(19) United States
(12) Patent Application Publication
(10) Pub. No.: US 2009/0172834 A1
(43) Pub. Date: Jul. 2, 2009

(54) Proteins Associated With Abiotic Stress Response And Homologs

(75) Inventors: Florian Schauwecker, Berlin (DE); Amber Shirley, Durham, NC (US)

Correspondence Address: CONNOLLY BOVE LODGE & HUTZ, LLP, P O BOX 2207, WILMINGTON, DE, 19899, US

(73) Assignee: BASF Plant Science GmbH, Ludwigshafen (DE)

(21) Appl. No.: 12/294,319

(22) PCT Filed: Mar. 12, 2007
(86) PCT No.: PCT/EP2007/052274

§ 371 Date: Oct. 6, 2008

Related U.S. Application Data
(60) Provisional application No. 60/785,900, filed on Mar. 24, 2006.
(60) Provisional application No. 60/785,946, filed on Mar. 24, 2006.

(51) Int. Cl. C12N 15/82; A01H 5/00; C12N 5/04; C12N 15/11; C12N 15/00; C07K 14/00; C12Q 1/68

(52) U.S. Cl. 800/278; 800/298; 800/320.1; 800/320.3; 800/320.2; 800/320; 800/312; 800/314; 800/306; 800/317; 800/317.2; 800/317.3; 800/317.4; 435/419; 435/411; 435/412; 435/414; 435/415; 435/416; 435/417; 536/23.6; 435/320.1; 530/350; 435/6

(57) ABSTRACT

This invention relates generally to nucleic acid sequences encoding proteins and homologs that are associated with abiotic stress responses and abiotic stress tolerance in plants. In particular, this invention relates to nucleic acid sequences encoding proteins that confer drought, heat, cold, and/or salt tolerance to plants.

[0001] This invention relates generally to nucleic acid sequences encoding proteins that are associated with abiotic stress responses and abiotic stress tolerance in plants. In particular, this invention relates to nucleic acid sequences encoding proteins that confer drought, heat, cold, and/or salt tolerance to plants.

[0002] In particular, this invention relates to nucleic acid sequences encoding proteins that confer drought, heat, cold, and/or salt tolerance and/or resistance to plants, preferably by altering the metabolic activity leading to drought, heat, cold, and/or salt tolerance and/or resistance to plants. The invention also deals with methods of producing, screening for and breeding such plant cells or plants and method of detecting stress in plants cells or plants.

[0003] Abiotic environmental stresses such as drought stress, salinity stress, heat stress and cold stress, are major limiting factors of plant growth and productivity (Boyer. 1982. Science 218, 443-448). Crop losses and crop yield losses of major crops such as rice, maize (corn) and wheat caused by these stresses represent a significant economic and political factor and contribute to food shortages in many underdeveloped countries.

[0004] Plants are typically exposed during their life cycle to conditions of reduced environmental water content. Most plants have evolved strategies to protect themselves against these conditions of low water or desiccation (drought). However, if the severity and duration of the drought conditions are too great, the effects on plant development, growth and yield of most crop plants are profound. Continuous exposure to drought causes major alterations in the plant metabolism. These great changes in metabolism ultimately lead to cell death and consequently yield losses.

[0005] Developing stress-tolerant plants is a strategy that has the potential to solve or mediate at least some of these problems (McKersie and Leshem, 1994. Stress and Stress Coping in Cultivated Plants, Kluwer Academic Publishers). However, traditional plant breeding strategies to develop new lines of plants that exhibit resistance (tolerance) to these types of stresses are relatively slow and require specific resistant lines for crossing with the desired line. Limited germplasm resources for stress tolerance and incompatibility in crosses between distantly related plant species represent significant problems encountered in conventional breeding. Additionally, the cellular processes leading to drought, cold and salt tolerance are complex in nature and involve multiple mechanisms of cellular adaptation and numerous metabolic pathways (McKersie and Leshem, 1994. Stress and Stress Coping in Cultivated Plants, Kluwer Academic Publishers). This multi-component nature of stress tolerance has not only made breeding for tolerance largely unsuccessful, but has also limited the ability to genetically engineer stress tolerance plants using biotechnological methods.

[0006] Drought, heat, cold and salt stresses have a common theme important for plant growth and that is water availability. Plants are exposed during their entire life cycle to conditions of reduced environmental water content. Most plants have evolved strategies to protect themselves against these conditions. However, if the severity and duration of the drought conditions are too great, the effects on plant development, growth and yield of most crop plants are profound. Since high salt content in some soils result in less available water for cell intake, its effect is similar to those observed under drought conditions. Additionally, under freezing temperatures, plant cells loose water as a result of ice formation that starts in the apoplast and withdraws water from the symplast (McKersie and Leshem, 1994. Stress and Stress Coping in Cultivated Plants, Kluwer Academic Publishers). Commonly, a plant's molecular response mechanisms to each of these stress conditions are similar.

[0007] The results of current research indicate that drought tolerance is a complex quantitative trait and that no real diagnostic marker is available yet. High salt concentrations or dehydration may cause damage at the cellular level during drought stress but the precise injury is not entirely clear (Bray, 1997. Trends Plant Sci. 2, 48-54). This lack of a mechanistic understanding makes it difficult to design a transgenic approach to improve drought tolerance. However, an important consequence of damage may be the production of reactive oxygen radicals that cause cellular injury, such as lipid peroxidation or protein and nucleic acid modification. Details of oxygen free radical chemistry and their reaction with cellular components such as cell membranes have been described (McKersie and Leshem, 1994. Stress and Stress Coping in Cultivated Plants, Kluwer Academic Publishers).

[0008] There is a need to identify genes expressed in stress tolerant plants that have the capacity to confer stress resistance to its host plant and to other plant species. It is a object of this invention to identify new methods to detect or confer stress tolerance and/or resistance in plants or plant cells.

[0009] It is the object of this invention to identify new, unique genes capable of conferring stress tolerance to plants upon expression or over-expression.

[0010] It is further object of this invention to identify, produce and breed new, unique stress tolerant and/or resistant plant cells or plants and methods of inducing and detecting stress tolerance and/or resistance in plants or plant cells. It is a further object to identify new methods to detect stress tolerance and/or resistance in plants or plant cells.

[0011] This invention fulfills in part the need to identify new, unique genes capable of conferring stress tolerance to plants upon expression or over-expression of endogenous and/or exogenous genes.

[0012] The present invention provides genes from useful plants. These genes are coding for stress related proteins (SRP) capable of conferring increased tolerance to environmental stress as compared to a wild type variety of the plant cell or plants upon over-expression.

[0013] The present invention also provides methods of modifying stress tolerance of a plant comprising, modifying the expression of a SRP (stress related protein) nucleic acid in the plant, wherein the SRP is as described below. The invention provides that this method can be performed such that the stress tolerance is either increased or decreased. Preferably, stress tolerance is increased in a plant via increasing expression of a SRP nucleic acid.

[0014] Increased expression of the endogenous gene coding for SRP can be achieved, for example, by increasing the strength of the promoter used to drive transcription of the gene and/or increasing the number of copies of the gene and its regulatory elements. Strong gene expression and multiple copies of the gene lead to increased levels of mRNA and target protein. Current methods for over-expressing proteins involve cloning the gene of interest and placing it, in a construct, next to a suitable promoter/enhancer, polyadenylation signal, and splice site, and introducing the construct into an appropriate host cell.

[0015] The invention is also directed to methods for over-expressing an endogenous gene in a cell, comprising introducing a vector containing a transcriptional regulatory sequence and one or more amplifiable markers into the cell, allowing the vector to integrate into the genome of the cell by non-homologous recombination, and allowing over-expression of the endogenous gene in the cell.

[0016] The invention is also directed to methods for over-expressing an exogenous gene in a cell, comprising introducing a vector containing a transcriptional regulatory sequence and one or more amplifiable markers into the cell, allowing the vector to integrate into the genome of the cell by non-homologous recombination, and allowing over-expression of the exogenous gene in the cell. In a preferred embodiment the expression or overexpression of a SRP nucleic acid from Zea mays confers increased tolerance and/or resistance to environmental stress as compared to a corresponding non-transformed wild type plant cell in a Glycine max cell/plant and vice versa, or a SRP nucleic acid from Zea mays confers increased tolerance and/or resistance to environmental stress as compared to a corresponding non-transformed wild type plant cell in a Glycine max, Brassica napus or Oryza sativa cell/plant and vice versa, or a SRP nucleic acid from Glycine max confers increased tolerance and/or resistance to environmental stress as compared to a corresponding non-transformed wild type plant cell in a Zea mays, Brassica napus or Oryza sativa cell/plant and vice versa, or a SRP nucleic acid from Brassica napus confers increased tolerance and/or resistance to environmental stress as compared to a corresponding non-transformed wild type plant cell in a Glycine max, Zea mays or Oryza sativa cell/plant and vice versa, or a SRP nucleic acid from Oryza sativa confers increased tolerance and/or resistance to environmental stress as compared to a corresponding non-transformed wild type plant cell in a Glycine max, Brassica napus, Triticum aestivum or Zea mays cell/plant and vice versa.

[0017] In a further preferred embodiment the expression or overexpression of a SRP nucleic acid from Oryza sativa confers increased tolerance and/or resistance to environmental stress as compared to a corresponding non-transformed wild type plant cell in a Glycine max, Brassica napus, Hordeum vulgare, Helianthus annuus, Linum usitatissimum, Hordeum vulgare, Helianthus annuus, Linum usitatissimum, Triticum aestivum or Zea mays cell/plant and vice versa.

[0018] The present invention provides a transgenic plant cell, wherein expression of said nucleic acid sequence in the plant cell results in increased tolerance and/or resistance to environmental stress as compared to a corresponding non-transformed wild type plant cell.

[0019] The present invention provides a transgenic plant cell transformed by Stress-Related Protein (SRP) coding nucleic acid, selected from the group consisting of:
[0020] a.) nucleic acid molecule encoding one of the polypeptides to as shown in Table II, column 4 and 5 or a fragment thereof, which confers an increased tolerance and/or resistance to environmental stress in an organism or a part thereof;
[0021] b.) nucleic acid molecule comprising one of the nucleic acid molecule as shown in Table I, column 4 and 5
[0022] c.) nucleic acid molecule whose sequence can be deduced from a polypeptide sequence encoded by a nucleic acid molecule of (a) or (b) as a result of the degeneracy of the genetic code and conferring an increased tolerance and/or resistance to environmental stress as compared to a corresponding non-transformed wild type plant in an organism or a part thereof;
[0023] d.) nucleic acid molecule which encodes a polypeptide which has at least 50% identity with the amino acid sequence of the polypeptide encoded by the nucleic acid molecule of (a) to (c) and conferring an increased tolerance and/or resistance to environmental stress in an organism or a part thereof;
[0024] e.) nucleic acid molecule which hybridizes with a nucleic acid molecule of (a) to (c) under stringent hybridisation conditions and conferring an increased tolerance and/or resistance to environmental stress in an organism or a part thereof;
[0025] f.) nucleic acid molecule which encompasses a nucleic acid molecule which is obtained by amplifying nucleic acid molecules from a cDNA library or a genomic library using the primers as shown in Table III, column 5 and conferring an increased tolerance and/or resistance to environmental stress as compared to a corresponding non-transformed wild type plant in an organism or a part thereof;
[0026] g.) nucleic acid molecule encoding a polypeptide which is isolated with the aid of monoclonal antibodies against a polypeptide encoded by one of the nucleic acid molecules of (a) to (f) and conferring an increased tolerance and/or resistance to environmental stress as compared to a corresponding non-transformed wild type plant in an organism or a part thereof;
[0027] h.) nucleic acid molecule encoding a polypeptide comprising the consensus sequence shown in table IV, column 5 and conferring an increased tolerance and/or resistance to environmental stress as compared to a corresponding non-transformed wild type plant in an organism or a part thereof and
[0028] i.) nucleic acid molecule which is obtainable by screening a suitable nucleic acid library under stringent hybridization conditions with a probe comprising one of the sequences of the nucleic acid molecule of (a) to (g) or with a fragment thereof having at least 15 nt, preferably 20 nt, 30 nt, 50 nt, 100 nt, 200 nt or 500 nt of the nucleic acid molecule characterized in (a) to (i) and conferring an increased tolerance and/or resistance to environmental stress as compared to a corresponding non-transformed wild type plant in an organism or a part thereof,
   or comprising a sequence which is complementary thereto.

[0029] The invention provides that the environmental stress can be salinity, drought, temperature, metal, chemical, pathogenic and oxidative stresses, or combinations thereof.

[0030] In an embodiment the present invention is related to a process for increasing tolerance and/or resistance to environmental stress as compared to a corresponding non-transformed wild type plant cell, which comprises

[0031] a) increasing or generating the activity of a protein as shown in Table II, column 2 encoded by the nucleic acid sequences as shown in Table I, column 4 or 5, in a plant cell and/or plant, and

[0032] b) growing said plant cell and/or plant under conditions which permit the cultivation and harvest of the plant cell and/or plant.

[0033] Comprises/comprising and grammatical variations thereof when used in this specification are to be taken to specify the presence of stated features, integers, steps or components or groups thereof, but not to preclude the presence or addition of one or more other features, integers, steps, components or groups thereof.

[0034] The term “Table I” used in this specification is to be taken to specify the content of Table I A and Table I B. The term “Table II” used in this specification is to be taken to specify the content of Table II A and Table II B. The term “Table I A” used in this specification is to be taken to specify the content of Table I A. The term “Table I B” used in this specification is to be taken to specify the content of Table I B. The term “Table II A” used in this specification is to be taken to specify the content of Table II A. The term “Table II B” used in this specification is to be taken to specify the content of Table II B.

[0035] In one preferred embodiment, the term “Table I” means Table I B. In one preferred embodiment, the term “Table II” means Table II B.

[0036] In the transgenic plant cell of the invention, the expression of said nucleic acid results in increased tolerance to an environmental stress as compared to a corresponding non-transformed wild type plant cell. Herein, the environmental stress is selected from the group consisting of salinity, drought, temperature, metal, chemical, pathogenic and oxidative stresses, or combinations thereof.

[0037] The terms “increased”, “rised”, “extended”, “enhanced”, “improved” or “amplified” relate to a corresponding change of a property in an organism, a part of an organism such as a tissue, seed, root, leave, flower etc. or in a cell and are interchangeable. Preferably, the overall activity in the volume is increased or enhanced in cases if the increase or enhancement is related to the increase or enhancement of an activity of a gene product, independent whether the amount of gene product or the specific activity of the gene product or both is increased or enhanced or whether the amount, stability or translation efficacy of the nucleic acid sequence or gene encoding for the gene product is increased or enhanced. The terms “reduction”, “decrease” or “deletion” relate to a corresponding change of a property in an organism, a part of an organism such as a tissue, seed, root, leave, flower etc. or in a cell. Preferably, the overall activity in the volume is reduced, decreased or deleted in cases if the reduction, decrease or deletion is related to the reduction, decrease or deletion of an activity of a gene product, independent whether the amount of gene product or the specific activity of the gene product or both is reduced, decreased or deleted or whether the amount, stability or translation efficacy of the nucleic acid sequence or gene encoding for the gene product is reduced, decreased or deleted.

[0038] The terms “increase” or “decrease” relate to a corresponding change of a property in an organism or in a part of an organism, such as a tissue, seed, root, leave, flower etc. or in a cell. Preferably, the overall activity in the volume is increased in cases the increase relates to the increase of an activity of a gene product, independent whether the amount of gene product or the specific activity of the gene product or both is increased or generated or whether the amount, stability or translation efficacy of the nucleic acid sequence or gene encoding for the gene product is increased.

[0039] Under “change of a property” it is understood that the activity, expression level or amount of a gene product or the metabolite content is changed in a specific volume relative to a corresponding volume of a control, reference or wild type, including the de novo creation of the activity or expression.

[0040] The terms “increase” or “decrease” include the change of said property in only parts of the subject of the present invention, for example, the modification can be found in compartment of a cell, like a organelle, or in a part of a plant, like tissue, seed, root, leave, flower etc. but is not detectable if the overall subject, i.e. complete cell or plant, is tested. Preferably, the increase or decrease is found cellular, thus the term “increase of an activity” or “increase of a metabolite content” relates to the cellular increase compared to the wild type cell.

[0041] Accordingly, the term “increase” or “decrease” means that the specific activity of an enzyme as well as the amount of a compound or metabolite, e.g. of a polypeptide, a nucleic acid molecule or of the fine chemical of the invention or an encoding mRNA or DNA, can be increased or decreased in a volume.

[0042] The terms “wild type”, “control” or “reference” are exchangeable and can be a cell or a part of organisms such as an organelle or a tissue, or an organism, in particular a microorganism or a plant, which was not modified or treated according to the herein described process according to the invention. Accordingly, the cell or a part of organisms such as an organelle or a tissue, or an organism, in particular a microorganism or a plant used as wild type, control or reference corresponds to the cell, organism or part thereof as much as possible and is in any other property but in the result of the process of the invention as identical to the subject matter of the invention as possible. Thus, the wild type, control or reference is treated identically or as identical as possible, saying that only conditions or properties might be different which do not influence the quality of the tested property.

[0043] Preferably, any comparison is carried out under analogous conditions. The term “analogous conditions” means that all conditions such as, for example, culture or growing conditions, assay conditions (such as buffer composition, temperature, substrates, pathogen strain, concentrations and the like) are kept identical between the experiments to be compared.

[0044] The “reference”, “control”, or “wild type” is preferably a subject, e.g. an organelle, a cell, a tissue, an organism, in particular a plant or a microorganism, which was not modified or treated according to the herein described process of the invention and is in any other property as similar to the subject matter of the invention as possible. The reference, control or wild type is in its genome, transcriptome, proteome or meta-bolome as similar as possible to the subject of the present invention. Preferably, the term “reference-” “control-” or “wild type-”-organelle, -cell, -tissue or -organism, in particular plant or microorganism, relates to an organelle, cell, tissue or organism, in particular plant or microorganism, which is nearly genetically identical to the organelle, cell, tissue or organism, in particular microorganism or plant, of the present invention or a part thereof preferably 95%, more preferred are 98%, even more preferred are 99.00%, in particular 99.10%, 99.30%, 99.50%, 99.70%, 99.90%, 99.99%, 99.999% or more. Most preferable the “reference”, “control”, or “wild type” is a subject, e.g. an organelle, a cell, a tissue, an organism, which is genetically identical to the organism, cell or organelle used according to the process of the invention except that the responsible or activity conferring nucleic acid molecules or the gene product encoded by them are amended, manipulated, exchanged or introduced according to the inventive process.

[0045] Preferably, the reference, control or wild type differs form the subject of the present invention only in the cellular activity of the polypeptide of the invention, e.g. as result of an increase in the level of the nucleic acid molecule of the present invention or an increase of the specific activity of the polypeptide of the invention, e.g. by or in the expression level or activity of an protein having the activity of an Stress-Related Protein (SRP) or its homologs, its biochemical or genetical causes and the increased tolerance and/or resistance to environmental stress as compared to a corresponding non-transformed wild type plant.

[0046] In case, a control, reference or wild type differing from the subject of the present invention only by not being subject of the process of the invention can not be provided, a control, reference or wild type can be an organism in which the cause for the modulation of an activity conferring the increased tolerance and/or resistance to environmental stress as compared to a corresponding non-transformed wild type plant or expression of the nucleic acid molecule of the invention as described herein has been switched back or off, e.g. by knocking out the expression of responsible gene product, e.g. by antisense inhibition, by inactivation of an activator or agonist, by activation of an inhibitor or antagonist, by inhibition through adding inhibitory antibodies, by adding active compounds as e.g. hormones, by introducing negative dominant mutants, etc. A gene production can for example be knocked out by introducing inactivating point mutations, which lead to an enzymatic activity inhibition or a destabilization or an inhibition of the ability to bind to cofactors etc.

[0047] Accordingly, preferred reference subject is the starting subject of the present process of the invention. Preferably, the reference and the subject matter of the invention are compared after standardization and normalization, e.g. to the amount of total RNA, DNA, or protein or activity or expression of reference genes, like housekeeping genes, such as ubiquitin, actin or ribosomal proteins.

[0048] A series of mechanisms exists via which a modification of the a protein, e.g. the polypeptide of the invention can directly or indirectly affect the yield, production and/or production efficiency of the amino acid.

[0049] For example, the molecule number or the specific activity of the polypeptide or the nucleic acid molecule may be increased. Larger amounts of the fine chemical can be produced if the polypeptide or the nucleic acid of the invention is expressed de novo in an organism lacking the activity of said protein. However, it is also possible to increase the expression of the gene which is naturally present in the organisms, for example by modifying the regulation of the gene, or by increasing the stability of the corresponding mRNA or of the corresponding gene product encoded by the nucleic acid molecule of the invention, or by introducing homologous genes from other organisms which are differently regulated, eg. not feedback sensitive.

[0050] This also applies analogously to the combined increased expression of the nucleic acid molecule of the present invention or its gene product with that of further enzymes of the amino acid biosynthesis pathways, e.g. which are useful for the synthesis of the fine chemicals.

[0051] The increase, decrease or modulation according to this invention can be constitutive, e.g. due to a stable permanent transgenic expression or to a stable mutation in the corresponding endogenous gene encoding the nucleic acid molecule of the invention or to a modulation of the expression or of the behaviour of a gene conferring the expression of the polypeptide of the invention, or transient, e.g. due to an transient transformation or temporary addition of a modulator such as a agonist or antagonist or inducible, e.g. after transformation with a inducible construct carrying the nucleic acid molecule of the invention under control of a induceable promoter and adding the inducer, e.g. tetracycline or as described herein below.

[0052] The increase in activity of the polypeptide amounts in a cell, a tissue, a organelle, an organ or an organism or a part thereof preferably to at least 5%, preferably to at least 20% or at to least 50%, especially preferably to at least 70%, 80%, 90% or more, very especially preferably are to at least 200%, most preferably are to at least 500% or more in comparison to the control, reference or wild type.

[0053] The specific activity of a polypeptide encoded by a nucleic acid molecule of the present invention or of the polypeptide of the present invention can be tested as described in the examples. In particular, the expression of a protein in question in a cell, e.g. a plant cell or a microorganism and the detection of an increase the fine chemical level in comparison to a control is an easy test and can be performed as described in the state of the art.

[0054] The term “increase” includes, that a compound or an activity is introduced into a cell de novo or that the compound or the activity has not been detectable before, in other words it is “generated”.

[0055] Accordingly, in the following, the term “increasing” also comprises the term “generating” or “stimulating”. The increased activity manifests itself in an increase of the fine chemical.

[0056] The transformed plant cells are compared to the corresponding non-transformed wild type of the same genus and species under otherwise identical conditions (such as, for example, culture conditions, age of the plants and the like). In this context, a increase in tolerance and/or resistance to environmental stress of at least 10%, advantageously of at least 20%, preferably at least 30%, especially preferably of at least 40%, 50% or 60%, very especially preferably of at least 70%, 80%, 90%, 95% or even 100% or more, in comparison with the non-transformed organism is advantageous.

[0057] The present invention provides a transgenic plant cell, wherein expression of said nucleic acid sequence in the plant cell results in increased tolerance and/or resistance to environmental stress as compared to a corresponding non-transformed wild type plant cell. One preferred wild type plant cell is a non-transformed Arabidopsis plant cell. An example here is the Arabidopsis wild type C24 (Nottingham Arabidopsis Stock Centre, UK; NASC Stock N906).

[0058] Other preferred wild type plant cells are a non-transformed from plants selected from the group consisting of maize, wheat, rye, oat, triticale, rice, barley, soybean, peanut, cotton, rapeseed, canola, manihot, pepper, sunflower, flax, borage, safflower, linseed, primrose, rapeseed, turnip rape, tagetes, solanaceous plants, potato, tobacco, eggplant, tomato, Vicia species, pea, alfalfa, coffee, cacao, tea, Salix species, oil palm, coconut, perennial grass and forage crops.

[0059] More preferred wild type plant cells are a non-transformed Linum plant cell, preferably Linum usitatissimum, more preferably the variety Brigitta, Golda, Gold Merchant, Helle, Juliel, Olpina, Livia, Marlin, Maedgold, Sporpion, Serenade, Linus, Taunus, Lifax or Liviola, a non-transformed Heliantus plant cell, preferably Heliantus annuus, more preferably the variety Aurasol, Capella, Flavia, Flores, Jazzy, Palulo, Pegasol, PIR64A54, Rigasol, Sariuca, Sideral, Sunny, Alenka, Candisol or Floyd, or a non-transformed Brassica plant cell, preferably Brassica napus, more preferably the variety Dorothy, Evita, Heros, Hyola, Kimbar, Lambada, Licolly, Liconira, Licosmos, Lisonne, Mistral, Passat, Serator, Siapula, Sponsor, Star, Caviar, Hybridol, Baical, Olga, Lara, Doublol, Karola, Falcon, Spirit, Olymp, Zeus, Libero, Kyola, Licord, Lion, Lirajet, Lisbeth, Magnum, Maja, Mendel, Mica, Mohican, Olpop, Ontarion, Panthar, Prinoe, Pronio, Susanna, Talani, Titan, Transfer, Wiking, Woltan, Zeniah, Artus, Contact or Smart.

[0060] The expression of said nucleic acid sequence in the plant cell may directly or indirectly influence the tolerance and/or resistance to environmental stress as compared to a corresponding non-transformed wild type plant of the transformed plant cells.

[0061] Preferably increased tolerance and/or resistance to environmental stress as compared to a corresponding non-transformed wild type plant may be altered by transformation with one or more Stress-Related Protein (SRP) coding nucleic acid selected from the group comprising the nucleic acid according to as shown in Table I, column 4 and 5 or homologs of the afore mentioned sequences,

[0062] It is within the scope of the invention to identify the genes encoded by a nucleic acid sequence selected from the group consisting of the nucleic acid as shown in Table I, column 4 and 5 and/or homologs thereof in target plants, especially crop plants, and then express the corresponding gene to achieve the increased tolerance and/or resistance to environmental stress. Consequently the invention is not limited to a specific plant.

[0063] A protein having an activity conferring an increased tolerance and/or resistance to environmental stress as compared to a corresponding non-transformed wild type plant preferably has the structure of the polypeptide described herein, of the polypeptide as shown in Table II, column 4 and 5 preferably or the functional homologues thereof as described herein, or is encoded by the nucleic acid molecule characterized herein or the nucleic acid molecule as shown in Table II, column 2 according to the invention, for example by the nucleic acid molecule as shown in Table I, column 4 and 5 preferably as shown in Table I, column 2 or its herein described functional homologues and has the herein mentioned activity.

[0064] The sequence of b0019 from Escherichia coli K12 has been published in Blattner et al., Science 277(5331), 1453-1474, 1997, and its activity is being defined as protein for the transport; the transport of small molecules, preferably cations. In a more preferred embodiment the protein has the activity of a Na+/H+ antiporter, responsive to stress, especially to high salinity and pH. Accordingly, in one embodiment, the process of the present invention comprises the use of a protein for the transport; preferably a stress responsive Na+/H+ antiporter from E. coli or its homolog, e.g. as shown herein, e.g. as indicated in Table II, for conferring an increased tolerance and/or resistance to environmental stress as compared to a corresponding non-transformed wild type plant in an organism or a part thereof.

[0065] The sequence of b0730 from Escherichia coli K12 has been published in Blattner et al., Science 277(5331), 1453-1474, 1997, and its activity is being defined as transcriptional regulator of succinylCoA synthetase operon and fatty acyl response regulator. Accordingly, in one embodiment, the process of the present invention comprises the use of a transcriptional regulator of succinylCoA synthetase operon or a fatty acid response regulator from E. coli or its homolog, e.g. as shown herein, e.g. as indicated in Table II, for conferring an increased tolerance and/or resistance to environmental stress as compared to a corresponding non-transformed wild type plant in an organism or a part thereof.

[0066] The sequence of b1528 from Escherichia coli K12 has been published in Blattner et al., Science 277(5331), 1453-1474, 1997, and its activity is being defined as L-arabinose/isopropyl-beta-D-thiogalactopyranoside export protein. Accordingly, in one embodiment, the process of the present invention comprises the use of a L-arabinose/isopropyl-beta-D-thiogalactopyranoside export protein, or its homologs, e.g. the proteins of the MFS family, e.g. as indicated in Table II, from E. coli for conferring an increased tolerance and/or resistance to environmental stress as compared to a corresponding non-transformed wild type plant in an organism or a part thereof.

[0067] The sequence of b1829 from Escherichia coli K12 has been published in Blattner, Science 277(5331), 1453-1474, 1997, and its activity is being defined as a heat shock protein. Accordingly, in one embodiment, the process of the present invention comprises the use of a “heat shock protein” from E. coli or its homolog, e.g. as shown herein, e.g. as indicated in Table II, for conferring an increased tolerance and/or resistance to environmental stress as compared to a corresponding non-transformed wild type plant in an organism or a part thereof.

[0068] The sequence of b3164 from Escherichia coli K12 has been published in Blattner, Science 277(5331), 1453-1474, 1997, and its activity is being defined as a polyribonucleotide nucleotidyltransferase. Accordingly, in one embodiment, the process of the present invention comprises the use of a “polyribonucleotide nucleotidyltransferase” from E. coli or its homolog, e.g. as shown herein, e.g. as indicated in Table II, for conferring an increased tolerance and/or resistance to environmental stress as compared to a corresponding non-transformed wild type plant in an organism or a part thereof.

[0069] The sequence of YBL002W from Saccharomyces cerevisiae has been published in Dietrich et al., Nature 387 (6632 Suppl), 78-81 (1997) and Goffeau et al., Science 274 (5287), 546-547, 1996, and its activity is being defined as histone H2A and H2B and/or a trehalase. Accordingly, in one embodiment, the process of the present invention comprises the use of a histone H2A and H2B and/or a trehalase from E. coli or its homolog, e.g. as shown herein, e.g. as indicated in Table II, for conferring an increased tolerance and/or resistance to environmental stress as compared to a corresponding non-transformed wild type plant in an organism or a part thereof.

[0070] The sequence of YBR002C from Saccharomyces cerevisiae has been published in Dietrich et al., Nature 387 (6632 Suppl), 78-81 (1997) and Goffeau et al., Science 274 (5287), 546-547, 1996, and its activity is being defined as Cis-prenyltransferase involved in dolichol synthesis; and/or a protein that participates in endoplasmic reticulum (ER) protein sorting. Accordingly, in one embodiment, the process of the present invention comprises the use of a Cis-prenyltransferase involved in dolichol synthesis; and/or a protein that participates in endoplasmic reticulum (ER) protein sorting from E. coli or its homolog, e.g. as shown herein, e.g. as indicated in Table II, for conferring an increased tolerance and/or resistance to environmental stress as compared to a corresponding non-transformed wild type plant in an organism or a part thereof.

[0071] The sequence of YBR010W from Saccharomyces cerevisiae has been published in Dietrich et al., Nature 387 (6632 Suppl), 78-81 (1997) and Goffeau et al., Science 274 (5287), 546-547, 1996, and its activity is being defined as one of two identical histone H3 proteins; or a core histone required for chromatin assembly, involved in heterochromatin-mediated telomeric and HM silencing; regulated by acetylation, methylation, and mitotic phosphorylation. Accordingly, in one embodiment, the process of the present invention comprises the use of a histone H3 proteins; or a core histone required for chromatin assembly, involved in heterochromatin-mediated telomeric and HM silencing; regulated by acetylation, methylation, and mitotic phosphorylation; from E. coli or its homolog, e.g. as shown herein, e.g. as indicated in Table II, for conferring an increased tolerance and/or resistance to environmental stress as compared to a corresponding non-transformed wild type plant in an organism or a part thereof.

[0072] The sequence of YBR090c from Saccharomyces cerevisiae has been published in Dietrich et al., Nature 387 (6632 Suppl), 78-81 (1997) and Goffeau et al., Science 274 (5287), 546-547, 1996, and its activity is being defined as a membrane protein. Accordingly, in one embodiment, the process of the present invention comprises the use of a membrane protein; from E. coli or its homolog, e.g. as shown herein, e.g. as indicated in Table II, for conferring an increased tolerance and/or resistance to environmental stress as compared to a corresponding non-transformed wild type plant in an organism or a part thereof.

[0073] The sequence of YBR109C from Saccharomyces cerevisiae has been published in Dietrich et al., Nature 387 (6632 Suppl), 78-81 (1997) and Goffeau et al., Science 274 (5287), 546-547, 1996, and its activity is being defined as a Ca++ binding protein that regulates Ca++ independent processes (e.g. mitosis, bud growth, actin organization, endocytosis, etc.) and Ca++ dependent processes (e.g. stress-activated pathways). Accordingly, in one embodiment, the process of the present invention comprises the use of a Ca++ binding protein that regulates Ca++ independent processes (e.g. mitosis, bud growth, actin organization, endocytosis, etc.) and Ca++ dependent processes (e.g. stress-activated pathways); from E. coli or its homolog, e.g. as shown herein, e.g. as indicated in Table II, for conferring an increased tolerance and/or resistance to environmental stress as compared to a corresponding non-transformed wild type plant in an organism or a part thereof.

[0074] The sequence of YBR288C from Saccharomyces cerevisiae has been published in Dietrich et al., Nature 387 (6632 Suppl), 78-81 (1997) and Goffeau et al., Science 274 (5287), 546-547, 1996, and its activity is being defined as a Mu3-like subunit of the clathrin associated protein complex (AP-3); which functions in transport of alkaline phosphatase to the vacuole via the alternate pathway. Accordingly, in one embodiment, the process of the present invention comprises the use of a Mu3-like subunit of the clathrin associated protein complex (AP-3); which functions in transport of alkaline phosphatase to the vacuole via the alternate pathway; from E. coli or its homolog, e.g. as shown herein, e.g. as indicated in Table II, for conferring an increased tolerance and/or resistance to environmental stress as compared to a corresponding non-transformed wild type plant in an organism or a part thereof.

[0075] The sequence of YEL001 C from Saccharomyces cerevisiae has been published in Dietrich et al., Nature 387 (6632 Suppl), 78-81 (1997) and Goffeau et al., Science 274 (5287), 546-547, 1996, and its activity is being defined as a YEL001C protein. Accordingly, in one embodiment, the process of the present invention comprises the use of a YEL001C protein; from E. coli or its homolog, e.g. as shown herein, e.g. as indicated in Table II, for conferring an increased tolerance and/or resistance to environmental stress as compared to a corresponding non-transformed wild type plant in an organism or a part thereof.

[0076] The sequence of YER062c from Saccharomyces cerevisiae has been published in Dietrich et al., Nature 387 (6632 Suppl), 78-81 (1997) and Goffeau et al., Science 274 (5287), 546-547, 1996, and its activity is being defined as a one of two redundant DL-glycerol-3-phosphatases (RHR2/GPP1 encodes the other) involved in glycerol biosynthesis; induced in response to hyperosmotic stress and oxidative stress, and during the diauxic transition. Accordingly, in one embodiment, the process of the present invention comprises the use of one of two redundant DL-glycerol-3-phosphatases (RHR2/GPP1 encodes the other) involved in glycerol biosynthesis; induced in response to hyperosmotic stress and oxidative stress, and during the diauxic transition; from E. coli or its homolog, e.g. as shown herein, e.g. as indicated in Table II, for conferring an increased tolerance and/or resistance to environmental stress as compared to a corresponding non-transformed wild type plant in an organism or a part thereof.

[0077] The sequence of YER145C from Saccharomyces cerevisiae has been published in Dietrich et al., Nature 387 (6632 Suppl), 78-81 (1997) and Goffeau et al., Science 274 (5287), 546-547, 1996, and its activity is being defined as a protein with high affinity iron permease involved in the transport of iron across the plasma membrane, which forms complex with Fet3p. Accordingly, in one embodiment, the process of the present invention comprises the use of a protein with high affinity iron permease involved in the transport of iron across the plasma membrane, which forms complex with Fet3p; from E. coli or its homolog, e.g. as shown herein, e.g. as indicated in Table II, for conferring an increased tolerance and/or resistance to environmental stress as compared to a corresponding non-transformed wild type plant in an organism or a part thereof. The sequence of YER146W from Saccharomyces cerevisiae has been published in Dietrich et al., Nature 387 (6632 Suppl), 78-81 (1997) and Goffeau et al., Science 274 (5287), 546-547, 1996, and its activity is being defined as a component of a small nuclear ribonucleoprotein complexes involved in RNA processing, in splicing and decay. Accordingly, in one embodiment, the process of the present invention comprises the use of a component of small nuclear ribonucleoprotein complexes involved in RNA processing, in splicing and decay; from E. coli or its homolog, e.g. as shown herein, e.g. as indicated in Table II, for conferring an increased tolerance and/or resistance to environmental stress as compared to a corresponding non-transformed wild type plant in an organism or a part thereof.

[0078] The sequence of YGL151W from Saccharomyces cerevisiae has been published in Dietrich et al., Nature 387 (6632 Suppl), 78-81 (1997) and Goffeau et al., Science 274 (5287), 546-547, 1996, and its activity is being defined as a component of a YGL151W protein. Accordingly, in one embodiment, the process of the present invention comprises the use of a YGL151W protein; from E. coli or its homolog, e.g. as shown herein, e.g. as indicated in Table II, for conferring an increased tolerance and/or resistance to environmental stress as compared to a corresponding non-transformed wild type plant in an organism or a part thereof.

[0079] The sequence of YGR046W from Saccharomyces cerevisiae has been published in Dietrich et al., Nature 387 (6632 Suppl), 78-81 (1997) and Goffeau et al., Science 274 (5287), 546-547, 1996, and its activity is being defined as a YGR046W protein. Accordingly, in one embodiment, the process of the present invention comprises the use of a YGR046W protein; from E. coli or its homolog, e.g. as shown herein, e.g. as indicated in Table II, for conferring an increased tolerance and/or resistance to environmental stress as compared to a corresponding non-transformed wild type plant in an organism or a part thereof.

[0080] The sequence of YGR060W from Saccharomyces cerevisiae has been published in Dietrich et al., Nature 387 (6632 Suppl), 78-81 (1997) and Goffeau et al., Science 274 (5287), 546-547, 1996, and its activity is being defined as a component of a C-4 methyl sterol oxidase, which catalyzes the first of three steps required to remove two C-4 methyl groups from an intermediate in ergosterol biosynthesis Accordingly, in one embodiment, the process of the present invention comprises the use of a C-4 methyl sterol oxidase, which catalyzes the first of three steps required to remove two C-4 methyl groups from an intermediate in ergosterol biosynthesis; from E. coli or its homolog, e.g. as shown herein, e.g. as indicated in Table II, for conferring an increased tolerance and/or resistance to environmental stress as compared to a corresponding non-transformed wild type plant in an organism or a part thereof.

[0081] The sequence of YGR141 W from Saccharomyces cerevisiae has been published in Dietrich et al., Nature 387 (6632 Suppl), 78-81 (1997) and Goffeau et al., Science 274 (5287), 546-547, 1996, and its activity is being defined as a YGR141W protein. Accordingly, in one embodiment, the process of the present invention comprises the use of a YGR141W protein; from E. coli or its homolog, e.g. as shown herein, e.g. as indicated in Table II, for conferring an increased tolerance and/or resistance to environmental stress as compared to a corresponding non-transformed wild type plant in an organism or a part thereof.

[0082] The sequence of YIL002C from Saccharomyces cerevisiae has been published in Dietrich et al., Nature 387 (6632 Suppl), 78-81 (1997) and Goffeau et al., Science 274 (5287), 546-547, 1996, and its activity is being defined as a inositol-1,4,5-trisphosphate 5-phosphatase homolog YIL002c. Accordingly, in one embodiment, the process of the present invention comprises the use of a inositol-1,4,5-trisphosphate 5-phosphatase homolog YIL002c; from E. coli or its homolog, e.g. as shown herein, e.g. as indicated in Table II, for conferring an increased tolerance and/or resistance to environmental stress as compared to a corresponding non-transformed wild type plant in an organism or a part thereof.

[0083] The sequence of YIL031W from Saccharomyces cerevisiae has been published in Dietrich et al., Nature 387 (6632 Suppl), 78-81 (1997) and Goffeau et al., Science 274 (5287), 546-547, 1996, and its activity is being defined as a peptidase that deconjugates Smt3/SUMO-1 peptides from proteins, and/or plays a role in chromosome cohesion at centromeric regions and recovery from checkpoint arrest induced by DNA damage or DNA replication defects. Accordingly, in one embodiment, the process of the present invention comprises the use of a peptidase that deconjugates Smt3/SUMO-1 peptides from proteins, and/or plays a role in chromosome cohesion at centromeric regions and recovery from checkpoint arrest induced by DNA damage or DNA replication defects; from E. coli or its homolog, e.g. as shown herein, e.g. as indicated in Table II, for conferring an increased tolerance and/or resistance to environmental stress as compared to a corresponding non-transformed wild type plant in an organism or a part thereof.

[0084] The sequence of YIL076W from Saccharomyces cerevisiae has been published in Dietrich et al., Nature 387 (6632 Suppl), 78-81 (1997) and Goffeau et al., Science 274 (5287), 546-547, 1996, and its activity is being defined as a epsilon-COP subunit of the coatomer; which regulates retrograde Golgi-to-ER protein traffic; and/or stabilizes Cop1p, the alpha-COP and the coatomer complex. Accordingly, in one embodiment, the process of the present invention comprises the use of epsilon-COP subunit of the coatomer; which regulates retrograde Golgi-to-ER protein traffic; and/or stabilizes Cop1p, the alpha-COP and the coatomer complex; from E. coli or its homolog, e.g. as shown herein, e.g. as indicated in Table II, for conferring an increased tolerance and/or resistance to environmental stress as compared to a corresponding non-transformed wild type plant in an organism or a part thereof.

[0085] The sequence of YIL077C from Saccharomyces cerevisiae has been published in Dietrich et al., Nature 387 (6632 Suppl), 78-81 (1997) and Goffeau et al., Science 274 (5287), 546-547, 1996, and its activity is being defined as a YIL077C protein. Accordingly, in one embodiment, the process of the present invention comprises the use of a YIL077C protein; from E. coli or its homolog, e.g. as shown herein, e.g. as indicated in Table II, for conferring an increased tolerance and/or resistance to environmental stress as compared to a corresponding non-transformed wild type plant in an organism or a part thereof.

[0086] The sequence of YIL121 W from Saccharomyces cerevisiae has been published in Dietrich et al., Nature 387 (6632 Suppl), 78-81 (1997) and Goffeau et al., Science 274 (5287), 546-547, 1996, and its activity is being defined as a multidrug transporter required for resistance to quinidine, barban, cisplatin, and bleomycin; which is member of the major facilitator superfamily of transporters conferring multiple drug resistance (MFS-MDR). Accordingly, in one embodiment, the process of the present invention comprises the use of multidrug transporter required for resistance to quinidine, barban, cisplatin, and bleomycin; which is member of the major facilitator superfamily of transporters conferring multiple drug resistance (MFS-MDR); from E. coli or its homolog, e.g. as shown herein, e.g. as indicated in Table II, for conferring an increased tolerance and/or resistance to environmental stress as compared to a corresponding non-transformed wild type plant in an organism or a part thereof.

[0087] The sequence of YIL156W from Saccharomyces cerevisiae has been published in Dietrich et al., Nature 387 (6632 Suppl), 78-81 (1997) and Goffeau et al., Science 274 (5287), 546-547, 1996, and its activity is being defined as a YIL156W protein. Accordingly, in one embodiment, the process of the present invention comprises the use of a YIL156W protein; from E. coli or its homolog, e.g. as shown herein, e.g. as indicated in Table II, for conferring an increased tolerance and/or resistance to environmental stress as compared to a corresponding non-transformed wild type plant in an organism or a part thereof.

[0088] The sequence of YJR044C from Saccharomyces cerevisiae has been published in Dietrich et al., Nature 387 (6632 Suppl), 78-81 (1997) and Goffeau et al., Science 274 (5287), 546-547, 1996, and its activity is being defined as a late endosomal protein involved in late endosome to vacuole trafficking. Accordingly, in one embodiment, the process of the present invention comprises the use of a late endosomal protein involved in late endosome to vacuole trafficking; from E. coli or its homolog, e.g. as shown herein, e.g. as indicated in Table II, for conferring an increased tolerance and/or resistance to environmental stress as compared to a corresponding non-transformed wild type plant in an organism or a part thereof.

[0089] The sequence of YKL057C from Saccharomyces cerevisiae has been published in Dietrich et al., Nature 387 (6632 Suppl), 78-81 (1997) and Goffeau et al., Science 274 (5287), 546-547, 1996, and its activity is being defined as a nucleoporin NUP120 (Nuclear pore protein NUP120). Accordingly, in one embodiment, the process of the present invention comprises the use of a nucleoporin NUP120 (Nuclear pore protein NUP120); from E. coli or its homolog, e.g. as shown herein, e.g. as indicated in Table II, for conferring an increased tolerance and/or resistance to environmental stress as compared to a corresponding non-transformed wild type plant in an organism or a part thereof.

[0090] The sequence of YKL150W from Saccharomyces cerevisiae has been published in Dietrich et al., Nature 387 (6632 Suppl), 78-81 (1997) and Goffeau et al., Science 274 (5287), 546-547, 1996, and its activity is being defined as a mitochondrial NADH-cytochrome b5 reductase, involved in ergosterol biosynthesis. Accordingly, in one embodiment, the process of the present invention comprises the use of a mitochondrial NADH-cytochrome b5 reductase, involved in ergosterol biosynthesis; from E. coli or its homolog, e.g. as shown herein, e.g. as indicated in Table II, for conferring an increased tolerance and/or resistance to environmental stress as compared to a corresponding non-transformed wild type plant in an organism or a part thereof.

[0091] The sequence of YKR057W from Saccharomyces cerevisiae has been published in Dietrich et al., Nature 387 (6632 Suppl), 78-81 (1997) and Goffeau et al., Science 274 (5287), 546-547, 1996, and its activity is being defined as a ribosomal protein, similar to S21 ribosomal proteins, involved in ribosome biogenesis and translation. Accordingly, in one embodiment, the process of the present invention comprises the use of a ribosomal protein, similar to S21 ribosomal proteins, involved in ribosome biogenesis and translation; from E. coli or its homolog, e.g. as shown herein, e.g. as indicated in Table II, for conferring an increased tolerance and/or resistance to environmental stress as compared to a corresponding non-transformed wild type plant in an organism or a part thereof.

[0092] The sequence of YLR062c from Saccharomyces cerevisiae has been published in Dietrich et al., Nature 387 (6632 Suppl), 78-81 (1997) and Goffeau et al., Science 274 (5287), 546-547, 1996, and its activity is being defined as a YLR062c protein. Accordingly, in one embodiment, the process of the present invention comprises the use of a YLR062c protein; from E. coli or its homolog, e.g. as shown herein, e.g. as indicated in Table II, for conferring an increased tolerance and/or resistance to environmental stress as compared to a corresponding non-transformed wild type plant in an organism or a part thereof.

[0093] The sequence of YLR142W from Saccharomyces cerevisiae has been published in Dietrich et al., Nature 387 (6632 Suppl), 78-81 (1997) and Goffeau et al., Science 274 (5287), 546-547, 1996, and its activity is being defined as a proline oxidase, and/or a nuclear-encoded mitochondrial protein involved in utilization of proline as sole nitrogen source. Accordingly, in one embodiment, the process of the present invention comprises the use of a proline oxidase, and/or a nuclear-encoded mitochondrial protein involved in utilization of proline as sole nitrogen source; from E. coli or its homolog, e.g. as shown herein, e.g. as indicated in Table II, for conferring an increased tolerance and/or resistance to environmental stress as compared to a corresponding non-transformed wild type plant in an organism or a part thereof.

[0094] The sequence of YLR173W from Saccharomyces cerevisiae has been published in Dietrich et al., Nature 387 (6632 Suppl), 78-81 (1997) and Goffeau et al., Science 274 (5287), 546-547, 1996, and its activity is being defined as a YLR173W protein. Accordingly, in one embodiment, the process of the present invention comprises the use of a YLR173W protein; from E. coli or its homolog, e.g. as shown herein, e.g. as indicated in Table II, for conferring an increased tolerance and/or resistance to environmental stress as compared to a corresponding non-transformed wild type plant in an organism or a part thereof.

[0095] The sequence of YLR274W from Saccharomyces cerevisiae has been published in Dietrich et al., Nature 387 (6632 Suppl), 78-81 (1997) and Goffeau et al., Science 274 (5287), 546-547, 1996, and its activity is being defined as a component of the hexameric MCM complex, which is important for priming origins of DNA replication in G1 and becomes an active ATP-dependent helicase that promotes DNA melting and elongation when activated by Cdc7p-Dbf4p in S— phase. Accordingly, in one embodiment, the process of the present invention comprises the use of a component of the hexameric MCM complex, which is important for priming origins of DNA replication in G1 and becomes an active ATP-dependent helicase that promotes DNA melting and elongation when activated by Cdc7p-Dbf4p in S— phase; from E. coli or its homolog, e.g. as shown herein, e.g. as indicated in Table II, for conferring an increased tolerance and/or resistance to environmental stress as compared to a corresponding non-transformed wild type plant in an organism or a part thereof.

[0096] The sequence of YLR394W from Saccharomyces cerevisiae has been published in Dietrich et al., Nature 387 (6632 Suppl), 78-81 (1997) and Goffeau et al., Science 274 (5287), 546-547, 1996, and its activity is being defined as a protein required for synaptonemal complex formation, which may have a role in meiotic recombination; and/or which localizes to synapsis initiation sites on meiotic chromosomes. Accordingly, in one embodiment, the process of the present invention comprises the use of a protein required for synaptonemal complex formation, which may have a role in meiotic recombination; and/or which localizes to synapsis initiation sites on meiotic chromosomes; from E. coli or its homolog, e.g. as shown herein, e.g. as indicated in Table II, for conferring an increased tolerance and/or resistance to environmental stress as compared to a corresponding non-transformed wild type plant in an organism or a part thereof.

[0097] The sequence of YNL108C from Saccharomyces cerevisiae has been published in Dietrich et al., Nature 387 (6632 Suppl), 78-81 (1997) and Goffeau et al., Science 274 (5287), 546-547, 1996, and its activity is being defined as a YNL108C protein. Accordingly, in one embodiment, the process of the present invention comprises the use of a YNL108C protein; from E. coli or its homolog, e.g. as shown herein, e.g. as indicated in Table II, for conferring an increased tolerance and/or resistance to environmental stress as compared to a corresponding non-transformed wild type plant in an organism or a part thereof.

[0098] The sequence of YNL141 W from Saccharomyces cerevisiae has been published in Dietrich et al., Nature 387 (6632 Suppl), 78-81 (1997) and Goffeau et al., Science 274 (5287), 546-547, 1996, and its activity is being defined as a adenine deaminase (adenine aminohydrolase), involved in purine salvage and nitrogen catabolism. Accordingly, in one embodiment, the process of the present invention comprises the use of a adenine deaminase (adenine aminohydrolase), involved in purine salvage and nitrogen catabolism; from E. coli or its homolog, e.g. as shown herein, e.g. as indicated in Table II, for conferring an increased tolerance and/or resistance to environmental stress as compared to a corresponding non-transformed wild type plant in an organism or a part thereof.

[0099] The sequence of YNL282W from Saccharomyces cerevisiae has been published in Dietrich et al., Nature 387 (6632 Suppl), 78-81 (1997) and Goffeau et al., Science 274 (5287), 546-547, 1996, and its activity is being defined as a subunit of both RNase MRP, which cleaves pre-rRNA, and nuclear RNase P, which cleaves tRNA precursors to generate mature 5′ ends. Accordingly, in one embodiment, the process of the present invention comprises the use of a subunit of both RNase MRP, which cleaves pre-rRNA, and nuclear RNase P, which cleaves tRNA precursors to generate mature 5′ ends; from E. coli or its homolog, e.g. as shown herein, e.g. as indicated in Table II, for conferring an increased tolerance and/or resistance to environmental stress as compared to a corresponding non-transformed wild type plant in an organism or a part thereof.

[0100] The sequence of YNL283C from Saccharomyces cerevisiae has been published in Dietrich et al., Nature 387 (6632 Suppl), 78-81 (1997) and Goffeau et al., Science 274 (5287), 546-547, 1996, and its activity is being defined as a partially redundant sensor-transducer of the stress-activated PKC1-MPK1 signaling pathway involved in maintenance of cell wall integrity and recovery from heat shock. Accordingly, in one embodiment, the process of the present invention comprises the use of a partially redundant sensor-transducer of the stress-activated PKC1-MPK1 signaling pathway involved in maintenance of cell wall integrity and recovery from heat shock; from E. coli or its homolog, e.g. as shown herein, e.g. as indicated in Table II, for conferring an increased tolerance and/or resistance to environmental stress as compared to a corresponding non-transformed wild type plant in an organism or a part thereof.

[0101] The sequence of YNL286W from Saccharomyces cerevisiae has been published in Dietrich et al., Nature 387 (6632 Suppl), 78-81 (1997) and Goffeau et al., Science 274 (5287), 546-547, 1996, and its activity is being defined as a protein that binds to U2 snRNA and Prp11p, and may be involved in U2 snRNA folding. Accordingly, in one embodiment, the process of the present invention comprises the use of a protein that binds to U2 snRNA and Prp11p, and may be involved in U2 snRNA folding; from E. coli or its homolog, e.g. as shown herein, e.g. as indicated in Table II, for conferring an increased tolerance and/or resistance to environmental stress as compared to a corresponding non-transformed wild type plant in an organism or a part thereof.

[0102] The sequence of YOL056W from Saccharomyces cerevisiae has been published in Dietrich et al., Nature 387 (6632 Suppl), 78-81 (1997) and Goffeau et al., Science 274 (5287), 546-547, 1996, and its activity is being defined as a homolog of Gpm1p phosphoglycerate mutase which converts 3-phosphoglycerate to 2-phosphoglycerate in glycolysis. Accordingly, in one embodiment, the process of the present invention comprises the use of a homolog of Gpm1p phosphoglycerate mutase which converts 3-phosphoglycerate to 2-phosphoglycerate in glycolysis; from E. coli or its homolog, e.g. as shown herein, e.g. as indicated in Table II, for conferring an increased tolerance and/or resistance to environmental stress as compared to a corresponding non-transformed wild type plant in an organism or a part thereof.

[0103] The sequence of YOR154W from Saccharomyces cerevisiae has been published in Dietrich et al., Nature 387 (6632 Suppl), 78-81 (1997) and Goffeau et al., Science 274 (5287), 546-547, 1996, and its activity is being defined as a membrane protein with YOR154w protein activity. Accordingly, in one embodiment, the process of the present invention comprises the use of membrane protein with YOR154w protein activity; from E. coli or its homolog, e.g. as shown herein, e.g. as indicated in Table II, for conferring an increased tolerance and/or resistance to environmental stress as compared to a corresponding non-transformed wild type plant in an organism or a part thereof.

[0104] The sequence of YOR266W from Saccharomyces cerevisiae has been published in Dietrich et al., Nature 387 (6632 Suppl), 78-81 (1997) and Goffeau et al., Science 274 (5287), 546-547, 1996, and its activity is being defined as a mitochondrial inner membrane protein involved in export of proteins from the mitochondrial matrix. Accordingly, in one embodiment, the process of the present invention comprises the use of mitochondrial inner membrane protein involved in export of proteins from the mitochondrial matrix; from E. coli or its homolog, e.g. as shown herein, e.g. as indicated in Table II, for conferring an increased tolerance and/or resistance to environmental stress as compared to a corresponding non-transformed wild type plant in an organism or a part thereof.

[0105] The sequence of YOR298C from Saccharomyces cerevisiae has been published in Dietrich et al., Nature 387 (6632 Suppl), 78-81 (1997) and Goffeau et al., Science 274 (5287), 546-547, 1996, and its activity is being defined as a protein with YOR298C protein activity. Accordingly, in one embodiment, the process of the present invention comprises the use of a protein with YOR298C protein activity; from E. coli or its homolog, e.g. as shown herein, e.g. as indicated in Table II, for conferring an increased tolerance and/or resistance to environmental stress as compared to a corresponding non-transformed wild type plant in an organism or a part thereof.

[0106] The sequence of YPL030W from Saccharomyces cerevisiae has been published in Dietrich et al., Nature 387 (6632 Suppl), 78-81 (1997) and Goffeau et al., Science 274 (5287), 546-547, 1996, and its activity is being defined as a protein with YPL030W protein activity. Accordingly, in one embodiment, the process of the present invention comprises the use of a protein with YPL030W protein activity; from E. coli or its homolog, e.g. as shown herein, e.g. as indicated in Table II, for conferring an increased tolerance and/or resistance to environmental stress as compared to a corresponding non-transformed wild type plant in an organism or a part thereof.

[0107] The sequence of YPL103C from Saccharomyces cerevisiae has been published in Dietrich et al., Nature 387 (6632 Suppl), 78-81 (1997) and Goffeau et al., Science 274 (5287), 546-547, 1996, and its activity is being defined as a protein with YPL103C protein activity. Accordingly, in one embodiment, the process of the present invention comprises the use of a protein with YPL103C protein activity; from E. coli or its homolog, e.g. as shown herein, e.g. as indicated in Table II, for conferring an increased tolerance and/or resistance to environmental stress as compared to a corresponding non-transformed wild type plant in an organism or a part thereof.

[0108] The sequence of YPL211W from Saccharomyces cerevisiae has been published in Dietrich et al., Nature 387 (6632 Suppl), 78-81 (1997) and Goffeau et al., Science 274 (5287), 546-547, 1996, and its activity is being defined as a protein with YPL211W protein activity. Accordingly, in one embodiment, the process of the present invention comprises the use of a protein with YPL211W protein activity; from E. coli or its homolog, e.g. as shown herein, e.g. as indicated in Table II, for conferring an increased tolerance and/or resistance to environmental stress as compared to a corresponding non-transformed wild type plant in an organism or a part thereof.

[0109] The sequence of YNR029C from Saccharomyces cerevisiae has been published in Dietrich et al., Nature 387 (6632 Suppl), 78-81 (1997) and Goffeau et al., Science 274 (5287), 546-547, 1996, and its activity is being defined as a membrane protein with YNR029C protein activity. Accordingly, in one embodiment, the process of the present invention comprises the use of membrane protein with YNR029C protein activity; from E. coli or its homolog, e.g. as shown herein, e.g. as indicated in Table II, for conferring an increased tolerance and/or resistance to environmental stress as compared to a corresponding non-transformed wild type plant in an organism or a part thereof.

[0110] The sequence of YNL231C from Saccharomyces cerevisiae has been published in Dietrich et al., Nature 387 (6632 Suppl), 78-81 (1997) and Goffeau et al., Science 274 (5287), 546-547, 1996, and its activity is being defined as a membrane protein with YNL231C protein activity. Accordingly, in one embodiment, the process of the present invention comprises the use of membrane protein with YNL231C protein activity; from E. coli or its homolog, e.g. as shown herein, e.g. as indicated in Table II, for conferring an increased tolerance and/or resistance to environmental stress as compared to a corresponding non-transformed wild type plant in an organism or a part thereof.

[0111] The sequence of YLR210W from Saccharomyces cerevisiae has been published in Dietrich et al., Nature 387 (6632 Suppl), 78-81 (1997) and Goffeau et al., Science 274 (5287), 546-547, 1996, and its activity is being defined as a membrane protein with YLR210W protein activity. Accordingly, in one embodiment, the process of the present invention comprises the use of membrane protein with YLR210W protein activity; from E. coli or its homolog, e.g. as shown herein, e.g. as indicated in Table II, for conferring an increased tolerance and/or resistance to environmental stress as compared to a corresponding non-transformed wild type plant in an organism or a part thereof.

[0112] In case the activity of the Escherichia coli K12 protein b0019 or a protein for the transport of cations or its homologs, e.g. a Na+/H+ antiporter, e.g. as indicated in Table II, is increased, preferably, in one embodiment the increase in tolerance and/or resistance to environmental stress as compared to a corresponding non-transformed wild type plant in an organism or a part thereof is conferred.

[0113] In case the activity of the Escherichia coli K12 protein b0730 or a protein with the activity defined as transcriptional regulator of succinylCoA synthetase operon and fatty acyl response regulator or its homologs, e.g. transcriptional regulator, e.g. as indicated in Table II, is increased, preferably, in one embodiment the increase in tolerance and/or resistance to environmental stress as compared to a corresponding non-transformed wild type plant in an organism or a part thereof is conferred.

[0114] In case the activity of the Escherichia coli K12 protein b1528 or a protein with the activity defined as L-arabinose/isopropyl-beta-D-thiogalactopyranoside export protein, or its homologs, e.g. as indicated in Table II, e.g. the proteins of the MFS family, is increased, preferably, in one embodiment the increase in tolerance and/or resistance to environmental stress as compared to a corresponding non-transformed wild type plant in an organism or a part thereof is conferred.

[0115] In one embodiment, in case the activity of the Escherichia coli K12 protein b1829 or its homologs, e.g. as indicated in Table II, is increased, e.g. the activity of a protease is increased, preferably, the activity of a heat shock protein is increased, more preferred the activity of a htpX protein or its homolog is increased; preferably, in one embodiment the increase in tolerance and/or resistance to environmental stress as compared to a corresponding non-transformed wild type plant in an organism or a part thereof is conferred.

[0116] In one embodiment, in case the activity of the Escherichia coli K12 protein b3164 or its homologs, e.g. as indicated in Table II, is increased, e.g. the activity of a polyribonucleotide nucleotidyltransferase is increased, preferably, in one embodiment the increase in tolerance and/or resistance to environmental stress as compared to a corresponding non-transformed wild type plant in an organism or a part thereof is conferred.

[0117] In one embodiment, in case the activity of the Saccharomyces cerevisiae protein YBL002W or its homologs, e.g. as indicated in Table II, is increased, e.g. the activity of a histone H2A and H2B and/or a trehalase is increased, preferably, in one embodiment the increase in tolerance and/or resistance to environmental stress as compared to a corresponding non-transformed wild type plant in an organism or a part thereof is conferred.

[0118] In one embodiment, in case the activity of the Saccharomyces cerevisiae protein YBR002C or its homologs, e.g. as indicated in Table II, is increased, e.g. the activity of a Cis-prenyltransferase involved in dolichol synthesis; and/or a protein that participates in endoplasmic reticulum (ER) protein sorting is increased, preferably, in one embodiment the increase in tolerance and/or resistance to environmental stress as compared to a corresponding non-transformed wild type plant in an organism or a part thereof is conferred.

[0119] In one embodiment, in case the activity of the Saccharomyces cerevisiae protein YBR010W or its homologs, e.g. as indicated in Table II, is increased, e.g. the activity of a histone H3 proteins; or a core histone required for chromatin assembly, involved in heterochromatin-mediated telomeric and HM silencing; regulated by acetylation, methylation, and mitotic phosphorylation is increased, preferably, in one embodiment the increase in tolerance and/or resistance to environmental stress as compared to a corresponding non-transformed wild type plant in an organism or a part thereof is conferred.

[0120] In one embodiment, in case the activity of the Saccharomyces cerevisiae protein YBR090C or its homologs, e.g. as indicated in Table II, is increased, e.g. the activity of a membrane protein is increased, preferably, in one embodiment the increase in tolerance and/or resistance to environmental stress as compared to a corresponding non-transformed wild type plant in an organism or a part thereof is conferred.

[0121] In one embodiment, in case the activity of the Saccharomyces cerevisiae protein YBR109C or its homologs, e.g. as indicated in Table II, is increased, e.g. the activity of a Ca++ binding protein that regulates Ca++ independent processes (e.g. mitosis, bud growth, actin organization, endocytosis, etc.) and Ca++ dependent processes (e.g. stress-activated pathways) is increased, preferably, in one embodiment the increase in tolerance and/or resistance to environmental stress as compared to a corresponding non-transformed wild type plant in an organism or a part thereof is conferred.

[0122] In one embodiment, in case the activity of the Saccharomyces cerevisiae protein YBR288C or its homologs, e.g. as indicated in Table II, is increased, e.g. the activity of a Mu3-like subunit of the clathrin associated protein complex (AP-3); which functions in transport of alkaline phosphatase to the vacuole via the alternate pathway is increased, preferably, in one embodiment the increase in tolerance and/or resistance to environmental stress as compared to a corresponding non-transformed wild type plant in an organism or a part thereof is conferred.

[0123] In one embodiment, in case the activity of the Saccharomyces cerevisiae protein YEL001C or its homologs, e.g. as indicated in Table II, is increased, e.g. the activity of a YEL001C protein is increased, preferably, in one embodiment the increase in tolerance and/or resistance to environmental stress as compared to a corresponding non-transformed wild type plant in an organism or a part thereof is conferred.

[0124] In one embodiment, in case the activity of the Saccharomyces cerevisiae protein YER062c or its homologs, e.g. as indicated in Table II, is increased, e.g. the activity of one of two redundant DL-glycerol-3-phosphatases (RHR2/GPP1 encodes the other) involved in glycerol biosynthesis; induced in response to hyperosmotic stress and oxidative stress, and during the diauxic transition is increased, preferably, in one embodiment the increase in tolerance and/or resistance to environmental stress as compared to a corresponding non-transformed wild type plant in an organism or a part thereof is conferred.

[0125] In one embodiment, in case the activity of the Saccharomyces cerevisiae protein YER145C or its homologs, e.g. as indicated in Table II, is increased, e.g. the activity of a protein with high affinity iron permease involved in the transport of iron across the plasma membrane, which forms complex with Fet3p is increased, preferably, in one embodiment the increase in tolerance and/or resistance to environmental stress as compared to a corresponding non-transformed wild type plant in an organism or a part thereof is conferred.

[0126] In one embodiment, in case the activity of the Saccharomyces cerevisiae protein YER146W or its homologs, e.g. as indicated in Table II, is increased, e.g. the activity of a component of small nuclear ribonucleoprotein complexes involved in RNA processing, in splicing and decay is increased, preferably, in one embodiment the increase in tolerance and/or resistance to environmental stress as compared to a corresponding non-transformed wild type plant in an organism or a part thereof is conferred.

[0127] In one embodiment, in case the activity of the Saccharomyces cerevisiae protein YGL151W or its homologs, e.g. as indicated in Table II, is increased, e.g. the activity of a YGL151W protein is increased, preferably, in one embodiment the increase in tolerance and/or resistance to environmental stress as compared to a corresponding non-transformed wild type plant in an organism or a part thereof is conferred.

[0128] In one embodiment, in case the activity of the Saccharomyces cerevisiae protein YGR046W or its homologs, e.g. as indicated in Table II, is increased, e.g. the activity of a YGR046W protein is increased, preferably, in one embodiment the increase in tolerance and/or resistance to environmental stress as compared to a corresponding non-transformed wild type plant in an organism or a part thereof is conferred.

[0129] In one embodiment, in case the activity of the Saccharomyces cerevisiae protein YGR060W or its homologs, e.g. as indicated in Table II, is increased, e.g. the activity of a C-4 methyl sterol oxidase, which catalyzes the first of three steps required to remove two C-4 methyl groups from an intermediate in ergosterol biosynthesis is increased, preferably, in one embodiment the increase in tolerance and/or resistance to environmental stress as compared to a corresponding non-transformed wild type plant in an organism or a part thereof is conferred.

[0130] In one embodiment, in case the activity of the Saccharomyces cerevisiae protein YGR141W or its homologs, e.g. as indicated in Table II, is increased, e.g. the activity of a YGR141W protein is increased, preferably, in one embodiment the increase in tolerance and/or resistance to environmental stress as compared to a corresponding non-transformed wild type plant in an organism or a part thereof is conferred.

[0131] In one embodiment, in case the activity of the Saccharomyces cerevisiae protein YIL002C or its homologs, e.g. as indicated in Table II, is increased, e.g. the activity of a inositol-1,4,5-trisphosphate 5-phosphatase homolog YIL002C is increased, preferably, in one embodiment the increase in tolerance and/or resistance to environmental stress as compared to a corresponding non-transformed wild type plant in an organism or a part thereof is conferred.

[0132] In one embodiment, in case the activity of the Saccharomyces cerevisiae protein YIL031W or its homologs, e.g. as indicated in Table II, is increased, e.g. the activity of a peptidase that deconjugates Smt3/SUMO-1 peptides from proteins, and/or plays a role in chromosome cohesion at centromeric regions and recovery from checkpoint arrest induced by DNA damage or DNA replication defects is increased, preferably, in one embodiment the increase in tolerance and/or resistance to environmental stress as compared to a corresponding non-transformed wild type plant in an organism or a part thereof is conferred.

[0133] In one embodiment, in case the activity of the Saccharomyces cerevisiae protein YIL076W or its homologs, e.g. as indicated in Table II, is increased, e.g. the activity of a epsilon-COP subunit of the coatomer; which regulates retrograde Golgi-to-ER protein traffic; and/or stabilizes Cop1p, the alpha-COP and the coatomer complex is increased, preferably, in one embodiment the increase in tolerance and/or resistance to environmental stress as compared to a corresponding non-transformed wild type plant in an organism or a part thereof is conferred.

[0134] In one embodiment, in case the activity of the Saccharomyces cerevisiae protein YIL077C or its homologs, e.g. as indicated in Table II, is increased, e.g. the activity of a YIL077C protein is increased, preferably, in one embodiment the increase in tolerance and/or resistance to environmental stress as compared to a corresponding non-transformed wild type plant in an organism or a part thereof is conferred.

[0135] In one embodiment, in case the activity of the Saccharomyces cerevisiae protein YIL121W or its homologs, e.g. as indicated in Table II, is increased, e.g. the activity of a multidrug transporter required for resistance to quinidine, barban, cisplatin, and bleomycin; which is member of the major facilitator superfamily of transporters conferring multiple drug resistance (MFS-MDR) is increased, preferably, in one embodiment the increase in tolerance and/or resistance to environmental stress as compared to a corresponding non-transformed wild type plant in an organism or a part thereof is conferred.

[0136] In one embodiment, in case the activity of the Saccharomyces cerevisiae protein YIL156W or its homologs, e.g. as indicated in Table II, is increased, e.g. the activity of a YIL156W protein is increased, preferably, in one embodiment the increase in tolerance and/or resistance to environmental stress as compared to a corresponding non-transformed wild type plant in an organism or a part thereof is conferred.

[0137] In one embodiment, in case the activity of the Saccharomyces cerevisiae protein YJR044C or its homologs, e.g. as indicated in Table II, is increased, e.g. the activity of a late endosomal protein involved in late endosome to vacuole trafficking is increased, preferably, in one embodiment the increase in tolerance and/or resistance to environmental stress as compared to a corresponding non-transformed wild type plant in an organism or a part thereof is conferred.

[0138] In one embodiment, in case the activity of the Saccharomyces cerevisiae protein YKL057C or its homologs, e.g. as indicated in Table II, is increased, e.g. the activity of a nucleoporin NUP120 (Nuclear pore protein NUP120) is increased, preferably, in one embodiment the increase in tolerance and/or resistance to environmental stress as compared to a corresponding non-transformed wild type plant in an organism or a part thereof is conferred.

[0139] In one embodiment, in case the activity of the Saccharomyces cerevisiae protein YKL150W or its homologs, e.g. as indicated in Table II, is increased, e.g. the activity of a mitochondrial NADH-cytochrome b5 reductase, involved in ergosterol biosynthesis is increased, preferably, in one embodiment the increase in tolerance and/or resistance to environmental stress as compared to a corresponding non-transformed wild type plant in an organism or a part thereof is conferred.

[0140] In one embodiment, in case the activity of the Saccharomyces cerevisiae protein YKR057W or its homologs, e.g. as indicated in Table II, is increased, e.g. the activity of a ribosomal protein, similar to S21 ribosomal proteins, involved in ribosome biogenesis and translation is increased, preferably, in one embodiment the increase in tolerance and/or resistance to environmental stress as compared to a corresponding non-transformed wild type plant in an organism or a part thereof is conferred.

[0141] In one embodiment, in case the activity of the Saccharomyces cerevisiae protein YLR062C or its homologs, e.g. as indicated in Table II, is increased, e.g. the activity of a YLR062C protein is increased, preferably, in one embodiment the increase in tolerance and/or resistance to environmental stress as compared to a corresponding non-transformed wild type plant in an organism or a part thereof is conferred.

[0142] In one embodiment, in case the activity of the Saccharomyces cerevisiae protein YLR142W or its homologs, e.g. as indicated in Table II, is increased, e.g. the activity of a proline oxidase, and/or a nuclear-encoded mitochondrial protein involved in utilization of proline as sole nitrogen source is increased, preferably, in one embodiment the increase in tolerance and/or resistance to environmental stress as compared to a corresponding non-transformed wild type plant in an organism or a part thereof is conferred.

[0143] In one embodiment, in case the activity of the Saccharomyces cerevisiae protein YLR173W or its homologs, e.g. as indicated in Table II, is increased, e.g. the activity of a YLR173W protein is increased, preferably, in one embodiment the increase in tolerance and/or resistance to environmental stress as compared to a corresponding non-transformed wild type plant in an organism or a part thereof is conferred.

[0144] In one embodiment, in case the activity of the Saccharomyces cerevisiae protein YLR274W or its homologs, e.g. as indicated in Table II, is increased, e.g. the activity of a component of the hexameric MCM complex, which is important for priming origins of DNA replication in G1 and becomes an active ATP-dependent helicase that promotes DNA melting and elongation when activated by Cdc7p-Dbf4p in S-phase is increased, preferably, in one embodiment the increase in tolerance and/or resistance to environmental stress as compared to a corresponding non-transformed wild type plant in an organism or a part thereof is conferred.

[0145] In one embodiment, in case the activity of the Saccharomyces cerevisiae protein YLR394W or its homologs, e.g. as indicated in Table II, is increased, e.g. the activity of a protein required for synaptonemal complex formation, which may have a role in meiotic recombination; and/or which localizes to synapsis initiation sites on meiotic chromosomes is increased, preferably, in one embodiment the increase in tolerance and/or resistance to environmental stress as compared to a corresponding non-transformed wild type plant in an organism or a part thereof is conferred.

[0146] In one embodiment, in case the activity of the Saccharomyces cerevisiae protein YNL108C or its homologs, e.g. as indicated in Table II, is increased, e.g. the activity of a YNL108C protein is increased, preferably, in one embodiment the increase in tolerance and/or resistance to environmental stress as compared to a corresponding non-transformed wild type plant in an organism or a part thereof is conferred.

[0147] In one embodiment, in case the activity of the Saccharomyces cerevisiae protein YNL141W or its homologs, e.g. as indicated in Table II, is increased, e.g. the activity of a adenine deaminase (adenine aminohydrolase), involved in purine salvage and nitrogen catabolism is increased, preferably, in one embodiment the increase in tolerance and/or resistance to environmental stress as compared to a corresponding non-transformed wild type plant in an organism or a part thereof is conferred.

[0148] In one embodiment, in case the activity of the Saccharomyces cerevisiae protein YNL282W or its homologs, e.g. as indicated in Table II, is increased, e.g. the activity of a subunit of both RNase MRP, which cleaves pre-rRNA, and nuclear RNase P, which cleaves tRNA precursors to generate mature 5′ ends is increased, preferably, in one embodiment the increase in tolerance and/or resistance to environmental stress as compared to a corresponding non-transformed wild type plant in an organism or a part thereof is conferred.

[0149] In one embodiment, in case the activity of the Saccharomyces cerevisiae protein YNL283C or its homologs, e.g. as indicated in Table II, is increased, e.g. the activity of a partially redundant sensor-transducer of the stress-activated PKC1-MPK1 signaling pathway involved in maintenance of cell wall integrity and recovery from heat shock is increased, preferably, in one embodiment the increase in tolerance and/or resistance to environmental stress as compared to a corresponding non-transformed wild type plant in an organism or a part thereof is conferred.

[0150] In one embodiment, in case the activity of the Saccharomyces cerevisiae protein YNL286W or its homologs, e.g. as indicated in Table II, is increased, e.g. the activity of a protein that binds to U2 snRNA and Prp11p, and may be involved in U2 snRNA folding is increased, preferably, in one embodiment the increase in tolerance and/or resistance to environmental stress as compared to a corresponding non-transformed wild type plant in an organism or a part thereof is conferred.

[0151] In one embodiment, in case the activity of the Saccharomyces cerevisiae protein YOL056W or its homologs, e.g. as indicated in Table II, is increased, e.g. the activity of a homolog of Gpm1p phosphoglycerate mutase which converts 3-phosphoglycerate to 2-phosphoglycerate in glycolysis is increased, preferably, in one embodiment the increase in tolerance and/or resistance to environmental stress as compared to a corresponding non-transformed wild type plant in an organism or a part thereof is conferred.

[0152] In one embodiment, in case the activity of the Saccharomyces cerevisiae protein YOR154W or its homologs, e.g. as indicated in Table II, is increased, e.g. the activity of a membrane protein with YOR154w protein activity is increased, preferably, in one embodiment the increase in tolerance and/or resistance to environmental stress as compared to a corresponding non-transformed wild type plant in an organism or a part thereof is conferred.

[0153] In one embodiment, in case the activity of the Saccharomyces cerevisiae protein YOR266W or its homologs, e.g. as indicated in Table II, is increased, e.g. the activity of a mitochondrial inner membrane protein involved in export of proteins from the mitochondrial matrix is increased, preferably, in one embodiment the increase in tolerance and/or resistance to environmental stress as compared to a corresponding non-transformed wild type plant in an organism or a part thereof is conferred.

[0154] In one embodiment, in case the activity of the Saccharomyces cerevisiae protein YOR298C or its homologs, e.g. as indicated in Table II, is increased, e.g. the activity of a protein with YOR298C protein activity is increased, preferably, in one embodiment the increase in tolerance and/or resistance to environmental stress as compared to a corresponding non-transformed wild type plant in an organism or a part thereof is conferred.

[0155] In one embodiment, in case the activity of the Saccharomyces cerevisiae protein YPL030W or its homologs, e.g. as indicated in Table II, is increased, e.g. the activity of a protein with YPL030W protein activity is increased, preferably, in one embodiment the increase in tolerance and/or resistance to environmental stress as compared to a corresponding non-transformed wild type plant in an organism or a part thereof is conferred.

[0156] In one embodiment, in case the activity of the Saccharomyces cerevisiae protein YPL103C or its homologs, e.g. as indicated in Table II, is increased, e.g. the activity of a protein with YPL103C protein activity is increased, preferably, in one embodiment the increase in tolerance and/or resistance to environmental stress as compared to a corresponding non-transformed wild type plant in an organism or a part thereof is conferred.

[0157] In one embodiment, in case the activity of the Saccharomyces cerevisiae protein YPL211W or its homologs, e.g. as indicated in Table II, is increased, e.g. the activity of a protein with YPL211W protein activity is increased, preferably, in one embodiment the increase in tolerance and/or resistance to environmental stress as compared to a corresponding non-transformed wild type plant in an organism or a part thereof is conferred.

[0158] In one embodiment, in case the activity of the Saccharomyces cerevisiae protein YNR029C or its homologs, e.g. as indicated in Table II, is increased, e.g. the activity of a membrane protein with YNR029C protein activity is increased, preferably, in one embodiment the increase in tolerance and/or resistance to environmental stress as compared to a corresponding non-transformed wild type plant in an organism or a part thereof is conferred.

[0159] In one embodiment, in case the activity of the Saccharomyces cerevisiae protein YNL231C or its homologs, e.g. as indicated in Table II, is increased, e.g. the activity of a membrane protein with YNL231C protein activity is increased, preferably, in one embodiment the increase in tolerance and/or resistance to environmental stress as compared to a corresponding non-transformed wild type plant in an organism or a part thereof is conferred.

[0160] In one embodiment, in case the activity of the Saccharomyces cerevisiae protein YLR210W or its homologs, e.g. as indicated in Table II, is increased, e.g. the activity of a membrane protein with YLR210W protein activity is increased, preferably, in one embodiment the increase in tolerance and/or resistance to environmental stress as compared to a corresponding non-transformed wild type plant in an organism or a part thereof is conferred.

[0161] It is also within the scope of the invention to screen plant cells or plants for increased tolerance and/or resistance to environmental stress by screening the plant cells under stress conditions for increased tolerance and/or resistance to environmental stress as compared to non-stress conditions. This allows selection of plants with increased tolerance and/or resistance to environmental stress without the identification of genes or visual symptoms.

[0162] With the invention it is further possible to breed plant cells or plants towards increased tolerance and/or resistance to environmental stress by screening the plant cells under stress conditions for increased tolerance and/or resistance to environmental stress as compared to non-stress conditions and selecting those with increased tolerance and/or resistance to environmental stress. The screening for increased tolerance and/or resistance to environmental stress is faster and easier than e.g. screening for genes.

[0163] Screening is well known to those skilled in the art and generally refers to the search for a particular attribute or trait. In the invention this trait in a plant or plant cell is the general appearance, healthy, visual symptoms of injury, such as wilting and leaf browning, or the concentration of a metabolite. The methods and devices for screening are familiar to those skilled in the art and include GC (gas chromatography), LC (liquid chromatography), HPLC (high performance (pressure) liquid chromatography), MS (mass spectrometry), NMR (nuclear magnetic resonance) spectroscopy, IR (infra red) spectroscopy, photometric methods etc and combinations of these methods.

[0164] Breeding is also customary knowledge for those skilled in the art. It is understood as the directed and stable incorporation of a particular attribute or trait into a plant or plant cell.

[0165] The various breeding steps are characterized by well-defined human intervention such as selecting the lines to be crossed, directing pollination of the parental lines, or selecting appropriate progeny plants. Different breeding measures can be taken, depending on the desired properties. All the techniques are well known by a person skilled in the art and include for example, but are not limited to hybridization, inbreeding, backcross breeding, multiline breeding, variety blend, interspecific hybridization, aneuploid techniques, etc. Hybridization techniques also can include the sterilization of plants to yield male or female sterile plants by mechanical, chemical, or biochemical means. Cross pollination of a male sterile plant with pollen of a different line assures that the genome of the male sterile but female fertile plant will uniformly obtain properties of both of the parental lines. The transgenic seeds and plants according to the invention can therefor be used for the breeding of improved plant lines, which can increase the effectiveness of conventional methods such as herbicide or pesticide treatment or which allow one to dispense with said methods due to their modified genetic properties. Alternatively new crops with improved stress tolerance, preferably drought and temperature, can be obtained, which, due to their optimized genetic “equipment”, yield harvested product of better quality than products that were not able to tolerate comparable adverse developmental conditions.

[0166] The invention provides that the environmental stress can be salinity, drought, temperature, metal, chemical, pathogenic and oxidative stresses, or combinations thereof, preferably drought and/or temperature.

[0167] The object of the invention is a transgenic plant cell, wherein the SRP (=stress related protein) is selected preferably from yeast, preferably Saccharomyces cerevisiae, or E. coli or a plant.

[0168] In one embodiment the object of the invention is a transgenic plant cell, wherein the SRP (=stress related protein) is selected preferably from a plant, preferably Brassica napus, Glycine max, Zea mays, Triticum aestivum or Oryza sativa or yeast, preferably Saccharomyces cerevisiae, or E. coli, more preferably from Brassica napus, Glycine max, Zea mays, Triticum aestivum or Oryza sativa.

[0169] In an other embodiment the object of the invention is a transgenic plant cell, wherein the SRP (=stress related protein) is selected preferably from a plant, preferably Brassica napus, Glycine max, Zea mays, Hordeum vulgare, Helianthus annuus, Linum usitatissimum, Hordeum vulgare, Helianthus annuus, Linum usitatissimum, Triticum aestivum or Oryza sativa or yeast, preferably Saccharomyces cerevisiae, or E. coli, more preferably from Brassica napus, Glycine max, Zea mays, Hordeum vulgare, Helianthus annuus, Linum usitatissimum, Hordeum vulgare, Helianthus annuus, Linum usitatissimum, Triticum aestivum or Oryza sativa.

[0170] Object of the invention is also a transgenic plant cell, wherein the SRP coding nucleic acid is at least about 50% homologous to one of the nucleic acid as shown in Table I, column 4 and 5. In the transgenic plant cell of the invention, the expression of said nucleic acid results in increased tolerance to an environmental stress as compared to a corresponding non-transformed wild type plant cell. Herein, the environmental stress is selected from the group consisting of salinity, drought, temperature, metal, chemical, pathogenic and oxidative stresses, or combinations thereof, preferably drought and/or temperature.

[0171] The term “expression” refers to the transcription and/or translation of a codogenic gene segment or gene. As a rule, the resulting product is an mRNA or a protein. However, expression products can also include functional RNAs such as, for example, antisense, nucleic acids, tRNAs, snRNAs, rRNAs, RNAi, siRNA, ribozymes etc. Expression may be systemic, local or temporal, for example limited to certain cell types, tissue, sorgans or time periods.

[0172] Unless otherwise specified, the terms “polynucleotides”, “nucleic acid” and “nucleic acid molecule” are interchangeably in the present context. Unless otherwise specified, the terms “peptide”, “polypeptide” and “protein” are interchangeably in the present context. The term “sequence” may relate to polynucleotides, nucleic acids, nucleic acid molecules, peptides, polypeptides and proteins, depending on the context in which the term “sequence” is used. The terms “gene(s)”, “polynucleotide”, “nucleic acid sequence”, “nucleotide sequence”, or “nucleic acid molecule(s)” as used herein refers to a polymeric form of nucleotides of any length, either ribonucleotides or deoxyribonucleotides. The terms refer only to the primary structure of the molecule.

[0173] Thus, the terms “gene(s)”, “polynucleotide”, “nucleic acid sequence”, “nucleotide sequence”, or “nucleic acid molecule(s)” as used herein include double- and single-stranded DNA and RNA. They also include known types of modifications, for example, methylation, “caps”, substitutions of one or more of the naturally occurring nucleotides with an analog. Preferably, the DNA or RNA sequence of the invention comprises a coding sequence encoding the herein defined polypeptide.

[0174] A “coding sequence” is a nucleotide sequence, which is transcribed into mRNA and/or translated into a polypeptide when placed under the control of appropriate regulatory sequences. The boundaries of the coding sequence are determined by a translation start codon at the 5′-terminus and a translation stop codon at the 3′-terminus. A coding sequence can include, but is not limited to mRNA, cDNA, recombinant nucleotide sequences or genomic DNA, while introns may be present as well under certain circumstances.

[0175] For the purposes of the invention, as a rule the plural is intended to encompass the singular and vice versa.

[0176] Further, the transgenic plant cell is derived from a monocotyledonous plant. Alternative, the transgenic plant cell is derived from a dicotyledonous plant. Preferably, the transgenic plant cell is selected from the group consisting of maize, wheat, rye, oat, triticale, rice, barley, soybean, peanut, cotton, rapeseed, canola, manihot, pepper, sunflower, flax, borage, sufflower, linseed, primrose, rapeseed, turnip rape, tagetes, solanaceous plants, potato, tabacco, eggplant, tomato, Vicia species, pea, alfalfa, coffee, cacao, tea, Salix species, oil palm, coconut, perennial grass, forage crops and Arabidopsis thaliana. Moreover, the transgenic plant cell of the present invention can be derived from a gymnosperm plant. Preferably, the plant is selected from the group of spruce, pine and fir.

[0177] The invention further provides a seed produced by a transgenic plant transformed by a SRP coding nucleic acid, wherein the plant is true breeding for increased tolerance to environmental stress as compared to a wild type plant cell. The transgenic plant might be a monocot, a dicot or a gymnosperm plant. The invention further provides a seed produced by a transgenic plant expressing an SRP wherein the plant is true breeding for increased tolerance to environmental stress as compared to a wild type plant cell. The invention pertains to a seed produced by a transgenic plant, wherein the seed is genetically homozygous for a transgene conferring an increased tolerance to environmental stress as compared to a wild type plant.

[0178] The invention further provides an agricultural product produced by any of the below-described transgenic plants, plant parts such as leafs, petal, anther, roots, tubers, stems, buds, flowers or seeds. The invention further provides a isolated recombinant expression vector comprising a SRP encoding nucleic acid.

[0179] The invention further provides a method of producing a transgenic plant with a SRP coding nucleic acid, wherein expression of the nucleic acid in the plant results in increased tolerance and/or resistance to an environmental stress as compared to a corresponding non-transformed wild type plant cell, comprising

[0180] transforming a plant cell with an expression vector including a SRP encoding nucleic acid selected from the group comprising the nucleic acid homologs or parts thereof and

[0181] generating from the plant cell a transgenic plant with an increased tolerance to environmental stress as compared to a corresponding non-transformed wild type plant.

[0182] With regard to invention described here, “transformed or transgene” means all those plants or parts thereof which have been brought about by genetic manipulation methods and in which either

[0183] a1) one or more genes, preferably encoded by one or more nucleic acid sequences as shown in Table I, column 4 and 5 and/or a homolog thereof, or

[0184] a2) a genetic regulatory element, for example a promoter, which is functionally linked e.g. to the nucleic acid sequence as shown in Table I, column 4 and 5 and/or a homolog thereof, or and

[0185] b) is/are not present in its/their natural genetic environment or has/have been modified by means of genetic manipulation methods, it being possible for the modification to be, by way of example, a substitution, addition, deletion, inversion or insertion of one or more nucleotide radicals.

[0186] “Natural genetic environment” means the natural chromosomal locus in the organism of origin or the presence in a genomic library. In the case of a genomic library, the natural, genetic environment of the nucleic acid sequence is preferably at least partially still preserved. The environment flanks the nucleic acid sequence at least on one side and has a sequence length of at least 50 bp, preferably at least 500 bp, particularly preferably at least 1000 bp, very particularly preferably at least 5000 bp.

[0187] In said method for producing a transgenic plant comprising an SRP, the SRP coding nucleic acid is selected from the group comprising the nucleic acid shown in Table I, column 4 and 5 and/or homologs of the afore mentioned sequences. Further, the SRP coding nucleic acid used in the said method is at least about 50% homologous to one of the nucleic acid shown in Table I, column 4 and 5.

[0188] A plant or plant cell is considered “true breeding” for a particular trait if it is genetically homozygous for that trait to the extent that, when the true-breeding plant is self-pollinated, a significant amount of independent segregation of the trait among the progeny is not observed. In the present invention, the trait arises from the transgenic expression of one or more DNA sequences introduced into a plant cell or plant.

[0189] The present invention also provides methods of modifying stress tolerance of a plant comprising, modifying the level of expression of a SRP nucleic acid in the plant. The invention provides one method of producing a transgenic plant with a synthetic, novel or modified transcription factor that acts by increasing the transcription of a SRP gene. Theoretically it is also possible to obtain a decrease in expression of the gene.

[0190] A method of detecting environmental stress in plant cells or plants comprising screening the plant cells for increased tolerance and/or resistance to environmental stress as compared to non-stress conditions is also in the scope of the invention.

[0191] Further a method of screening plant cells or plants for increased tolerance and/or resistance to environmental stress comprising screening the plant cells under stress conditions as compared to non-stress conditions is encompassed in the invention.

[0192] The present invention also encloses a method of breeding plant cells or plants towards increased tolerance and/or resistance to environmental stress comprising screening the plant cells under stress conditions for increased tolerance and/or resistance to environmental stress as compared to non-stress conditions and selecting those with increased tolerance and/or resistance to environmental stress.

[0193] The present invention also encompasses the use of increased tolerance and/or resistance to environmental stress and/or a SRP encoding nucleic acid selected from the group comprising the nucleic acid shown in Table I, column 4 and 5 and/or homologs of the afore mentioned sequences or parts thereof as markers for selection of plants or plant cells with increased tolerance to environmental stress.

[0194] The present invention further encompasses the use of increased tolerance and/or resistance to environmental stress and/or a SRP encoding nucleic acid selected from the group comprising the nucleic acid shown in Table I, column 4 and 5 and/or homologs of the afore mentioned sequences or parts thereof as markers for detection of stress in plants or plant cells.

[0195] The present invention also provides methods of modifying stress tolerance of a crop plant comprising utilizing a SRP coding nucleic acid sequence to identify individual plants in populations segregating for either increased or decreased environmental stress tolerance (DNA marker).

[0196] In the said method of modifying stress tolerance of a plant the SRP encoding nucleic acid may be selected from the group comprising the nucleic acid shown in Table I, column 4 and 5 and/or homologs of the afore mentioned sequences. Further the SRP coding nucleic acid used therein may at least about 50% homologous to one of the nucleic acid shown in Table I, column 4 and 5. Also an expression vector as described in the present invention might be used in the said method.

[0197] In a variant method of said method of modifying stress tolerance, the plant is transformed with an inducible promoter that directs expression of the SRP. For example, the promoter is tissue specific. In a variant method, the used promoter is developmentally regulated.

[0198] In a further embodiment, the method of modifying stress tolerance comprises one or more of the following steps:

[0199] a) stabilizing a protein conferring the increased expression of a protein encoded by the nucleic acid molecule of the invention or of the polypeptide of the invention having the herein-mentioned activity of increasing tolerance and/or resistance to environmental stress as compared to a corresponding non-transformed wild type plant cell;

[0200] b) stabilizing a mRNA conferring the increased expression of a protein encoded by the nucleic acid molecule of the invention or its homologs or of a mRNA encoding the polypeptide of the present invention having the herein-mentioned activity of increasing tolerance and/or resistance to environmental stress as compared to a corresponding non-transformed wild type plant cell;

[0201] c) increasing the specific activity of a protein conferring the increased expression of a protein encoded by the nucleic acid molecule of the invention or of the polypeptide of the present invention or decreasing the inhibitory regulation of the polypeptide of the invention;

[0202] d) generating or increasing the expression of an endogenous or artificial transcription factor mediating the expression of a protein conferring the increased expression of a protein encoded by the nucleic acid molecule of the invention or of the polypeptide of the invention having the herein-mentioned activity of increasing tolerance and/or resistance to environmental stress as compared to a corresponding non-transformed wild type plant cell;

[0203] e) stimulating activity of a protein conferring the increased expression of a protein encoded by the nucleic acid molecule of the present invention or a polypeptide of the present invention having the herein-mentioned activity of increasing the tolerance and/or resistance to environmental stress by adding one or more exogenous inducing factors to the organisms or parts thereof;

[0204] f) expressing a transgenic gene encoding a protein conferring the increased expression of a polypeptide encoded by the nucleic acid molecule of the present invention or a polypeptide of the present invention, having the herein-mentioned activity of increasing tolerance and/or resistance to environmental stress as compared to a corresponding non-transformed wild type plant cell; and/or

[0205] g) increasing the copy number of a gene conferring the increased expression of a nucleic acid molecule encoding a polypeptide encoded by the nucleic acid molecule of the invention or the polypeptide of the invention having the herein-mentioned activity of increasing tolerance and/or resistance to environmental stress as compared to a corresponding non-transformed wild type plant cell;

[0206] h) increasing the expression of the endogenous gene encoding the polypeptide of the invention or its homologs by adding positive expression or removing negative expression elements, e.g. homologous recombination can be used to either introduce positive regulatory elements like for plants the 35S enhancer into the promoter or to remove repressor elements form regulatory regions. Further gene conversion methods can be used to disrupt repressor elements or to enhance to activity of positive elements-positive elements can be randomly introduced in plants by T-DNA or transposon mutagenesis and lines can be identified in which the positive elements have be integrated near to a gene of the invention, the expression of which is thereby enhanced; and/or

[0207] i) modulating growth conditions of the plant in such a manner, that the expression or activity of the gene encoding the protein of the invention or the protein itself is enhanced;

[0208] j) selecting of organisms with especially high activity of the proteins of the invention from natural or from mutagenized resources and breeding them into the target organisms, eg the elite crops.

[0209] Preferably, said mRNA is the nucleic acid molecule of the present invention and/or the protein conferring the increased expression of a protein encoded by the nucleic acid molecule of the present invention or the polypeptide having the herein mentioned activity is the polypeptide of the present invention, e.g. conferring increased tolerance to environmental stress.

[0210] In general, the amount of mRNA, polynucleotide or nucleic acid molecule in a cell or a compartment of an organism correlates with the amount of encoded protein and thus with the overall activity of the encoded protein in said volume. Said correlation is not always linear, the activity in the volume is dependent on the stability of the molecules, the degradation of the molecules or the presence of activating or inhibiting co-factors. Further, product and educt inhibitions of enzymes are well known, e.g. Zinser et al. “Enzyminhibitoren/Enzyme inhibitors”.

[0211] The activity of the abovementioned proteins and/or polypeptide encoded by the nucleic acid molecule of the present invention can be increased in various ways. For example, the activity in an organism or in a part thereof, like a cell, is increased via increasing the gene product number, e.g. by increasing the expression rate, like introducing a stronger promoter, or by increasing the stability of the mRNA expressed, thus increasing the translation rate, and/or increasing the stability of the gene product, thus reducing the proteins decayed. Further, the activity or turnover of enzymes can be influenced in such a way that a reduction or increase of the reaction rate or a modification (reduction or increase) of the affinity to the substrate results, is reached. A mutation in the catalytic centre of an polypeptide of the invention, e.g. as enzyme, can modulate the turn over rate of the enzyme, e.g. a knock out of an essential amino acid can lead to a reduced or completely knock out activity of the enzyme, or the deletion or mutation of regulator binding sites can reduce a negative regulation like a feedback inhibition (or a substrate inhibition, if the substrate level is also increased). The specific activity of an enzyme of the present invention can be increased such that the turn over rate is increased or the binding of a co-factor is improved. Improving the stability of the encoding mRNA or the protein can also increase the activity of a gene product. The stimulation of the activity is also under the scope of the term “increased activity”.

[0212] Moreover, the regulation of the abovementioned nucleic acid sequences may be modified so that gene expression is increased. This can be achieved advantageously by means of heterologous regulatory sequences or by modifying, for example mutating, the natural regulatory sequences which are present. The advantageous methods may also be combined with each other.

[0213] In general, an activity of a gene product in an organism or part thereof, in particular in a plant cell, a plant, or a plant tissue or a part thereof or in a microorganism can be increased by increasing the amount of the specific encoding mRNA or the corresponding protein in said organism or part thereof. “Amount of protein or mRNA” is understood as meaning the molecule number of polypeptides or mRNA molecules in an organism, a tissue, a cell or a cell compartment. “Increase” in the amount of a protein means the quantitative increase of the molecule number of said protein in an organism, a tissue, a cell or a cell compartment or part thereof—for example by one of the methods described herein below—in comparison to a wild type, control or reference.

[0214] The increase in molecule number amounts preferably to at least 1%, preferably to more than 10%, more preferably to 30% or more, especially preferably to 50%, 70% or more, very especially preferably to 100%, most preferably to 500% or more. However, a de novo expression is also regarded as subject of the present invention.

[0215] A modification, i.e. an increase or decrease, can be caused by endogenous or exogenous factors. For example, an increase in activity in an organism or a part thereof can be caused by adding a gene product or a precursor or an activator or an agonist to the media or nutrition or can be caused by introducing said subjects into a organism, transient or stable.

[0216] In one embodiment the increase or decrease in tolerance and/or resistance to environmental stress as compared to a corresponding non-transformed wild type plant cell in the plant or a part thereof, e.g. in a cell, a tissue, a organ, an organelle etc., is achieved by increasing the endogenous level of the polypeptide of the invention. Accordingly, in an embodiment of the present invention, the present invention relates to a process wherein the gene copy number of a gene encoding the polynucleotide or nucleic acid molecule of the invention is increased. Further, the endogenous level of the polypeptide of the invention can for example be increased by modifying the transcriptional or translational regulation of the polypeptide.

[0217] In one embodiment the increased tolerance and/or resistance to environmental stress in the plant or part thereof can be altered by targeted or random mutagenesis of the endogenous genes of the invention. For example homologous recombination can be used to either introduce positive regulatory elements like for plants the 35S enhancer into the promoter or to remove repressor elements form regulatory regions. In addition gene conversion like methods described by Kochevenko and Willmitzer (Plant Physiol. 2003 May; 132(1):174-84) and citations therein can be used to disrupt repressor elements or to enhance to activity of positive regulatory elements.

[0218] Furthermore positive elements can be randomly introduced in (plant) genomes by T-DNA or transposon mutagenesis and lines can be screened for, in which the positive elements has be integrated near to a gene of the invention, the expression of which is thereby enhanced. The activation of plant genes by random integrations of enhancer elements has been described by Hayashi et al., 1992 (Science 258:1350-1353) or Weigel et al., 2000 (Plant Physiol. 122, 1003-1013) and others citated therein.

[0219] Reverse genetic strategies to identify insertions (which eventually carrying the activation elements) near in genes of interest have been described for various cases eg. Krysan et al., 1999 (Plant Cell 1999, 11, 2283-2290); Sessions et al., 2002 (Plant Cell 2002, 14, 2985-2994); Young et al., 2001, (Plant Physiol. 2001, 125, 513-518); Koprek et al., 2000 (Plant J. 2000, 24, 253-263); Jeon et al., 2000 (Plant J. 2000, 22, 561-570); Tissier et al., 1999 (Plant Cell 1999, 11, 1841-1852); Speulmann et al., 1999 (Plant Cell 1999, 11, 1853-1866). Briefly material from all plants of a large T-DNA or transposon mutagenized plant population is harvested and genomic DNA prepared. Then the genomic DNA is pooled following specific architectures as described for example in Krysan et al., 1999 (Plant Cell 1999, 11, 2283-2290). Pools of genomics DNAs are then screened by specific multiplex PCR reactions detecting the combination of the insertional mutagen (eg T-DNA or Transposon) and the gene of interest. Therefore PCR reactions are run on the DNA pools with specific combinations of T-DNA or transposon border primers and gene specific primers. General rules for primer design can again be taken from Krysan et al., 1999 (Plant Cell 1999, 11, 2283-2290) Rescreening of lower levels DNA pools lead to the identification of individual plants in which the gene of interest is activated by the insertional mutagen.

[0220] The enhancement of positive regulatory elements or the disruption or weaking of negative regulatory elements can also be achieved through common mutagenesis techniques: The production of chemically or radiation mutated populations is a common technique and known to the skilled worker. Methods for plants are described by Koorneef et al. 1982 and the citations therein and by Lightner and Caspar in “Methods in Molecular Biology” Vol 82. These techniques usually induce pointmutations that can be identified in any known gene using methods such as TILLING (Colbert et al. 2001).

[0221] Accordingly, the expression level can be increased if the endogenous genes encoding a polypeptide conferring an increased expression of the polypeptide of the present invention, in particular genes comprising the nucleic acid molecule of the present invention, are modified via homologous recombination, Tilling approaches or gene conversion

[0222] Regulatory sequences can be operatively linked to the coding region of an endogenous protein and control its transcription and translation or the stability or decay of the encoding mRNA or the expressed protein. In order to modify and control the expression, promoter, UTRs, splicing sites, processing signals, polyadenylation sites, terminators, enhancers, repressors, post transcriptional or posttranslational modification sites can be changed, added or amended For example, the activation of plant genes by random integrations of enhancer elements has been described by Hayashi et al., 1992 (Science 258:1350-1353) or Weigel et al., 2000 (Plant Physiol. 122, 1003-1013) and others cited therein. For example, the expression level of the endogenous protein can be modulated by replacing the endogenous promoter with a stronger transgenic promoter or by replacing the endogenous 3′UTR with a 3′UTR, which provides more stability without amending the coding region. Further, the transcriptional regulation can be modulated by introduction of a artificial transcription factor as described in the examples. Alternative promoters, terminators and UTRs are described below.

[0223] The activation of an endogenous polypeptide having above-mentioned activity, e.g. conferring an increased tolerance to environmental stress can also be increased by introducing a synthetic transcription factor, which binds close to the coding region of the protein of the invention encoding gene and activates its transcription. A chimeric zinc finger protein can be construed, which comprises a specific DNA-binding domain and an activation domain as e.g. the VP16 domain of Herpes Simplex virus. The specific binding domain can bind to the regulatory region of the protein coding region. The expression of the chimeric transcription factor in a plant leads to a specific expression of the protein of the invention, see e.g. in WO01/52620, Oriz, Proc. Natl. Acad. Sci. USA, 2002, Vol. 99, 13290 or Guan, Proc. Natl. Acad. Sci. USA, 2002, Vol. 99, 13296.

[0224] In one further embodiment of the method according to the invention, plants are used in which one of the abovementioned genes, or one of the abovementioned nucleic acids, is mutated in a way that the activity of the encoded gene products is less influenced by cellular factors, or not at all, in comparison with the unmutated proteins. For example, well known regulation mechanism of enzymic activity are substrate inhibition or feed back regulation mechanisms. Ways and techniques for the introduction of substitutions, deletions and additions of one or more bases, nucleotides or amino acids of a corresponding sequence are described herein below in the corresponding paragraphs and the references listed there, e.g. in Sambrook et al., Molecular Cloning, Cold Spring Habour, N.Y., 1989. The person skilled in the art will be able to identify regulation domains and binding sites of regulators by comparing the sequence of the nucleic acid molecule of the present invention or the expression product thereof with the state of the art by computer software means which comprise algorithms for the identifying of binding sites and regulation domains or by introducing into a nucleic acid molecule or in a protein systematically mutations and assaying for those mutations which will lead to an increased specify activity or an increased activity per volume, in particular per cell.

[0225] It is therefore advantageously to express in a plant a nucleic acid molecule of the invention or a polypeptide of the invention derived from a evolutionary distantly related organism, as e.g. using a prokaryotic gene in a eukaryotic host, as in these cases the regulation mechanism of the host cell may not weaken the activity (cellular or specific) of the gene or its expression product

[0226] The mutation is introduced in such a way that the production of the amino acids is not adversely affected.

[0227] Less influence on the regulation of a gene or its gene product is understood as meaning a reduced regulation of the enzymatic activity leading to an increased specific or cellular activity of the gene or its product. An increase of the enzymatic activity is understood as meaning an enzymatic activity, which is increased by at least 10%, advantageously at least 20, 30 or 40%, especially advantageously by at least 50, 60 or 70% in comparison with the starting organism.

[0228] The invention provides that the above methods can be performed such that the stress tolerance is increased. It is also possible to obtain a decrease in stress tolerance.

[0229] The invention is not limited to specific nucleic acids, specific polypeptides, specific cell types, specific host cells, specific conditions or specific methods etc. as such, but may vary and numerous modifications and variations therein will be apparent to those skilled in the art. It is also to be understood that the terminology used herein is for the purpose of describing specific embodiments only and is not intended to be limiting.

[0230] The present invention also relates in one embodiment to isolated Stress Related Proteins (SRP) which are selected from the group comprising the proteins as shown in Table II, column 4 and 5 and/or homologs thereof. Preferably, the isolated Stress Related Proteins (SRP) of the present invention are selected from the group comprising the polypeptides as shown in Table II B, column 5. Further, the present invention is related to isolated Stress Related Protein (SRP) encoding nucleic acids selected from the group comprising the nucleic acid as shown in Table I, column 4 and 5 and/or homologs thereof. Here, preferably, an isolated Stress Related Protein (SRP) encoding nucleic acid encodes an SRP which is selected from yeast or E. coli and/or Brassica napus, Glycine max, Zea mays, Triticum aestivum or Oryza sativa, more preferably as shown in Table II B, column 5.

[0231] The present invention also relates in an other embodiment to isolated Stress Related Proteins (SRP) which are selected from the group comprising the proteins as shown in Table II, column 4 and 5 and/or homologs thereof. Preferably, the isolated Stress Related Proteins (SRP) of the present invention are selected from the group comprising the polypeptides as shown in Table II B, column 5. Further, the present invention is related to isolated Stress Related Protein (SRP) encoding nucleic acids selected from the group comprising the nucleic acid as shown in Table I, column 4 and 5 and/or homologs thereof. Here, preferably, an isolated Stress Related Protein (SRP) encoding nucleic acid encodes an SRP which is selected from yeast or E. coli and/or Brassica napus, Glycine max, Zea mays, Hordeum vulgare, Helianthus annuus, Linum usitatissimum, Hordeum vulgare, Helianthus annuus, Linum usitatissimum, Triticum aestivum or Oryza sativa, more preferably as shown in Table II B, column 5.

[0232] In one embodiment the present invention provides stress related gene sequences selected from the group consisting of the nucleic acid of as shown in Table I, column 4 and 5 of yeast, preferably from Saccharomyces cerevisiae or E. coli and/or as shown in Table I B, column 5 and/or homologs thereof, preferably from Brassica napus, Glycine max, Zea mays, Triticum aestivum or Oryza sativa.

[0233] In an other embodiment the present invention provides stress related gene sequences selected from the group consisting of the nucleic acid of as shown in Table I, column 4 and 5 of yeast, preferably from Saccharomyces cerevisiae or E. coli and/or as shown in Table I B, column 5 and/or homologs thereof, preferably from Brassica napus, Glycine max, Zea mays, Hordeum vulgare, Helianthus annuus, Linum usitatissimum, Hordeum vulgare, Helianthus annuus, Linum usitatissimum, Triticum aestivum or Oryza sativa.

[0234] Homologs of the aforementioned sequences can be isolated advantageously from yeast, fungi, viruses, algae, bacteria, such as Acetobacter (subgen. Acetobacter) aceti; Acidithiobacillus ferrooxidans; Acinetobacter sp.; Actinobacillus sp; Aeromonas salmonicida; Agrobacterium tumefaciens; Aquifex aeolicus; Arcanobacterium pyogenes; Aster yellows phytoplasma; Bacillus sp.; Bifidobacterium sp.; Borrelia burgdorferi; Brevibacterium linens; Brucella melitensis; Buchnera sp.; Butyrivibrio fibrisolvens; Campylobacter jejuni; Caulobacter crescentus; Chlamydia sp.; Chlamydophila sp.; Chlorobium limicola; Citrobacter rodentium; Clostridium sp.; Comamonas testosteroni; Corynebacterium sp.; Coxiella burnetii; Deinococcus radiodurans; Dichelobacter nodosus; Edwardsiella ictaluri; Enterobacter sp.; Erysipelothrix rhusiopathiae; Escherichia coli; Flavobacterium sp.; Francisella tularensis; Frankia sp. Cpl1; Fusobacterium nucleatum; Geobacillus stearothermophilus; Gluconobacter oxydans; Haemophilus sp.; Helicobacter pylori; Klebsiella pneumoniae; Lactobacillus sp.; Lactococcus lactis; Listeria sp.; Mannheimia haemolytica; Mesorhizobium loti; Methylophaga thalassica; Microcystis aeruginosa; Microscilla sp. PRE1; Moraxella sp. TA144; Mycobacterium sp.; Mycoplasma sp.; Neisseria sp.; Nitrosomonas sp.; Nostoc sp. PCC 7120; Novosphingobium aromaticivorans; Oenococcus oeni; Pantoea citrea; Pasteurella multocida; Pediococcus pentosaceus; Phormidium foveolarum; Phytoplasma sp.; Plectonema boryanum; Prevotella ruminicola; Propionibacterium sp.; Proteus vulgaris; Pseudomonas sp.; Ralstonia sp.; Rhizobium sp.; Rhodococcus equi; Rhodothermus marinus; Rickettsia sp.; Riemerella anatipestifer; Ruminococcus flavefaciens; Salmonella sp.; Selenomonas ruminantium; Serratia entomophila; Shigella sp.; Sinorhizobium meliloti; Staphylococcus sp.; Streptococcus sp.; Streptomyces sp.; Synechococcus sp.; Synechocystis sp. PCC 6803; Thermotoga maritima; Treponema sp.; Ureaplasma urealyticum; Vibrio cholerae; Vibrio parahaemolyticus; Xylella fastidiosa; Yersinia sp.; Zymomonas mobilis, preferably Salmonella sp. or Escherichia coli or plants, preferably from yeasts such as from the genera Saccharomyces, Pichia, Candida, Hansenula, Torulopsis or Schizosaccharomyces or plants such as Arabidopsis thaliana, maize, wheat, rye, oat, triticale, rice, barley, soybean, peanut, cotton, borage, sufflower, linseed, primrose, rapeseed, canola and turnip rape, manihot, pepper, sunflower, tagetes, solanaceous plant such as potato, tobacco, eggplant and tomato, Vicia species, pea, alfalfa, bushy plants such as coffee, cacao, tea, Salix species, trees such as oil palm, coconut, perennial grass, such as ryegrass and fescue, and forage crops, such as alfalfa and clover and from spruce, pine or fir for example. More preferably homologs of aforementioned sequences can be isolated from Saccharomyces cerevisiae, E. coli or plants, preferably Brassica napus, Glycine max, Zea mays, Triticum aestivum or Oryza sativa or preferably Brassica napus, Glycine max, Zea mays, Hordeum vulgare, Helianthus annuus, Linum usitatissimum, Hordeum vulgare, Helianthus annuus, Linum usitatissimum, Triticum aestivum or Oryza sativa.

[0235] The stress related proteins of the present invention are preferably produced by recombinant DNA techniques. For example, a nucleic acid molecule encoding the protein is cloned into an expression vector, for example in to a binary vector, the expression vector is introduced into a host cell, for example the Arabidopsis thaliana wild type NASC N906 or any other plant cell as described in the examples see below, and the stress related protein is expressed in said host cell. Examples for binary vectors are pBIN19, pBI101, pBinAR, pGPTV, pCAMBIA, pBIB-HYG, pBecks, pGreen or pPZP (Hajukiewicz, P. et al., 1994, Plant Mol. Biol., 25: 989-994 and Hellens et al, Trends in Plant Science (2000) 5, 446-451.).

[0236] Advantageously, the nucleic acid sequences according to the invention or the gene construct together with at least one reporter gene are cloned into an expression cassette, which is introduced into the organism via a vector or directly into the genome. This reporter gene should allow easy detection via a growth, fluorescence, chemical, bioluminescence or resistance assay or via a photometric measurement. Examples of reporter genes which may be mentioned are antibiotic- or herbicide-resistance genes, hydrolase genes, fluorescence protein genes, bioluminescence genes, sugar or nucleotide metabolic genes or biosynthesis genes such as the Ura3 gene, the Ilv2 gene, the luciferase gene, the β-galactosidase gene, the gfp gene, the 2-desoxyglucose-6-phosphate phosphatase gene, the β-glucuronidase gene, β-lactamase gene, the neomycin phosphotransferase gene, the hygromycin phosphotransferase gene or the BASTA (=gluphosinate-resistance) gene. These genes permit easy measurement and quantification of the transcription activity and hence of the expression of the genes. In this way genome positions may be identified which exhibit differing productivity.

[0237] In a preferred embodiment a nucleic acid contruct, for example an expression cassette, comprises upstream, i.e. at the 5′ end of the encoding sequence, a promoter and downstream, i.e. at the 3′ end, a polyadenylation signal and optionally other regulatory elements which are operably linked to the intervening encoding sequence with the nucleic acid of as shown in Table I, column 4 and 5. By an operable linkage is meant the sequential arrangement of promoter, encoding sequence, terminator and optionally other regulatory elements in such a way that each of the regulatory elements can fulfill its function in the expression of the encoding sequence in due manner. The sequences preferred for operable linkage are targeting sequences for ensuring subcellular localization in plastids. However, targeting sequences for ensuring subcellular localization in the mitochondrium, in the endoplasmic reticulum (=ER), in the nucleus, in oil corpuscles or other compartments may also be employed as well as translation promoters such as the 5′ lead sequence in tobacco mosaic virus (Gallie et al., Nucl. Acids Res. 15 (1987), 8693-8711).

[0238] A nucleic acid construct, for example an expression cassette may, for example, contain a constitutive promoter or a tissue-specific promoter (preferably the USP or napin promoter) the gene to be expressed and the ER retention signal. For the ER retention signal the KDEL amino acid sequence (lysine, aspartic acid, glutamic acid, leucine) or the KKX amino acid sequence (lysine-lysine-X-stop, wherein X means every other known amino acid) is preferably employed.

[0239] For expression in a prokaryotic or eukaryotic host organism, for example a microorganism such as a fungus or a plant the expression cassette is advantageously inserted into a vector such as by way of example a plasmid, a phage or other DNA which allows optimum expression of the genes in the host organism. Examples of suitable plasmids are: in E. coli pLG338, pACYC184, pBR series such as e.g. pBR322, pUC series such as pUC18 or pUC19, M113 mp series, pKC30, pRep4, pHS1, pHS2, pPLc236, pMBL24, pLG200, pUR290, pIN-III¹¹³-B1, λgt11 or pBdCl; in Streptomyces pIJ101, pIJ364, pIJ702 or pIJ361; in Bacillus pUB110, pC194 or pBD214; in Corynebacterium pSA77 or pAJ667; in fungi pALS1, pIL2 or pBB116; other advantageous fungal vectors are described by Romanos, M. A. et al., [(1992) “Foreign gene expression in yeast: a review”, Yeast 8: 423-488] and by van den Hondel, C. A. M. J. J. et al. [(1991) “Heterologous gene expression in filamentous fungi” as well as in More Gene Manipulations in Fungi [J. W. Bennet & L. L. Lasure, eds., pp. 396-428: Academic Press: San Diego] and in “Gene transfer systems and vector development for filamentous fungi” [van den Hondel, C. A. M. J. J. & Punt, P. J. (1991) in: Applied Molecular Genetics of Fungi, Peberdy, J. F. et al., eds., pp. 1-28, Cambridge University Press: Cambridge]. Examples of advantageous yeast promoters are 2 μM, pAG-1, YEp6, YEp13 or pEMBLYe23. Examples of algal or plant promoters are pLGV23, pGHlac⁺, pBIN19, pAK2004, pVKH or pDH51 (see Schmidt, R. and Willmitzer, L., 1988). The vectors identified above or derivatives of the vectors identified above are a small selection of the possible plasmids. Further plasmids are well known to those skilled in the art and may be found, for example, in the book Cloning Vectors (Eds. Pouwels P. H. et al. Elsevier, Amsterdam-New York-Oxford, 1985 ISBN 0 444 904018). Suitable plant vectors are described inter alia in “Methods in Plant Molecular Biology and Biotechnology” (CRC Press), Ch. 6/7, pp. 71-119. Advantageous vectors are known as shuttle vectors or binary vectors which replicate in E. coli and Agrobacterium.

[0240] By vectors is meant with the exception of plasmids all other vectors known to those skilled in the art such as by way of example phages, viruses such as SV40, CMV, baculovirus, adenovirus, transposons, IS elements, phasmids, phagemids, cosmids, linear or circular DNA. These vectors can be replicated autonomously in the host organism or be chromosomally replicated, chromosomal replication being preferred.

[0241] In a further embodiment of the vector the expression cassette according to the invention may also advantageously be introduced into the organisms in the form of a linear DNA and be integrated into the genome of the host organism by way of heterologous or homologous recombination. This linear DNA may be composed of a linearized plasmid or only of the expression cassette as vector or the nucleic acid sequences according to the invention.

[0242] In a further advantageous embodiment the nucleic acid sequence according to the invention can also be introduced into an organism on its own.

[0243] If in addition to the nucleic acid sequence according to the invention further genes are to be introduced into the organism, all together with a reporter gene in a single vector or each single gene with a reporter gene in a vector in each case can be introduced into the organism, whereby the different vectors can be introduced simultaneously or successively.

[0244] The vector advantageously contains at least one copy of the nucleic acid sequences according to the invention and/or the expression cassette (=gene construct) according to the invention.

[0245] The invention further provides an isolated recombinant expression vector comprising a SRP nucleic acid as described above, wherein expression of the vector in a host cell results in increased tolerance to environmental stress as compared to a wild type variety of the host cell. As used herein, the term “vector” refers to a nucleic acid molecule capable of transporting another nucleic acid to which it has been linked. One type of vector is a “plasmid,” which refers to a circular double stranded DNA loop into which additional DNA segments can be ligated. Another type of vector is a viral vector, wherein additional DNA segments can be ligated into the viral genome. Certain vectors are capable of autonomous replication in a host cell into which they are introduced (e.g., bacterial vectors having a bacterial origin of replication and episomal mammalian vectors). Other vectors (e.g., non-episomal mammalian vectors) are integrated into the genome of a host cell upon introduction into the host cell, and thereby are replicated along with the host genome. Moreover, certain vectors are capable of directing the expression of genes to which they are operatively linked. Such vectors are referred to herein as “expression vectors.” In general, expression vectors of utility in recombinant DNA techniques are often in the form of plasmids. In the present specification, “plasmid” and “vector” can be used interchangeably as the plasmid is the most commonly used form of vector. However, the invention is intended to include such other forms of expression vectors, such as viral vectors (e.g., replication defective retroviruses, adenoviruses, and adeno-associated viruses), which serve equivalent functions.

[0246] The recombinant expression vectors of the invention comprise a nucleic acid of the invention in a form suitable for expression of the nucleic acid in a host cell, which means that the recombinant expression vectors include one or more regulatory sequences, selected on the basis of the host cells to be used for expression, which is operatively linked to the nucleic acid sequence to be expressed. As used herein with respect to a recombinant expression vector, “operatively linked” is intended to mean that the nucleotide sequence of interest is linked to the regulatory sequence(s) in a manner which allows for expression of the nucleotide sequence (e.g., in an in vitro transcription/translation system or in a host cell when the vector is introduced into the host cell). The term “regulatory sequence” is intended to include promoters, enhancers, and other expression control elements (e.g., polyadenylation signals). Such regulatory sequences are described, for example, in Goeddel, Gene Expression Technology: Methods in Enzymology 185, Academic Press, San Diego, Calif. (1990) and Gruber and Crosby, in: Methods in Plant Molecular Biology and Biotechnology, eds. Glick and Thompson, Chapter 7, 89-108, CRC Press: Boca Raton, Fla., including the references therein. Regulatory sequences include those that direct constitutive expression of a nucleotide sequence in many types of host cells and those that direct expression of the nucleotide sequence only in certain host cells or under certain conditions. It will be appreciated by those skilled in the art that the design of the expression vector can depend on such factors as the choice of the host cell to be transformed, the level of expression of polypeptide desired, etc. The expression vectors of the invention can be introduced into host cells to thereby produce polypeptides or peptides, including fusion polypeptides or peptides, encoded by nucleic acids as described herein (e.g., SRPs, mutant forms of SRPs, fusion polypeptides, etc.).

[0247] The recombinant expression vectors of the invention can be designed for expression of SRPs in prokaryotic or eukaryotic cells. For example, SRP genes can be expressed in bacterial cells such as C. glutamicum, insect cells (using baculovirus expression vectors), yeast and other fungal cells (See Romanos, M. A. et al., 1992, Foreign gene expression in yeast: a review, Yeast 8:423-488; van den Hondel, C. A. M. J. J. et al., 1991, Heterologous gene expression in filamentous fungi, in: More Gene Manipulations in Fungi, J. W. Bennet & L. L. Lasure, eds., p. 396-428: Academic Press: San Diego; and van den Hondel, C. A. M. J. J. & Punt, P. J., 1991, Gene transfer systems and vector development for filamentous fungi, in: Applied Molecular Genetics of Fungi, Peberdy, J. F. et al., eds., p. 1-28, Cambridge University Press: Cambridge), algae (Falciatore et al., 1999, Marine Biotechnology 1(3):239-251), ciliates of the types: Holotrichia, Peritrichia, Spirotrichia, Suctoria, Tetrahymena, Paramecium, Colpidium, Glaucoma, Platyophrya, Potomacus, Pseudocohnilembus, Euplotes, Engelmaniella, and Stylonychia, especially of the genus Stylonychia lemnae with vectors following a transformation method as described in PCT Application No. WO 98/01572, and multicellular plant cells (See Schmidt, R. and Willmitzer, L., 1988, High efficiency Agrobacterium tumefaciens-mediated transformation of Arabidopsis thaliana leaf and cotyledon explants, Plant Cell Rep. 583-586; Plant Molecular Biology and Biotechnology, C Press, Boca Raton, Fla., chapter 6/7, S.71-119 (1993); F. F. White, B. Jenes et al., Techniques for Gene Transfer, in: Transgenic Plants, Vol. 1, Engineering and Utilization, eds. Kung und R. Wu, 128-43, Academic Press: 1993; Potrykus, 1991, Annu. Rev. Plant Physiol. Plant Molec. Biol. 42:205-225 and references cited therein) or mammalian cells. Suitable host cells are discussed further in Goeddel, Gene Expression Technology: Methods in Enzymology 185, Academic Press: San Diego, Calif. (1990). Alternatively, the recombinant expression vector can be transcribed and translated in vitro, for example using T7 promoter regulatory sequences and T7 polymerase.

[0248] Expression of polypeptides in prokaryotes is most often carried out with vectors containing constitutive or inducible promoters directing the expression of either fusion or non-fusion polypeptides. Fusion vectors add a number of amino acids to a polypeptide encoded therein, usually to the amino terminus of the recombinant polypeptide but also to the C-terminus or fused within suitable regions in the polypeptides. Such fusion vectors typically serve three purposes: 1) to increase expression of a recombinant polypeptide; 2) to increase the solubility of a recombinant polypeptide; and 3) to aid in the purification of a recombinant polypeptide by acting as a ligand in affinity purification. Often, in fusion expression vectors, a proteolytic cleavage site is introduced at the junction of the fusion moiety and the recombinant polypeptide to enable separation of the recombinant polypeptide from the fusion moiety subsequent to purification of the fusion polypeptide. Such enzymes, and their cognate recognition sequences, include Factor Xa, thrombin, and enterokinase.

[0249] By way of example the plant expression cassette can be installed in the pRT transformation vector ((a) Toepfer et al., 1993, Methods Enzymol., 217: 66-78; (b) Toepfer et al. 1987, Nucl. Acids. Res. 15: 5890 ff.).

[0250] Alternatively, a recombinant vector (=expression vector) can also be transcribed and translated in vitro, e.g. by using the T7 promoter and the T7 RNA polymerase.

[0251] Expression vectors employed in prokaryotes frequently make use of inducible systems with and without fusion proteins or fusion oligopeptides, wherein these fusions can ensue in both N-terminal and C-terminal manner or in other useful domains of a protein. Such fusion vectors usually have the following purposes: i.) to increase the RNA expression rate; ii.) to increase the achievable protein synthesis rate; iii.) to increase the solubility of the protein; iv.) or to simplify purification by means of a binding sequence usable for affinity chromatography. Proteolytic cleavage points are also frequently introduced via fusion proteins, which allow cleavage of a portion of the fusion protein and purification. Such recognition sequences for proteases are recognized, e.g. factor Xa, thrombin and enterokinase.

[0252] Typical advantageous fusion and expression vectors are pGEX [Pharmacia Biotech Inc; Smith, D. B. and Johnson, K. S. (1988) Gene 67: 31-40], pMAL (New England Biolabs, Beverly, Mass.) and pRIT5 (Pharmacia, Piscataway, N.J.) which contains glutathione S-transferase (GST), maltose binding protein or protein A.

[0253] In one embodiment, the coding sequence of the SRP is cloned into a pGEX expression vector to create a vector encoding a fusion polypeptide comprising, from the N-terminus to the C-terminus, GST-thrombin cleavage site-X polypeptide. The fusion polypeptide can be purified by affinity chromatography using glutathione-agarose resin. Recombinant PKSRP unfused to GST can be recovered by cleavage of the fusion polypeptide with thrombin.

[0254] Other examples of E. coli expression vectors are pTrc [Amann et al., (1988) Gene 69:301-315] and pET vectors [Studier et al., Gene Expression Technology: Methods in Enzymology 185, Academic Press, San Diego, Calif. (1990) 60-89; Stratagene, Amsterdam, The Netherlands].

[0255] Target gene expression from the pTrc vector relies on host RNA polymerase transcription from a hybrid trp-lac fusion promoter. Target gene expression from the pET 11d vector relies on transcription from a T7 gn10-lac fusion promoter mediated by a co-expressed viral RNA polymerase (T7 gn1). This viral polymerase is supplied by host strains BL21(DE3) or HMS174(DE3) from a resident λ prophage harboring a T7 gn1 gene under the transcriptional control of the lacUV 5 promoter.

[0256] One strategy to maximize recombinant polypeptide expression is to express the polypeptide in a host bacteria with an impaired capacity to proteolytically cleave the recombinant polypeptide (Gottesman, S., Gene Expression Technology: Methods in Enzymology 185, Academic Press, San Diego, Calif. (1990) 119-128). Another strategy is to alter the sequence of the nucleic acid to be inserted into an expression vector so that the individual codons for each amino acid are those preferentially utilized in the bacterium chosen for expression, such as C. glutamicum (Wada et al., 1992, Nucleic Acids Res. 20:2111-2118). Such alteration of nucleic acid sequences of the invention can be carried out by standard DNA synthesis techniques.

[0257] Other advantageous vectors for use in yeast are pYepSec1 (Baldari, et al., (1987) Embo J. 6:229-234), pMFa (Kurjan and Herskowitz, (1982) Cell 30:933-943), pJRY88 (Schultz et al., (1987) Gene 54:113-123), and pYES derivatives (Invitrogen Corporation, San Diego, Calif.). Vectors for use in filamentous fungi are described in: van den Hondel, C. A. M. J. J. & Punt, P. J. (1991) “Gene transfer systems and vector development for filamentous fungi”, in: Applied Molecular Genetics of Fungi, J. F. Peberdy, et al., eds., pp. 1-28, Cambridge University Press: Cambridge.

[0258] Alternatively, insect cell expression vectors can also be advantageously utilized, e.g. for expression in Sf 9 cells. These are e.g. the vectors of the pAc series (Smith et al. (1983) Mol. Cell. Biol. 3:2156-2165) and the pVL series (Lucklow and Summers (1989) Virology 170:31-39).

[0259] Furthermore, plant cells or algal cells can advantageously be used for gene expression. Examples of plant expression vectors may be found in Becker, D., et al. (1992) “New plant binary vectors with selectable markers located proximal to the left border”, Plant Mol. Biol. 20: 1195-1197 or in Bevan, M. W. (1984) “Binary Agrobacterium vectors for plant transformation”, Nucl. Acid. Res. 12: 8711-8721.

[0260] Furthermore, the nucleic acid sequences may also be expressed in mammalian cells, advantageously in nonhuman mammalian cells. Examples of corresponding expression vectors are pCDM8 and pMT2PC referred to in: Seed, B. (1987) Nature 329:840 or Kaufman et al. (1987) EMBO J. 6: 187-195). At the same time promoters preferred for use are of viral origin, such as by way of example promoters of polyoma, adenovirus 2, cytomegalovirus or simian virus 40. Other prokaryotic and eukaryotic expression systems are referred to in chapters 16 and 17 of Sambrook et al., Molecular Cloning: A Laboratory Manual. 2nd, ed., Cold Spring Harbor Laboratory, Cold Spring Harbor Laboratory Press, Cold Spring Harbor, N.Y., 1989.

[0261] In a preferred embodiment of the present invention, the SRPs are expressed in plants and plants cells such as unicellular plant cells (e.g. algae) (See Falciatore et al., 1999, Marine Biotechnology 1(3):239-251 and references therein) and plant cells from higher plants (e.g., the spermatophytes, such as crop plants). A SRP may be “introduced” into a plant cell by any means, including transfection, transformation or transduction, electroporation, particle bombardment, agroinfection, and the like. One transformation method known to those of skill in the art is the dipping of a flowering plant into an Agrobacteria solution, wherein the Agrobacteria contains the SRP nucleic acid, followed by breeding of the transformed gametes.

[0262] Other suitable methods for transforming or transfecting host cells including plant cells can be found in Sambrook, et al., Molecular Cloning: A Laboratory Manual. 2^{nd}, ed., Cold Spring Harbor Laboratory, Cold Spring Harbor Laboratory Press, Cold Spring Harbor, N.Y., 1989, and other laboratory manuals such as Methods in Molecular Biology, 1995, Vol. 44, Agrobacterium protocols, ed: Gartland and Davey, Humana Press, Totowa, N.J. As biotic and abiotic stress tolerance is a general trait wished to be inherited into a wide variety of plants like maize, wheat, rye, oat, triticale, rice, barley, soybean, peanut, cotton, rapeseed and canola, manihot, pepper, sunflower and tagetes, solanaceous plants like potato, tobacco, eggplant, and tomato, Vicia species, pea, alfalfa, bushy plants (coffee, cacao, tea), Salix species, trees (oil palm, coconut), perennial grasses, and forage crops, these crop plants are also preferred target plants for a genetic engineering as one further embodiment of the present invention. Forage crops include, but are not limited to, Wheatgrass, Canarygrass, Bromegrass, Wildrye Grass, Bluegrass, Orchardgrass, Alfalfa, Salfoin, Birdsfoot Trefoil, Alsike Clover, Red Clover, and Sweet Clover.

[0263] In one embodiment of the present invention, transfection of a SRP into a plant is achieved by Agrobacterium mediated gene transfer. Agrobacterium mediated plant transformation can be performed using for example the GV3101(pMP90) (Koncz and Schell, 1986, Mol. Gen. Genet. 204:383-396) or LBA4404 (Clontech) Agrobacterium tumefaciens strain. Transformation can be performed by standard transformation and regeneration techniques (Deblaere et al., 1994, Nucl. Acids Res. 13:4777-4788; Gelvin, Stanton B. and Schilperoort, Robert A, Plant Molecular Biology Manual, 2^{nd} Ed.—Dordrecht: Kluwer Academic Publ., 1995.—in Sect., Ringbuc Zentrale Signatur: BT11-P ISBN 0-7923-2731-4; Glick, Bernard R.; Thompson, John E., Methods in Plant Molecular Biology and Biotechnology, Boca Raton: CRC Press, 1993 360 S., ISBN 0-8493-5164-2). For example, rapeseed can be transformed via cotyledon or hypocotyl transformation (Moloney et al., 1989, Plant cell Report 8:238-242; De Block et al., 1989, Plant Physiol. 91:694-701). Use of antibiotics for Agrobacterium and plant selection depends on the binary vector and the Agrobacterium strain used for transformation. Rapeseed selection is normally performed using kanamycin as selectable plant marker. Agrobacterium mediated gene transfer to flax can be performed using, for example, a technique described by Mlynarova et al., 1994, Plant Cell Report 13:282-285. Additionally, transformation of soybean can be performed using for example a technique described in European Patent No. 0424 047, U.S. Pat. No. 5,322,783, European Patent No. 0397 687, U.S. Pat. No. 5,376,543, or U.S. Pat. No. 5,169,770. Transformation of maize can be achieved by particle bombardment, polyethylene glycol mediated DNA uptake or via the silicon carbide fiber technique. (See, for example, Freeling and Walbot “The maize handbook” Springer Verlag: New York (1993) ISBN 3-540-97826-7). A specific example of maize transformation is found in U.S. Pat. No. 5,990,387, and a specific example of wheat transformation can be found in PCT Application No. WO 93/07256.

[0264] According to the present invention, the introduced SRP may be maintained in the plant cell stably if it is incorporated into a non-chromosomal autonomous replicon or integrated into the plant chromosomes. Alternatively, the introduced SRP may be present on an extra-chromosomal non-replicating vector and be transiently expressed or transiently active.

[0265] In one embodiment, a homologous recombinant microorganism can be created wherein the SRP is integrated into a chromosome, a vector is prepared which contains at least a portion of a SRP gene into which a deletion, addition, or substitution has been introduced to thereby alter, e.g., functionally disrupt, the SRP gene. Preferably, the SRP gene is a yeast, E. coli SRP gene, but it can be a homolog from a related plant or even from a mammalian or insect source. In one embodiment, the vector is designed such that, upon homologous recombination, the endogenous SRP gene is functionally disrupted (i.e., no longer encodes a functional polypeptide; also referred to as a knock-out vector). Alternatively, the vector can be designed such that, upon homologous recombination, the endogenous SRP gene is mutated or otherwise altered but still encodes a functional polypeptide (e.g., the upstream regulatory region can be altered to thereby alter the expression of the endogenous SRP). To create a point mutation via homologous recombination, DNA-RNA hybrids can be used in a technique known as chimeraplasty (Cole-Strauss et al., 1999, Nucleic Acids Research 27(5):1323-1330 and Kmiec, 1999 Gene therapy American Scientist. 87(3):240-247). Homologous recombination procedures in Physcomitrella patens are also well known in the art and are contemplated for use herein.

[0266] Whereas in the homologous recombination vector, the altered portion of the SRP gene is flanked at its 5′ and 3′ ends by an additional nucleic acid molecule of the SRP gene to allow for homologous recombination to occur between the exogenous SRP gene carried by the vector and an endogenous SRP gene, in a microorganism or plant. The additional flanking SRP nucleic acid molecule is of sufficient length for successful homologous recombination with the endogenous gene. Typically, several hundreds of base pairs up to kilobases of flanking DNA (both at the 5′ and 3′ ends) are included in the vector. See, e.g., Thomas, K. R., and Capecchi, M. R., 1987, Cell 51:503 for a description of homologous recombination vectors or Strepp et al., 1998, PNAS, 95 (8):4368-4373 for cDNA based recombination in Physcomitrella patens). The vector is introduced into a microorganism or plant cell (e.g., via polyethylene glycol mediated DNA), and cells in which the introduced SRP gene has homologously recombined with the endogenous SRP gene are selected using art-known techniques.

[0267] In another embodiment, recombinant microorganisms can be produced that contain selected systems which allow for regulated expression of the introduced gene. For example, inclusion of a SRP gene on a vector placing it under control of the lac operon permits expression of the SRP gene only in the presence of IPTG. Such regulatory systems are well known in the art.

[0268] Whether present in an extra-chromosomal non-replicating vector or a vector that is integrated into a chromosome, the SRP polynucleotide preferably resides in a plant expression cassette. A plant expression cassette preferably contains regulatory sequences capable of driving gene expression in plant cells that are operatively linked so that each sequence can fulfill its function, for example, termination of transcription by polyadenylation signals. Preferred polyadenylation signals are those originating from Agrobacterium tumefaciens t-DNA such as the gene 3 known as octopine synthase of the Ti-plasmid pTiACH5 (Gielen et al., 1984, EMBO J. 3:835) or functional equivalents thereof but also all other terminators functionally active in plants are suitable. As plant gene expression is very often not limited on transcriptional levels, a plant expression cassette preferably contains other operatively linked sequences like translational enhancers such as the overdrive-sequence containing the 5′-untranslated leader sequence from tobacco mosaic virus enhancing the polypeptide per RNA ratio (Gallie et al., 1987, Nucl. Acids Research 15:8693-8711). Examples of plant expression vectors include those detailed in: Becker, D. et al., 1992, New plant binary vectors with selectable markers located proximal to the left border, Plant Mol. Biol. 20: 1195-1197; and Bevan, M. W., 1984, Binary Agrobacterium vectors for plant transformation, Nucl. Acid. Res. 12:8711-8721; and Vectors for Gene Transfer in Higher Plants; in: Transgenic Plants, Vol. 1, Engineering and Utilization, eds.: Kung and R. Wu, Academic Press, 1993, S. 15-38.

[0269] “Transformation” is defined herein as a process for introducing heterologous DNA into a plant cell, plant tissue, or plant. It may occur under natural or artificial conditions using various methods well known in the art. Transformation may rely on any known method for the insertion of foreign nucleic acid sequences into aprokaryotic or eukaryotic host cell. The method is selected based on the host cell being transformed and may include, but is not limited to, viral infection, electroporation, lipofection, and particle bombardment. Such “transformed” cells include stably transformed cells in which the inserted DNA is capable of replication either as an autonomously replicating plasmid or as part of the host chromosome. They also include cells which transiently express the inserted DNA or RNA for limited periods of time. Transformed plant cells, plant tissue, or plants are understood to encompass not only the end product of a transformation process, but also transgenic progeny thereof.

[0270] The terms “transformed,” “transgenic,” and “recombinant” refer to a host organism such as a bacterium or a plant into which a heterologous nucleic acid molecule has been introduced. The nucleic acid molecule can be stably integrated into the genome of the host or the nucleic acid molecule can also be present as an extrachromosomal molecule. Such an extrachromosomal molecule can be auto-replicating. Transformed cells, tissues, or plants are understood to encompass not only the end product of a transformation process, but also transgenic progeny thereof. A “non-transformed,” “non-transgenic,” or “non-recombinant” host refers to a wild-type organism, e.g., a bacterium or plant, which does not contain the heterologous nucleic acid molecule.

[0271] A “transgenic plant”, as used herein, refers to a plant which contains a foreign nucleotide sequence inserted into either its nuclear genome or organellar genome. It encompasses further the offspring generations i.e. the T1-, T2- and consecutively generations or BC1-, BC2- and consecutively generation as well as crossbreeds thereof with non-transgenic or other transgenic plants.

[0272] The host organism (=transgenic organism) advantageously contains at least one copy of the nucleic acid according to the invention and/or of the nucleic acid construct according to the invention.

[0273] In principle all plants can be used as host organism. Preferred transgenic plants are, for example, selected from the families Aceraceae, Anacardiaceae, Apiaceae, Asteraceae, Brassicaceae, Cactaceae, Cucurbitaceae, Euphorbiaceae, Fabaceae, Malvaceae, Nymphaeaceae, Papaveraceae, Rosaceae, Salicaceae, Solanaceae, Arecaceae, Bromeliaceae, Cyperaceae, Iridaceae, Liliaceae, Orchidaceae, Gentianaceae, Labiaceae, Magnoliaceae, Ranunculaceae, Carifolaceae, Rubiaceae, Scrophulariaceae, Caryophyllaceae, Ericaceae, Polygonaceae, Violaceae, Juncaceae or Poaceae and preferably from a plant selected from the group of the families Apiaceae, Asteraceae, Brassicaceae, Cucurbitaceae, Fabaceae, Papaveraceae, Rosaceae, Solanaceae, Liliaceae or Poaceae. Preferred are crop plants such as plants advantageously selected from the group of the genus peanut, oilseed rape, canola, sunflower, safflower, olive, sesame, hazelnut, almond, avocado, bay, pumpkin/squash, linseed, soya, pistachio, borage, maize, wheat, rye, oats, sorghum and millet, triticale, rice, barley, cassava, potato, sugarbeet, egg plant, alfalfa, and perennial grasses and forage plants, oil palm, vegetables (brassicas, root vegetables, tuber vegetables, pod vegetables, fruiting vegetables, onion vegetables, leafy vegetables and stem vegetables), buckwheat, Jerusalem artichoke, broad bean, vetches, lentil, dwarf bean, lupin, clover and Lucerne for mentioning only some of them.

[0274] In one preferred embodiment, the host plant is selected from the families Aceraceae, Anacardiaceae, Apiaceae, Asteraceae, Brassicaceae, Cactaceae, Cucurbitaceae, Euphorbiaceae, Fabaceae, Malvaceae, Nymphaeaceae, Papaveraceae, Rosaceae, Salicaceae, Solanaceae, Arecaceae, Bromeliaceae, Cyperaceae, Iridaceae, Liliaceae, Orchidaceae, Gentianaceae, Labiaceae, Magnoliaceae, Ranunculaceae, Carifolaceae, Rubiaceae, Scrophulariaceae, Caryophyllaceae, Ericaceae, Polygonaceae, Violaceae, Juncaceae or Poaceae and preferably from a plant selected from the group of the families Apiaceae, Asteraceae, Brassicaceae, Cucurbitaceae, Fabaceae, Papaveraceae, Rosaceae, Solanaceae, Liliaceae or Poaceae. Preferred are crop plants and in particular plants mentioned herein above as host plants such as the families and genera mentioned above for example preferred the species Anacardium occidentale, Calendula officinalis, Carthamus tinctorius, Cichorium intybus, Cynara scolymus, Helianthus annus, Tagetes lucida, Tagetes erecta, Tagetes tenuifolia; Daucus carota; Corylus avellana, Corylus colurna, Borago officinalis; Brassica napus, Brassica rapa ssp., Sinapis arvensis Brassica juncea, Brassica juncea var. juncea, Brassica juncea var. crispifolia, Brassica juncea var. foliosa, Brassica nigra, Brassica sinapioides, Melanosinapis communis, Brassica oleracea, Arabidopsis thaliana, Anana comosus, Ananas ananas, Bromelia comosa, Carica papaya, Cannabis sative, Ipomoea batatus, Ipomoea pandurata, Convolvulus batatas, Convolvulus tiliaceus, Ipomoea fastigiata, Ipomoea tiliacea, Ipomoea triloba, Convolvulus panduratus, Beta vulgaris, Beta vulgaris var. altissima, Beta vulgaris var. vulgaris, Beta maritima, Beta vulgaris var. perennis, Beta vulgaris var. conditiva, Beta vulgaris var. esculenta, Cucurbita maxima, Cucurbita mixta, Cucurbita pepo, Cucurbita moschata, Olea europaea, Manihot utilissima, Janipha manihot, Jatropha manihot, Manihot aipil, Manihot dulcis, Manihot manihot, Manihot melanobasis, Manihot esculenta, Ricinus communis, Pisum sativum, Pisum arvense, Pisum humile, Medicago sativa, Medicago falcata, Medicago varia, Glycine max Dolichos soja, Glycine gracilis, Glycine hispida, Phaseolus max, Soja hispida, Soja max, Cocos nucifera, Pelargonium grossularioides, Oleum cocoas, Laurus nobilis, Persea americana, Arachis hypogaea, Linum usitatissimum, Linum humile, Linum austriacum, Linum bienne, Linum angustifolium, Linum catharticum, Linum flavum, Linum grandiflorum, Adenolinum grandiflorum, Linum lewisii, Linum narbonense, Linum perenne, Linum perenne var. Iewisii, Linum pratense, Linum trigynum, Punica granatum, Gossypium hirsutum, Gossypium arboreum, Gossypium barbadense, Gossypium herbaceum, Gossypium thurberi, Musa nana, Musa acuminata, Musa paradisiaca, Musa spp., Elaeis guineensis, Papaver orientale, Papaver rhoeas, Papaver dubium, Sesamum indicum, Piper aduncum, Piper amalago, Piper angustifolium, Piper auritum, Piper betel, Piper cubeba, Piper longum, Piper nigrum, Piper retrofractum, Artanthe adunca, Artanthe elongata, Peperomia elongata, Piper elongatum, Steffensia elongata, Hordeum vulgare, Hordeum jubatum, Hordeum murinum, Hordeum secalinum, Hordeum distichon Hordeum aegiceras, Hordeum hexastichon, Hordeum hexastichum, Hordeum irregulare, Hordeum sativum, Hordeum secalinum, Avena sativa, Avena fatua, Avena byzantina, Avena fatua var. sativa, Avena hybrida, Sorghum bicolor, Sorghum halepense, Sorghum saccharatum, Sorghum vulgare, Andropogon drummondii, Holcus bicolor, Holcus sorghum, Sorghum aethiopicum, Sorghum arundinaceum, Sorghum caffrorum, Sorghum cernuum, Sorghum dochna, Sorghum drummondii, Sorghum durra, Sorghum guineense, Sorghum lanceolatum, Sorghum nervosum, Sorghum saccharatum, Sorghum subglabrescens, Sorghum verticilliflorum, Sorghum vulgare, Holcus halepensis, Sorghum miliaceum millet, Panicum militaceum, Zea mays, Triticum aestivum, Triticum durum, Triticum turgidum, Triticum hybernum, Triticum macha, Triticum sativum or Triticum vulgare, Cofea spp., Coffea arabica, Coffea canephora, Coffea liberica, Capsicum annuum, Capsicum annuum var. glabriusculum, Capsicum frutescens, Capsicum annuum, Nicotiana tabacum, Solanum tuberosum, Solanum melongena, Lycopersicon esculentum, Lycopersicon lycopersicum, Lycopersicon pyriforme, Solanum integrifolium, Solanum lycopersicum Theobroma cacao or Camellia sinensis

or Hordeum vulgare, Helianthus annuus, Linum usitatissimum.

[0275] Anacardiaceae such as the genera Pistacia, Mangifera, Anacardium e.g. the species Pistacia vera [pistachios, Pistazie], Mangifer indica [Mango] or Anacardium occidentale [Cashew]; Asteraceae such as the genera Calendula, Carthamus, Centaurea, Cichorium, Cynara, Helianthus, Lactuca, Locusta, Tagetes, Valeriana e.g. the species Calendula officinalis [Marigold], Carthamus tinctorius [safflower], Centaurea cyanus [cornflower], Cichorium intybus [blue daisy], Cynara scolymus [Artichoke], Helianthus annus [sunflower], Lactuca sativa, Lactuca crispa, Lactuca esculenta, Lactuca scariola L. ssp. sativa, Lactuca scariola L. var. integrata, Lactuca scariola L. var. integrifolia, Lactuca sativa subsp. romana, Locusta communis, Valeriana locusta [lettuce], Tagetes lucida, Tagetes erecta or Tagetes tenuifolia [Marigold]; Apiaceae such as the genera Daucus e.g. the species Daucus carota [carrot]; Betulaceae such as the genera Corylus e.g. the species Corylus avellana or Corylus colurna [hazelnut]; Boraginaceae such as the genera Borago e.g. the species Borago officinalis [borage]; Brassicaceae such as the genera Brassica, Melanosinapis, Sinapis, Arabadopsis e.g. the species Brassica napus, Brassica rapa ssp. [canola, oilseed rape, turnip rape], Sinapis arvensis Brassica juncea, Brassica juncea var. juncea, Brassica juncea var. crispifolia, Brassica juncea var. foliosa, Brassica nigra, Brassica sinapioides, Melanosinapis communis [mustard], Brassica oleracea [fodder beet] or Arabidopsis thaliana; Bromeliaceae such as the genera Anana, Bromelia e.g. the species Anana comosus, Ananas ananas or Bromelia comosa [pineapple]; Caricaceae such as the genera Carica e.g. the species Carica papaya [papaya]; Cannabaceae such as the genera Cannabis e.g. the species Cannabis sative [hemp], Convolvulaceae such as the genera Ipomea, Convolvulus e.g. the species Ipomoea batatus, Ipomoea pandurata, Convolvulus batatas, Convolvulus tiliaceus, Ipomoea fastigiata, Ipomoea tiliacea, Ipomoea triloba or Convolvulus panduratus [sweet potato, Man of the Earth, wild potato], Chenopodiaceae such as the genera Beta, i.e. the species Beta vulgaris, Beta vulgaris var. altissima, Beta vulgaris var. Vulgaris, Beta maritima, Beta vulgaris var. perennis, Beta vulgaris var. conditiva or Beta vulgaris var. esculenta [sugar beet]; Cucurbitaceae such as the genera Cucubita e.g. the species Cucurbita maxima, Cucurbita mixta, Cucurbita pepo or Cucurbita moschata [pumpkin, squash]; Elaeagnaceae such as the genera Elaeagnus e.g. the species Olea europaea [olive]; Ericaceae such as the genera Kalmia e.g. the species Kalmia latifolia, Kalmia angustifolia, Kalmia microphylla, Kalmia polifolia, Kalmia occidentalis, Cistus chamaerhodendros or Kalmia lucida [American laurel, broad-leafed laurel, calico bush, spoon wood, sheep laurel, alpine laurel, bog laurel, western bog-laurel, swamp-laurel]; Euphorbiaceae such as the genera Manihot, Janipha, Jatropha, Ricinus e.g. the species Manihot utilissima, Janipha manihot, Jatropha manihot., Manihot aipil, Manihot dulcis, Manihot manihot, Manihot melanobasis, Manihot esculenta [manihot, arrowroot, tapioca, cassava] or Ricinus communis [castor bean, Castor Oil Bush, Castor Oil Plant, Palma Christi, Wonder Tree]; Fabaceae such as the genera Pisum, Albizia, Cathormion, Feuillea, Inga, Pithecolobium, Acacia, Mimosa, Medicajo, Glycine, Dolichos, Phaseolus, Soja e.g. the species Pisum sativum, Pisum arvense, Pisum humile [pea], Albizia berteriana, Albizia julibrissin, Albizia lebbeck, Acacia berteriana, Acacia littoralis, Albizia berteriana, Albizzia berteriana, Cathormion berteriana, Feuillea berteriana, Inga fragrans, Pithecellobium berterianum, Pithecellobium fragrans, Pithecolobium berterianum, Pseudalbizzia berteriana, Acacia julibrissin, Acacia nemu, Albizia nemu, Feuilleea julibrissin, Mimosa julibrissin, Mimosa speciosa, Sericanrda julibrissin, Acacia lebbeck, Acacia macrophylla, Albizia lebbek, Feuilleea lebbeck, Mimosa lebbeck, Mimosa speciosa [bastard logwood, silk tree, East Indian Walnut], Medicago sativa, Medicago falcata, Medicago varia [alfalfa] Glycine max Dolichos soja, Glycine gracilis, Glycine hispida, Phaseolus max, Soja hispida or Soja max [soybean]; Geraniaceae such as the genera Pelargonium, Cocos, Oleum e.g. the species Cocos nucifera, Pelargonium grossularioides or Oleum cocois [coconut]; Gramineae such as the genera Saccharum e.g. the species Saccharum officinarum; Juglandaceae such as the genera Juglans, Wallia e.g. the species Juglans regia, Juglans ailanthifolia, Juglans sieboldiana, Juglans cinerea, Wallia cinerea, Juglans bixbyi, Juglans californica, Juglans hindsii, Juglans intermedia, Juglans jamaicensis, Juglans major, Juglans microcarpa, Juglans nigra or Wallia nigra [walnut, black walnut, common walnut, persian walnut, white walnut, butternut, black walnut]; Lauraceae such as the genera Persea, Laurus e.g. the species laurel Laurus nobilis [bay, laurel, bay laurel, sweet bay], Persea americana Persea americana, Persea gratissima or Persea persea [avocado]; Leguminosae such as the genera Arachis e.g. the species Arachis hypogaea [peanut]; Linaceae such as the genera Linum, Adenolinum e.g. the species Linum usitatissimum, Linum humile, Linum austriacum, Linum bienne, Linum angustifolium, Linum catharticum, Linum flavum, Linum grandiflorum, Adenolinum grandiflorum, Linum lewisii, Linum narbonense, Linum perenne, Linum perenne var. Iewisii, Linum pratense or Linum trigynum [flax, linseed]; Lythrarieae such as the genera Punica e.g. the species Punica granatum [pomegranate]; Malvaceae such as the genera Gossypium e.g. the species Gossypium hirsutum, Gossypium arboreum, Gossypium barbadense, Gossypium herbaceum or Gossypium thurberi [cotton]; Musaceae such as the genera Musa e.g. the species Musa nana, Musa acuminata, Musa paradisiaca, Musa spp. [banana]; Onagraceae such as the genera Camissonia, Oenothera e.g. the species Oenothera biennis or Camissonia brevipes [primrose, evening primrose]; Palmae such as the genera Elacis e.g. the species Elaeis guineensis [oil plam]; Papaveraceae such as the genera Papaver e.g. the species Papaver orientale, Papaver rhoeas, Papaver dubium [poppy, oriental poppy, corn poppy, field poppy, shirley poppies, field poppy, long-headed poppy, long-pod poppy]; Pedaliaceae such as the genera Sesamum e.g. the species Sesamum indicum [sesame]; Piperaceae such as the genera Piper, Artanthe, Peperomia, Steffensia e.g. the species Piper aduncum, Piper amalago, Piper angustifolium, Piper auritum, Piper betel, Piper cubeba, Piper longum, Piper nigrum, Piper retrofractum, Artanthe adunca, Artanthe elongata, Peperomia elongata, Piper elongatum, Steffensia elongata. [Cayenne pepper, wild pepper]; Poaceae such as the genera Hordeum, Secale, Avena, Sorghum, Andropogon, Holcus, Panicum, Oryza, Zea, Triticum e.g. the species Hordeum vulgare, Hordeum jubatum, Hordeum murinum, Hordeum secalinum, Hordeum distichon Hordeum aegiceras, Hordeum hexastichon., Hordeum hexastichum, Hordeum irregulare, Hordeum sativum, Hordeum secalinum [barley, pearl barley, foxtail barley, wall barley, meadow barley], Secale cereale [rye], Avena sativa, Avena fatua, Avena byzantina, Avena fatua var. sativa, Avena hybrida [oat], Sorghum bicolor, Sorghum halepense, Sorghum saccharatum, Sorghum vulgare, Andropogon drummondii, Holcus bicolor, Holcus sorghum, Sorghum aethiopicum, Sorghum arundinaceum, Sorghum caffrorum, Sorghum cernuum, Sorghum dochna, Sorghum drummondii, Sorghum durra, Sorghum guineense, Sorghum lanceolatum, Sorghum nervosum, Sorghum saccharatum, Sorghum subglabrescens, Sorghum verticilliflorum, Sorghum vulgare, Holcus halepensis, Sorghum miliaceum millet, Panicum militaceum [Sorghum, millet], Oryza sativa, Oryza latifolia [rice], Zea mays [corn, maize] Triticum aestivum, Triticum durum, Triticum turgidum, Triticum hybernum, Triticum macha, Triticum sativum or Triticum vulgare [wheat, bread wheat, common wheat], Proteaceae such as the genera Macadamia e.g. the species Macadamia intergrifolia [macadamia]; Rubiaceae such as the genera Coffea e.g. the species Cofea spp., Coffea arabica, Coffea canephora or Coffea liberica [coffee]; Scrophulariaceae such as the genera Verbascum e.g. the species Verbascum blattaria, Verbascum chaixii, Verbascum densiflorum, Verbascum lagurus, Verbascum longifolium, Verbascum lychnitis, Verbascum nigrum, Verbascum olympicum, Verbascum phlomoides, Verbascum phoenicum, Verbascum pulverulentum or Verbascum thapsus [mullein, white moth mullein, nettle-leaved mullein, dense-flowered mullein, silver mullein, long-leaved mullein, white mullein, dark mullein, greek mullein, orange mullein, purple mullein, hoary mullein, great mullein]; Solanaceae such as the genera Capsicum, Nicotiana, Solanum, Lycopersicon e.g. the species Capsicum annuum, Capsicum annuum var. glabriusculum, Capsicum frutescens [pepper], Capsicum annuum [paprika], Nicotiana tabacum, Nicotiana alata, Nicotiana attenuata, Nicotiana glauca, Nicotiana langsdorffii, Nicotiana obtusifolia, Nicotiana quadrivalvis, Nicotiana repanda, Nicotiana rustica, Nicotiana sylvestris [tobacco], Solanum tuberosum [potato], Solanum melongena [egg-plant] (Lycopersicon esculentum, Lycopersicon lycopersicum., Lycopersicon pyriforme, Solanum integrifolium or Solanum lycopersicum [tomato]; Sterculiaceae such as the genera Theobroma e.g. the species Theobroma cacao [cacao]; Theaceae such as the genera Camellia e.g. the species Camellia sinensis) [tea]

or Hordeum vulgare, Helianthus annuus, Linum usitatissimum.

[0276] The introduction of the nucleic acids according to the invention, the expression cassette or the vector into organisms, plants for example, can in principle be done by all of the methods known to those skilled in the art. The introduction of the nucleic acid sequences gives rise to recombinant or transgenic organisms.

[0277] In the case of microorganisms, those skilled in the art can find appropriate methods in the textbooks by Sambrook, J. et al. (1989) Molecular cloning: A laboratory manual, Cold Spring Harbor Laboratory Press, by F. M. Ausubel et al. (1994) Current protocols in molecular biology, John Wiley and Sons, by D. M. Glover et al., DNA Cloning Vol. 1, (1995), IRL Press (ISBN 019-963476-9), by Kaiser et al. (1994) Methods in Yeast Genetics, Cold Spring Harbor Laboratory Press or Guthrie et al. Guide to Yeast Genetics and Molecular Biology, Methods in Enzymology, 1994, Academic Press.

[0278] The transfer of foreign genes into the genome of a plant is called transformation. In doing this the methods described for the transformation and regeneration of plants from plant tissues or plant cells are utilized for transient or stable transformation. Suitable methods are protoplast transformation by poly(ethylene glycol)-induced DNA uptake, the “biolistic” method using the gene cannon—referred to as the particle bombardment method, electroporation, the incubation of dry embryos in DNA solution, microinjection and gene transfer mediated by Agrobacterium. Said methods are described by way of example in B. Jenes et al., Techniques for Gene Transfer, in: Transgenic Plants, Vol. 1, Engineering and Utilization, eds. S. D. Kung and R. Wu, Academic Press (1993) 128-143 and in Potrykus Annu. Rev. Plant Physiol. Plant Molec. Biol. 42 (1991) 205-225). The nucleic acids or the construct to be expressed is preferably cloned into a vector which is suitable for transforming Agrobacterium tumefaciens, for example pBin19 (Bevan et al., Nucl. Acids Res. 12 (1984) 8711). Agrobacteria transformed by such a vector can then be used in known manner for the transformation of plants, in particular of crop plants such as by way of example tobacco plants, for example by bathing bruised leaves or chopped leaves in an agrobacterial solution and then culturing them in suitable media. The transformation of plants by means of Agrobacterium tumefaciens is described, for example, by Höfgen and Willmitzer in Nucl. Acid Res. (1988) 16, 9877 or is known inter alia from F. F. White, Vectors for Gene Transfer in Higher Plants; in Transgenic Plants, Vol. 1, Engineering and Utilization, eds. S. D. Kung and R. Wu, Academic Press, 1993, pp. 15-38.

[0279] Agrobacteria transformed by an expression vector according to the invention may likewise be used in known manner for the transformation of plants such as test plants like Arabidopsis or crop plants such as cereal crops, corn, oats, rye, barley, wheat, soybean, rice, cotton, sugar beet, canola, sunflower, flax, hemp, potatoes, tobacco, tomatoes, carrots, paprika, oilseed rape, tapioca, cassava, arrowroot, tagetes, alfalfa, lettuce and the various tree, nut and vine species, in particular of oil-containing crop plants such as soybean, peanut, castor oil plant, sunflower, corn, cotton, flax, oilseed rape, coconut, oil palm, safflower (Carthamus tinctorius) or cocoa bean, e.g. by bathing bruised leaves or chopped leaves in an agrobacterial solution and then culturing them in suitable media.

[0280] The genetically modified plant cells may be regenerated by all of the methods known to those skilled in the art. Appropriate methods can be found in the publications referred to above by S. D. Kung and R. Wu, Potrykus or Höfgen and Willmitzer.

[0281] Accordingly, a further aspect of the invention relates to transgenic organisms transformed by at least one nucleic acid sequence, expression cassette or vector according to the invention as well as cells, cell cultures, tissue, parts—such as, for example, leaves, roots, etc. in the case of plant organisms—or reproductive material derived from such organisms. The terms “host organism”, “host cell”, “recombinant (host) organism” and “transgenic (host) cell” are used here interchangeably. Of course these terms relate not only to the particular host organism or the particular target cell but also to the descendants or potential descendants of these organisms or cells. Since, due to mutation or environmental effects certain modifications may arise in successive generations, these descendants need not necessarily be identical with the parental cell but nevertheless are still encompassed by the term as used here.

[0282] For the purposes of the invention “transgenic” or “recombinant” means with regard for example to a nucleic acid sequence, an expression cassette (=gene construct, nucleic acid construct) or a vector containing the nucleic acid sequence according to the invention or an organism transformed by the nucleic acid sequences, expression cassette or vector according to the invention all those constructions produced by genetic engineering methods in which either

[0283] a) the nucleic acid sequence as shown in Table I, column 4 and 5 or its derivatives or parts thereof or

[0284] b) a genetic control sequence functionally linked to the nucleic acid sequence described under (a), for example a 3′- and/or 5′-genetic control sequence such as a promoter or terminator, or

(a) and (b)
are not found in their natural, genetic environment or have been modified by genetic engineering methods, wherein the modification may by way of example be a substitution, addition, deletion, inversion or insertion of one or more nucleotide residues. Natural genetic environment means the natural genomic or chromosomal locus in the organism of origin or inside the host organism or presence in a genomic library. In the case of a genomic library the natural genetic environment of the nucleic acid sequence is preferably retained at least in part. The environment borders the nucleic acid sequence at least on one side and has a sequence length of at least 50 bp, preferably at least 500 bp, particularly preferably at least 1,000 bp, most particularly preferably at least 5,000 bp. A naturally occurring expression cassette—for example the naturally occurring combination of the natural promoter of the nucleic acid sequence according to the invention with the corresponding Δ-8-desaturase, Δ-9-elongase and/or Δ-5-desaturase gene—turns into a transgenic expression cassette when the latter is modified by unnatural, synthetic (“artificial”) methods such as by way of example a mutagenation. Appropriate methods are described by way of example in U.S. Pat. No. 5,565,350 or WO 00/15815.

[0285] Suitable organisms or host organisms for the nucleic acid, expression cassette or vector according to the invention are advantageously in principle all organisms, which are suitable for the expression of recombinant genes as described above. Further examples which may be mentioned are plants such as Arabidopsis, Asteraceae such as Calendula or crop plants such as soybean, peanut, castor oil plant, sunflower, flax, corn, cotton, flax, oilseed rape, coconut, oil palm, safflower (Carthamus tinctorius) or cocoa bean.

[0286] A further object of the invention relates to the use of a nucleic acid construct, e.g. an expression cassette, containing DNA sequences encoding as shown in Table II, column 4 and 5 or DNA sequences hybridizing therewith for the transformation of plant cells, tissues or parts of plants.

[0287] In doing so, depending on the choice of promoter, the sequences as shown in Table II, column 4 and 5 can be expressed specifically in the leaves, in the seeds, the nodules, in roots, in the stem or other parts of the plant. Those transgenic plants overproducing sequences as shown in Table II, column 4 and 5, the reproductive material thereof, together with the plant cells, tissues or parts thereof are a further object of the present invention.

[0288] The expression cassette or the nucleic acid sequences or construct according to the invention containing sequences as shown in Table I, column 4 and 5 can, moreover, also be employed for the transformation of the organisms identified by way of example above such as bacteria, yeasts, filamentous fungi and plants.

[0289] Within the framework of the present invention, increased tolerance and/or resistance to environmental stress means, for example, the artificially acquired trait of increased biosynthetic performance due to functional over expression of sequences as shown in Table II, column 4 and 5 encoded by sequences as shown in Table I, column 4 and 5 and/or homologs in the organisms according to the invention, advantageously in the transgenic plants according to the invention, by comparison with the nongenetically modified initial plants at least for the duration of at least one plant generation.

[0290] A constitutive expression of the exogenous sequences as shown in Table II, column 4 and 5 encoded by sequences as shown in Table I, column 4 and 5 and/or homologs is, moreover, advantageous. On the other hand, however, an inducible expression may also appear desirable.

[0291] The efficiency of the expression of the sequences as shown in Table II, column 4 and 5 encoded by sequences as shown in Table I, column 4 and 5 and/or homologs can be determined, for example, in vitro by shoot meristem propagation. In addition, an expression of the sequences as shown in Table II, column 4 and 5 encoded by sequences as shown in Table I, column 4 and 5 and/or homologs modified in nature and level and its effect on the metabolic pathways performance can be tested on test plants in greenhouse trials.

[0292] An additional object of the invention comprises transgenic organisms such as transgenic plants transformed by an expression cassette containing sequences as shown in Table I, column 4 and 5 according to the invention or DNA sequences hybridizing therewith, as well as transgenic cells, tissue, parts and reproduction material of such plants. Particular preference is given in this case to transgenic crop plants such as by way of example barley, wheat, rye, oats, corn, soybean, rice, cotton, sugar beet, oilseed rape and canola, sunflower, flax, hemp, thistle, potatoes, tobacco, tomatoes, tapioca, cassava, arrowroot, alfalfa, lettuce and the various tree, nut and vine species.

[0293] For the purposes of the invention plants are mono- and dicotyledonous plants, mosses or algae.

[0294] A further refinement according to the invention are transgenic plants as described above which contain a nucleic acid sequence or construct according to the invention or a expression cassette according to the invention.

[0295] Furthermore, by derivatives is meant homologues of the sequences as shown in Table I, column 4 and 5, for example eukaryotic homologues, truncated sequences, single-stranded DNA of the encoding and nonencoding DNA sequence or RNA of the encoding and nonencoding DNA sequence.

[0296] In addition, by homologues of the sequences as shown in Table I, column 4 and 5 is meant derivatives such as by way of example promoter variants. These variants may be modified by one or more nucleotide exchanges, by insertion(s) and/or deletion(s) without, however, adversely affecting the functionality or efficiency of the promoters. Furthermore, the promoters can have their efficiency increased by altering their sequence or be completely replaced by more effective promoters even of foreign organisms.

[0297] By derivatives is also advantageously meant variants whose nucleotide sequence has been altered in the region from −1 to −2000 ahead of the start codon in such a way that the gene expression and/or the protein expression is modified, preferably increased. Furthermore, by derivatives is also meant variants which have been modified at the 3′ end.

[0298] Suitable promoters in the expression cassette are in principle all promoters which can control the expression of foreign genes in organisms such as microorganisms like protozoa such as ciliates, algae such as green, brown, red or blue algae such as Euglenia, bacteria such as gram-positive or gram-negative bacteria, yeasts such as Saccharomyces, Pichia or Schizosaccharomyces or fungi such as Mortierella, Thraustochytrium or Schizochytrium or plants, advantageously in plants or fungi. Use is preferably made in particular of plant promoters or promoters derived from a plant virus. Advantageous regulation sequences for the method according to the invention are found for example in promoters such as cos, tac, trp, tet, trp-tet, lpp, lac, lpp-lac, lacIq-, T7, T5, T3, gal, trc, ara, SP6, λ-PR or in λ-PL promoters which are employed advantageously in gram-negative bacteria. Other advantageous regulation sequences are found, for example, in the gram-positive promoters amy and SPO2, in the yeast or fungal promoters ADC1, MFα, AC, P-60, CYC1, GAPDH, TEF, rp28, ADH or in the plant promoters CaMV/35S [Franck et al., Cell 21 (1980) 285-294], SSU, OCS, lib4, STLS1, B33, nos (=Nopalin Synthase Promoter) or in the ubiquintin or phaseolin promoter. The expression cassette may also contain a chemically inducible promoter by means of which the expression of the exogenous sequences as shown in Table I, column 4 and 5 in the organisms can be controlled advantageously in the plants at a particular time. Advantageous plant promoters of this type are by way of example the PRP1 promoter [Ward et al., Plant. Mol. Biol. 22 (1993), 361-366], a promoter inducible by benzenesulfonamide (EP 388 186), a promoter inducible by tetracycline [Gatz et al., (1992) Plant J. 2, 397-404], a promoter inducible by salicylic acid (WO 95/19443), a promoter inducible by abscisic acid (EP 335 528) and a promoter inducible by ethanol or cyclohexanone (WO93/21334). Other examples of plant promoters which can advantageously be used are the promoter of cytosolic FBPase from potato, the ST-LSI promoter from potato (Stockhaus et al., EMBO J. 8 (1989) 2445-245), the promoter of phosphoribosyl pyrophosphate amidotransferase from Glycine max (see also gene bank accession number U87999) or a nodiene-specific promoter as described in EP 249 676. Particularly advantageous are those plant promoters which ensure expression in tissues or plant parts/organs in which fatty acid biosynthesis or the precursor stages thereof occurs, as in endosperm or in the developing embryo for example. Particularly noteworthy are advantageous promoters which ensure seed-specific expression such as by way of example the USP promoter or derivatives thereof, the LEB4 promoter, the phaseolin promoter or the napin promoter. The particularly advantageous USP promoter cited according to the invention or its derivatives mediate very early gene expression in seed development [Baeumlein et al., Mol Gen Genet, 1991, 225 (3): 459-67]. Other advantageous seed-specific promoters which may be used for monocotylodonous or dicotylodonous plants are the promoters suitable for dicotylodons such as napin gene promoters, likewise cited by way of example, from oilseed rape (U.S. Pat. No. 5,608,152), the oleosin promoter from Arabidopsis (WO 98/45461), the phaseolin promoter from Phaseolus vulgaris (U.S. Pat. No. 5,504,200), the Bce4 promoter from Brassica (WO 91/13980) or the leguminous B4 promoter (LeB4, Baeumlein et al., Plant J., 2, 2, 1992: 233-239) or promoters suitable for monocotylodons such as the promoters of the Ipt2 or Ipt1 gene in barley (WO 95/15389 and WO 95/23230) or the promoters of the barley hordeine gene, the rice glutelin gene, the rice oryzin gene, the rice prolamin gene, the wheat gliadin gene, the white glutelin gene, the corn zein gene, the oats glutelin gene, the sorghum kasirin gene or the rye secalin gene which are described in WO99/16890.

[0299] Furthermore, particularly preferred are those promoters, which ensure the expression in tissues, or plant parts in which, for example, the biosynthesis of fatty acids, oils and lipids or the precursor stages thereof takes place. Particularly noteworthy are promoters, which ensure a seed-specific expression. Noteworthy are the promoter of the napin gene from oilseed rape (U.S. Pat. No. 5,608,152), the USP promoter from Vicia faba (USP=unknown seed protein, Baeumlein et al., Mol Gen Genet, 1991, 225 (3): 459-67), the promoter of the oleosin gene from Arabidopsis (WO98/45461), the phaseolin promoter (U.S. Pat. No. 5,504,200) or the promoter of the legumin B4 gene (LeB4; Baeumlein et al., 1992, Plant Journal, 2 (2): 233-9). Other promoters to be mentioned are that of the Ipt2 or Ipt1 gene from barley (WO95/15389 and WO95/23230) which mediate seed-specific expression in monocotyledonous plants. Other advantageous seed specific promoters are promoters such as the promoters from rice, corn or wheat disclosed in WO 99/16890 or Amy32b, Amy6-6 or aleurain (U.S. Pat. No. 5,677,474), Bce4 (rape, U.S. Pat. No. 5,530,149), glycinin (soy bean, EP 571 741), phosphoenol pyruvat carboxylase (soy bean, JP 06/62870), ADR12-2 (soy bean, WO 98/08962), isocitratlyase (rape, U.S. Pat. No. 5,689,040) or β-amylase (barley, EP 781 849).

[0300] As described above, the expression construct (=gene construct, nucleic acid construct) may contain yet other genes, which are to be introduced into the organisms. These genes can be subject to separate regulation or be subject to the same regulation region as sequences as shown in Table I, column 4 and 5. These genes are by way of example other biosynthesis genes, advantageously for fatty acid biosynthesis, vitamin biosynthesis etc. that allow increased synthesis.

[0301] In principle all natural promoters with their regulation sequences can be used like those named above for the expression cassette according to the invention and the method according to the invention. Over and above this, synthetic promoters may also advantageously be used.

[0302] In the preparation of an expression cassette various DNA fragments can be manipulated in order to obtain a nucleotide sequence, which usefully reads in the correct direction and is equipped with a correct reading raster. To connect the DNA fragments (=nucleic acids according to the invention) to one another adaptors or linkers may be attached to the fragments.

[0303] The promoter and the terminator regions can usefully be provided in the transcription direction with a linker or polylinker containing one or more restriction points for the insertion of this sequence. Generally, the linker has 1 to 10, mostly 1 to 8, preferably 2 to 6, restriction points. In general the size of the linker inside the regulatory region is less than 100 bp, frequently less than 60 bp, but at least 5 bp. The promoter may be both native or homologous as well as foreign or heterologous to the host organism, for example to the host plant. In the 5′-3′ transcription direction the expression cassette contains the promoter, a DNA sequence as shown in Table I, column 4 and 5 gene and a region for transcription termination. Different termination regions can be exchanged for one another in any desired fashion.

[0304] Furthermore, manipulations which provide suitable restriction interfaces or which remove excess DNA or restriction interfaces can be employed. Where insertions, deletions or substitutions, such as transitions and transversions, come into consideration, in vitro mutagenesis, primer repair, restriction or ligation may be used. In suitable manipulations such as restriction, chewing back or filling of overhangs for blunt ends complementary ends of the fragments can be provided for the ligation.

[0305] For an advantageous high expression the attachment of the specific ER retention signal SEKDEL inter alia can be of importance (Schouten, A. et al., Plant Mol. Biol. 30 (1996), 781-792). In this way the average expression level is tripled or even quadrupled. Other retention signals which occur naturally in plant and animal proteins located in the ER may also be employed for the construction of the cassette. In another preferred embodiment a plastidial targeting sequence is used as described by Napier J. A. [Targeting of foreign proteins to the chloroplast, Methods Mol. Biol., 49, 1995: 369-376]. A preferred used vector comprising said plastidial targeting sequence is disclosed by Colin Lazarus [Guerineau F., Woolston S., Brooks L., Mullineaux P. “An expression cassette for targeting foreign proteins into chloroplast; Nucleic. Acids Res., December 9, 16 (23), 1988: 11380].

[0306] Preferred polyadenylation signals are plant polyadenylation signals, preferably those which substantially correspond to T-DNA polyadenylation signals from Agrobacterium tumefaciens, in particular gene 3 of the T-DNA (octopin synthase) of the Ti plasmid pTiACH5 (Gielen et al., EMBO J. 3 (1984), 835 et seq.) or corresponding functional equivalents.

[0307] An expression cassette is produced by fusion of a suitable promoter with suitable sequences as shown in Table I, column 4 and 5 together with a polyadenylation signal by common recombination and cloning techniques as described, for example, in T. Maniatis, E. F. Fritsch and J. Sambrook, Molecular Cloning: A Laboratory Manual, Cold Spring Harbor Laboratory, Cold Spring Harbor, N.Y. (1989) as well as in T. J. Silhavy, M. L. Berman and L. W. Enquist, Experiments with Gene Fusions, Cold Spring Harbor Laboratory, Cold Spring Harbor, N.Y. (1984) and in Ausubel, F. M. et al., Current Protocols in Molecular Biology, Greene Publishing Assoc. and Wiley-Interscience (1987).

[0308] In the preparation of an expression cassette various DNA fragments can be manipulated to produce a nucleotide sequence which usefully reads in the correct direction and is equipped with a correct reading raster. Adapters or linkers can be attached to the fragments for joining the DNA fragments.

[0309] The promoter and the terminator regions can usefully be provided in the transcription direction with a linker or polylinker containing one or more restriction points for the insertion of this sequence. Generally, the linker has 1 to 10, mostly 1 to 8, preferably 2 to 6, restriction points. In general the size of the linker inside the regulatory region is less than 100 bp, frequently less than 60 bp, but at least 5 bp. The promoter may be both native or homologous as well as foreign or heterologous to the host organism, for example to the host plant. In the 5′-3′ transcription direction the expression cassette contains the promoter, a DNA sequence which either encodes gene as shown in Table I, column 4 and 5 and a region for transcription termination. Different termination regions can be exchanged for one another in any desired fashion.

[0310] In the preparation of an expression cassette various DNA fragments can be manipulated to produce a nucleotide sequence which usefully reads in the correct direction and is equipped with a correct reading raster. Adapters or linkers can be attached to the fragments for joining the DNA fragments.

[0311] The DNA sequences encoding the nucleic acid sequences used in the inventive processes such as the sequences as shown in Table I, column 4 and 5 contain all the sequence characteristics needed to achieve correct localization of respective biosynthesis. Accordingly, no further targeting sequences are needed per se. However, such a localization may be desirable and advantageous and hence artificially modified or reinforced so that such fusion constructs are also a preferred advantageous embodiment of the invention.

[0312] Particularly preferred are sequences which ensure targeting in plastids. Under certain circumstances targeting into other compartments (reported in: Kermode, Crit. Rev. Plant Sci. 15, 4 (1996), 285-423) may also be desirable, e.g. into vacuoles, the mitochondrium, the endoplasmic reticulum (ER), peroxisomes, lipid structures or due to lack of corresponding operative sequences retention in the compartment of origin, the cytosol.

[0313] As used herein, the term “environmental stress” refers to any sub-optimal growing condition and includes, but is not limited to, sub-optimal conditions associated with salinity, drought, temperature, metal, chemical, pathogenic and oxidative stresses, or combinations thereof. In preferred embodiments, the environmental stress can be salinity, drought, heat, or low temperature, or combinations thereof, and in particular, can be low water content or low temperature. Wherein drought stress means any environmental stress which leads to a lack of water in plants or reduction of water supply to plants, wherein low temperature stress means freezing of plants below +4° C. as well as chilling of plants below 15° C. and wherein high temperature stress means for example a temperature above 35° C. The range of stress and stress response depends on the different plants which are used for the invention, i.e. it differs for example between a plant such as wheat and a plant such as Arabidopsis. A common response of plants to environmental stress is the loss of yield or the loss of quality. It is also to be understood that as used in the specification and in the claims, “a” or “an” can mean one or more, depending upon the context in which it is used. Thus, for example, reference to “a cell” can mean that at least one cell can be utilized.

[0314] As also used herein, the terms “nucleic acid” and “nucleic acid molecule” are intended to include DNA molecules (e.g., cDNA or genomic DNA) and RNA molecules (e.g., mRNA) and analogs of the DNA or RNA generated using nucleotide analogs. This term also encompasses untranslated sequence located at both the 3′ and 5′ ends of the coding region of the gene: at least about 1000 nucleotides of sequence upstream from the 5′ end of the coding region and at least about 200 nucleotides of sequence downstream from the 3′ end of the coding region of the gene. The nucleic acid molecule can be single-stranded or double-stranded, but preferably is double-stranded DNA.

[0315] An “isolated” nucleic acid molecule is one that is substantially separated from other nucleic acid molecules, which are present in the natural source of the nucleic acid. That means other nucleic acid molecules are present in an amount less than 5% based on weight of the amount of the desired nucleic acid, preferably less than 2% by weight, more preferably less than 1% by weight, most preferably less than 0.5% by weight. Preferably, an “isolated” nucleic acid is free of some of the sequences that naturally flank the nucleic acid (i.e., sequences located at the 5′ and 3′ ends of the nucleic acid) in the genomic DNA of the organism from which the nucleic acid is derived. For example, in various embodiments, the isolated stress related protein encoding nucleic acid molecule can contain less than about 5 kb, 4 kb, 3 kb, 2 kb, 1 kb, 0.5 kb or 0.1 kb of nucleotide sequences which naturally flank the nucleic acid molecule in genomic DNA of the cell from which the nucleic acid is derived. Moreover, an “isolated” nucleic acid molecule, such as a cDNA molecule, can be free from some of the other cellular material with which it is naturally associated, or culture medium when produced by recombinant techniques, or chemical precursors or other chemicals when chemically synthesized.

[0316] A nucleic acid molecule of the present invention, e.g., a nucleic acid molecule encoding an SRP or a portion thereof which confers tolerance and/or resistance to environmental stress in plants, can be isolated using standard molecular biological techniques and the sequence information provided herein. For example, a Arabidopsis thaliana stress related protein encoding cDNA can be isolated from a A. thaliana c-DNA library or a Brassica napus, Glycine max, Zea mays or Oryza sativa stress related protein encoding cDNA can be isolated from a Brassica napus, Glycine max, Zea mays, Triticum aestivum or Oryza sativa

or Hordeum vulgare, Helianthus annuus, Linum usitatissimum
respectively c-DNA library using all or portion of one of the sequences as shown in Table I, column 4 and 5 and respectively. Moreover, a nucleic acid molecule encompassing all or a portion of one of the sequences as shown in Table I, column 4 and 5 can be isolated by the polymerase chain reaction using oligonucleotide primers designed based upon this sequence. For example, mRNA can be isolated from plant cells (e.g., by the guanidinium-thiocyanate extraction procedure of Chirgwin et al., 1979 Biochemistry 18:5294-5299) and cDNA can be prepared using reverse transcriptase (e.g., Moloney MLV reverse transcriptase, available from Gibco/BRL, Bethesda, Md.; or AMV reverse transcriptase, available from Seikagaku America, Inc., St. Petersburg, Fla.). Synthetic oligonucleotide primers for polymerase chain reaction amplification can be designed based upon one of the nucleotide sequences as shown in Table I, column 4 and 5. A nucleic acid molecule of the invention can be amplified using cDNA or, alternatively, genomic DNA, as a template and appropriate oligonucleotide primers according to standard PCR amplification techniques. The nucleic acid molecule so amplified can be cloned into an appropriate vector and characterized by DNA sequence analysis. Furthermore, oligonucleotides corresponding to a SRP encoding nucleotide sequence can be prepared by standard synthetic techniques, e.g., using an automated DNA synthesizer.

[0317] In a preferred embodiment, an isolated nucleic acid molecule of the invention comprises one of the nucleotide sequences shown in sequences as shown in Table I, column 4 and 5 encoding the SRP (i.e., the “coding region”), as well as 5′ untranslated sequences and 3′ untranslated sequences.

[0318] Moreover, the nucleic acid molecule of the invention can comprise only a portion of the coding region of one of the sequences of the nucleic acid as shown in Table I, column 4 and 5, for example, a fragment which can be used as a probe or primer or a fragment encoding a biologically active portion of a SRP.

[0319] Portions of proteins encoded by the SRP encoding nucleic acid molecules of the invention are preferably biologically active portions described herein. As used herein, the term “biologically active portion of” a SRP is intended to include a portion, e.g., a domain/motif, of stress related protein that participates in a stress tolerance and/or resistance response in a plant. To determine whether a SRP, or a biologically active portion thereof, results in increased stress tolerance in a plant, a stress analysis of a plant comprising the SRP may be performed. Such analysis methods are well known to those skilled in the art, as detailed in the Examples. More specifically, nucleic acid fragments encoding biologically active portions of a SRP can be prepared by isolating a portion of one of the sequences of the nucleic acid as shown in Table I, column 4 and 5 expressing the encoded portion of the SRP or peptide (e.g., by recombinant expression in vitro) and assessing the activity of the encoded portion of the SRP or peptide.

[0320] Biologically active portions of a SRP are encompassed by the present invention and include peptides comprising amino acid sequences derived from the amino acid sequence of a SRP encoding gene, or the amino acid sequence of a protein homologous to a SRP, which include fewer amino acids than a full length SRP or the full length protein which is homologous to a SRP, and exhibits at least some enzymatic activity of a SRP. Typically, biologically active portions (e.g., peptides which are, for example, 5, 10, 15, 20, 30, 35, 36, 37, 38, 39, 40, 50, 100 or more amino acids in length) comprise a domain or motif with at least one activity of a SRP. Moreover, other biologically active portions in which other regions of the protein are deleted, can be prepared by recombinant techniques and evaluated for one or more of the activities described herein. Preferably, the biologically active portions of a SRP include one or more selected domains/motifs or portions thereof having biological activity.

[0321] The term “biological active portion” or “biological activity” means a SRP or a portion of a SRP which still has at least 10% or 20%, preferably 20%, 30%, 40% or 50%, especially preferably 60%, 70% or 80% of the enzymatic activity of the natural or starting enzyme.

[0322] A nucleic acid molecule encompassing a complete sequence of the nucleic acid molecules used in the process, for example the polynucleotide of the invention, or a part thereof may additionally be isolated by polymerase chain reaction, oligonucleotide primers based on this sequence or on parts thereof being used. For example, a nucleic acid molecule comprising the complete sequence or part thereof can be isolated by polymerase chain reaction using oligonucleotide primers which have been generated on the basis of this sequence—For example, mRNA can be isolated from cells (for example by means of the guanidinium thiocyanate extraction method of Chirgwin et al. (1979) Biochemistry 18:5294-5299) and cDNA can be generated by means of reverse transcriptase (for example Moloney MLV reverse transcriptase, available from Gibco/BRL, Bethesda, Md., or AMV reverse transcriptase, obtainable from Seikagaku America, Inc., St. Petersburg, Fla.).

[0323] Synthetic oligonucleotide primers for the amplification, e.g. as shown in table 2, by means of polymerase chain reaction can be generated on the basis of a sequence shown herein, for example the sequence as shown in Table I, column 4 and 5 or the sequences derived from polypeptides as shown in Table II, column 4 and 5.

[0324] Moreover, it is possible to identify conserved regions from various organisms by carrying out protein sequence alignments with the polypeptide used in the process of the invention, in particular with sequences of the polypeptide of the invention, from which conserved regions, and in turn, degenerate primers can be derived. Conserved region for the polypeptide of the invention are indicated in the alignment shown in the figure ALIGNEMENT. Conserved regions are those, which show a very little variation in the amino acid in one particular position of several homologs from different origin. The consenus sequences shown in FIG. 2 are derived from said aligments.

[0325] Degenerated primers can then be utilized by PCR for the amplification of fragments of novel proteins having above-mentioned activity, e.g. having an SPR activity or further functional homologs of the polypeptide of the invention from other organisms.

[0326] These fragments can then be utilized as hybridization probe for isolating the complete gene sequence. As an alternative, the missing 5′ and 3′ sequences can be isolated by means of RACE-PCR (rapid amplification of cDNA ends). A nucleic acid molecule according to the invention can be amplified using cDNA or, as an alternative, genomic DNA as template and suitable oligonucleotide primers, following standard PCR amplification techniques. The nucleic acid molecule amplified thus can be cloned into a suitable vector and characterized by means of DNA sequence analysis. Oligonucleotides, which correspond to one of the nucleic acid molecules used in the process can be generated by standard synthesis methods, for example using an automatic DNA synthesizer.

[0327] Nucleic acid molecules which are advantageously for the process according to the invention can be isolated based on their homology to the nucleic acid molecules disclosed herein using the sequences or part thereof as hybridization probe and following standard hybridization techniques under stringent hybridization conditions. In this context, it is possible to use, for example, isolated nucleic acid molecules of at least 15, 20, 25, 30, 35, 40, 50, 60 or more nucleotides, preferably of at least 15, 20 or 25 nucleotides in length which hybridize under stringent conditions with the above-described nucleic acid molecules, in particular with those which encompass a nucleotide sequence of the nucleic acid molecule used in the process of the invention or encoding a protein used in the invention or of the nucleic acid molecule of the invention. Nucleic acid molecules with 30, 50, 100, 250 or more nucleotides may also be used.

[0328] In addition to fragments of the SRP described herein, the present invention includes homologs and analogs of naturally occurring SRP and SRP encoding nucleic acids in a plant.

[0329] “Homologs” are defined herein as two nucleic acids or proteins that have similar, or “homologous”, nucleotide or amino acid sequences, respectively. Homologs include allelic variants, orthologs, paralogs, agonists and antagonists of SRP as defined hereafter. The term “homolog” further encompasses nucleic acid molecules that differ from one of the nucleotide sequences as shown in Table I, column 4 and 5 (and portions thereof) due to degeneracy of the genetic code and thus encode the same SRP as that encoded by the amino acid sequences as shown in Table II, column 4 and 5. As used herein a “naturally occurring” SRP refers to a SRP amino acid sequence that occurs in nature.

[0330] The term “homology” means that the respective nucleic acid molecules or encoded proteins are functionally and/or structurally equivalent. The nucleic acid molecules that are homologous to the nucleic acid molecules described above and that are derivatives of said nucleic acid molecules are, for example, variations of said nucleic acid molecules which represent modifications having the same biological function, in particular encoding proteins with the same or substantially the same biological function. They may be naturally occurring variations, such as sequences from other plant varieties or species, or mutations. These mutations may occur naturally or may be obtained by mutagenesis techniques. The allelic variations may be naturally occurring allelic variants as well as synthetically produced or genetically engineered variants. Structurally equivalents can, for example, be identified by testing the binding of said polypeptide to antibodies or computer based predictions. Structurally equivalent have the similar immunological characteristic, e.g. comprise similar epitopes.

[0331] Functional equivalents derived from one of the polypeptides as shown in Table II, column 4 and 5 according to the invention by substitution, insertion or deletion have at least 30%, 35%, 40%, 45% or 50%, preferably at least 55%, 60%, 65% or 70% by preference at least 80%, especially preferably at least 85% or 90%, 91%, 92%, 93% or 94%, very especially preferably at least 95%, 97%, 98% or 99% homology with one of the polypeptides as shown in Table II, column 4 and 5 according to the invention and are distinguished by essentially the same properties as the polypeptide as shown in Table II, column 4 and 5.

[0332] Functional equivalents derived from the nucleic acid sequence as shown in Table I, column 4 and 5 according to the invention by substitution, insertion or deletion have at least 30%, 35%, 40%, 45% or 50%, preferably at least 55%, 60%, 65% or 70% by preference at least 80%, especially preferably at least 85% or 90%, 91%, 92%, 93% or 94%, very especially preferably at least 95%, 97%, 98% or 99% homology with one of the polypeptides as shown in Table I, column 4 and 5 according to the invention and encode polypeptides having essentially the same properties as the polypeptide as shown in Table I, column 4 and 5.

[0333] “Essentially the same properties” of a functional equivalent is above all understood as meaning that the functional equivalent has above mentioned acitivty, e.g conferring an increase in the fine chemical amount while increasing the amount of protein, activity or function of said functional equivalent in an organism, e.g. a microorgansim, a plant or plant or animal tissue, plant or animal cells or a part of the same.

[0334] By “hybridizing” it is meant that such nucleic acid molecules hybridize under conventional hybridization conditions, preferably under stringent conditions such as described by, e.g., Sambrook (Molecular Cloning; A Laboratory Manual, 2nd Edition, Cold Spring Harbor Laboratory Press, Cold Spring Harbor, N.Y. (1989)) or in Current Protocols in Molecular Biology, John Wiley & Sons, N.Y. (1989), 6.3.1-6.3.6.

[0335] According to the invention, DNA as well as RNA molecules of the nucleic acid of the invention can be used as probes. Further, as template for the identification of functional homologues Northern blot assays as well as Southern blot assays can be performed. The Northern blot assay advantageously provides further informations about the expressed gene product: e.g. expression pattern, occurrence of processing steps, like splicing and capping, etc. The Southern blot assay provides additional information about the chromosomal localization and organization of the gene encoding the nucleic acid molecule of the invention.

[0336] A preferred, nonlimiting example of stringent hydridization conditions are hybridizations in 6× sodium chloride/sodium citrate (=SSC) at approximately 45° C., followed by one or more wash steps in 0.2×SSC, 0.1% SDS at 50 to 65° C., for example at 50° C., 55° C. or 60° C. The skilled worker knows that these hybridization conditions differ as a function of the type of the nucleic acid and, for example when organic solvents are present, with regard to the temperature and concentration of the buffer. The temperature under “standard hybridization conditions” differs for example as a function of the type of the nucleic acid between 42° C. and 58° C., preferably between 45° C. and 50° C. in an aqueous buffer with a concentration of 0.1×0.5×, 1×, 2×, 3×, 4× or 5×SSC (pH 7.2). If organic solvent(s) is/are present in the abovementioned buffer, for example 50% formamide, the temperature under standard conditions is approximately 40° C., 42° C. or 45° C. The hybridization conditions for DNA:DNA hybrids are preferably for example 0.1×SSC and 20° C., 25° C., 30° C., 35° C., 40° C. or 45° C., preferably between 30° C. and 45° C. The hybridization conditions for DNA:RNA hybrids are preferably for example 0.1×SSC and 30° C., 35° C., 40° C., 45° C., 50° C. or 55° C., preferably between 45° C. and 55° C. The abovementioned hybridization temperatures are determined for example for a nucleic acid approximately 100 bp (=base pairs) in length and a G+C content of 50% in the absence of formamide. The skilled worker knows to determine the hybridization conditions required with the aid of textbooks, for example the ones mentioned above, or from the following textbooks: Sambrook et al., “Molecular Cloning”, Cold Spring Harbor Laboratory, 1989; Hames and Higgins (Ed.) 1985, “Nucleic Acids Hybridization: A Practical Approach”, IRL Press at Oxford University Press, Oxford; Brown (Ed.) 1991, “Essential Molecular Biology: A Practical Approach”, IRL Press at Oxford University Press, Oxford.

[0337] A further example of one such stringent hybridization condition is hybridization at 4×SSC at 65° C., followed by a washing in 0.1×SSC at 65° C. for one hour. Alternatively, an exemplary stringent hybridization condition is in 50% formamide, 4×SSC at 42° C. Further, the conditions during the wash step can be selected from the range of conditions delimited by low-stringency conditions (approximately 2×SSC at 50° C.) and high-stringency conditions (approximately 0.2×SSC at 50° C., preferably at 65° C.) (20×SSC: 0.3M sodium citrate, 3M NaCl, pH 7.0). In addition, the temperature during the wash step can be raised from low-stringency conditions at room temperature, approximately 22° C., to higher-stringency conditions at approximately 65° C. Both of the parameters salt concentration and temperature can be varied simultaneously, or else one of the two parameters can be kept constant while only the other is varied. Denaturants, for example formamide or SDS, may also be employed during the hybridization. In the presence of 50% formamide, hybridization is preferably effected at 42° C. Relevant factors like i) length of treatment, ii) salt conditions, iii) detergent conditions, iv) competitor DNAs, v) temperature and vi) probe selection can be combined case by case so that not all possibilities can be mentioned herein.

[0338] Thus, in a preferred embodiment, Northern blots are prehybridized with Rothi-Hybri-Quick buffer (Roth, Karlsruhe) at 68° C. for 2 h. Hybridization with radioactive labelled probe is done overnight at 68° C. Subsequent washing steps are performed at 68° C. with 1×SSC.

[0339] For Southern blot assays the membrane is prehybridized with Rothi-Hybri-Quick buffer (Roth, Karlsruhe) at 68° C. for 2 h. The hybridization with radioactive labelled probe is conducted over night at 68° C. Subsequently the hybridization buffer is discarded and the filter shortly washed using 2×SSC; 0.1% SDS. After discarding the washing buffer new 2×SSC; 0.1% SDS buffer is added and incubated at 68° C. for 15 minutes. This washing step is performed twice followed by an additional washing step using 1×SSC; 0.1% SDS at 68° C. for 10 min.

[0340] Polypeptides having above-mentioned activity, i.e. conferring the altered metabolic activity, derived from other organisms, can be encoded by other DNA sequences which hybridize to the sequences as shown in Table I, column 4 and 5 under relaxed hybridization conditions and which code on expression for peptides confering an altered metabolic activity.

[0341] Further, some applications have to be performed at low stringency hybridisation conditions, without any consequences for the specificity of the hybridisation. For example, a Southern blot analysis of total DNA could be probed with a nucleic acid molecule of the present invention and washed at low stringency (55° C. in 2xSSPE0, 1% SDS). The hybridisation analysis could reveal a simple pattern of only genes encoding polypeptides of the present invention or used in the process of the invention, e.g. having herein-mentioned activity of increasing the fine chemical. A further example of such low-stringent hybridization conditions is 4×SSC at 50° C. or hybridization with 30 to 40% formamide at 42° C. Such molecules comprise those which are fragments, analogues or derivatives of the polypeptide of the invention or used in the process of the invention and differ, for example, by way of amino acid and/or nucleotide deletion(s), insertion(s), substitution (s), addition(s) and/or recombination (s) or any other modification(s) known in the art either alone or in combination from the above-described amino acid sequences or their underlying nucleotide sequence(s). However, it is preferred to use high stringency hybridisation conditions.

[0342] Hybridization should advantageously be carried out with fragments of at least 5, 10, 15, 20, 25, 30, 35 or 40 bp, advantageously at least 50, 60, 70 or 80 bp, preferably at least 90, 100 or 110 bp. Most preferably are fragments of at least 15, 20, or 30 bp. Preferably are also hybridizations with at least 100 bp or 200, very especially preferably at least 400 bp in length. In an especially preferred embodiment, the hybridization should be carried out with the entire nucleic acid sequence with conditions described above.

[0343] The terms “fragment”, “fragment of a sequence” or “part of a sequence” mean a truncated sequence of the original sequence referred to. The truncated sequence (nucleic acid or protein sequence) can vary widely in length; the minimum size being a sequence of sufficient size to provide a sequence with at least a comparable function and/or activity of the original sequence referred to or hybridizing with the nucleic acid molecule of the invention or used in the process of the invention under stringend conditions, while the maximum size is not critical. In some applications, the maximum size usually is not substantially greater than that required to provide the desired activity and/or function(s) of the original sequence.

[0344] In addition to fragments and fusion polypeptides of the SRPs described herein, the present invention includes homologs and analogs of naturally occurring SRPs and SRP encoding nucleic acids in a plant. “Homologs” are defined herein as two nucleic acids or polypeptides that have similar, or substantially identical, nucleotide or amino acid sequences, respectively. Homologs include allelic variants, orthologs, paralogs, agonists and antagonists of SRPs as defined hereafter. The term “homolog” further encompasses nucleic acid molecules that differ from one of the nucleotide sequences as shown in Table I, column 4 and 5 (and portions thereof) due to degeneracy of the genetic code and thus encode the same SRP as that encoded by the nucleotide sequences as shown in Table I, column 4 and 5. As used herein a “naturally occurring” SRP refers to a SRP amino acid sequence that occurs in nature. Preferably, a naturally occurring SRP comprises an amino acid sequence selected from the group consisting of polypeptides as shown in Table II, column 4 and 5.

[0345] An agonist of the SRP can retain substantially the same, or a subset, of the biological activities of the SRP. An antagonist of the SRP can inhibit one or more of the activities of the naturally occurring form of the SRP. For example, the SRP antagonist can competitively bind to a downstream or upstream member of the cell membrane component metabolic cascade that includes the SRP, or bind to a SRP that mediates transport of compounds across such membranes, thereby preventing translocation from taking place.

[0346] Nucleic acid molecules corresponding to natural allelic variants and analogs, orthologs and paralogs of a SRP cDNA can be isolated based on their identity to the Saccharomyces cerevisiae, E. coli or based on their identity to the Brassica napus, Glycine max, Zea mays, Triticum aestivum or Oryza sativa or Hordeum vulgare, Helianthus annuus, Linum usitatissimum SRP nucleic acids described herein using SRP cDNAs, or a portion thereof, as a hybridization probe according to standard hybridization techniques under stringent hybridization conditions. In an alternative embodiment, homologs of the SRP can be identified by screening combinatorial libraries of mutants, e.g., truncation mutants, of the SRP for SRP agonist or antagonist activity. In one embodiment, a variegated library of SRP variants is generated by combinatorial mutagenesis at the nucleic acid level and is encoded by a variegated gene library. A variegated library of SRP variants can be produced by, for example, enzymatically ligating a mixture of synthetic oligonucleotides into gene sequences such that a degenerate set of potential SRP sequences is expressible as individual polypeptides, or alternatively, as a set of larger fusion polypeptides (e.g., for phage display) containing the set of SRP sequences therein. There are a variety of methods that can be used to produce libraries of potential SRP homologs from a degenerate oligonucleotide sequence. Chemical synthesis of a degenerate gene sequence can be performed in an automatic DNA synthesizer, and the synthetic gene is then ligated into an appropriate expression vector. Use of a degenerate set of genes allows for the provision, in one mixture, of all of the sequences encoding the desired set of potential SRP sequences. Methods for synthesizing degenerate oligonucleotides are known in the art. See, e.g., Narang, S. A., 1983, Tetrahedron 39:3; Itakura et al., 1984, Annu. Rev. Biochem. 53:323; Itakura et al., 1984, Science 198:1056; Ike et al., 1983, Nucleic Acid Res. 11:477.

[0347] In addition, libraries of fragments of the SRP coding regions can be used to generate a variegated population of SRP fragments for screening and subsequent selection of homologs of a SRP. In one embodiment, a library of coding sequence fragments can be generated by treating a double stranded PCR fragment of a SRP coding sequence with a nuclease under conditions wherein nicking occurs only about once per molecule, denaturing the double stranded DNA, renaturing the DNA to form double stranded DNA, which can include sense/antisense pairs from different nicked products, removing single stranded portions from reformed duplexes by treatment with S1 nuclease, and ligating the resulting fragment library into an expression vector. By this method, an expression library can be derived which encodes N-terminal, C-terminal, and internal fragments of various sizes of the SRP.

[0348] Several techniques are known in the art for screening gene products of combinatorial libraries made by point mutations or truncation, and for screening cDNA libraries for gene products having a selected property. Such techniques are adaptable for rapid screening of the gene libraries generated by the combinatorial mutagenesis of SRP homologs. The most widely used techniques, which are amenable to high through-put analysis, for screening large gene libraries typically include cloning the gene library into replicable expression vectors, transforming appropriate cells with the resulting library of vectors, and expressing the combinatorial genes under conditions in which detection of a desired activity facilitates isolation of the vector encoding the gene whose product was detected. Recursive ensemble mutagenesis (REM), a new technique that enhances the frequency of functional mutants in the libraries, can be used in combination with the screening assays to identify SRP homologs (Arkin and Yourvan, 1992, PNAS 89:7811-7815; Delgrave et al., 1993, Polypeptide Engineering 6(3):327-331). In another embodiment, cell based assays can be exploited to analyze a variegated SRP library, using methods well known in the art. The present invention further provides a method of identifying a novel SRP, comprising (a) raising a specific antibody response to a SRP, or a fragment thereof, as described herein; (b) screening putative SRP material with the antibody, wherein specific binding of the antibody to the material indicates the presence of a potentially novel SRP; and (c) analyzing the bound material in comparison to known SRP, to determine its novelty.

[0349] As stated above, the present invention includes SRPs and homologs thereof. To determine the percent sequence identity of two amino acid sequences (e.g., one of the sequences as shown in Table II, column 4 and 5, and a mutant form thereof), the sequences are aligned for optimal comparison purposes (e.g., gaps can be introduced in the sequence of one polypeptide for optimal alignment with the other polypeptide or nucleic acid). The amino acid residues at corresponding amino acid positions are then compared. When a position in one sequence (e.g., one of the sequences as shown in Table II, column 4 and 5) is occupied by the same amino acid residue as the corresponding position in the other sequence (e.g., a mutant form of the sequence selected from the polypeptide as shown in Table II, column 4 and 5), then the molecules are identical at that position. The same type of comparison can be made between two nucleic acid sequences.

[0350] The percent sequence identity between the two sequences is a function of the number of identical positions shared by the sequences (i.e., percent sequence identity=numbers of identical positions/total numbers of positions×100). Preferably, the isolated amino acid homologs included in the present invention are at least about 50-60%, preferably at least about 60-70%, and more preferably at least about 70-75%, 75-80%, 80-85%, 85-90% or 90-95%, and most preferably at least about 96%, 97%, 98%, 99% or more identical to an entire amino acid sequence as shown in Table II, column 4 and 5. In yet another embodiment, the isolated amino acid homologs included in the present invention are at least about 50-60%, preferably at least about 60-70%, and more preferably at least about 70-75%, 75-80%, 80-85%, 85-90% or 90-95%, and most preferably at least about 96%, 97%, 98%, 99% or more identical to an entire amino acid sequence encoded by a nucleic acid sequenceas shown in Table I, column 4 and 5. In other embodiments, the SRP amino acid homologs have sequence identity over at least 15 contiguous amino acid residues, more preferably at least 25 contiguous amino acid residues, and most preferably at least 35 contiguous amino acid residuesas shown in Table II, column 4 and 5.

[0351] In another preferred embodiment, an isolated nucleic acid homolog of the invention comprises a nucleotide sequence which is at least about 50-60%, preferably at least about 60-70%, more preferably at least about 70-75%, 75-80%, 80-85%, 85-90% or 90-95%, and even more preferably at least about 95%, 96%, 97%, 98%, 99% or more identical to a nucleotide sequence as shown in Table I, column 4 and 5, or to a portion comprising at least 20, 30, 40, 50, 60 consecutive nucleotides thereof. The preferable length of sequence comparison for nucleic acids is at least 75 nucleotides, more preferably at least 100 nucleotides and most preferably the entire length of the coding region.

[0352] It is further preferred that the isolated nucleic acid homolog of the invention encodes a SRP, or portion thereof, that is at least 85% identical to an amino acid sequence as shown in Table II, column 4 and 5 and that functions as a modulator of an environmental stress response in a plant. In a more preferred embodiment, overexpression of the nucleic acid homolog in a plant increases the tolerance of the plant to an environmental stress.

[0353] For the purposes of the invention, the percent sequence identity between two nucleic acid or polypeptide sequences is determined using the Vector NTI 6.0 (PC) software package (InforMax, 7600 Wisconsin Ave., Bethesda, Md. 20814). A gap opening penalty of 15 and a gap extension penalty of 6.66 are used for determining the percent identity of two nucleic acids. A gap opening penalty of 10 and a gap extension penalty of 0.1 are used for determining the percent identity of two polypeptides. All other parameters are set at the default settings. For purposes of a multiple alignment (Clustal W algorithm), the gap opening penalty is 10, and the gap extension penalty is 0.05 with blosum62 matrix. It is to be understood that for the purposes of determining sequence identity when comparing a DNA sequence to an RNA sequence, a thymidine nucleotide is equivalent to a uracil nucleotide.

[0354] In another aspect, the invention provides an isolated nucleic acid comprising a polynucleotide that hybridizes to the polynucleotide as shown in Table I, column 4 and 5 under stringent conditions. More particularly, an isolated nucleic acid molecule of the invention is at least 15 nucleotides in length and hybridizes under stringent conditions to the nucleic acid molecule comprising a nucleotide sequence as shown in Table I, column 4 and 5. In other embodiments, the nucleic acid is at least 30, 50, 100, 250 or more nucleotides in length. Preferably, an isolated nucleic acid homolog of the invention comprises a nucleotide sequence which hybridizes under highly stringent conditions to the nucleotide sequence as shown in Table I, column 4 and 5, and functions as a modulator of stress tolerance in a plant. In a further preferred embodiment, overexpression of the isolated nucleic acid homolog in a plant increases a plant's tolerance to an environmental stress.

[0355] As used herein with regard to hybridization for DNA to DNA blot, the term “stringent conditions” refers in one embodiment to hybridization overnight at 60° C. in 10× Denharts solution, 6×SSC, 0.5% SDS and 100 μg/ml denatured salmon sperm DNA. Blots are washed sequentially at 62° C. for 30 minutes each time in 3×SSC/0.1% SDS, followed by 1×SSC/0.1% SDS and finally 0.1×SSC/0.1% SDS. As also used herein, “highly stringent conditions” refers to hybridization overnight at 65° C. in 10× Denharts solution, 6×SSC, 0.5% SDS and 100 μg/ml denatured salmon sperm DNA. Blots are washed sequentially at 65° C. for 30 minutes each time in 3×SSC/0.1% SDS, followed by 1×SSC/0.1% SDS and finally 0.1×SSC/0.1% SDS. Methods for nucleic acid hybridizations are described in Meinkoth and Wahl, 1984, Anal. Biochem. 138:267-284; Ausubel et al. eds, 1995, Current Protocols in Molecular Biology, Chapter 2, Greene Publishing and Wiley-Interscience, New York; and Tijssen, 1993, Laboratory Techniques in Biochemistry and Molecular Biology: Hybridization with Nucleic Acid Probes, Part I, Chapter 2, Elsevier, New York. Preferably, an isolated nucleic acid molecule of the invention that hybridizes under stringent or highly stringent conditions to a sequence as shown in Table I, column 4 and 5 corresponds to a naturally occurring nucleic acid molecule. As used herein, a “naturally occurring” nucleic acid molecule refers to an RNA or DNA molecule having a nucleotide sequence that occurs in nature (e.g., encodes a natural polypeptide). In one embodiment, the nucleic acid encodes a naturally occurring Saccharomyces cerevisiae, E. coli SRP or a naturally occurring Brassica napus, Glycine max, Zea mays, Triticum aestivum or Oryza sativa or Hordeum vulgare, Helianthus annuus, Linum usitatissimum SRP.

[0356] Using the above-described methods, and others known to those of skill in the art, one of ordinary skill in the art can isolate homologs of the SRPs comprising amino acid sequences as shown in Table II, column 4 and 5. One subset of these homologs are allelic variants. As used herein, the term “allelic variant” refers to a nucleotide sequence containing polymorphisms that lead to changes in the amino acid sequences of a SRP and that exist within a natural population (e.g., a plant species or variety). Such natural allelic variations can typically result in 1-5% variance in a SRP nucleic acid. Allelic variants can be identified by sequencing the nucleic acid sequence of interest in a number of different plants, which can be readily carried out by using hybridization probes to identify the same SRP genetic locus in those plants. Any and all such nucleic acid variations and resulting amino acid polymorphisms or variations in a SRP that are the result of natural allelic variation and that do not alter the functional activity of a SRP, are intended to be within the scope of the invention.

[0357] An isolated nucleic acid molecule encoding a SRP having sequence identity with a polypeptide sequence as shown in Table II, column 4 and 5 can be created by introducing one or more nucleotide substitutions, additions or deletions into a nucleotide sequence as shown in Table I, column 4 and 5, respectively, such that one or more amino acid substitutions, additions, or deletions are introduced into the encoded polypeptide. Mutations can be introduced into one of the sequences as shown in Table I, column 4 and 5 by standard techniques, such as site-directed mutagenesis and PCR-mediated mutagenesis. Preferably, conservative amino acid substitutions are made at one or more predicted non-essential amino acid residues. A “conservative amino acid substitution” is one in which the amino acid residue is replaced with an amino acid residue having a similar side chain.

[0358] Families of amino acid residues having similar side chains have been defined in the art. These families include amino acids with basic side chains (e.g., lysine, arginine, histidine), acidic side chains (e.g., aspartic acid, glutamic acid), uncharged polar side chains (e.g., glycine, asparagine, glutamine, serine, threonine, tyrosine, cysteine), nonpolar side chains (e.g., alanine, valine, leucine, isoleucine, proline, phenylalanine, methionine, tryptophan), beta-branched side chains (e.g., threonine, valine, isoleucine) and aromatic side chains (e.g., tyrosine, phenylalanine, tryptophan, histidine). Thus, a predicted nonessential amino acid residue in a SRP is preferably replaced with another amino acid residue from the same side chain family. Alternatively, in another embodiment, mutations can be introduced randomly along all or part of a SRP coding sequence, such as by saturation mutagenesis, and the resultant mutants can be screened for a SRP activity described herein to identify mutants that retain SRP activity. Following mutagenesis of one of the sequences as shown in Table I, column 4 and 5, the encoded polypeptide can be expressed recombinantly and the activity of the polypeptide can be determined by analyzing the stress tolerance of a plant expressing the polypeptide as described herein.

[0359] Additionally, optimized SRP nucleic acids can be created. As used herein, “optimized” refers to a nucleic acid that is genetically engineered to increase its expression in a given plant or animal. To provide plant optimized SRP nucleic acids, the DNA sequence of the gene can be modified to 1) comprise codons preferred by highly expressed plant genes; 2) comprise an A+T content in nucleotide base composition to that substantially found in plants; 3) form a plant initiation sequence; or 4) eliminate sequences that cause destabilization, inappropriate polyadenylation, degradation, and termination of RNA, or that form secondary structure hairpins or RNA splice sites. Increased expression of SRP nucleic acids in plants can be achieved by utilizing the distribution frequency of codon usage in plants in general or a particular plant. Methods for optimizing nucleic acid expression in plants can be found in EPA 0359472; EPA 0385962; PCT Application No. WO 91/16432; U.S. Pat. No. 5,380,831; U.S. Pat. No. 5,436,391; Perlack et al., 1991, Proc. Natl. Acad. Sci. USA 88:3324-3328; and Murray et al., 1989, Nucleic Acids Res. 17:477-498.

[0360] As used herein, “frequency of preferred codon usage” refers to the preference exhibited by a specific host cell in usage of nucleotide codons to specify a given amino acid. To determine the frequency of usage of a particular codon in a gene, the number of occurrences of that codon in the gene is divided by the total number of occurrences of all codons specifying the same amino acid in the gene. Similarly, the frequency of preferred codon usage exhibited by a host cell can be calculated by averaging frequency of preferred codon usage in a large number of genes expressed by the host cell. It is preferable that this analysis be limited to genes that are highly expressed by the host cell. The percent deviation of the frequency of preferred codon usage for a synthetic gene from that employed by a host cell is calculated first by determining the percent deviation of the frequency of usage of a single codon from that of the host cell followed by obtaining the average deviation over all codons. As defined herein, this calculation includes unique codons (i.e., ATG and TGG). In general terms, the overall average deviation of the codon usage of an optimized gene from that of a host cell is calculated using the equation 1A=n=1 Z Xₙ−YₙXₙ times 100 Z where Xₙ=frequency of usage for codon n in the host cell; Yₙ=frequency of usage for codon n in the synthetic gene; n represents an individual codon that specifies an amino acid; and the total number of codons is Z. The overall deviation of the frequency of codon usage, A, for all amino acids should preferably be less than about 25%, and more preferably less than about 10%.

[0361] Hence, a SRP nucleic acid can be optimized such that its distribution frequency of codon usage deviates, preferably, no more than 25% from that of highly expressed plant genes and, more preferably, no more than about 10%. In addition, consideration is given to the percentage G+C content of the degenerate third base (monocotyledons appear to favor G+C in this position, whereas dicotyledons do not). It is also recognized that the XCG (where X is A, T, C, or G) nucleotide is the least preferred codon in dicots whereas the XTA codon is avoided in both monocots and dicots. Optimized SRP nucleic acids of this invention also preferably have CG and TA doublet avoidance indices closely approximating those of the chosen host plant. More preferably these indices deviate from that of the host by no more than about 10-15%.

[0362] In addition to the nucleic acid molecules encoding the SRPs described above, another aspect of the invention pertains to isolated nucleic acid molecules that are antisense thereto. Antisense polynucleotides are thought to inhibit gene expression of a target polynucleotide by specifically binding the target polynucleotide and interfering with transcription, splicing, transport, translation, and/or stability of the target polynucleotide. Methods are described in the prior art for targeting the antisense polynucleotide to the chromosomal DNA, to a primary RNA transcript, or to a processed mRNA. Preferably, the target regions include splice sites, translation initiation codons, translation termination codons, and other sequences within the open reading frame.

[0363] The term “antisense,” for the purposes of the invention, refers to a nucleic acid comprising a polynucleotide that is sufficiently complementary to all or a portion of a gene, primary transcript, or processed mRNA, so as to interfere with expression of the endogenous gene. “Complementary” polynucleotides are those that are capable of base pairing according to the standard Watson-Crick complementarity rules. Specifically, purines will base pair with pyrimidines to form a combination of guanine paired with cytosine (G:C) and adenine paired with either thymine (A:T) in the case of DNA, or adenine paired with uracil (A:U) in the case of RNA. It is understood that two polynucleotides may hybridize to each other even if they are not completely complementary to each other, provided that each has at least one region that is substantially complementary to the other. The term “antisense nucleic acid” includes single stranded RNA as well as double-stranded DNA expression cassettes that can be transcribed to produce an antisense RNA. “Active” antisense nucleic acids are antisense RNA molecules that are capable of selectively hybridizing with a primary transcript or mRNA encoding a polypeptide having at least 80% sequence identity with the polypeptide as shown in Table II, column 4 and 5.

[0364] The antisense nucleic acid can be complementary to an entire SRP coding strand, or to only a portion thereof. In one embodiment, an antisense nucleic acid molecule is antisense to a “coding region” of the coding strand of a nucleotide sequence encoding a SRP. The term “coding region” refers to the region of the nucleotide sequence comprising codons that are translated into amino acid residues. In another embodiment, the antisense nucleic acid molecule is antisense to a “noncoding region” of the coding strand of a nucleotide sequence encoding a SRP. The term “noncoding region” refers to 5′ and 3′ sequences that flank the coding region that are not translated into amino acids (i.e., also referred to as 5′ and 3′ untranslated regions). The antisense nucleic acid molecule can be complementary to the entire coding region of SRP mRNA, but more preferably is an oligonucleotide which is antisense to only a portion of the coding or noncoding region of SRP mRNA. For example, the antisense oligonucleotide can be complementary to the region surrounding the translation start site of PKSRP mRNA. An antisense oligonucleotide can be, for example, about 5, 10, 15, 20, 25, 30, 35, 40, 45 or 50 nucleotides in length. Typically, the antisense molecules of the present invention comprise an RNA having 60-100% sequence identity with at least 14 consecutive nucleotides of one of the nucleic acid as shown in Table I, column 4 and 5. Preferably, the sequence identity will be at least 70%, more preferably at least 75%, 80%, 85%, 90%, 95%, 98% and most preferably 99%.

[0365] An antisense nucleic acid of the invention can be constructed using chemical synthesis and enzymatic ligation reactions using procedures known in the art. For example, an antisense nucleic acid (e.g., an antisense oligonucleotide) can be chemically synthesized using naturally occurring nucleotides or variously modified nucleotides designed to increase the biological stability of the molecules or to increase the physical stability of the duplex formed between the antisense and sense nucleic acids, e.g., phosphorothioate derivatives and acridine substituted nucleotides can be used. Examples of modified nucleotides which can be used to generate the antisense nucleic acid include 5-fluorouracil, 5-bromouracil, 5-chlorouracil, 5-iodouracil, hypoxanthine, xanthine, 4-acetylcytosine, 5-(carboxyhydroxylmethyl)uracil, 5-carboxymethylaminomethyl-2-thiouridine, 5-carboxymethylaminomethyluracil, dihydrouracil, beta-D-galactosylqueosine, inosine, N6-isopentenyladenine, 1-methylguanine, 1-methylinosine, 2,2-dimethylguanine, 2-methyladenine, 2-methylguanine, 3-methylcytosine, 5-methylcytosine, N6-adenine, 7-methylguanine, 5-methylaminomethyluracil, 5-methoxyaminomethyl-2-thiouracil, beta-D-mannosylqueosine, 5′-methoxycarboxymethylu racil, 5-methoxyuracil, 2-methylthio-N-6-isopentenyladenine, uracil-5-oxyacetic acid (v), wybutoxosine, pseudouracil, queosine, 2-thiocytosine, 5-methyl-2-thiouracil, 2-thiouracil, 4-thiouracil, 5-methyluracil, uracil-5-oxyacetic acid methylester, uracil-5-oxyacetic acid (v), 5-methyl-2-thiouracil, 3-(3-amino-3-N2-carboxypropyl)uracil, (acp3)w, and 2,6-diaminopurine. Alternatively, the antisense nucleic acid can be produced biologically using an expression vector into which a nucleic acid has been subcloned in an antisense orientation (i.e., RNA transcribed from the inserted nucleic acid will be of an antisense orientation to a target nucleic acid of interest, described further in the following subsection).

[0366] In yet another embodiment, the antisense nucleic acid molecule of the invention is an α-anomeric nucleic acid molecule. An α-anomeric nucleic acid molecule forms specific double-stranded hybrids with complementary RNA in which, contrary to the usual β-units, the strands run parallel to each other (Gaultier et al., 1987, Nucleic Acids. Res. 15:6625-6641). The antisense nucleic acid molecule can also comprise a 2′-o-methylribonucleotide (Inoue et al., 1987, Nucleic Acids Res. 15:6131-6148) or a chimeric RNA-DNA analogue (Inoue et al., 1987, FEBS Lett. 215:327-330).

[0367] The antisense nucleic acid molecules of the invention are typically administered to a cell or generated in situ such that they hybridize with or bind to cellular mRNA and/or genomic DNA encoding a SRP to thereby inhibit expression of the polypeptide, e.g., by inhibiting transcription and/or translation. The hybridization can be by conventional nucleotide complementarity to form a stable duplex, or, for example, in the case of an antisense nucleic acid molecule which binds to DNA duplexes, through specific interactions in the major groove of the double helix. The antisense molecule can be modified such that it specifically binds to a receptor or an antigen expressed on a selected cell surface, e.g., by linking the antisense nucleic acid molecule to a peptide or an antibody which binds to a cell surface receptor or antigen. The antisense nucleic acid molecule can also be delivered to cells using the vectors described herein. To achieve sufficient intracellular concentrations of the antisense molecules, vector constructs in which the antisense nucleic acid molecule is placed under the control of a strong prokaryotic, viral, or eukaryotic (including plant) promoter are preferred.

[0368] As an alternative to antisense polynucleotides, ribozymes, sense polynucleotides, or double stranded RNA (dsRNA) can be used to reduce expression of a SRP polypeptide. By “ribozyme” is meant a catalytic RNA-based enzyme with ribonuclease activity which is capable of cleaving a single-stranded nucleic acid, such as an mRNA, to which it has a complementary region. Ribozymes (e.g., hammerhead ribozymes described in Haselhoff and Gerlach, 1988, Nature 334:585-591) can be used to catalytically cleave SRP mRNA transcripts to thereby inhibit translation of SRP mRNA. A ribozyme having specificity for a SRP-encoding nucleic acid can be designed based upon the nucleotide sequence of a SRP cDNA, as disclosed herein or on the basis of a heterologous sequence to be isolated according to methods taught in this invention. For example, a derivative of a Tetrahymena L-19 IVS RNA can be constructed in which the nucleotide sequence of the active site is complementary to the nucleotide sequence to be cleaved in a SRP-encoding mRNA. See, e.g., U.S. Pat. Nos. 4,987,071 and 5,116,742 to Cech et al. Alternatively, SRP mRNA can be used to select a catalytic RNA having a specific ribonuclease activity from a pool of RNA molecules. See, e.g., Bartel, D. and Szostak, J. W., 1993, Science 261:1411-1418. In preferred embodiments, the ribozyme will contain a portion having at least 7, 8, 9, 10, 12, 14, 16, 18 or 20 nucleotides, and more preferably 7 or 8 nucleotides, that have 100% complementarity to a portion of the target RNA. Methods for making ribozymes are known to those skilled in the art. See, e.g., U.S. Pat. Nos. 6,025,167; 5,773,260; and 5,496,698.

[0369] The term “dsRNA,” as used herein, refers to RNA hybrids comprising two strands of RNA. The dsRNAs can be linear or circular in structure. In a preferred embodiment, dsRNA is specific for a polynucleotide encoding either the polypeptide as shown in Table II, column 4 and 5 or a polypeptide having at least 70% sequence identity with a polypeptide as shown in Table II, column 4 and 5. The hybridizing RNAs may be substantially or completely complementary. By “substantially complementary,” is meant that when the two hybridizing RNAs are optimally aligned using the BLAST program as described above, the hybridizing portions are at least 95% complementary. Preferably, the dsRNA will be at least 100 base pairs in length. Typically, the hybridizing RNAs will be of identical length with no over hanging 5′ or 3′ ends and no gaps. However, dsRNAs having 5′ or 3′ overhangs of up to 100 nucleotides may be used in the methods of the invention.

[0370] The dsRNA may comprise ribonucleotides or ribonucleotide analogs, such as 2′-O-methyl ribosyl residues, or combinations thereof. See, e.g., U.S. Pat. Nos. 4,130,641 and 4,024,222. A dsRNA polyriboinosinic acid:polyribocytidylic acid is described in U.S. Pat. No. 4,283,393. Methods for making and using dsRNA are known in the art. One method comprises the simultaneous transcription of two complementary DNA strands, either in vivo, or in a single in vitro reaction mixture. See, e.g., U.S. Pat. No. 5,795,715. In one embodiment, dsRNA can be introduced into a plant or plant cell directly by standard transformation procedures. Alternatively, dsRNA can be expressed in a plant cell by transcribing two complementary RNAs.

[0371] Other methods for the inhibition of endogenous gene expression, such as triple helix formation (Moser et al., 1987, Science 238:645-650 and Cooney et al., 1988, Science 241:456-459) and cosuppression (Napoli et al., 1990, The Plant Cell 2:279-289) are known in the art. Partial and full-length cDNAs have been used for the cosuppression of endogenous plant genes. See, e.g., U.S. Pat. Nos. 4,801,340, 5,034,323, 5,231,020, and 5,283,184; Van der Kroll et al., 1990, The Plant Cell 2:291-299; Smith et al., 1990, Mol. Gen. Genetics 224:477-481 and Napoli et al., 1990, The Plant Cell 2:279-289.

[0372] For sense suppression, it is believed that introduction of a sense polynucleotide blocks transcription of the corresponding target gene. The sense polynucleotide will have at least 65% sequence identity with the target plant gene or RNA. Preferably, the percent identity is at least 80%, 90%, 95% or more. The introduced sense polynucleotide need not be full length relative to the target gene or transcript. Preferably, the sense polynucleotide will have at least 65% sequence identity with at least 100 consecutive nucleotides of one of the nucleic acids as shown in Table I, column 4 and 5. The regions of identity can comprise introns and/or exons and untranslated regions. The introduced sense polynucleotide may be present in the plant cell transiently, or may be stably integrated into a plant chromosome or extrachromosomal replicon.

[0373] Moreover, nucleic acid molecules encoding SRP from the same or other species such as SRP analogs, orthologs and paralogs, are intended to be within the scope of the present invention. As used herein, the term “analogs” refers to two nucleic acids that have the same or similar function, but that have evolved separately in unrelated organisms. As used herein, the term “orthologs” refers to two nucleic acids from different species that have evolved from a common ancestral gene by speciation. Normally, orthologs encode proteins having the same or similar functions. As also used herein, the term “paralogs” refers to two nucleic acids that are related by duplication within a genome. Paralogs usually have different functions, but these functions may be related (Tatusov, R. L. et al. 1997 Science 278(5338):631-637). Analogs, orthologs and paralogs of a naturally occurring stress related protein can differ from the naturally occurring stress related protein by post-translational modifications, by amino acid sequence differences, or by both. Post-translational modifications include in vivo and in vitro chemical derivatization of polypeptides e.g., acetylation, carboxylation, phosphorylation or glycosylation, and such modifications may occur during polypeptide synthesis or processing or following treatment with isolated modifying enzymes. In particular, orthologs of the invention will generally exhibit at least 80-85%, more preferably 90%, 91%, 92%, 93%, 94%, and most preferably 95%, 96%, 97%, 98% or even 99% identity or homology with all or part of a naturally occurring stress related protein amino acid sequence and will exhibit a function similar to a stress related protein. Orthologs of the present invention are also preferably capable of participating in the stress response in plants.

[0374] In addition to naturally-occurring variants of a stress related protein sequence that may exist in the population, the skilled artisan will further appreciate that changes can be introduced by mutation into a nucleotide sequence as shown in Table I, column 4 and 5, thereby leading to changes in the amino acid sequence of the encoded stress related protein, without altering the functional ability of the stress related protein or enhancing the functional ability of the stress related protein. For example, nucleotide substitutions leading to amino acid substitutions at “non-essential” amino acid residues can be made in a sequence as shown in Table II, column 4 and 5. “non-essential” amino acid residue is a residue that can be altered from the wild-type sequence of one of stress related proteins without altering the activity thereof, whereas an “essential” amino acid residue is required for stress related protein activity. Other amino acid residues, however, (e.g., those that are not conserved or only semi-conserved in the domain having SRP activity) may not be essential for activity and thus are likely to be amenable to alteration without altering SRP activity.

[0375] Accordingly, another aspect of the invention pertains to nucleic acid molecules encoding stress related proteins that contain changes in amino acid residues that are not essential for stress related protein activity. Such SRP differ in amino acid sequence from a sequence as shown in Table II, column 4 and 5, yet retain at least one of the stress related protein activities described herein. In one embodiment, the isolated nucleic acid molecule comprises a nucleotide sequence encoding a protein, wherein the protein comprises an amino acid sequence at least about 50% homologous to an amino acid sequence as shown in Table II, column 4 and 5. Preferably, the protein encoded by the nucleic acid molecule is at least about 50-60% homologous to one of the sequences as shown in Table I, column 4 and 5, more preferably at least about 60-70% homologous to one of the sequences as shown in Table I, column 4 and 5, even more preferably at least about 70-80%, 80-90%, more preferably 90%, 91%, 92%, 93%, 94% homologous to one of the sequences as shown in Table I, column 4 and 5 and most preferably at least about 96%, 97%, 98%, or 99% homologous to one of the sequences of the as shown in Table I, column 4 and 5. The preferred stress related protein homologs of the present invention are preferably capable of participating in the stress tolerance response in a plant. The homology (=identity) was calculated over the entire amino acid range. The program used was PileUp (J. Mol. Evolution., 25 (1987), 351-360, Higgins et al., CABIOS, 5 1989: 151-153).

[0376] Homologs of the sequences as shown in Table I, column 4 and 5 are furthermore to be understood as meaning, for example, homologs, analogs, orthologs and paralogs which have at least 30% homology (=identity) at the derived amino acid level, preferably at least 50%, 60%, 70% or 80% homology, especially preferably at least 85% homology, very especially preferably 90% 91%, 92%, 93%, 94% homology, most preferably 95%, 96%, 97%, 98% or 99% homology. The homology (=identity) was calculated over the entire amino acid range. The program used was PileUp (J. Mol. Evolution., 25 (1987), 351-360, Higgens et al., CABIOS, 5 1989: 151-153) or the program Gap and BestFit [Needleman and Wunsch (J. Mol. Biol. 48; 443-453 (1970) and Smith and Waterman respectively (Adv. Appl. Math. 2; 482-489 (1981)] which are part of the GCG software package [Genetics Computer Group, 575 Science Drive, Madison, Wis., USA 53711 (1991)]. The above mentioned percentages of sequence homology are calculated with the program BestFit or Gap, preferably Gap, over the total sequence length with the following parameters used: Gap Weight: 8, Length Weight: 2.

[0377] For the determination of the percentage homology (=identity) of two or more amino acids or of two or more nucleotide sequences several computer software programs have been developed. The homology of two or more sequences can be calculated with for example the software fasta, which presently has been used in the version fasta 3 (W. R. Pearson and D. J. Lipman (1988), Improved Tools for Biological Sequence Comparison. PNAS 85:2444-2448; W. R. Pearson (1990) Rapid and Sensitive Sequence Comparison with FASTP and FASTA, Methods in Enzymology 183:63-98; W. R. Pearson and D. J. Lipman (1988) Improved Tools for Biological Sequence Comparison. PNAS 85:2444-2448; W. R. Pearson (1990); Rapid and Sensitive Sequence Comparison with FASTP and FASTAMethods in Enzymology 183:63-98). Another useful program for the calculation of homologies of different sequences is the standard blast program, which is included in the Biomax pedant software (Biomax, Munich, Federal Republic of Germany). This leads unfortunately sometimes to suboptimal results since blast does not always include complete sequences of the subject and the query. Nevertheless as this program is very efficient it can be used for the comparison of a huge number of sequences. The following settings are typically used for such a comparisons of sequences:

—p Program Name [String]; —d Database [String]; default=nr; —i Query File [File In]; default=stdin; —e Expectation value (E) [Real]; default=10.0; —m alignment view options: 0=pairwise; 1=query-anchored showing identities; 2=query-anchored no identities; 3=flat query-anchored, show identities; 4=flat query-anchored, no identities; 5=query-anchored no identities and blunt ends; 6=flat query-anchored, no identities and blunt ends; 7=XML Blast output; 8=tabular; 9 tabular with comment lines [Integer]; default=0; —o BLAST report Output File [File Out] Optional; default=stdout; —F Filter query sequence (DUST with blastn, SEG with others) [String]; default=T; —G Cost to open a gap (zero invokes default behavior) [Integer]; default=0; —E Cost to extend a gap (zero invokes default behavior) [Integer]; default=0; —X X dropoff value for gapped alignment (in bits) (zero invokes default behavior); blastn 30, megablast 20, tblastx 0, all others 15 [Integer]; default=0; —I Show GI's in deflines [T/F]; default=F; —q Penalty for a nucleotide mismatch (blastn only) [Integer]; default=−3; —r Reward for a nucleotide match (blastn only) [Integer]; default=1; —v Number of database sequences to show one-line descriptions for (V) [Integer]; default=500; —b Number of database sequence to show alignments for (B) [Integer]; default=250; —f Threshold for extending hits, default if zero; blastp 11, blastn 0, blastx 12, tblastn 13; tblastx 13, megablast 0 [Integer]; default=0; —g Perform gapped alignment (not available with tblastx) [T/F]; default=T; —Q Query Genetic code to use [Integer]; default=1; —D DB Genetic code (for tblast[nx] only) [Integer]; default=1; —a Number of processors to use [Integer]; default=1; —O SeqAlign file [File Out] Optional; —J Believe the query defline [T/F]; default=F; —M Matrix [String]; default=BLOSUM62; —W Word size, default if zero (blastn 11, megablast 28, all others 3) [Integer]; default=0; —z Effective length of the database (use zero for the real size) [Real]; default=0; —K Number of best hits from a region to keep (off by default, if used a value of 100 is recommended) [Integer]; default=0; —P 0 for multiple hit, 1 for single hit [Integer]; default=0; —Y Effective length of the search space (use zero for the real size) [Real]; default=0; —S Query strands to search against database (for blast[nx], and tblastx); 3 is both, 1 is top, 2 is bottom [Integer]; default=3; —T Produce HTML output [T/F]; default=F; —I Restrict search of database to list of GI's [String] Optional; —U Use lower case filtering of FASTA sequence [T/F] Optional; default=F; —y X dropoff value for ungapped extensions in bits (0.0 invokes default behavior); blastn 20, megablast 10, all others 7 [Real]; default=0.0; —Z X dropoff value for final gapped alignment in bits (0.0 invokes default behavior); blastn/megablast 50, tblastx 0, all others 25 [Integer]; default=0; —R PSI-TBLASTN checkpoint file [File In] Optional; —n MegaBlast search [T/F]; default=F; —L Location on query sequence [String] Optional; —A Multiple Hits window size, default if zero (blastn/megablast 0, all others 40 [Integer]; default=0; —w Frame shift penalty (OOF algorithm for blastx) [Integer]; default=0; —t Length of the largest intron allowed in tblastn for linking HSPs (0 disables linking) [Integer]; default=0.

[0378] Results of high quality are reached by using the algorithm of Needleman and Wunsch or Smith and Waterman. Therefore programs based on said algorithms are preferred. Advantageously the comparisons of sequences can be done with the program PileUp (J. Mol. Evolution., 25, 351-360, 1987, Higgins et al., CABIOS, 5 1989: 151-153) or preferably with the programs Gap and BestFit, which are respectively based on the algorithms of Needleman and Wunsch [J. Mol. Biol. 48; 443-453 (1970)] and Smith and Waterman [Adv. Appl. Math. 2; 482-489 (1981)]. Both programs are part of the GCG software-package [Genetics Computer Group, 575 Science Drive, Madison, Wis., USA 53711 (1991); Altschul et al. (1997) Nucleic Acids Res. 25:3389 et seq.]. Therefore preferably the calculations to determine the percentages of sequence homology are done with the program Gap over the whole range of the sequences. The following standard adjustments for the comparison of nucleic acid sequences were used: gap weight: 50, length weight: 3, average match: 10.000, average mismatch: 0.000.

[0379] For the comparison of amino acid sequences the same algorithms as described above or nucleic acid sequences can be used. Results of high quality are reached by using the algorithm of Needleman and Wunsch or Smith and Waterman. Therefore programs based on said algorithms are preferred. Advantageously the comparisons of sequences can be done with the program PileUp (J. Mol. Evolution., 25, 351-360, 1987, Higgins et al., CABIOS, 5 1989: 151-153) or preferably with the programs Gap and BestFit, which are respectively based on the algorithms of Needleman and Wunsch [J. Mol. Biol. 48; 443-453 (1970)] and Smith and Waterman [Adv. Appl. Math. 2; 482-489 (1981)]. Both programs are part of the GCG software-package [Genetics Computer Group, 575 Science Drive, Madison, Wis., USA 53711 (1991); Altschul et al. (1997) Nucleic Acids Res. 25:3389 et seq.]. Therefore preferably the calculations to determine the percentages of sequence homology are done with the program Gap over the whole range of the sequences. The following standard adjustments for the comparison of amino acid sequences were used: gap weight: 8, length weight: 2, average match: 2.912, average mismatch: −2.003.

[0380] Variants shall also be encompassed, in particular, functional variants which can be obtained from the sequence as shown in Table I, column 4 and 5 by means of deletion, insertion or substitution of nucleotides, the enzymatic activity of the derived synthetic proteins being retained or enhanced.

[0381] An isolated nucleic acid molecule encoding a stress related protein homologous to a protein sequence as shown in Table II, column 4 and 5 can be created by introducing one or more nucleotide substitutions, additions or deletions into a nucleotide sequence as shown in Table I, column 4 and 5 such that one or more amino acid substitutions, additions or deletions are introduced into the encoded protein. Mutations can be introduced into one of the sequences as shown in Table I, column 4 and 5 by standard techniques, such as site-directed mutagenesis and PCR-mediated mutagenesis. Another route to the mutagenesis of enzymes, disclosed in the European Publication EP-A-0 909 821, is a method using the specific Escherichia coli strain XL1-Red to generate mutants and altered the enzyme activity.

[0382] Preferably, conservative amino acid substitutions are made at one or more predicted non-essential amino acid residues. A “conservative amino acid substitution” is one in which the amino acid residue is replaced with an amino acid residue having a similar side chain.

[0383] Families of amino acid residues having similar side chains have been defined in the art. These families include amino acids with basic side chains (e.g., lysine, arginine, histidine), acidic side chains (e.g., aspartic acid, glutamic acid), uncharged polar side chains (e.g., glycine, asparagine, glutamine, serine, threonine, tyrosine, cysteine), nonpolar side chains (e.g., alanine, valine, leucine, isoleucine, proline, phenylalanine, methionine, tryptophan), beta-branched side chains (e.g., threonine, valine, isoleucine) and aromatic side chains (e.g., tyrosine, phenylalanine, tryptophan, histidine). Thus, a predicted nonessential amino acid residue in a stress related protein is preferably replaced with another amino acid residue from the same side chain family. Alternatively, in another embodiment, mutations can be introduced randomly along all or part of a stress related protein coding sequence, such as by saturation mutagenesis, and the resultant mutants can be screened for a stress related protein activity as described herein to identify mutants that retain stress related protein activity or show enhanced stress related protein activity. Following mutagenesis of one of the sequences of the nucleic acid as shown in Table I, column 4 and 5, the encoded protein can be expressed recombinantly and the activity of the protein can be determined by analyzing the stress tolerance of a plant expressing the protein as described in the examples below.

[0384] A useful method to ascertain the level of transcription of the gene (an indicator of the amount of mRNA available for translation to the gene product) is to perform a Northern blot (for reference see, for example, Ausubel et al., 1988 Current Protocols in Molecular Biology, Wiley: New York). This information at least partially demonstrates the degree of transcription of the gene. Total cellular RNA can be prepared from cells, tissues or organs by several methods, all well-known in the art, such as that described in Bormann, E. R. et al., 1992 Mol. Microbiol. 6:317-326. To assess the presence or relative quantity of protein translated from this mRNA, standard techniques, such as a Western blot, may be employed. These techniques are well known to one of ordinary skill in the art (see, for example, Ausubel et al., 1988 Current Protocols in Molecular Biology, Wiley: New York).

[0385] The present invention also relates to a plant expression cassette comprising a SRP coding nucleic acid selected from the group comprising as shown in Table I, column 4 and 5 and/or homologs or parts thereof operatively linked to regulatory sequences and/or targeting sequences.

[0386] Further, object of the invention is an expression vector comprising a SRP encoding nucleic acid selected from the group comprising sequences of the nucleic acid of as shown in Table I, column 4 and 5 and/or homologs or parts thereof or a plant expression cassette as described above, whereby expression of the SRP coding nucleic acid in a host cell results in increased tolerance to environmental stress as compared to a corresponding non-transformed wild type host cell.

[0387] The invention further provides an isolated recombinant expression vector comprising a stress related protein encoding nucleic acid as described above, wherein expression of the vector or stress related protein encoding nucleic acid, respectively in a host cell results in increased tolerance and/or resistance to environmental stress as compared to the corresponding non-transformed wild type of the host cell. As used herein, the term “vector” refers to a nucleic acid molecule capable of transporting another nucleic acid to which it has been linked. One type of vector is a “plasmid”, which refers to a circular double stranded DNA loop into which additional DNA segments can be ligated. Another type of vector is a viral vector, wherein additional DNA segments can be ligated into the viral genome. Further types of vectors can be linearized nucleic acid sequences, such as transposons, which are pieces of DNA which can copy and insert themselves. There have been 2 types of transposons found: simple transposons, known as Insertion Sequences and composite transposons, which can have several genes as well as the genes that are required for transposition.

[0388] Certain vectors are capable of autonomous replication in a host cell into which they are introduced (e.g., bacterial vectors having a bacterial origin of replication and episomal mammalian vectors). Other vectors (e.g., non-episomal mammalian vectors) are integrated into the genome of a host cell upon introduction into the host cell, and thereby are replicated along with the host genome. Moreover, certain vectors are capable of directing the expression of genes to which they are operatively linked. Such vectors are referred to herein as “expression vectors”. In general, expression vectors of utility in recombinant DNA techniques are often in the form of plasmids. In the present specification, “plasmid” and “vector” can be used interchangeably as the plasmid is the most commonly used form of vector. However, the invention is intended to include such other forms of expression vectors, such as viral vectors (e.g., replication defective retroviruses, adenoviruses and adeno-associated viruses), which serve equivalent functions.

[0389] A plant expression cassette preferably contains regulatory sequences capable of driving gene expression in plant cells and operably linked so that each sequence can fulfill its function, for example, termination of transcription by polyadenylation signals. Preferred polyadenylation signals are those originating from Agrobacterium tumefaciens T-DNA such as the gene 3 known as octopine synthase of the Ti-plasmid pTiACH5 (Gielen et al., 1984 EMBO J. 3:835) or functional equivalents thereof but also all other terminators functionally active in plants are suitable.

[0390] As plant gene expression is very often not limited on transcriptional levels, a plant expression cassette preferably contains other operably linked sequences like translational enhancers such as the overdrive-sequence containing the 5′-untranslated leader sequence from tobacco mosaic virus enhancing the protein per RNA ratio (Gallie et al., 1987 Nucl. Acids Research 15:8693-8711).

[0391] Plant gene expression has to be operably linked to an appropriate promoter conferring gene expression in a timely, cell or tissue specific manner. Preferred are promoters driving constitutive expression (Benfey et al., 1989 EMBO J. 8:2195-2202) like those derived from plant viruses like the 35S CaMV (Franck et al., 1980 Cell 21:285-294), the 19S CaMV (see also U.S. Pat. No. 5,352,605 and PCT Application No. WO 8402913) or plant promoters like those from Rubisco small subunit described in U.S. Pat. No. 4,962,028.

[0392] Additional advantageous regulatory sequences are, for example, included in the plant promoters such as CaMV/35S [Franck et al., Cell 21 (1980) 285-294], PRP1 [Ward et al., Plant. Mol. Biol. 22 (1993)], SSU, OCS, lib4, usp, STLS1, B33, LEB4, nos or in the ubiquitin, napin or phaseolin promoter. Also advantageous in this connection are inducible promoters such as the promoters described in EP-A-0 388 186 (benzyl sulfonamide inducible), Plant J. 2, 1992: 397-404 (Gatz et al., Tetracyclin inducible), EP-A-0 335 528 (abscisic acid inducible) or WO 93/21334 (ethanol or cyclohexenol inducible). Additional useful plant promoters are the cytosolic FBPase promotor or ST-LSI promoter of the potato (Stockhaus et al., EMBO J. 8, 1989, 2445), the phosphorybosyl phyrophoshate amido transferase promoter of Glycine max (gene bank accession No. U87999) or the noden specific promoter described in EP-A-0 249 676. Additional particularly advantageous promoters are seed specific promoters which can be used for monokotyledones or dikotyledones and are described in U.S. Pat. No. 5,608,152 (napin promoter from rapeseed), WO 98/45461 (phaseolin promoter from Arabidopsis), U.S. Pat. No. 5,504,200 (phaseolin promoter from Phaseolus vulgaris), WO 91/13980 (Bce4 promoter from Brassica) and Baeumlein et al., Plant J., 2, 2, 1992: 233-239 (LEB4 promoter from leguminosa). Said promoters are useful in dikotyledones. The following promoters are useful for example in monokotyledones Ipt-2- or Ipt-1-promoter from barley (WO 95/15389 and WO 95/23230) or hordein promoter from barley. Other useful promoters are described in WO 99/16890.

[0393] It is possible in principle to use all natural promoters with their regulatory sequences like those mentioned above for the novel process. It is also possible and advantageous in addition to use synthetic promoters.

[0394] The gene construct may also comprise further genes which are to be inserted into the organisms and which are for example involved in stress resistance. It is possible and advantageous to insert and express in host organisms regulatory genes such as genes for inducers, repressors or enzymes which intervene by their enzymatic activity in the regulation, or one or more or all genes of a biosynthetic pathway. These genes can be heterologous or homologous in origin. The inserted genes may have their own promoter or else be under the control of same promoter as the sequences of the nucleic acid as shown in Table I, column 4 and 5 or their homologs.

[0395] The gene construct advantageously comprises, for expression of the other genes present, additionally 3′ and/or 5′ terminal regulatory sequences to enhance expression, which are selected for optimal expression depending on the selected host organism and gene or genes.

[0396] These regulatory sequences are intended to make specific expression of the genes and protein expression possible as mentioned above. This may mean, depending on the host organism, for example that the gene is expressed or overexpressed only after induction, or that it is immediately expressed and/or overexpressed.

[0397] The regulatory sequences or factors may moreover preferably have a beneficial effect on expression of the introduced genes, and thus increase it. It is possible in this way for the regulatory elements to be enhanced advantageously at the transcription level by using strong transcription signals such as promoters and/or enhancers. However, in addition, it is also possible to enhance translation by, for example, improving the stability of the mRNA.

[0398] Other preferred sequences for use in plant gene expression cassettes are targeting-sequences necessary to direct the gene product in its appropriate cell compartment (for review see Kermode, 1996 Crit. Rev. Plant Sci. 15(4):285-423 and references cited therein) such as the vacuole, the nucleus, all types of plastids like amyloplasts, chloroplasts, chromoplasts, the extracellular space, mitochondria, the endoplasmic reticulum, oil bodies, peroxisomes and other compartments of plant cells.

[0399] Plant gene expression can also be facilitated via an inducible promoter (for review see Gatz, 1997 Annu. Rev. Plant Physiol. Plant Mol. Biol. 48:89-108). Chemically inducible promoters are especially suitable if gene expression is wanted to occur in a time specific manner.

[0400] Table 1 lists several examples of promoters that may be used to regulate transcription of the stress related protein nucleic acid coding sequences.

[0401] Tab. 1: Examples of Tissue-specific and Stress inducible promoters in plants

### EXPRESSION REFERENCE

[0402] Cor78—Cold, drought, salt, Ishitani, et al., Plant Cell 9:1935-1949 (1997).
[0403] ABA, wounding-inducible Yamaguchi-Shinozaki and Shinozaki, Plant Cell 6:251-264 (1994).
[0404] Rci2A—Cold, dehydration-inducible Capel et al., Plant Physiol 115:569-576 (1997)
[0405] Rd22—Drought, salt Yamaguchi-Shinozaki and Shinozaki, Mol Gen Genet. 238:17-25 (1993).
[0406] Cor15A—Cold, dehydration, ABA Baker et al., Plant Mol. Biol. 24:701-713 (1994).
[0407] GH3—Auxin inducible Liu et al., Plant Cell 6:645-657 (1994)
[0408] ARSK1-Root, salt inducible Hwang and Goodman, Plant J 8:37-43 (1995).
[0409] PtxA—Root, salt inducible GenBank accession X67427
[0410] SbHRGP3—Root specific Ahn et al., Plant Cell 8:1477-1490 (1998).
[0411] KST1—Guard cell specific Plesch et al., Plant Journal. 28(4):455-64, (2001)
[0412] KAT1—Guard cell specific Plesch et al., Gene 249:83-89 (2000)
   [0413] Nakamura et al., Plant Physiol. 109:371-374 (1995)
[0414] salicylic acid inducible PCT Application No. WO 95/19443
[0415] tetracycline inducible Gatz et al. Plant J. 2:397-404 (1992)
[0416] Ethanol inducible PCT Application No. WO 93/21334
[0417] pathogen inducible PRP1 Ward et al., 1993 Plant. Mol. Biol. 22:361-366
[0418] heat inducible hsp80 U.S. Pat. No. 5,187,267
[0419] cold inducible alpha-amylase PCT Application No. WO 96/12814
[0420] Wound-inducible pinII European Patent No. 375091
[0421] RD29A—salt-inducible Yamaguchi-Shinozalei et al. (1993) Mol. Gen. Genet. 236:331-340
[0422] plastid-specific viral RNA-polymerase PCT Application No. WO 95/16783 and. WO 97/06250

[0423] Other promoters, e.g. superpromotor (Ni et al., Plant Journal 7, 1995: 661-676), Ubiquitin promotor (Callis et al., J. Biol. Chem., 1990, 265: 12486-12493; U.S. Pat. No. 5,510,474; U.S. Pat. No. 6,020,190; Kawalleck et al., Plant. Molecular Biology, 1993, 21: 673-684) or 34S promotor (GenBank Accession numbers M59930 and X16673) were similar useful for the present invention and are known to a person skilled in the art.

[0424] Developmental stage-preferred promoters are preferentially expressed at certain stages of development. Tissue and organ preferred promoters include those that are preferentially expressed in certain tissues or organs, such as leaves, roots, seeds, or xylem. Examples of tissue preferred and organ preferred promoters include, but are not limited to fruit-preferred, ovule-preferred, male tissue-preferred, seed-preferred, integument-preferred, tuber-preferred, stalk-preferred, pericarp-preferred, and leaf-preferred, stigma-preferred, pollen-preferred, anther-preferred, a petal-preferred, sepal-preferred, pedicel-preferred, silique-preferred, stem-preferred, root-preferred promoters, and the like. Seed preferred promoters are preferentially expressed during seed development and/or germination. For example, seed preferred promoters can be embryo-preferred, endosperm preferred, and seed coat-preferred. See Thompson et al., 1989, BioEssays 10:108. Examples of seed preferred promoters include, but are not limited to, cellulose synthase (celA), Cim1, gamma-zein, globulin-1, maize 19 kD zein (cZ19B1), and the like.

[0425] Other promoters useful in the expression cassettes of the invention include, but are not limited to, the major chlorophyll a/b binding protein promoter, histone promoters, the Ap3 promoter, the β-conglycin promoter, the napin promoter, the soybean lectin promoter, the maize 15 kD zein promoter, the 22 kD zein promoter, the 27 kD zein promoter, the g-zein promoter, the waxy, shrunken 1, shrunken 2 and bronze promoters, the Zm13 promoter (U.S. Pat. No. 5,086,169), the maize polygalacturonase promoters (PG) (U.S. Pat. Nos. 5,412,085 and 5,545,546), and the SGB6 promoter (U.S. Pat. No. 5,470,359), as well as synthetic or other natural promoters.

[0426] Additional flexibility in controlling heterologous gene expression in plants may be obtained by using DNA binding domains and response elements from heterologous sources (i.e., DNA binding domains from non-plant sources). An example of such a heterologous DNA binding domain is the LexA DNA binding domain (Brent and Ptashne, 1985, Cell 43:729-736).

[0427] The invention further provides a recombinant expression vector comprising a SRP DNA molecule of the invention cloned into the expression vector in an antisense orientation. That is, the DNA molecule is operatively linked to a regulatory sequence in a manner that allows for expression (by transcription of the DNA molecule) of an RNA molecule that is antisense to a SRP mRNA. Regulatory sequences operatively linked to a nucleic acid molecule cloned in the antisense orientation can be chosen which direct the continuous expression of the antisense RNA molecule in a variety of cell types. For instance, viral promoters and/or enhancers, or regulatory sequences can be chosen which direct constitutive, tissue specific, or cell type specific expression of antisense RNA. The antisense expression vector can be in the form of a recombinant plasmid, phagemid, or attenuated virus wherein antisense nucleic acids are produced under the control of a high efficiency regulatory region. The activity of the regulatory region can be determined by the cell type into which the vector is introduced. For a discussion of the regulation of gene expression using antisense genes, see Weintraub, H. et al., 1986, Antisense RNA as a molecular tool for genetic analysis, Reviews—Trends in Genetics, Vol. 1(1), and Mol et al., 1990, FEBS Letters 268:427-430.

[0428] Another aspect of the invention pertains to host cells into which a recombinant expression vector of the invention has been introduced. The terms “host cell” and “recombinant host cell” are used interchangeably herein. It is understood that such terms refer not only to the particular subject cell but they also apply to the progeny or potential progeny of such a cell. Because certain modifications may occur in succeeding generations due to either mutation or environmental influences, such progeny may not, in fact, be identical to the parent cell, but are still included within the scope of the term as used herein. A host cell can be any prokaryotic or eukaryotic cell. For example, a SRP can be expressed in bacterial cells such as C. glutamicum, yeast, E. coli, insect cells, fungal cells, or mammalian cells (such as Chinese hamster ovary cells (CHO) or COS cells), algae, ciliates, plant cells, fungi, or other microorganisms like C. glutamicum. Other suitable host cells are known to those skilled in the art.

[0429] A host cell of the invention, such as a prokaryotic or eukaryotic host cell in culture, can be used to produce (i.e., express) a SRP. Accordingly, the invention further provides methods for producing SRPs using the host cells of the invention. In one embodiment, the method comprises culturing the host cell of invention (into which a recombinant expression vector encoding a SRP has been introduced, or into which genome has been introduced a gene encoding a wild-type or altered SRP) in a suitable medium until SRP is produced. In another embodiment, the method further comprises isolating SRPs from the medium or the host cell.

[0430] Another aspect of the invention pertains to isolated SRPs, and biologically active portions thereof. An “isolated” or “purified” polypeptide or biologically active portion thereof is free of some of the cellular material when produced by recombinant DNA techniques, or chemical precursors or other chemicals when chemically synthesized. The language “substantially free of cellular material” includes preparations of SRP in which the polypeptide is separated from some of the cellular components of the cells in which it is naturally or recombinantly produced. In one embodiment, the language “substantially free of cellular material” includes preparations of a SRP having less than about 30% (by dry weight) of non-SRP material (also referred to herein as a “contaminating polypeptide”), more preferably less than about 20% of non-SRP material, still more preferably less than about 10% of non-SRP material, and most preferably less than about 5% non-SRP material.

[0431] When the SRP or biologically active portion thereof is recombinantly produced, it is also preferably substantially free of culture medium, i.e., culture medium represents less than about 20%, more preferably less than about 10%, and most preferably less than about 5% of the volume of the polypeptide preparation. The language “substantially free of chemical precursors or other chemicals” includes preparations of SRP in which the polypeptide is separated from chemical precursors or other chemicals that are involved in the synthesis of the polypeptide. In one embodiment, the language “substantially free of chemical precursors or other chemicals” includes preparations of a SRP having less than about 30% (by dry weight) of chemical precursors or non-SRP chemicals, more preferably less than about 20% chemical precursors or non-SRP chemicals, still more preferably less than about 10% chemical precursors or non-SRP chemicals, and most preferably less than about 5% chemical precursors or non-SRP chemicals. In preferred embodiments, isolated polypeptides, or biologically active portions thereof, lack contaminating polypeptides from the same organism from which the SRP is derived. Typically, such polypeptides are produced by recombinant expression of, for example, a Saccharomyces cerevisiae, E. coli or Brassica napus, Glycine max, Zea mays, Triticum aestivum or Oryza sativa or Hordeum vulgare, Helianthus annuus, Linum usitatissimum SRP in plants other than Saccharomyces cerevisiae, E. coli, or microorganisms such as C. glutamicum, ciliates, algae or fungi.

[0432] The nucleic acid molecules, polypeptides, polypeptide homologs, fusion polypeptides, primers, vectors, and host cells described herein can be used in one or more of the following methods: identification of Saccharomyces cerevisiae, E. coli or Brassica napus, Glycine max, Zea mays, Triticum aestivum or Oryza sativa or Hordeum vulgare, Helianthus annuus, Linum usitatissimum and related organisms; mapping of genomes of organisms related to Saccharomyces cerevisiae, E. coli; identification and localization of Saccharomyces cerevisiae, E. coli or Brassica napus, Glycine max, Zea mays, Triticum aestivum or Oryza sativa or Hordeum vulgare, Helianthus annuus, Linum usitatissimum sequences of interest; evolutionary studies; determination of SRP regions required for function; modulation of a SRP activity; modulation of the metabolism of one or more cell functions; modulation of the transmembrane transport of one or more compounds; modulation of stress resistance; and modulation of expression of SRP nucleic acids.

[0433] The SRP nucleic acid molecules of the invention are also useful for evolutionary and polypeptide structural studies. The metabolic and transport processes in which the molecules of the invention participate are utilized by a wide variety of prokaryotic and eukaryotic cells; by comparing the sequences of the nucleic acid molecules of the present invention to those encoding similar enzymes from other organisms, the evolutionary relatedness of the organisms can be assessed. Similarly, such a comparison permits an assessment of which regions of the sequence are conserved and which are not, which may aid in determining those regions of the polypeptide that are essential for the functioning of the enzyme. This type of determination is of value for polypeptide engineering studies and may give an indication of what the polypeptide can tolerate in terms of mutagenesis without losing function.

[0434] Manipulation of the SRP nucleic acid molecules of the invention may result in the production of SRPs having functional differences from the wild-type SRPs. These polypeptides may be improved in efficiency or activity, may be present in greater numbers in the cell than is usual, or may be decreased in efficiency or activity.

[0435] There are a number of mechanisms by which the alteration of a SRP of the invention may directly affect stress response and/or stress tolerance. In the case of plants expressing SRPs, increased transport can lead to improved salt and/or solute partitioning within the plant tissue and organs. By either increasing the number or the activity of transporter molecules which exportionic molecules from the cell, it may be possible to affect the salt tolerance of the cell.

[0436] The effect of the genetic modification in plants, C. glutamicum, fungi, algae, or ciliates on stress tolerance can be assessed by growing the modified microorganism or plant under less than suitable conditions and then analyzing the growth characteristics and/or metabolism of the plant. Such analysis techniques are well known to one skilled in the art, and include dry weight, wet weight, polypeptide synthesis, carbohydrate synthesis, lipid synthesis, evapotranspiration rates, general plant and/or crop yield, flowering, reproduction, seed setting, root growth, respiration rates, photosynthesis rates, etc. (Applications of HPLC in Biochemistry in: Laboratory Techniques in Biochemistry and Molecular Biology, vol. 17; Rehm et al., 1993 Biotechnology, vol. 3, Chapter III: Product recovery and purification, page 469-714, VCH: Weinheim; Belter, P. A. et al., 1988, Bioseparations: downstream processing for biotechnology, John Wiley and Sons; Kennedy, J. F. and Cabral, J. M. S., 1992, Recovery processes for biological materials, John Wiley and Sons; Shaeiwitz, J. A. and Henry, J. D., 1988, Biochemical separations, in: Ulmann's Encyclopedia of Industrial Chemistry, vol. B3, Chapter 11, page 1-27, VCH: Weinheim; and Dechow, F. J., 1989, Separation and purification techniques in biotechnology, Noyes Publications).

[0437] For example, yeast expression vectors comprising the nucleic acids disclosed herein, or fragments thereof, can be constructed and transformed into Saccharomyces cerevisiae using standard protocols. The resulting transgenic cells can then be assayed for fail or alteration of their tolerance to drought, salt, and temperature stress. Similarly, plant expression vectors comprising the nucleic acids disclosed herein, or fragments thereof, can be constructed and transformed into an appropriate plant cell such as Arabidopsis, soy, rape, maize, wheat, Medicago truncatula, etc., using standard protocols. The resulting transgenic cells and/or plants derived therefrom can then be assayed for fail or alteration of their tolerance to drought, salt, temperature stress, and lodging.

[0438] The engineering of one or more SRP genes of the invention may also result in SRPs having altered activities which indirectly impact the stress response and/or stress tolerance of algae, plants, ciliates, or fungi, or other microorganisms like C. glutamicum. For example, the normal biochemical processes of metabolism result in the production of a variety of products (e.g., hydrogen peroxide and other reactive oxygen species) which may actively interfere with these same metabolic processes. For example, peroxynitrite is known to nitrate tyrosine side chains, thereby inactivating some enzymes having tyrosine in the active site (Groves, J. T., 1999, Curr. Opin. Chem. Biol. 3(2):226-235). While these products are typically excreted, cells can be genetically altered to transport more products than is typical for a wild-type cell. By optimizing the activity of one or more PKSRPs of the invention which are involved in the export of specific molecules, such as salt molecules, it may be possible to improve the stress tolerance of the cell.

[0439] Additionally, the sequences disclosed herein, or fragments thereof, can be used to generate knockout mutations in the genomes of various organisms, such as bacteria, mammalian cells, yeast cells, and plant cells (Girke, T., 1998, The Plant Journal 15:39-48). The resultant knockout cells can then be evaluated for their ability or capacity to tolerate various stress conditions, their response to various stress conditions, and the effect on the phenotype and/or genotype of the mutation. For other methods of gene inactivation, see U.S. Pat. No. 6,004,804 “Non-Chimeric Mutational Vectors” and Puttaraju et al., 1999, Spliceosome-mediated RNA trans-splicing as a tool for gene therapy, Nature Biotechnology 17:246-252.

[0440] The aforementioned mutagenesis strategies for SRPs resulting in increased stress resistance are not meant to be limiting; variations on these strategies will be readily apparent to one skilled in the art. Using such strategies, and incorporating the mechanisms disclosed herein, the nucleic acid and polypeptide molecules of the invention may be utilized to generate algae, ciliates, plants, fungi, or other microorganisms like C. glutamicum expressing mutated PKSRP nucleic acid and polypeptide molecules such that the stress tolerance is improved.

[0441] The present invention also provides antibodies that specifically bind to a SRP, or a portion thereof, as encoded by a nucleic acid described herein. Antibodies can be made by many well-known methods (See, e.g. Harlow and Lane, “Antibodies; A Laboratory Manual,” Cold Spring Harbor Laboratory, Cold Spring Harbor, N.Y., (1988)). Briefly, purified antigen can be injected into an animal in an amount and in intervals sufficient to elicit an immune response. Antibodies can either be purified directly, or spleen cells can be obtained from the animal. The cells can then fused with an immortal cell line and screened for antibody secretion. The antibodies can be used to screen nucleic acid clone libraries for cells secreting the antigen. Those positive clones can then be sequenced. See, for example, Kelly et al., 1992, Bio/Technology 10:163-167; Bebbington et al., 1992, Bio/Technology 10:169-175.

[0442] The phrases “selectively binds” and “specifically binds” with the polypeptide refer to a binding reaction that is determinative of the presence of the polypeptide in a heterogeneous population of polypeptides and other biologics. Thus, under designated immunoassay conditions, the specified antibodies bound to a particular polypeptide do not bind in a significant amount to other polypeptides present in the sample. Selective binding of an antibody under such conditions may require an antibody that is selected for its specificity for a particular polypeptide. A variety of immunoassay formats may be used to select antibodies that selectively bind with a particular polypeptide. For example, solid-phase ELISA immunoassays are routinely used to select antibodies selectively immunoreactive with a polypeptide. See Harlow and Lane, “Antibodies, A Laboratory Manual,” Cold Spring Harbor Publications, New York, (1988), for a description of immunoassay formats and conditions that could be used to determine selective binding.

[0443] In some instances, it is desirable to prepare monoclonal antibodies from various hosts. A description of techniques for preparing such monoclonal antibodies may be found in Stites et al., eds., “Basic and Clinical Immunology,” (Lange Medical Publications, Los Altos, Calif., Fourth Edition) and references cited therein, and in Harlow and Lane, “Antibodies, A Laboratory Manual,” Cold Spring Harbor Publications, New York, (1988).

[0444] Gene expression in plants is regulated by the interaction of protein transcription factors with specific nucleotide sequences within the regulatory region of a gene. A common type of transcription factor contains zinc finger (ZF) motifs. Each ZF module is approximately 30 amino acids long folded around a zinc ion. The DNA recognition domain of a ZF protein is a α-helical structure that inserts into the major grove of the DNA double helix. The module contains three amino acids that bind to the DNA with each amino acid contacting a single base pair in the target DNA sequence. ZF motifs are arranged in a modular repeating fashion to form a set of fingers that recognize a contiguous DNA sequence. For example, a three-fingered ZF motif will recognize 9 bp of DNA. Hundreds of proteins have been shown to contain ZF motifs with between 2 and 37 ZF modules in each protein (Isalan M, et al., 1998 Biochemistry 37(35):12026-33; Moore M, et al., 2001 Proc. Natl. Acad. Sci. USA 98(4):1432-1436 and 1437-1441; US patents U.S. Pat. No. 6,007,988 and U.S. Pat. No. 6,013,453).

[0445] The regulatory region of a plant gene contains many short DNA sequences (cis-acting elements) that serve as recognition domains for transcription factors, including ZF proteins. Similar recognition domains in different genes allow the coordinate expression of several genes encoding enzymes in a metabolic pathway by common transcription factors. Variation in the recognition domains among members of a gene family facilitates differences in gene expression within the same gene family, for example, among tissues and stages of development and in response to environmental conditions.

[0446] Typical ZF proteins contain not only a DNA recognition domain but also a functional domain that enables the ZF protein to activate or repress transcription of a specific gene. Experimentally, an activation domain has been used to activate transcription of the target gene (U.S. Pat. No. 5,789,538 and patent application WO9519431), but it is also possible to link a transcription repressor domain to the ZF and thereby inhibit transcription (patent applications WO0/47754 and WO2001002019). It has been reported that an enzymatic function such as nucleic acid cleavage can be linked to the ZF (patent application WO0/20622)

[0447] The invention provides a method that allows one skilled in the art to isolate the regulatory region of one or more stress related protein encoding genes from the genome of a plant cell and to design zinc finger transcription factors linked to a functional domain that will interact with the regulatory region of the gene. The interaction of the zinc finger protein with the plant gene can be designed in such a manner as to alter expression of the gene and preferably thereby alter metabolic activity to confer increased (or decreased) tolerance of abiotic stress such as drought. The invention provides a method of producing a transgenic plant with a transgene encoding this designed transcription factor, or alternatively a natural transcription factor, that modifies transcription of the Stress-Related Protein, particularly stress related protein gene to provide increased tolerance of environmental stress. Such a regulation of plant genes by artificial polydactyl zinc fingers has been demonstrated by Ordiz et al. (Regulation of transgene Expression in plants with polydactyl zinc finger transcription factors, Ordiz et al., PNAS, 99 (20) 13290-13295, 2002) or Guan et al. (Hertiable endogenous gene regulation in plants with designed polydactyl zinc finger transcription factos, PNAS, Vol. 99 (20), 13296-13301 (2002)).

[0448] In particular, the invention provides a method of producing a transgenic plant with a stress related protein coding nucleic acid, wherein expression of the nucleic acid(s) in the plant results in increased tolerance to environmental stress as compared to a wild type plant comprising: (a) transforming a plant cell with an expression vector comprising a stress related protein encoding nucleic acid, and (b) generating from the plant cell a transgenic plant with an increased tolerance to environmental stress as compared to a wild type plant. For such plant transformation, binary vectors such as pBinAR can be used (Hofgen and Willmitzer, 1990 Plant Science 66:221-230). Moreover suitable binary vectors are for example pBIN19, pBI101, pGPTV or pPZP (Hajukiewicz, P. et al., 1994, Plant Mol. Biol., 25: 989-994).

[0449] Construction of the binary vectors can be performed by ligation of the cDNA into the T-DNA. 5′ to the cDNA a plant promoter activates transcription of the cDNA. A polyadenylation sequence is located 3′ to the cDNA. Tissue-specific expression can be achieved by using a tissue specific promoter as listed above. Also, any other promoter element can be used. For constitutive expression within the whole plant, the CaMV 35S promoter can be used. The expressed protein can be targeted to a cellular compartment using a signal peptide, for example for plastids, mitochondria or endoplasmic reticulum (Kermode, 1996 Crit. Rev. Plant Sci. 4(15):285-423). The signal peptide is cloned 5′ in frame to the cDNA to archive subcellular localization of the fusion protein. Additionally, promoters that are responsive to abiotic stresses can be used with, such as the Arabidopsis promoter RD29A. One skilled in the art will recognize that the promoter used should be operatively linked to the nucleic acid such that the promoter causes transcription of the nucleic acid which results in the synthesis of a mRNA which encodes a polypeptide.

[0450] Alternate methods of transfection include the direct transfer of DNA into developing flowers via electroporation or Agrobacterium mediated gene transfer. Agrobacterium mediated plant transformation can be performed using for example the GV3101(pMP90) (Koncz and Schell, 1986 Mol. Gen. Genet. 204:383-396) or LBA4404 (Ooms et al., Plasmid, 1982, 7: 15-29; Hoekema et al., Nature, 1983, 303: 179-180) Agrobacterium tumefaciens strain. Transformation can be performed by standard transformation and regeneration techniques (Deblaere et al., 1994 Nucl. Acids. Res. 13:4777-4788; Gelvin and Schilperoort, Plant Molecular Biology Manual, 2nd Ed.-Dordrecht: Kluwer Academic Publ., 1995.-in Sect., Ringbuc Zentrale Signatur: BT11-P ISBN 0-7923-2731-4; Glick, B R and Thompson, J E, Methods in Plant Molecular Biology and Biotechnology, Boca Raton: CRC Press, 1993.-360 S., ISBN 0-8493-5164-2). For example, rapeseed can be transformed via cotyledon or hypocotyl transformation (Moloney et al., 1989 Plant Cell Reports 8:238-242; De Block et al., 1989 Plant Physiol. 91:694-701). Use of antibiotics for Agrobacterium and plant selection depends on the binary vector and the Agrobacterium strain used for transformation. Rapeseed selection is normally performed using kanamycin as selectable plant marker. Agrobacterium mediated gene transfer to flax can be performed using, for example, a technique described by Mlynarova et al., 1994 Plant Cell Report 13:282-285. Additionally, transformation of soybean can be performed using for example a technique described in European Patent No. 0424 047, U.S. Pat. No. 5,322,783, European Patent No. 0397 687, U.S. Pat. No. 5,376,543 or U.S. Pat. No. 5,169,770. Transformation of maize can be achieved by particle bombardment, polyethylene glycol mediated DNA uptake or via the silicon carbide fiber technique (see, for example, Freeling and Walbot “The maize handbook” Springer Verlag: New York (1993) ISBN 3-540-97826-7). A specific example of maize transformation is found in U.S. Pat. No. 5,990,387 and a specific example of wheat transformation can be found in PCT Application No. WO 93/07256.

[0451] The stress related protein encoding nucleic acid molecules of the invention have a variety of uses. Most importantly, the nucleic acid and amino acid sequences of the present invention can be used to transform plant cells or plants, thereby inducing tolerance to stresses such as drought, high salinity and cold. The present invention therefore provides a transgenic plant transformed by a stress related protein encoding nucleic acid (coding or antisense), wherein expression of the nucleic acid sequence in the plant results in increased tolerance to environmental stress as compared to a wild type plant. The increased stress tolerance is apparent as an increase in the yield or quality of the plant. The transgenic plant can be a monocot or a dicot or a gymnosperm plant. The invention further provides that the transgenic plant can be selected from maize, wheat, rye, oat, triticale, rice, barley, soybean, peanut, cotton, borage, sufflower, linseed, primrose, rapeseed, canola and turnip rape, manihot, pepper, sunflower, tagetes, solanaceous plant such as potato, tobacco, eggplant and tomato, Vicia species, pea, alfalfa, bushy plants such as coffee, cacao, tea, Salix species, trees such as oil palm, coconut, perennial grass, such as ryegrass and fescue, and forage crops, such as alfalfa and clover and Arabidopsis thaliana. Further the transgenic plant can be selected from spruce, pine or fir for example.

[0452] In particular, the present invention describes using the expression of stress related proteins to engineer drought-tolerant, salt-tolerant and/or cold-tolerant plants. This strategy has herein been demonstrated for Arabidopsis thaliana, Ryegrass, Alfalfa, Rapeseed/Canola, Soybean, Corn and Wheat but its application is not restricted to these plants. Accordingly, the invention provides a transgenic plant containing a stress related protein encoding gene selected from the nucleic acid as shown in Table I, column 4 and 5 and/or homologs of the afore mentioned sequences, wherein the environmental stress is drought, increased salt or decreased or increased temperature but its application is not restricted to these adverse environments. Protection against other adverse conditions such as heat, air pollution, heavy metals and chemical toxicants, for example, may be obtained. In preferred embodiments, the environmental stress is drought.

[0453] The present invention also provides methods of modifying stress tolerance of a plant comprising, modifying the expression of a stress related protein encoding gene in the plant. The invention provides that this method can be performed such that the stress tolerance is increased. This can for example be done by the use of transcription factors. In particular, the present invention provides methods of producing a transgenic plant having an increased tolerance to environmental stress as compared to a wild type plant due to increased expression of a stress related protein in the plant.

[0454] Growing the modified plants under stress conditions and then screening and analyzing the growth characteristics and/or metabolic activity assess the effect of the genetic modification in plants on stress tolerance and/or resistance. Such analysis techniques are well known to one skilled in the art. They include next to screening (Römpp Lexikon Biotechnologie, Stuttgart/New York: Georg Thieme Verlag 1992, “screening” p. 701) dry weight, wet weight, protein synthesis, carbohydrate synthesis, lipid synthesis, evapotranspiration rates, general plant and/or crop yield, flowering, reproduction, seed setting, root growth, respiration rates, photosynthesis rates, etc. (Applications of HPLC in Biochemistry in: Laboratory Techniques in Biochemistry and Molecular Biology, vol. 17; Rehm et al., 1993 Biotechnology, vol. 3, Chapter III: Product recovery and purification, page 469-714, VCH: Weinheim; Belter, P. A. et al., 1988 Bioseparations: downstream processing for biotechnology, John Wiley and Sons; Kennedy, J. F. and Cabral, J. M. S., 1992 Recovery processes for biological materials, John Wiley and Sons; Shaeiwitz, J. A. and Henry, J. D., 1988 Biochemical separations, in: Ulmann's Encyclopedia of Industrial Chemistry, vol. B3, Chapter 11, page 1-27, VCH: Weinheim; and Dechow, F. J. (1989) Separation and purification techniques in biotechnology, Noyes Publications).

[0455] The engineering of one or more stress related protein encoding genes of the invention may also result in stress related proteins having altered activities which indirectly impact the stress response and/or stress tolerance of plants. For example, the normal biochemical processes of metabolism result in the production of a variety of products (e.g., hydrogen peroxide and other reactive oxygen species) which may actively interfere with these same metabolic processes (for example, peroxynitrite is known to react with tyrosine side chains, thereby inactivating some enzymes having tyrosine in the active site (Groves, J. T., 1999 Curr. Opin. Chem. Biol. 3(2):226-235). By optimizing the activity of one or more stress related proteins (enzymes) of the invention, it may be possible to improve the stress tolerance of the cell.

[0456] Throughout this application, various publications are referenced. The disclosures of all of these publications and those references cited within those publications in their entireties are hereby incorporated by reference into this application in order to more fully describe the state of the art to which this invention pertains.

[0457] It should also be understood that the foregoing relates to preferred embodiments of the present invention and that numerous changes and variations may be made therein without departing from the scope of the invention. The invention is further illustrated by the following examples, which are not to be construed in any way as limiting. On the contrary, it is to be clearly understood that various other embodiments, modifications and equivalents thereof, which, after reading the description herein, may suggest themselves to those skilled in the art without departing from the spirit of the present invention and/or the scope of the claims.

[0458] The invention also pertains to the use of SRP encoding nucleic acid selected form the group comprising the nucleic acid as shown in Table I, column 4 and 5 and/or homologs of the afore mentioned sequences for preparing a plant cell with increased environmental stress tolerance. The said sequences can also be used for preparing a plant with increased environmental stress tolerance.

[0459] Object of the invention is further the use of increased tolerance and/or resistance to environmental stress and/or a SRP encoding nucleic acid selected form the group of sequences of the nucleic acid as shown in Table I, column 4 and 5 and/or homologs of the afore mentioned sequences or parts thereof as markers for selection of plants with increased tolerance to environmental stress or as markers for detection of stress in plants or plant cells.

### EXAMPLE 1

### Engineering Stress-Tolerant Arabidopsis Plants by Over-Expressing Stress Related Protein Genes

[0460] Gene Cloning and Transformation of Arabidopsis thaliana Amplification

[0461] The standard protocol of RNA extraction (Qiagen) and cDNA production (Invitrogen) is used for the isolation procedure of RNA from different tissues of Brassica napus, Glycine max, Zea mays or Oryza sativa and synthesis of there respective cDNA.

[0462] The standard protocol of Pfu DNA polymerase or a Pfu/Taq DNA polymerase mix (Herculase) was used for the amplification procedure. Amplified ORF fragments were analysed by gel electrophoresis. Each primer consists of a universal 5′ end and ORF specific 3′ end whereby the universal sequences differ for the forward and reverse primers (forward primer sequence contains an EcoRI for yeast or SmaI for E. coli and the reverse primer sequence a SmaI for yeast or SacI for E. coli restriction site) allowing generally a unidirectional cloning success.

[0463] Amplification using the protocol of Pfu or Herculase DNA polymerase (Stratagene). Conditions: 1×PCR buffer, 0.2 mM dNTP, 100 ng genomic DNA Saccharomyces cerevisiae (S288C) or 60 ng genomic DNA Escherichia coli K-12 (MG1655), 25 μmol forward primer, 25 μmol reverse primer, 2.5 u Pfu or Herculase DNA polymerase. 1st cycle for 3′ for yeast of 2′ for E. coli at 94° C., followed by 25 cycles for 30″ at 94° C., 30″ 55° C. for yeast or 60° C. for E. coli and 5-6′ 72° C., followed by 1 cycle for 610′ at 72° C., final for 4° C. at ∞.

[0464] Forward and reverse primer sequences used for ORF amplification are shown in Table III

### Vector Preparation

[0465] The preferred binary vector 1 bxbigResgen for yeast and 1 bxSuperCoLic for E. coli, which is based on the modified pPZP binary vector backbone (comprising the kanamycin-gene for bacterial selection; Hajukiewicz, P. et al., 1994, Plant Mol. Biol., 25: 989-994) carried the selection marker bar-gene (De Block et al., 1987, EMBO J. 6, 2513-2518) driven by the mas1′promotor (Velten et al., 1984, EMBO J. 3, 2723-2730; Mengiste, Amedeo and Paszkowski, 1997, Plant J., 12, 945-948) on its T-DNA. In addition the T-DNA contained the strong double ³⁵S (Kay et al., 1987, Science 236, 1299-1302) for yeast or Super promotor (Ni et al., 1995, Plant Journal 7, 661-676) for E. coli in front of a cloning cassette followed by the nos-terminator (Depicker A. Stachel S. Dhaese P. Zambryski P. Goodman H M. Nopaline synthase: transcript mapping and DNA sequence. Journal of Molecular & Applied Genetics. 1(6):561-73, 1982.). The cloning cassette consists of the following sequence:

5′-TTG CTC TTC CAT GGC AAT GAT TAA TTA ACG AAG
AGC AA-3′.
Yeast:
5′-GGAATTCCAGCTGACCACCATGGCAATTCCCGGGGATC-
3 or
E.coli:
5′-TTG CTC TTC CAT GGC AAT GAT TAA TTA ACG AAG AGC
AA-3′, respectively.

[0466] Other selection marker systems, like the AHAS marker or other promotors, e.g. superpromotor (see above), 35S promotor (see above), Ubiquitin promotor (Callis et al., J. Biol. Chem., 1990, 265: 12486-12493; U.S. Pat. No. 5,510,474; U.S. Pat. No. 6,020,190; Kawalleck et al., Plant. Molecular Biology, 1993, 21: 673-684) or 34S promotor (GenBank Accession numbers M59930 and X16673) were similar useful for the instant invention and are known to a person skilled in the art. The vector was linearised with EcoR and SmaI for yeast or SmaI and SacI for E. coli using the standard protocol provided by the supplier (MBI Fermentas, Germany) and purified using Qiagen columns (Qiagen, Hilden, Germany).

### Ligation and Transformation

[0467] Present ORF fragments (˜100 ng) were digested by EcoRI and SmaI for yeast and SmaI and SacI for E. coli using the standard protocol provided by the supplier (MBI Fermentas, Germany), purified using Qiagen columns (Qiagen, Hilden, Germany) and were ligated into the cloning cassette of the binary vector systems (˜30 ng) using standard procedures (Maniatis et al.).

[0468] In the case of internal EcoRI, SmaI and SacI restriction sites a blunt end cloning procedure was applied. The undigested ORF fragments were directly purified and ligated into the cloning cassette of the binary vector. In this case the EcoRI site was refilled by Klenow reaction and the SacI site blunted Pfu DNA polymerase.

[0469] Ligation products were transformed into E. coli (DH5alpha) using a standard heat shock protocol (Maniatis et al.). Transformed colonies were grown on LB media and selected by respective antibiotics (Km) for 16 h at 37° C. Positive clones were identified by control PCR reactions using a combination of a vector specific and the respective ORF specific primers.

### Plasmid Preparation

[0470] Plasmid DNA was prepared from positive clones using standard protocols (Qiagen Hilden, Germany).

### Transformation of Agrobacteria

[0471] Plasmids were transformed into Agrobacterium tumefaciens (GV3101 pMP90; Koncz and Schell, 1986, Mol. Gen. Genet. 204: 383-396) using heat shock or electroporation protocols. Transformed colonies were grown on YEP media and selected by respective antibiotics (R1f/Gent/Km) for 2d at 28° C. These Agrobacterium cultures were used for the plant transformation.

[0472] Arabidopsis thaliana was grown and transformed according to standard conditions Bechtold 1993 (Bechtold, N., Ellis, J., Pelletier, G. 1993. In planta Agrobacterium mediated gene transfer by infiltration of Arabidopsis thaliana plants C. R. Acad. Sci. Paris. 316:1194-1199); Bent et al. 1994 (Bent, A., Kunkel, B. N., Dahlbeck, D., Brown, K. L., Schmidt, R., Giraudat, J., Leung, J., and Staskawicz, B. J. 1994; PPCS2 of Arabidopsis thaliana: A leucin-rich repeat class of plant disease resistant genes; Science 265: 1856-1860).

[0473] Transgenic A. thaliana plants were grown individually in pots containing a 4:1 (v/v) mixture of soil and quartz sand in a York growth chamber. Standard growth conditions were: photoperiod of 16 h light and 8 h dark, 20° C., 60% relative humidity, and a photon flux density of 150 μE. To induce germination, sown seeds were kept at 4° C., in the dark, for 3 days. Plants were watered daily until they were approximately 3 weeks old at which time drought was imposed by withholding water. Parallely, the relative humidity was reduced in 10% increments every second day to 20%. After approximately 12 days of withholding water, most plants showed visual symptoms of injury, such as wilting and leaf browning, whereas tolerant plants were identified as being visually turgid and healthy green in color. Plants were scored for symptoms of drought injury in comparison to neighbouring plants for 3 days in succession.

[0474] Three successive experiments were conducted. In the first experiment, 10 independent T2 lines were sown for each gene being tested. The percentage of plants not showing visual symptoms of injury was determined. In the second experiment, the lines that had been scored as tolerant in the first experiment were put through a confirmation screen according to the same experimental procedures. In this experiment, plants of each tolerant line were grown and treated as before. In the third experiment, at least 7 replicates of the most tolerant line were grown and treated as before. The average and maximum number of days of drought survival after wild-type control had visually died were determined. Additionally measurements of chlorophyll fluorescence were made in stressed and non-stressed plants using a Mini-PAM (Heinz Walz GmbH, Effeltrich, Germany).

[0475] In the first experiment, after 12 days of drought, the control, non-transgenic Arabidopsis thaliana and most transgenic lines expressing other transgenes in the test showed extreme visual symptoms of stress including necrosis and cell death. Several plants expressing the genes retained viability as shown by their turgid appearance and maintenance of green color.

[0476] The second experiment compared a smaller number of independent transgenic lines for each gene but a greater number of progeny within each independent transformation event. This experiment confirmed the previous results. Those lines containing the specific SRP encoding yeast genes survived longer than the controls. In some cases the transgenic line survived more than 3 days after the controls had died.

[0477] According to the results of the first and second experiments some major lines containing the specific SRP encoding yeast genes were identified, which showed the best results with regard to the average days of survival after wild type and/or the hit percentage.

[0478] In a third experiment these major lines were tested with multiple replicates (4-80 plants per line). The average number of days the plants of the major line survived longer than wild-type was measured. I.e., the number ‘1’ means that, on average, the plants overexpressing this ORF, on averaged survived 1 day longer than wild-type. The value for WT in this column is ‘0’. The results are summmarised in table 3.

[0479] Table 2: Drought tolerance of transgenic Arabidopsis thaliana expressing the various SRP encoding genes from Saccharomyces cerevisiae or E. coli after imposition of drought stress on 3 week old plants in a third experiment using several plants from one transgenic line (experiment 3). Drought tolerance is measured for the indicated number of transgenic plants (Plants tested) as the average number of days (Average days of survival after WT) that the transgenic plants survived after the control (untransformed wild type). For WT, this column has the value ‘0’.

| | | |
|---|---|---|
| Sequ. ID | | |
| No. | Gene | Average days of survival after WT |

| | | |
|---|---|---|
| 1 | YLR210W | 2.1 |
| 344 | YNL231C | 0.85 |
| 515 | YNR029C | 1.11 |

[0480] In a further experiment, for individual major lines, other lines containing the same gene contruct, but resulting from a different transformation event were tested. In these lines, the specific SRP encoding yeast genes is incorporated at a different site in the plant genom. The results are summmarised in table 3 in accordance to table 3. The results demonstrate the dependence of the stress tolerance and/or resistance in plants on the expression of the SRP, rather than the insertion event.

[0481] Table 3: Drought tolerance of transgenic Arabidopsis thaliana expressing selected SRP encoding genes from Saccharomyces cerevisiae or E. coli after imposition of drought stress on 3 week old plants in a third experiment using one plant from several independent transgenic lines each (experiment 3). Drought tolerance is measured for the indicated number of transgenic plants (Plants tested) as the average number of days (Average days of survival after WT) that the transgenic plants survived after the control (untransformed wild type). For WT, this column has the value ‘0’.

| | | | |
|---|---|---|---|
| | | Number | Average days |
| Sequ. ID | | other lines | of survival |
| No. | Gene | tested | after WT |

| | | | |
|---|---|---|---|
| 1 | YLR210W | 8 | 2.0 |
| 344 | YNL231C | 9 | 0.89 |
| 515 | YNR029C | 7 | 1 |

[0482] Chlorophyll fluorescence measurements of photosynthetic yield confirmed that severe drought stress completely inhibited photosynthesis in the control plants, but the transgenic major lines maintained photosynthetic function longer (Table 5).

[0483] Table 4: Drought tolerance of transgenic Arabidopsis thaliana expressing the various SRP encoding genes from Saccharomyces cerevisiae or E. coli after imposition of drought stress on 3 week old plants in a third experiment using several plants from one transgenic line (experiment 3). Drought tolerance is reported as photosynthetic yield measured by chlorophyll fluorescence measured at three different time point during the drought stress experiment, and compared to the untransformed wild type control. For each transgenic line, the average of 5 replicate plants is indicated, the wild type value is the average of 20-25 plants measured in the same experiment.

| | | | | | | | |
|---|---|---|---|---|---|---|---|
| | | Photosyn- | | | | Photosyn- | |
| | | thetic | | Photosyn- | | thetic | |
| | | yield | | thetic | | yield 14 | |
| Sequ. | | 6 days | | yield 10 | | days after | |
| ID | | after final | | days after | | final | |
| No. | Gene | watering | wild type | final watering | wild type | watering | wild type |

| | | | | | | | |
|---|---|---|---|---|---|---|---|
| 1 | YLR210W | 740 | 736 | 777 | 709 | 137 | 106 |
| 344 | YNL231C | 766 | 766 | 703 | 654 | | |
| 515 | YNR029C | 753 | 766 | 762 | 654 | 307 | 106 |

### EXAMPLE 2

### Engineering Stress-Tolerant Arabidopsis Plants by Over-Expressing Stress Related Protein Encoding Genes from Saccharomyces cereviesae or E. Coli Using Stress-Inducible and Tissue-Specific Promoters

[0484] Transgenic Arabidopsis plants were created as in example 1 to express the stress related protein encoding transgenes under the control of either a tissue-specific or stress-inducible promoter. Constitutive expression of a transgene may cause deleterious side effects. Stress inducible expression was achieved using promoters selected from those listed above in Table 1.

[0485] T2 generation plants were produced and treated with drought stress in two experiments. For the first drought experiment, the plants were deprived of water until the plant and soil were desiccated. At various times after withholding water, a normal watering schedule was resumed and the plants were grown to maturity. Seed yield was determined as seeds per plant. At an equivalent degree of drought stress, tolerant plants were able to resume normal growth and produced more seeds than non-transgenic control plants. Proline content of the leaves and stomatal aperture were also measured at various times during the drought stress. Tolerant plants maintained a lower proline content and a greater stomatal aperture than the non-transgenic control plants.

[0486] An alternative method to impose water stress on the transgenic plants was by treatment with water containing an osmolyte such as polyethylene glycol (PEG) at specific water potential. Since PEG may be toxic, the plants were given only a short term exposure and then normal watering was resumed. As above, seed yields were measured from the mature plants. The response was measured during the stress period by physical measurements, such as stomatal aperture or osmotic potential, or biochemical measurements, such as accumulation of proline. Tolerant plants had higher seed yields, maintained their stomatal aperture and showed only slight changes in osmotic potential and proline levels, whereas the susceptible non-transgenic control plants closed their stomata and exhibited increased osmotic potential and proline levels.

[0487] The transgenic plants with a constitutive promoter controlling transcription of the transgene were compared to those plants with a drought-inducible promoter in the absence of stress. The results indicated that the metabolite and gene expression changes did not occur when plants with the stress-inducible promoter were grown in the absence of stress. These plants also had higher seed yields than those with the constitutive promoter.

### EXAMPLE 3

### Over-Expression of Stress Related Genes from Saccharomyces cerevisiae or E. Coli Provides Tolerance of Multiple Abiotic Stresses

[0488] Plants that exhibit tolerance of one abiotic stress often exhibit tolerance of another environmental stress or an oxygen free radical generating herbicide. This phenomenon of cross-tolerance is not understood at a mechanistic level (McKersie and Leshem, 1994). Nonetheless, it is reasonable to expect that plants exhibiting enhanced drought tolerance due to the expression of a transgene might also exhibit tolerance of low temperatures, freezing, salt, air pollutants such as ozone, and other abiotic stresses. In support of this hypothesis, the expression of several genes are up or down-regulated by multiple abiotic stress factors including cold, salt, osmoticum, ABA, etc (e.g. Hong et al. (1992) Developmental and organ-specific expression of an ABA- and stress-induced protein in barley. Plant Mol Biol 18: 663-674; Jagendorf and Takabe (2001) Inducers of glycinebetaine synthesis in barley. Plant Physiol 127: 1827-1835); Mizoguchi et al. (1996) A gene encoding a mitogen-activated protein kinase is induced simultaneously with genes for a mitogen-activated protein kinase and an S6 ribosomal protein kinase by touch, cold, and water stress in Arabidopsis thaliana. Proc Natl Acad Sci USA 93: 765-769; Zhu (2001) Cell signaling under salt, water and cold stresses. Curr Opin Plant Biol 4: 401-406).

[0489] To determine salt tolerance, seeds of Arabidopsis thaliana were sterilized (100% bleach, 0.1% TritonX for five minutes two times and rinsed five times with ddH2O). Seeds were plated on non-selection media (½ MS, 0.6% phytagar, 0.5 g/L MES, 1% sucrose, 2 μg/ml benamyl). Seeds are allowed to germinate for approximately ten days. At the 4-5 leaf stage, transgenic plants were potted into 5.5 cm diameter pots and allowed to grow (22° C., continuous light) for approximately seven days, watering as needed. To begin the assay, two liters of 100 mM NaCl and ⅛ MS was added to the tray under the pots. To the tray containing the control plants, three liters of ⅛ MS was added. The concentrations of NaCl supplementation were increased stepwise by 50 mM every 4 days up to 200 mM. After the salt treatment with 200 mM, fresh and dry weights of the plants as well as seed yields were determined.

[0490] To determine cold tolerance, seeds of the transgenic and cold lines were germinated and grown for approximately 10 days to the 4-5 leaf stage as above. The plants were then transferred to cold temperatures (5° C.) and grown through the flowering and seed set stages of development. Photosynthesis was measured using chlorophyll fluorescence as an indicator of photosynthetic fitness and integrity of the photosystems. Seed yield and plant dry weight were measured as an indictor of plant biomass production.

[0491] Plants that had tolerance to salinity or cold had higher seed yields, photosynthesis and dry matter production than susceptible plants.

### EXAMPLE 4

### Engineering Stress-Tolerant Alfalfa Plants by Over-Expressing Stress Related Genes from Saccharomyces cerevisiae or E. Coli

[0492] A regenerating clone of alfalfa (Medicago sativa) was transformed using the method of (McKersie et al., 1999 Plant Physiol 119: 839-847). Regeneration and transformation of alfalfa is genotype dependent and therefore a regenerating plant is required. Methods to obtain regenerating plants have been described. For example, these can be selected from the cultivar Rangelander (Agriculture Canada) or any other commercial alfalfa variety as described by Brown DCW and A Atanassov (1985. Plant Cell Tissue Organ Culture 4: 111-112). Alternatively, the RA3 variety (University of Wisconsin) has been selected for use in tissue culture (Walker et al., 1978 μm J Bot 65:654-659).

[0493] Petiole explants were cocultivated with an overnight culture of Agrobacterium tumefaciens C58C1 pMP90 (McKersie et al., 1999 Plant Physiol 119: 839-847) or LBA4404 containing a binary vector. Many different binary vector systems have been described for plant transformation (e.g. An, G. in Agrobacterium Protocols. Methods in Molecular Biology vol 44, pp 47-62, Gartland K M A and M R Davey eds. Humana Press, Totowa, N.J.). Many are based on the vector pBIN19 described by Bevan (Nucleic Acid Research. 1984. 12:8711-8721) that includes a plant gene expression cassette flanked by the left and right border sequences from the Ti plasmid of Agrobacterium tumefaciens. A plant gene expression cassette consists of at least two genes—a selection marker gene and a plant promoter regulating the transcription of the cDNA or genomic DNA of the trait gene. Various selection marker genes can be used including the Arabidopsis gene encoding a mutated acetohydroxy acid synthase (AHAS) enzyme (U.S. Pat. Nos. 57,673,666 and 6,225,105). Similarly, various promoters can be used to regulate the trait gene that provides constitutive, developmental, tissue or environmental regulation of gene transcription. In this example, the 34S promoter (GenBank Accession numbers M59930 and X16673) was used to provide constitutive expression of the trait gene.

[0494] The explants were cocultivated for 3 d in the dark on SH induction medium containing 288 mg/L Pro, 53 mg/L thioproline, 4.35 g/L K2SO4, and 100 μm acetosyringinone. The explants were washed in half-strength Murashige-Skoog medium (Murashige and Skoog, 1962) and plated on the same SH induction medium without acetosyringinone but with a suitable selection agent and suitable antibiotic to inhibit Agrobacterium growth. After several weeks, somatic embryos were transferred to BOi2Y development medium containing no growth regulators, no antibiotics, and 50 g/L sucrose. Somatic embryos were subsequently germinated on half-strength Murashige-Skoog medium. Rooted seedlings were transplanted into pots and grown in a greenhouse.

[0495] The T0 transgenic plants were propagated by node cuttings and rooted in Turface growth medium. The plants were defoliated and grown to a height of about 10 cm (approximately 2 weeks after defoliation). The plants were then subjected to drought stress in two experiments.

[0496] For the first drought experiment, the seedlings received no water for a period up to 3 weeks at which time the plant and soil were desiccated. At various times after withholding water, a normal watering schedule was resumed. At one week after resuming watering, the fresh and dry weights of the shoots was determined. At an equivalent degree of drought stress, tolerant plants were able to resume normal growth whereas susceptible plants had died or suffered significant injury resulting in less dry matter. Proline content of the leaves and stomatal aperture were also measured at various times during the drought stress. Tolerant plants maintained a lower proline content and a greater stomatal aperture than the non-transgenic control plants.

[0497] An alternative method to impose water stress on the transgenic plants was by treatment with a solution at specific water potential, containing an osmolyte such as polyethylene glycol (PEG). The PEG treatment was given to either detached leaves (e.g. Djilianov et al., 1997 Plant Science 129: 147-156) or to the roots (Wakabayashi et al., 1997 Plant Physiol 113: 967-973). Since PEG may be toxic, the plants were given only a short term exposure. The response was measured as physical measurements such as stomatal aperture or osmotic potential, or biochemical measurements such as accumulation of proline. Tolerant plants maintained their stomatal aperture and showed only slight changes in osmotic potential, whereas the susceptible non-transgenic control plants closed their stomata and exhibited increased osmotic potential. In addition the changes in proline and other metabolites were less in the tolerant transgenic plants than in the non-transgenic control plants.

[0498] Tolerance of salinity and cold were measured using methods as described in example 3. Plants that had tolerance to salinity or cold had higher seed yields, photosynthesis and dry matter production than susceptible plants.

### EXAMPLE 5

### Engineering Stress-Tolerant Ryegrass Plants by Over-Expressing Stress Related Genes from Saccharomyces cerevisiae or E. Coli

[0499] Seeds of several different ryegrass varieties may be used as explant sources for transformation, including the commercial variety Gunne available from Svalof Weibull seed company or the variety Affinity. Seeds were surface-sterilized sequentially with 1% Tween-20 for 1 minute, 100% bleach for 60 minutes, 3 rinses with 5 minutes each with de-ionized and distilled H2O, and then germinated for 3-4 days on moist, sterile filter paper in the dark. Seedlings were further sterilized for 1 minute with 1% Tween-20, 5 minutes with 75% bleach, and rinsed 3 times with ddH2O, 5 min each.

[0500] Surface-sterilized seeds were placed on the callus induction medium containing Murashige and Skoog basal salts and vitamins, 20 g/l sucrose, 150 mg/l asparagine, 500 mg/l casein hydrolysate, 3 g/l Phytagel, 10 mg/l BAP, and 5 mg/l dicamba. Plates were incubated in the dark at 25C for 4 weeks for seed germination and embryogenic callus induction.

[0501] After 4 weeks on the callus induction medium, the shoots and roots of the seedlings were trimmed away, the callus was transferred to fresh media, maintained in culture for another 4 weeks, and then transferred to MSO medium in light for 2 weeks. Several pieces of callus (11-17 weeks old) were either strained through a 10 mesh sieve and put onto callus induction medium, or cultured in 100 ml of liquid ryegrass callus induction media (same medium as for callus induction with agar) in a 250 ml flask. The flask was wrapped in foil and shaken at 175 rpm in the dark at 23 C for 1 week. Sieving the liquid culture with a 40-mesh sieve collected the cells. The fraction collected on the sieve was plated and cultured on solid ryegrass callus induction medium for 1 week in the dark at 25C. The callus was then transferred to and cultured on MS medium containing 1% sucrose for 2 weeks.

[0502] Transformation can be accomplished with either Agrobacterium of with particle bombardment methods. An expression vector is created containing a constitutive plant promoter and the cDNA of the gene in a pUC vector. The plasmid DNA was prepared from E. coli cells using with Qiagen kit according to manufacturer's instruction. Approximately 2 g of embryogenic callus was spread in the center of a sterile filter paper in a Petri dish. An aliquot of liquid MSO with 10 g/l sucrose was added to the filter paper. Gold particles (1.0 μm in size) were coated with plasmid DNA according to method of Sanford et al., 1993 and delivered to the embryogenic callus with the following parameters: 500 μg particles and 2 μg DNA per shot, 1300 psi and a target distance of 8.5 cm from stopping plate to plate of callus and 1 shot per plate of callus.

[0503] After the bombardment, calli were transferred back to the fresh callus development medium and maintained in the dark at room temperature for a 1-week period. The callus was then transferred to growth conditions in the light at 25° C. to initiate embryo differentiation with the appropriate selection agent, e.g. 250 nM Arsenal, 5 mg/l PPT or 50 mg/L kanamycin. Shoots resistant to the selection agent appeared and once rotted were transferred to soil.

[0504] Samples of the primary transgenic plants (T0) are analyzed by PCR to confirm the presence of T-DNA. These results are confirmed by Southern hybridization in which DNA is electrophoresed on a 1% agarose gel and transferred to a positively charged nylon membrane (Roche Diagnostics). The PCR DIG Probe Synthesis Kit (Roche Diagnostics) is used to prepare a digoxigenin-labelled probe by PCR, and used as recommended by the manufacturer.

[0505] Transgenic T0 ryegrass plants were propagated vegetatively by excising tillers. The transplanted tillers were maintained in the greenhouse for 2 months until well established. The shoots were defoliated and allowed to grow for 2 weeks.

[0506] The first drought experiment was conducted in a manner similar to that described in example 3. The seedlings received no water for a period up to 3 weeks at which time the plant and soil were desiccated. At various times after withholding water, a normal watering schedule was resumed. At one week after resuming watering, the lengths of leaf blades, and the fresh and dry weights of the shoots was determined. At an equivalent degree of drought stress, tolerant plants were able to resume normal growth whereas susceptible plants had died or suffered significant injury resulting in shorter leaves and less dry matter. Proline content of the leaves and stomatal aperture were also measured at various times during the drought stress. Tolerant plants maintained a lower proline content and a greater stomatal aperture than the non-transgenic control plants.

[0507] A second experiment imposing drought stress on the transgenic plants was by treatment with a solution of PEG as described in the previous examples. Tolerance of salinity and cold were measured using methods as described in example 3. Plants that had tolerance to salinity or cold had higher seed yields, photosynthesis and dry matter production than susceptible plants.

### EXAMPLE 6

### Engineering Stress-Tolerant Soybean Plants by Over-Expressing Stress Related Genes from Saccharomyces cerevisiae or E. Coli

[0508] Soybean was transformed according to the following modification of the method described in the Texas A&M patent U.S. Pat. No. 5,164,310. Several commercial soybean varieties are amenable to transformation by this method. The cultivar Jack (available from the Illinois Seed Foundation) is a commonly used for transformation. Seeds were sterilized by immersion in 70% (v/v) ethanol for 6 min and in 25% commercial bleach (NaOCl) supplemented with 0.1% (v/v) Tween for 20 min, followed by rinsing 4 times with sterile double distilled water. Seven-day seedlings were propagated by removing the radicle, hypocotyl and one cotyledon from each seedling. Then, the epicotyl with one cotyledon was transferred to fresh germination media in petri dishes and incubated at 25° C. under a 16-hr photoperiod (approx. 100 RE-m-2s-1) for three weeks. Axillary nodes (approx. 4 mm in length) were cut from 3-4 week-old plants. Axillary nodes were excised and incubated in Agrobacterium LBA4404 culture.

[0509] Many different binary vector systems have been described for plant transformation (e.g. An, G. in Agrobacterium Protocols. Methods in Molecular Biology vol 44, pp 47-62, Gartland KMA and MR Davey eds. Humana Press, Totowa, N.J.). Many are based on the vector pBIN19 described by Bevan (Nucleic Acid Research. 1984. 12:8711-8721) that includes a plant gene expression cassette flanked by the left and right border sequences from the Ti plasmid of Agrobacterium tumefaciens. A plant gene expression cassette consists of at least two genes—a selection marker gene and a plant promoter regulating the transcription of the cDNA or genomic DNA of the trait gene. Various selection marker genes can be used including the Arabidopsis gene encoding a mutated acetohydroxy acid synthase (AHAS) enzyme (U.S. Pat. Nos. 57,673,666 and 6,225,105). Similarly, various promoters can be used to regulate the trait gene to provide constitutive, developmental, tissue or environmental regulation of gene transcription. In this example, the 34S promoter (GenBank Accession numbers M59930 and X16673) was used to provide constitutive expression of the trait gene.

[0510] After the co-cultivation treatment, the explants were washed and transferred to selection media supplemented with 500 mg/L timentin. Shoots were excised and placed on a shoot elongation medium. Shoots longer than 1 cm were placed on rooting medium for two to four weeks prior to transplanting to soil.

[0511] The primary transgenic plants (T0) were analyzed by PCR to confirm the presence of T-DNA. These results were confirmed by Southern hybridization in which DNA is electrophoresed on a 1% agarose gel and transferred to a positively charged nylon membrane (Roche Diagnostics). The PCR DIG Probe Synthesis Kit (Roche Diagnostics) is used to prepare a digoxigenin-labelled probe by PCR, and used as recommended by the manufacturer.

[0512] Tolerant plants had higher seed yields, maintained their stomatal aperture and showed only slight changes in osmotic potential and proline levels, whereas the susceptible non-transgenic control plants closed their stomata and exhibited increased osmotic potential and proline levels.

[0513] Tolerance of drought, salinity and cold were measured using methods as described in example 3. Plants that had tolerance to salinity or cold had higher seed yields, photosynthesis and dry matter production than susceptible plants.

### EXAMPLE 7

### Engineering Stress-Tolerant Rapeseed/Canola Plants by Over-Expressing Stress Related Genes from Saccharomyces cerevisiae or E. Coli

[0514] Cotyledonary petioles and hypocotyls of 5-6 day-old young seedlings were used as explants for tissue culture and transformed according to Babic et al. (1998, Plant Cell Rep 17: 183-188). The commercial cultivar Westar (Agriculture Canada) is the standard variety used for transformation, but other varieties can be used.

[0515] Agrobacterium tumefaciens LBA4404 containing a binary vector was used for canola transformation. Many different binary vector systems have been described for plant transformation (e.g. An, G. in Agrobacterium Protocols. Methods in Molecular Biology vol 44, pp 47-62, Gartland K M A and MR Davey eds. Humana Press, Totowa, N.J.). Many are based on the vector pBIN19 described by Bevan (Nucleic Acid Research. 1984. 12:8711-8721) that includes a plant gene expression cassette flanked by the left and right border sequences from the Ti plasmid of Agrobacterium tumefaciens. A plant gene expression cassette consists of at least two genes—a selection marker gene and a plant promoter regulating the transcription of the cDNA or genomic DNA of the trait gene. Various selection marker genes can be used including the Arabidopsis gene encoding a mutated acetohydroxy acid synthase (AHAS) enzyme (U.S. Pat. Nos. 57,673,666 and 6,225,105). Similarly, various promoters can be used to regulate the trait gene to provide constitutive, developmental, tissue or environmental regulation of gene transcription. In this example, the 34S promoter (GenBank Accession numbers M59930 and X16673) was used to provide constitutive expression of the trait gene.

[0516] Canola seeds were surface-sterilized in 70% ethanol for 2 min., and then in 30% Clorox with a drop of Tween-20 for 10 min, followed by three rinses with sterilized distilled water. Seeds were then germinated in vitro 5 days on half strength MS medium without hormones, 1% sucrose, 0.7% Phytagar at 23° C., 16 hr. light. The cotyledon petiole explants with the cotyledon attached were excised from the in vitro seedlings, and inoculated with Agrobacterium by dipping the cut end of the petiole explant into the bacterial suspension. The explants were then cultured for 2 days on MSBAP-3 medium containing 3 mg/l BAP, 3% sucrose, 0.7% Phytagar at 23° C., 16 hr light. After two days of co-cultivation with Agrobacterium, the petiole explants were transferred to MSBAP-3 medium containing 3 mg/l BAP, cefotaxime, carbenicillin, or timentin (300 mg/l) for 7 days, and then cultured on MSBAP-3 medium with cefotaxime, carbenicillin, or timentin and selection agent until shoot regeneration. When the shoots were 5-10 mm in length, they were cut and transferred to shoot elongation medium (MSBAP-0.5, containing 0.5 mg/l BAP). Shoots of about 2 cm in length were transferred to the rooting medium (MS0) for root induction.

[0517] Samples of the primary transgenic plants (T0) were analyzed by PCR to confirm the presence of T-DNA. These results were confirmed by Southern hybridization in which DNA is electrophoresed on a 1% agarose gel and transferred to a positively charged nylon membrane (Roche Diagnostics). The PCR DIG Probe Synthesis Kit (Roche Diagnostics) is used to prepare a digoxigenin-labelled probe by PCR, and used as recommended by the manufacturer.

[0518] The transgenic plants were then evaluated for their improved stress tolerance according to the method described in Example 3. Tolerant plants had higher seed yields, maintained their stomatal aperture and showed only slight changes in osmotic potential and proline levels, whereas the susceptible non-transgenic control plants closed their stomata and exhibited increased osmotic potential and proline levels.

[0519] Tolerance of drought, salinity and cold were measured using methods as described in the previous example 3. Plants that had tolerance to salinity or cold had higher seed yields, photosynthesis and dry matter production than susceptible plants.

### EXAMPLE 8

### Engineering Stress-Tolerant Corn Plants by Over-Expressing Stress Related Genes from Saccharomyces cerevisiae or E. Coli

[0520] Transformation of maize (Zea Mays L.) is performed with a modification of the method described by Ishida et al. (1996. Nature Biotech 14745-50). Transformation is genotype-dependent in corn and only specific genotypes are amenable to transformation and regeneration. The inbred line A188 (University of Minnesota) or hybrids with A188 as a parent are good sources of donor material for transformation (Fromm et al. 1990 Biotech 8:833-839), but other genotypes can be used successfully as well. Ears are harvested from corn plants at approximately 11 days after pollination (DAP) when the length of immature embryos is about 1 to 1.2 mm. Immature embryos are co-cultivated with Agrobacterium tumefaciens that carry “super binary” vectors and transgenic plants are recovered through organogenesis. The super binary vector system of Japan Tobacco is described in WO patents WO94/00977 and WO95/06722. Vectors were constructed as described. Various selection marker genes can be used including the maize gene encoding a mutated acetohydroxy acid synthase (AHAS) enzyme (U.S. Pat. No. 6,025,541). Similarly, various promoters can be used to regulate the trait gene to provide constitutive, developmental, tissue or environmental regulation of gene transcription. In this example, the 34S promoter (GenBank Accession numbers M59930 and X16673) was used to provide constitutive expression of the trait gene.

[0521] Excised embryos are grown on callus induction medium, then maize regeneration medium, containing imidazolinone as a selection agent. The Petri plates are incubated in the light at 25° C. for 2-3 weeks, or until shoots develop. The green shoots are transferred from each embryo to maize rooting medium and incubated at 25° C. for 2-3 weeks, until roots develop. The rooted shoots are transplanted to soil in the greenhouse. T1 seeds are produced from plants that exhibit tolerance to the imidazolinone herbicides and which are PCR positive for the transgenes.

[0522] The T1 transgenic plants were then evaluated for their improved stress tolerance according to the method described in Example 3. The T1 generation of single locus insertions of the T-DNA will segregate for the transgene in a 3:1 ratio. Those progeny containing one or two copies of the transgene are tolerant of the imidazolinone herbicide, and exhibit greater tolerance of drought stress than those progeny lacking the transgenes. Tolerant plants had higher seed yields, maintained their stomatal aperture and showed only slight changes in osmotic potential and proline levels, whereas the susceptible non-transgenic control plants closed their stomata and exhibited increased osmotic potential and proline levels. Homozygous T2 plants exhibited similar phenotypes. Hybrid plants (F1 progeny) of homozygous transgenic plants and non-transgenic plants also exhibited increased environmental stress tolerance.

[0523] Tolerance of salinity and cold were measured using methods as described in the previous example 3. Plants that had tolerance to drought, salinity or cold had higher seed yields, photosynthesis and dry matter production than susceptible plants.

### EXAMPLE 9

### Engineering Stress-Tolerant Wheat Plants by Over-Expressing Stress Related Genes from Saccharomyces cerevisiae or E. Coli

[0524] Transformation of wheat is performed with the method described by Ishida et al. (1996 Nature Biotech. 14745-50). The cultivar Bobwhite (available from CYMMIT, Mexico) is commonly used in transformation. Immature embryos are co-cultivated with Agrobacterium tumefaciens that carry “super binary” vectors, and transgenic plants are recovered through organogenesis. The super binary vector system of Japan Tobacco is described in WO patents WO94/00977 and WO95/06722. Vectors were constructed as described. Various selection marker genes can be used including the maize gene encoding a mutated acetohydroxy acid synthase (AHAS) enzyme (U.S. Pat. No. 6,025,541). Similarly, various promoters can be used to regulate the trait gene to provide constitutive, developmental, tissue or environmental regulation of gene transcription. In this example, the 34S promoter (GenBank Accession numbers M59930 and X16673) was used to provide constitutive expression of the trait gene.

[0525] After incubation with Agrobacterium, the embryos are grown on callus induction medium, then regeneration medium, containing imidazolinone as a selection agent. The Petri plates are incubated in the light at 25° C. for 2-3 weeks, or until shoots develop. The green shoots are transferred from each embryo to rooting medium and incubated at 25° C. for 2-3 weeks, until roots develop. The rooted shoots are transplanted to soil in the greenhouse. T1 seeds are produced from plants that exhibit tolerance to the imidazolinone herbicides and which are PCR positive for the transgenes.

[0526] The T1 transgenic plants were then evaluated for their improved stress tolerance according to the method described in the previous example 3. The T1 generation of single locus insertions of the T-DNA will segregate for the transgene in a 3:1 ratio. Those progeny containing one or two copies of the transgene are tolerant of the imidazolinone herbicide, and exhibit greater tolerance of drought stress than those progeny lacking the transgenes. Tolerant plants had higher seed yields, maintained their stomatal aperture and showed only slight changes in osmotic potential and proline levels, whereas the susceptible non-transgenic control plants closed their stomata and exhibited increased osmotic potential and proline levels. Homozygous T2 plants exhibited similar phenotypes. Tolerance of salinity and cold were measured using methods as described in the previous examples. Plants that had tolerance to drought, salinity or cold had higher seed yields, photosynthesis and dry matter production than susceptible plants.

### EXAMPLE 10

### Identification of Identical and Heterologous Genes

[0527] Gene sequences can be used to identify identical or heterologous genes from cDNA or genomic libraries. Identical genes (e.g. full-length cDNA clones) can be isolated via nucleic acid hybridization using for example cDNA libraries. Depending on the abundance of the gene of interest, 100,000 up to 1,000,000 recombinant bacteriophages are plated and transferred to nylon membranes. After denaturation with alkali, DNA is immobilized on the membrane by e.g. UV cross linking. Hybridization is carried out at high stringency conditions. In aqueous solution, hybridization and washing is performed at an ionic strength of 1 M NaCl and a temperature of 68° C. Hybridization probes are generated by e.g. radioactive (³²P) nick transcription labeling (High Prime, Roche, Mannheim, Germany). Signals are detected by autoradiography.

[0528] Partially identical or heterologous genes that are related but not identical can be identified in a manner analogous to the above-described procedure using low stringency hybridization and washing conditions. For aqueous hybridization, the ionic strength is normally kept at 1 M NaCl while the temperature is progressively lowered from 68 to 42° C.

[0529] Isolation of gene sequences with homology (or sequence identity/similarity) only in a distinct domain of (for example 10-20 amino acids) can be carried out by using synthetic radio labeled oligonucleotide probes. Radiolabeled oligonucleotides are prepared by phosphorylation of the 5-prime end of two complementary oligonucleotides with T4 polynucleotide kinase. The complementary oligonucleotides are annealed and ligated to form concatemers. The double stranded concatemers are than radiolabeled by, for example, nick transcription. Hybridization is normally performed at low stringency conditions using high oligonucleotide concentrations.

Oligonucleotide hybridization solution:

### 6×SSC

[0530] M sodium phosphate

### mM EDTA (pH 8)

### 0.5% SDS

[0531] 100 μg/ml denatured salmon sperm DNA
% nonfat dried milk

[0532] During hybridization, temperature is lowered stepwise to 5-10° C. below the estimated oligonucleotide Tₘ or down to room temperature followed by washing steps and autoradiography. Washing is performed with low stringency such as 3 washing steps using 4×SSC. Further details are described by Sambrook, J. et al., 1989, “Molecular Cloning: A Laboratory Manual,” Cold Spring Harbor Laboratory Press or Ausubel, F. M. et al., 1994, “Current Protocols in Molecular Biology,” John Wiley & Sons.

### EXAMPLE 11

### Identification of Identical Genes by Screening Expression Libraries with Antibodies

[0533] c-DNA clones can be used to produce recombinant polypeptide for example in E. coli (e.g. Qiagen QIAexpress pQE system). Recombinant polypeptides are then normally affinity purified via Ni-NTA affinity chromatography (Qiagen). Recombinant polypeptides are then used to produce specific antibodies for example by using standard techniques for rabbit immunization. Antibodies are affinity purified using a Ni-NTA column saturated with the recombinant antigen as described by Gu et al., 1994, BioTechniques 17:257-262. The antibody can than be used to screen expression cDNA libraries to identify identical or heterologous genes via an immunological screening (Sambrook, J. et al., 1989, “Molecular Cloning: A Laboratory Manual,” Cold Spring Harbor Laboratory Press or Ausubel, F. M. et al., 1994, “Current Protocols in Molecular Biology”, John Wiley & Sons).

### EXAMPLE 12

### In Vivo Mutagenesis

[0534] In vivo mutagenesis of microorganisms can be performed by passage of plasmid (or other vector) DNA through E. coli or other microorganisms (e.g. Bacillus spp. or yeasts such as Saccharomyces cerevisiae) which are impaired in their capabilities to maintain the integrity of their genetic information. Typical mutator strains have mutations in the genes for the DNA repair system (e.g., mutHLS, mutD, mutT, etc.; for reference, see Rupp, W. D., 1996, DNA repair mechanisms, in: Escherichia coli and Salmonella, p. 2277-2294, ASM: Washington.) Such strains are well known to those skilled in the art. The use of such strains is illustrated, for example, in Greener, A. and Callahan, M., 1994, Strategies 7: 32-34. Transfer of mutated DNA molecules into plants is preferably done after selection and testing in microorganisms. Transgenic plants are generated according to various examples within the exemplification of this document.

### EXAMPLE 13

### Engineering Stress-Tolerant Arabidopsis Plants by Over-Expressing Stress Related Protein Encoding Genes from Brassica napus, Glycine Max, Zea mays, Triticum aestivum or Oryza sativa or Hordeum vulgare, Helianthus annuus, Linum usitatissimum, Using Stress-Inducible and Tissue-Specific Promoters

[0535] Transgenic Arabidopsis plants over-expressing stress related protein encoding genes from Brassica napus, Glycine max, Zea mays, Triticum aestivum and Oryza sativa and Hordeum vulgare, Helianthus annuus, Linum usitatissimum, are created as described in example 1 to express the stress related protein encoding transgenes under the control of either a tissue-specific or stress-inducible promoter. Constitutive expression of a transgene may cause deleterious side effects, which can be avoided by the use of these promoters. Stress inducible expression is achieved using promoters selected from those listed above in Table 1.

[0536] T2 generation plants are produced and treated with drought stress in two experiments. For the first drought experiment, the plants are deprived of water until the plant and soil are desiccated. At various times after withholding water, a normal watering schedule is resumed and the plants are grown to maturity. Seed yield is determined as seeds per plant. At an equivalent degree of drought stress, tolerant plants are able to resume normal growth and produced more seeds than non-transgenic control plants. Proline content of the leaves and stomatal aperture is also measured at various times during the drought stress. Tolerant plants maintain a lower proline content and a greater stomatal aperture than the non-transgenic control plants.

[0537] An alternative method to impose water stress on the transgenic plantsis by treatment with water containing an osmolyte such as polyethylene glycol (PEG) at specific water potential. Since PEG can be toxic, the plants are given only a short term exposure and then normal watering was resumed. As above, seed yields are measured from the mature plants. The response is measured during the stress period by physical measurements, such as stomatal aperture or osmotic potential, or biochemical measurements, such as accumulation of proline. Tolerant plants have higher seed yields, maintain their stomatal aperture and show only slight changes in osmotic potential and proline levels, whereas the susceptible non-transgenic control plants close their stomata and exhibit increased osmotic potential and proline levels.

[0538] The transgenic plants with a constitutive promoter controlling transcription of the transgene are compared to those plants with a drought-inducible promoter in the absence of stress. The results indicate that the metabolite and gene expression changes do not occur when plants with the stress-inducible promoter were grown in the absence of stress. These plants also have higher seed yields than those with the constitutive promoter.

### EXAMPLE 14

### Over-Expression of Stress Related Genes from Brassica napus, Glycine max, Zea mays, Triticum aestivum or Oryza sativa or Hordeum vulgare, Helianthus annuus, Linum usitatissimum Provides Tolerance of Multiple Abiotic Stresses

[0539] Plants that exhibit tolerance of one abiotic stress often exhibit tolerance of another environmental stress or an oxygen free radical generating herbicide. This phenomenon of cross-tolerance is not understood at a mechanistic level (McKersie and Leshem, 1994). Nonetheless, it is reasonable to expect that plants exhibiting enhanced drought tolerance due to the expression of a transgene might also exhibit tolerance of low temperatures, freezing, salt, air pollutants such as ozone, and other abiotic stresses. In support of this hypothesis, the expression of several genes are up or down-regulated by multiple abiotic stress factors including cold, salt, osmoticum, ABA, etc (e.g. Hong et al. (1992) Developmental and organ-specific expression of an ABA- and stress-induced protein in barley. Plant Mol Biol 18: 663-674; Jagendorf and Takabe (2001) Inducers of glycinebetaine synthesis in barley. Plant Physiol 127: 1827-1835); Mizoguchi et al. (1996) A gene encoding a mitogen-activated protein kinase is induced simultaneously with genes for a mitogen-activated protein kinase and an S6 ribosomal protein kinase by touch, cold, and water stress in Arabidopsis thaliana. Proc Natl Acad Sci USA 93: 765-769; Zhu (2001) Cell signaling under salt, water and cold stresses. Curr Opin Plant Biol 4: 401-406).

[0540] Transgenic Arabidopsis plants over-expressing stress related protein encoding genes from Brassica napus, Glycine max, Zea mays, Triticum aestivum and Oryza sativa and Hordeum vulgare, Helianthus annuus, Linum usitatissimum, are created as described in example 1 and tested for tolerance to salt and cold stress.

[0541] To determine salt tolerance, seeds of Arabidopsis thaliana are sterilized (incubated in 100% bleach, 0.1% TritonX100 for five minutes (twice) and rinsed five times with ddH₂O). Seeds are plated on non-selective medium (½ MS, 0.6% phytagar, 0.5 g/L MES, 1% sucrose, 2 μg/ml benamyl). Seeds are allowed to germinate for approximately ten days. At the 4-5 leaf stage, transgenic plants are potted into 5.5 cm diameter pots and allowed to grow (22° C., continuous light) for approximately seven days, watering as needed. To begin the assay, two liters of 100 mM NaCl and ⅛ MS are added to the tray under the pots. To the tray containing the control plants, three liters of ⅛ MS is added. The concentrations of NaCl supplementation are increased stepwise by 50 mM every 4 days up to 200 mM. After the salt treatment with 200 mM, fresh and dry weights of the plants as well as seed yields are determined. Transgenic plants overexpression stress related protein encoding genes from Brassica napus, Glycine max, Zea mays, Triticum aestivum and Oryza sativa and Hordeum vulgare, Helianthus annuus, Linum usitatissimum show higher fresh and dry weights and more seed yield in comparison to wildtype or mock transformed plants.

[0542] To determine cold tolerance, seeds of the transgenic and cold lines are germinated and grown for approximately 10 days to the 4-5 leaf stage as above. The plants are then transferred to cold temperatures (5° C.) and grown through the flowering and seed set stages of development. Photosynthesis is measured using chlorophyll fluorescence as an indicator of photosynthetic fitness and integrity of the photosystems. Seed yield and plant dry weight are measured as an indictor of plant biomass production.

[0543] It is found that the over-expression of stress related genes from Brassica napus, Glycine max, Zea mays, Triticum aestivum or Oryza sativa or Hordeum vulgare, Helianthus annuus, Linum usitatissimum provided tolerance to salt and cold as well as drought. Plants that have tolerance to salinity or cold also have higher seed yields, photosynthesis and dry matter production than susceptible plants.

### EXAMPLE 15

### Engineering Stress-Tolerant Alfalfa Plants by Over-Expressing Stress Related Genes from Brassica napus, Glycine max, Zea mays or Oryza Sativa

[0544] A regenerating clone of alfalfa (Medicago sativa) is transformed using the method of McKersie et al., 1999 (Plant Physiol 119: 839-847). Regeneration and transformation of alfalfa is genotype dependent and therefore a regenerating plant is required. Methods to obtain regenerating plants have been described. For example, these can be selected from the cultivar Rangelander (Agriculture Canada) or any other commercial alfalfa variety as described by Brown and Atanassov (1985. Plant Cell Tissue Organ Culture 4: 111-112). Alternatively, the RA3 variety (University of Wisconsin) has been selected for use in tissue culture (Walker et al., 1978 μm J Bot 65:654-659).

[0545] Petiole explants are cocultivated with an overnight culture of Agrobacterium tumefaciens C58C1 pMP90 (McKersie et al., 1999 Plant Physiol 119: 839-847) or LBA4404 containing a binary vector. Many different binary vector systems have been described for plant transformation (e.g. An, G. in Agrobacterium Protocols. Methods in Molecular Biology vol 44, pp 47-62, Gartland K M A and MR Davey eds. Humana Press, Totowa, N.J.). Many are based on the vector pBIN19 described by Bevan (Nucleic Acid Research. 1984. 12:8711-8721) that includes a plant gene expression cassette flanked by the left and right border sequences from the Ti plasmid of Agrobacterium tumefaciens. A plant gene expression cassette consists of at least two genes—a selection marker gene and a plant promoter regulating the transcription of the cDNA or genomic DNA of the trait gene. Various selection marker genes can be used including the Arabidopsis gene encoding a mutated acetohydroxy acid synthase (AHAS) enzyme (U.S. Pat. Nos. 57,673,666 and 6,225,105). Similarly, various promoters can be used to regulate the trait gene that provides constitutive, developmental, tissue or environmental regulation of gene transcription. In this example, the 34S promoter (GenBank Accession numbers M59930 and X16673) was used to provide constitutive expression of the trait gene.

[0546] The explants are cocultivated for 3 d in the dark on SH induction medium containing 288 mg/L Pro, 53 mg/L thioproline, 4.35 g/L K2SO4, and 100 μm acetosyringinone. The explants were washed in half-strength Murashige-Skoog medium (Murashige and Skoog, 1962) and plated on the same SH induction medium without acetosyringinone but with a suitable selection agent and suitable antibiotic to inhibit Agrobacterium growth. After several weeks, somatic embryos are transferred to BOi2Y development medium containing no growth regulators, no antibiotics, and 50 g/L sucrose. Somatic embryos are subsequently germinated on half-strength Murashige-Skoog medium. Rooted seedlings are transplanted into pots and grown in a greenhouse.

[0547] The T0 transgenic plants are propagated by node cuttings and rooted in Turface growth medium. The plants are defoliated and grown to a height of about 10 cm (approximately 2 weeks after defoliation). The plants are then subjected to drought stress in two experiments.

[0548] For the first drought experiment, the seedlings receive no water for a period up to 3 weeks at which time the plant and soil are desiccated. At various times after withholding water, a normal watering schedule is resumed. At one week after resuming watering, the fresh and dry weights of the shoots are determined. At an equivalent degree of drought stress, the tolerant transgenic plants are able to resume normal growth whereas susceptible wildtype plants have died or suffer significant injury resulting in less dry matter. Proline content of the leaves and stomatal aperture are also measured at various times during the drought stress. Tolerant transgenic plants maintain a lower proline content and a greater stomatal aperture than the non-transgenic control plants.

[0549] An alternative method to impose water stress on the transgenic plants is by treatment with a solution at specific water potential, containing an osmolyte such as polyethylene glycol (PEG). The PEG treatment is given to either detached leaves (e.g. Djilianov et al., 1997 Plant Science 129: 147-156) or to the roots (Wakabayashi et al., 1997 Plant Physiol 113: 967-973). Since PEG can be toxic, the plants are given only a short term exposure. The response is measured as physical measurements such as stomatal aperture or osmotic potential, or biochemical measurements such as accumulation of proline. Tolerant plants maintain their stomatal aperture and show only slight changes in osmotic potential, whereas the susceptible non-transgenic control plants close their stomata and exhibit increased osmotic potential. In addition the changes in proline and other metabolites are less in the tolerant transgenic plants than in the non-transgenic control plants.

[0550] Tolerance of salinity and cold is measured using methods as described in example 3. It is found that alfalfa plants over-expressing stress related genes from Brassica napus, Glycine max, Zea mays, Triticum aestivum or Oryza sativa or Hordeum vulgare, Helianthus annuus, Linum usitatissimum, are more resistant to salinity and cold stress than non-transgenic control plants. Plants that have tolerance to salinity or cold also have higher seed yields, photosynthesis and dry matter production than susceptible plants.

### EXAMPLE 16

### Engineering Stress-Tolerant Ryegrass Plants by Over-Expressing Stress Related Genes from Brassica napus, Glycine max, Zea mays, Triticum aestivum or Oryza sativa or Hordeum vulgare, Helianthus annuus, Linum usitatissimum

[0551] Seeds of several different ryegrass varieties may be used as explant sources for transformation, including the commercial variety Gunne available from Svalof Weibull seed company or the variety Affinity. Seeds are surface-sterilized sequentially with 1% Tween-20 for 1 minute, 100% bleach for 60 minutes, 3 rinses with 5 minutes each with de-ionized and distilled H2O, and then germinated for 3-4 days on moist, sterile filter paper in the dark. Seedlings are further sterilized for 1 minute with 1% Tween-20, 5 minutes with 75% bleach, and rinsed 3 times with ddH2O, 5 min each.

[0552] Surface-sterilized seeds are placed on the callus induction medium containing Murashige and Skoog basal salts and vitamins, 20 g/l sucrose, 150 mg/l asparagine, 500 mg/l casein hydrolysate, 3 g/l Phytagel, 10 mg/l BAP, and 5 mg/l dicamba. Plates are incubated in the dark at 25C for 4 weeks for seed germination and embryogenic callus induction.

[0553] After 4 weeks on the callus induction medium, the shoots and roots of the seedlings are trimmed away, the callus is transferred to fresh media, maintained in culture for another 4 weeks, and then transferred to MSO medium in light for 2 weeks. Several pieces of callus (11-17 weeks old) are either strained through a 10 mesh sieve and put onto callus induction medium, or cultured in 100 ml of liquid ryegrass callus induction media (same medium as for callus induction with agar) in a 250 ml flask. The flask is wrapped in foil and shaken at 175 rpm in the dark at 23° C. for 1 week. Sieving the liquid culture with a 40-mesh sieve collect the cells. The fraction collected on the sieve is plated and cultured on solid ryegrass callus induction medium for 1 week in the dark at 25C. The callus is then transferred to and cultured on MS medium containing 1% sucrose for 2 weeks.

[0554] Transformation can be accomplished with either Agrobacterium of with particle bombardment methods. An expression vector is created containing a constitutive plant promoter and the cDNA of the gene in a pUC vector. The plasmid DNA is prepared from E. coli cells using with Qiagen kit according to manufacturer's instruction. Approximately 2 g of embryogenic callus is spread in the center of a sterile filter paper in a Petri dish. An aliquot of liquid MSO with 10 g/l sucrose is added to the filter paper. Gold particles (1.0 μm in size) are coated with plasmid DNA according to method of Sanford et al., 1993 and delivered to the embryogenic callus with the following parameters: 500 μg particles and 2 μg DNA per shot, 1300 psi and a target distance of 8.5 cm from stopping plate to plate of callus and 1 shot per plate of callus.

[0555] After the bombardment, calli are transferred back to the fresh callus development medium and maintained in the dark at room temperature for a 1-week period. The callus is then transferred to growth conditions in the light at 25° C. to initiate embryo differentiation with the appropriate selection agent, e.g. 250 nM Arsenal, 5 mg/l PPT or 50 mg/L kanamycin. Shoots resistant to the selection agent appeared and once rooted?? are transferred to soil.

[0556] Samples of the primary transgenic plants (T0) are analyzed by PCR to confirm the presence of T-DNA. These results are confirmed by Southern hybridization in which DNA is electrophoresed on a 1% agarose gel and transferred to a positively charged nylon membrane (Roche Diagnostics). The PCR DIG Probe Synthesis Kit (Roche Diagnostics) is used to prepare a digoxigenin-labelled probe by PCR, and used as recommended by the manufacturer.

[0557] Transgenic T0 ryegrass plants are propagated vegetatively by excising tillers. The transplanted tillers are maintained in the greenhouse for 2 months until well established. The shoots are defoliated and allowed to grow for 2 weeks.

[0558] The first drought experiment is conducted in a manner similar to that described in example 3. The seedlings receive no water for a period up to 3 weeks at which time the plant and soil are desiccated. At various times after withholding water, a normal watering schedule is resumed. At one week after resuming watering, the lengths of leaf blades, and the fresh and dry weights of the shoots is determined. At an equivalent degree of drought stress, tolerant plants are able to resume normal growth whereas susceptible plants have died or suffer significant injury resulting in shorter leaves and less dry matter. Proline content of the leaves and stomatal aperture are also measured at various times during the drought stress. Tolerant plants maintain a lower proline content and a greater stomatal aperture than the non-transgenic control plants.

[0559] A second experiment imposing drought stress on the transgenic plants was by treatment with a solution of PEG as described in the previous examples. Tolerance of salinity and cold were measured using methods as described in example 3. It is found that ryegrass over-expressing stress related genes from Brassica napus, Glycine max, Zea mays, Triticum aestivum or Oryza sativa or Hordeum vulgare, Helianthus annuus, Linum usitatissimum, are more resistant to salinity and cold stress that non-transgenic control plants. Plants that have tolerance to salinity or cold also have higher seed yields, photosynthesis and dry matter production than susceptible plants.

### EXAMPLE 17

### Engineering Stress-Tolerant Soybean Plants by Over-Expressing Stress Related Genes from Brassica napus, Glycine max, Zea mays, Triticum aestivum or Oryza sativa or Hordeum vulgare, Helianthus annuus, Linum usitatissimum,

[0560] Soybean is transformed according to the following modification of the method described in the Texas A&M patent U.S. Pat. No. 5,164,310. Several commercial soybean varieties are amenable to transformation by this method. The cultivar Jack (available from the Illinois Seed Foundation) is a commonly used for transformation. Seeds are sterilized by immersion in 70% (v/v) ethanol for 6 min and in 25% commercial bleach (NaOCl) supplemented with 0.1% (v/v) Tween for 20 min, followed by rinsing 4 times with sterile double distilled water. Seven-day old seedlings are propagated by removing the radicle, hypocotyl and one cotyledon from each seedling. Then, the epicotyl with one cotyledon is transferred to fresh germination media in petri dishes and incubated at 25° C. under a 16-hr photoperiod (approx. 100 μE-m-2s-1) for three weeks. Axillary nodes (approx. 4 mm in length) are cut from 3-4 week-old plants. Axillary nodes are excised and incubated in Agrobacterium LBA4404 culture.

[0561] Many different binary vector systems have been described for plant transformation (e.g. An, G. in Agrobacterium Protocols. Methods in Molecular Biology vol 44, pp 47-62, Gartland K M A and MR Davey eds. Humana Press, Totowa, N.J.). Many are based on the vector pBIN19 described by Bevan (Nucleic Acid Research. 1984. 12:8711-8721) that includes a plant gene expression cassette flanked by the left and right border sequences from the Ti plasmid of Agrobacterium tumefaciens. A plant gene expression cassette consists of at least two genes—a selection marker gene and a plant promoter regulating the transcription of the cDNA or genomic DNA of the trait gene. Various selection marker genes can be used including the Arabidopsis gene encoding a mutated acetohydroxy acid synthase (AHAS) enzyme (U.S. Pat. Nos. 57,673,666 and 6,225,105). Similarly, various promoters can be used to regulate the trait gene to provide constitutive, developmental, tissue or environmental regulation of gene transcription. In this example, the 34S promoter (GenBank Accession numbers M59930 and X16673) is used to provide constitutive expression of the trait gene.

[0562] After the co-cultivation treatment, the explants are washed and transferred to selection media supplemented with 500 mg/L timentin. Shoots are excised and placed on a shoot elongation medium. Shoots longer than 1 cm are placed on rooting medium for two to four weeks prior to transplanting to soil.

[0563] The primary transgenic plants (T0) are analyzed by PCR to confirm the presence of T-DNA. These results are confirmed by Southern hybridization in which DNA is electrophoresed on a 1% agarose gel and transferred to a positively charged nylon membrane (Roche Diagnostics). The PCR DIG Probe Synthesis Kit (Roche Diagnostics) is used to prepare a digoxigenin-labelled probe by PCR, and used as recommended by the manufacturer.

[0564] Stress-tolerant soybean plants over-expressing stress related genes from Brassica napus, Glycine max, Zea mays, Triticum aestivum or Oryza sativa or Hordeum vulgare, Helianthus annuus, Linum usitatissimum have higher seed yields, maintain their stomatal aperture and show only slight changes in osmotic potential and proline levels, whereas the susceptible non-transgenic control plants close their stomata and exhibit increased osmotic potential and proline levels.

[0565] Tolerance of drought, salinity and cold are measured using methods as described in example 3. Plants that have displayed tolerance to salinity or cold have higher seed yields, photosynthesis and dry matter production than susceptible plants.

### EXAMPLE 18

### Engineering Stress-Tolerant Rapeseed/Canola Plants by Over-Expressing Stress Related Genes from Brassica napus, Glycine max, Zea mays, Triticum aestivum or Oryza sativa or Hordeum vulgare, Helianthus annuus, Linum usitatissimum

[0566] Cotyledonary petioles and hypocotyls of 5-6 day-old young seedlings are used as explants for tissue culture and transformed according to Babic et al. (1998, Plant Cell Rep 17: 183-188). The commercial cultivar Westar (Agriculture Canada) is the standard variety used for transformation, but other varieties can be used.

[0567] Agrobacterium tumefaciens LBA4404 containing a binary vector is used for canola transformation. Many different binary vector systems have been described for plant transformation (e.g. An, G. in Agrobacterium Protocols. Methods in Molecular Biology vol 44, pp 47-62, Gartland K M A and MR Davey eds. Humana Press, Totowa, N.J.). Many are based on the vector pBIN19 described by Bevan (Nucleic Acid Research. 1984.12:8711-8721) that includes a plant gene expression cassette flanked by the left and right border sequences from the Ti plasmid of Agrobacterium tumefaciens. A plant gene expression cassette consists of at least two genes—a selection marker gene and a plant promoter regulating the transcription of the cDNA or genomic DNA of the trait gene. Various selection marker genes can be used including the Arabidopsis gene encoding a mutated acetohydroxy acid synthase (AHAS) enzyme (U.S. Pat. Nos. 57,673,666 and 6,225,105). Similarly, various promoters can be used to regulate the trait gene to provide constitutive, developmental, tissue or environmental regulation of gene transcription. In this example, the 34S promoter (GenBank Accession numbers M59930 and X16673) is used to provide constitutive expression of the trait gene.

[0568] Canola seeds are surface-sterilized in 70% ethanol for 2 min., and then in 30% Clorox with a drop of Tween-20 for 10 min, followed by three rinses with sterilized distilled water. Seeds are then germinated in vitro 5 days on half strength MS medium without hormones, 1% sucrose, 0.7% Phytagar at 23° C., 16 hr. light. The cotyledon petiole explants with the cotyledon attached are excised from the in vitro seedlings, and inoculated with Agrobacterium by dipping the cut end of the petiole explant into the bacterial suspension. The explants are then cultured for 2 days on MSBAP-3 medium containing 3 mg/l BAP, 3% sucrose, 0.7% Phytagar at 23° C., 16 hr light. After two days of co-cultivation with Agrobacterium, the petiole explants are transferred to MSBAP-3 medium containing 3 mg/l BAP, cefotaxime, carbenicillin, or timentin (300 mg/l) for 7 days, and then cultured on MSBAP-3 medium with cefotaxime, carbenicillin, or timentin and selection agent until shoot regeneration. When the shoots are 5-10 mm in length, they are cut and transferred to shoot elongation medium (MSBAP-0.5, containing 0.5 mg/l BAP). Shoots of about 2 cm in length are transferred to the rooting medium (MSO) for root induction.

[0569] Samples of the primary transgenic plants (T0) are analyzed by PCR to confirm the presence of T-DNA. These results are confirmed by Southern hybridization in which DNA is electrophoresed on a 1% agarose gel and transferred to a positively charged nylon membrane (Roche Diagnostics). The PCR DIG Probe Synthesis Kit (Roche Diagnostics) is used to prepare a digoxigenin-labelled probe by PCR, and used as recommended by the manufacturer.

[0570] The transgenic plants are then evaluated for their improved stress tolerance according to the method described in Example 3. It is found that transgenic Rapeseed/Canola over-expressing stress related genes from Brassica napus, Glycine max, Zea mays, Triticum aestivum or Oryza sativa or Hordeum vulgare, Helianthus annuus, Linum usitatissimum are more tolerant to environmental stress than non-transgenic control plants. Tolerant plants have higher seed yields, maintain their stomatal aperture and show only slight changes in osmotic potential and proline levels, whereas the susceptible non-transgenic control plants close their stomata and exhibited increased osmotic potential and proline levels. Plants that have tolerance to salinity or cold have higher seed yields, photosynthesis and dry matter production than susceptible plants.

### EXAMPLE 19

### Engineering Stress-Tolerant Corn Plants by Over-Expressing Stress Related Genes from Brassica napus, Glycine Max, Zea Mays, Triticum Aestivum or Oryza sativa or Hordeum vulgare, Helianthus annuus, Linum usitatissimum,

[0571] Transformation of corn (Zea mays L.) is performed with a modification of the method described by Ishida et al. (1996. Nature Biotech 14745-50). Transformation is genotype-dependent in corn and only specific genotypes are amenable to transformation and regeneration. The inbred line A188 (University of Minnesota) or hybrids with A188 as a parent are good sources of donor material for transformation (Fromm et al. 1990 Biotech 8:833-839), but other genotypes can be used successfully as well. Ears are harvested from corn plants at approximately 11 days after pollination (DAP) when the length of immature embryos is about 1 to 1.2 mm. Immature embryos are co-cultivated with Agrobacterium tumefaciens that carry “super binary” vectors and transgenic plants are recovered through organogenesis. The super binary vector system of Japan Tobacco is described in WO patents WO94/00977 and WO95/06722. Vectors are constructed as described. Various selection marker genes can be used including the corn gene encoding a mutated acetohydroxy acid synthase (AHAS) enzyme (U.S. Pat. No. 6,025,541). Similarly, various promoters can be used to regulate the trait gene to provide constitutive, developmental, tissue or environmental regulation of gene transcription. In this example, the 34S promoter (GenBank Accession numbers M59930 and X16673) is used to provide constitutive expression of the trait gene.

[0572] Excised embryos are grown on callus induction medium, then corn regeneration medium, containing imidazolinone as a selection agent. The Petri plates were incubated in the light at 25° C. for 2-3 weeks, or until shoots develop. The green shoots from each embryo are transferred to corn rooting medium and incubated at 25° C. for 2-3 weeks, until roots develop. The rooted shoots are transplanted to soil in the greenhouse. T1 seeds are produced from plants that exhibit tolerance to the imidazolinone herbicides and are PCR positive for the transgenes.

[0573] The T1 transgenic plants are then evaluated for their improved stress tolerance according to the methods described in Example 3. The T1 generation of single locus insertions of the T-DNA will segregate for the transgene in a 1:2:1 ratio. Those progeny containing one or two copies of the transgene (¾ of the progeny) are tolerant of the imidazolinone herbicide, and exhibit greater tolerance of drought stress than those progeny lacking the transgenes. Tolerant plants have higher seed yields, maintained their stomatal aperture and showed only slight changes in osmotic potential and proline levels, whereas the susceptible non-transgenic control plants closed their stomata and exhibited increased osmotic potential and proline levels. Homozygous T2 plants exhibited similar phenotypes. Hybrid plants (F1 progeny) of homozygous transgenic plants and non-transgenic plants also exhibited increased environmental stress tolerance.

[0574] Tolerance to salinity and cold are measured using methods as described in the previous example 3. Again, transgenic corn plants over-expressing stress related genes from Brassica napus, Glycine max, Zea mays, Triticum aestivum or Oryza sativa or Hordeum vulgare, Helianthus annuus, Linum usitatissimum are found to be tolerant to environmental stresses. Plants that have tolerance to drought, salinity or cold have higher seed yields, photosynthesis and dry matter production than susceptible plants.

### EXAMPLE 20

### Engineering Stress-Tolerant Wheat Plants by Over-Expressing Stress Related Genes from Brassica napus, Glycine Max, Zea Mays, Triticum Aestivum or Oryza sativa or Hordeum vulgare, Helianthus annuus, Linum usitatissimum

[0575] Transformation of wheat is performed with the method described by Ishida et al. (1996 Nature Biotech. 14745-50). The cultivar Bobwhite (available from CYMMIT, Mexico) is commonly used in transformation. Immature embryos are co-cultivated with Agrobacterium tumefaciens that carry “super binary” vectors, and transgenic plants are recovered through organogenesis. The super binary vector system of Japan Tobacco is described in WO patents WO94/00977 and WO95/06722. Vectors are constructed as described. Various selection marker genes can be used including the maize gene encoding a mutated acetohydroxy acid synthase (AHAS) enzyme (U.S. Pat. No. 6,025,541). Similarly, various promoters can be used to regulate the trait gene to provide constitutive, developmental, tissue or environmental regulation of gene transcription. In this example, the 34S promoter (GenBank Accession numbers M59930 and X16673) is used to provide constitutive expression of the trait gene.

[0576] After incubation with Agrobacterium, the embryos are grown on callus induction medium, then regeneration medium, containing imidazolinone as a selection agent. The Petri plates are incubated in the light at 25° C. for 2-3 weeks, or until shoots develop. The green shoots are transferred from each embryo to rooting medium and incubated at 25° C. for 2-3 weeks, until roots develop. The rooted shoots are transplanted to soil in the greenhouse. T1 seeds are produced from plants that exhibit tolerance to the imidazolinone herbicides and which are PCR positive for the transgenes.

[0577] The T1 transgenic plants are then evaluated for their improved stress tolerance according to the method described in the previous example 3. The T1 generation of single locus insertions of the T-DNA will segregate for the transgene in a 1:2:1 ratio. Those progeny containing one or two copies of the transgene (¾ of the progeny) are tolerant of the imidazolinone herbicide, and exhibit greater tolerance of drought stress than those progeny lacking the transgenes. Tolerant plants have higher seed yields, maintained their stomatal aperture and showed only slight changes in osmotic potential and proline levels, whereas the susceptible non-transgenic control plants closed their stomata and exhibited increased osmotic potential and proline levels. Homozygous T2 plants exhibited similar phenotypes. Tolerance of salinity and cold are measured using methods as described in the previous examples. Plants that overexpressed stress related genes from Brassica napus, Glycine max, Zea mays, Triticum aestivum or Oryza sativa or Hordeum vulgare, Helianthus annuus, Linum usitatissimum, have tolerance to drought, salinity or cold and displayed have higher seed yields, photosynthesis and dry matter production than non-transgenic, susceptible plants.

### EXAMPLE 21

### Identification of Identical and Heterologous Genes

[0578] Gene sequences can be used to identify identical or heterologous genes from cDNA or genomic libraries. Identical genes (e.g. full-length cDNA clones) can be isolated via nucleic acid hybridization using for example cDNA libraries. Depending on the abundance of the gene of interest, 100,000 up to 1,000,000 recombinant bacteriophages are plated and transferred to nylon membranes. After denaturation with alkali, DNA is immobilized on the membrane by e.g. UV cross linking. Hybridization is carried out at high stringency conditions. In aqueous solution, hybridization and washing is performed at an ionic strength of 1 M NaCl and a temperature of 68° C. Hybridization probes are generated by e.g. radioactive (³²P) nick transcription labeling (High Prime, Roche, Mannheim, Germany). Signals are detected by autoradiography.

[0579] Partially identical or heterologous genes that are similar but not identical can be identified in a manner analogous to the above-described procedure using low stringency hybridization and washing conditions. For aqueous hybridization, the ionic strength is normally kept at 1 M NaCl while the temperature is progressively oared from 68 to 42° C.

[0580] Isolation of gene sequences with homology (or sequence identity/similarity) in only a distinct domain of for example 10-20 amino acids can be carried out using synthetic radio labeled oligonucleotide probes. Radiolabeled oligonucleotides are prepared by phosphorylation of the 5-prime end of two complementary oligonucleotides with T4 polynucleotide kinase. The complementary oligonucleotides are annealed and ligated to form concatemers. The double stranded concatemers are then radiolabeled by, for example, nick transcription. Hybridization is normally performed at low stringency conditions using high oligonucleotide concentrations.

Oligonucleotide hybridization solution:

### 6×SSC

[0581] M sodium phosphate

### mM EDTA (pH 8)

### 0.5% SDS

[0582] 100 μg/ml denatured salmon sperm DNA
% nonfat dried milk

[0583] During hybridization, temperature is lowered stepwise to 5-10° C. below the estimated oligonucleotide Tₘ or down to room temperature followed by washing steps and autoradiography. Washing is performed with low stringency such as 3 washing steps using 4×SSC. Further details are described by Sambrook, J. et al., 1989, “Molecular Cloning: A Laboratory Manual,” Cold Spring Harbor Laboratory Press or Ausubel, F. M. et al., 1994, “Current Protocols in Molecular Biology,” John Wiley & Sons.

### EXAMPLE 22

### Identification of Identical or Homologous Genes by Screening Expression Libraries with Antibodies

[0584] c-DNA clones can be used to produce recombinant polypeptide for example in E. coli (e.g. Qiagen QIAexpress pQE system). Recombinant polypeptides are then normally affinity purified via Ni-NTA affinity chromatography (Qiagen). Recombinant polypeptides are then used to produce specific antibodies for example by using standard techniques for rabbit immunization. Antibodies are affinity purified using a Ni-NTA column saturated with the recombinant antigen as described by Gu et al., 1994, BioTechniques 17:257-262. The antibody can then be used to screen expression cDNA libraries to identify identical or heterologous genes via an immunological screening (Sambrook, J. et al., 1989, “Molecular Cloning: A Laboratory Manual,” Cold Spring Harbor Laboratory Press or Ausubel, F. M. et al., 1994, “Current Protocols in Molecular Biology”, John Wiley & Sons).

### EXAMPLE 23

### In Vivo Mutagenesis

[0585] In vivo mutagenesis of microorganisms can be performed by passage of plasmid (or other vector) DNA through E. coli or other microorganisms (e.g. Bacillus spp. or yeasts such as Saccharomyces cerevisiae), which are impaired in their capabilities to maintain the integrity of their genetic information. Typical mutator strains have mutations in the genes for the DNA repair system (e.g., mutHLS, mutD, mutT, etc.; for reference, see Rupp, W. D., 1996, DNA repair mechanisms, in: Escherichia coli and Salmonella, p. 2277-2294, ASM: Washington.) Such strains are well known to those skilled in the art. The use of such strains is illustrated, for example, in Greener, A. and Callahan, M., 1994, Strategies 7: 32-34. Transfer of mutated DNA molecules into plants is preferably done after selection and testing in microorganisms. Transgenic plants are generated according to various examples within the exemplification of this document.

TABLE IA
Nucleic acid sequence ID numbers

| | | | 4. | |
|---|---|---|---|---|
| 1. | 2. | | Lead | |
| Hit | Gene/ORF | 3. | NA | 5. |
| no. | Locus Name | Organism | SEQ ID | Homologs NA SEQ IDs |
| 1 | b0019_stress | Escherichia coli | 1 | 3, 5, 7, 9, 11, 13, 15, 17, 19, 21, 23, 25, 27, 29, 31, 33, 35, 37, 39, 41, 43, 45, 47, 49, 51, 53, |
| | | | | 55, 57, 59, 61, 63, 65, 67, 69, 71, 73, 75, 77, 79, 81, 83, 85, 87, 89, 91, 93, 95, 97, 99, 101, |
| | | | | 103, 105, 107, 109, 111, 113, 115, 117, 119, 121, 123, 125, 127, 129, 131, 133, 135, 137, |
| | | | | 139, 141, 143, 145, 147, 149, 151, 153, 155, 157, 159, 161, 163, 165, 167, 169, 171, |
| | | | | 173, 175, 177, 179, 181, 183, 185, 187, 189, 191, 193, 195, 197, 199, 201, 203, 205, |
| | | | | 207, 209, 211, 213, 215, 217, 219, 221, 223, 225, 227, 229, 231, 233, 235, 237, 239, 241, |
| | | | | 243, 245, 247, 249, 251, 253, 255, 257, 259, 261, 263, 265, 267, 269, 271 |
| 2 | b0730_stress | Escherichia coli | 276 | 278, 280, 282, 284, 286, 288, 290, 292, 294, 296, 298, 300, 302, 304, 306, 308, 310, 312, |
| | | K12 | | 314, 316, 318, 320, 322, 324, 326, 328, 330, 332, 334, 336, 338, 340, 342, 344, 346, |
| | | | | 348, 350, 352, 354, 356, 358, 360, 362, 364, 366, 368, 370, 372, 374, 376, 378, 380, |
| | | | | 382, 384, 386, 388, 390, 392, 394, 396, 398, 400, 402, 404, 406, 408, 410, 412, 414, 416, |
| | | | | 418, 420, 422, 424, 426, 428, 430, 432, 434, 436, 438, 440, 442, 444, 446, 448, 450, |
| | | | | 452, 454, 456, 458, 460, 462, 464, 466, 468, 470, 472, 474, 476, 478, 480, 482, 484, |
| | | | | 486, 488, 490, 492, 494, 496, 498, 500, 502, 504, 506, 508, 510, 512, 514, 516, 518, 520, |
| | | | | 522, 524, 526, 528, 530, 532, 534, 536, 538, 540, 542, 544, 546, 548, 550, 552, 554, |
| | | | | 556, 558, 560, 562, 564, 566, 568, 570, 572, 574, 576, 578, 580, 582, 584, 586, 588, |
| | | | | 590, 592, 594, 596, 598, 600, 602, 604, 606, 608, 610, 612, 614, 616, 618, 620, 622, 624, |
| | | | | 626, 628, 630, 632, 634, 636, 638, 640, 642, 644, 646, 648, 650, 652, 654, 656, 658, |
| | | | | 660, 662, 664, 666, 668, 670, 672, 674, 676, 678, 680, 682, 684, 686, 688, 690, 692, |
| | | | | 694 |
| 3 | b1528_stress | Escherichia coli | 699 | 701, 703, 705, 707, 709, 711, 713, 715, 717, 719, 721, 723, 725, 727, 729, 731, 733, 735, |
| | | K12 | | 737, 739, 741, 743, 745, 747, 749, 751, 753, 755, 757, 759, 761, 763, 765, 767, 769, |
| | | | | 771, 773, 775, 777, 779, 781, 783, 785, 787, 789, 791, 793, 795, 797, 799, 801, 803, |
| | | | | 805, 807, 809, 811, 813, 815, 817, 819, 821, 823, 825, 827, 829, 831, 833, 835, 837, 839, |
| | | | | 841, 843, 845, 847, 849, 851, 853, 855, 857, 859, 861, 863, 865, 867, 869, 871, 873, |
| | | | | 875, 877, 879, 881, 883, 885, 887, 889, 891, 893, 895, 897, 899, 901, 903, 905, 907, |
| | | | | 909, 911, 913, 915, 917, 919, 921, 923, 925, 927, 929, 931, 933, 935, 937, 939, 941, 943, |
| | | | | 945, 947, 949, 951, 953, 955, 957, 959, 961, 963, 965, 967, 969, 971, 973, 975, 977, |
| | | | | 979, 981, 983, 985, 987, 989, 991, 993, 995, 997, 999, 1001, 1003, 1005, 1007, 1009, |
| | | | | 1011, 1013, 1015, 1017, 1019, 1021, 1023, 1025, 1027, 1029, 1031, 1033, 1035, 1037, |
| | | | | 1039, 1041, 1043, 1045, 1047, 1049, 1051, 1053, 1055, 1057, 1059, 1061, 1063, |
| | | | | 1065, 1067, 1069, 1071, 1073, 1075, 1077, 1079, 1081, 1083, 1085, 1087, 1089, 1091, |
| | | | | 1093, 1095, 1097, 1099, 1101, 1103, 1105, 1107, 1109, 1111, 1113, 1115, 1117, |
| | | | | 1119, 1121, 1123, 1125, 1127, 1129, 1131, 1133, 1135, 1137, 1139, 1141, 1143, 1145, |
| | | | | 1147, 1149, 1151, 1153, 1155, 1157, 1159, 1161, 1163, 1165, 1167, 1169, 1171, |
| | | | | 1173, 1175, 1177, 1179, 1181, 1183, 1185, 1187, 1189, 1191, 1193, 1195, 1197, 1199, |
| | | | | 1201, 1203, 1205, 1207, 1209, 1211, 1213, 1215, 1217, 1219, 1221 |
| 4 | b1829_stress | Escherichia coli | 1226 | 1228, 1230, 1232, 1234, 1236, 1238, 1240, 1242, 1244, 1246, 1248, 1250, 1252, 1254, |
| | | K12 | | 1256, 1258, 1260, 1262, 1264, 1266, 1268, 1270, 1272, 1274, 1276, 1278, 1280, |
| | | | | 1282, 1284, 1286, 1288, 1290, 1292, 1294, 1296, 1298, 1300, 1302, 1304, 1306, 1308, |
| | | | | 1310, 1312, 1314, 1316, 1318, 1320, 1322, 1324, 1326, 1328, 1330, 1332, 1334, |
| | | | | 1336, 1338, 1340, 1342, 1344, 1346, 1348, 1350, 1352, 1354, 1356, 1358, 1360, 1362, |
| | | | | 1364, 1366, 1368, 1370, 1372, 1374, 1376, 1378, 1380, 1382, 1384, 1386, 1388, |
| | | | | 1390, 1392, 1394, 1396, 1398, 1400, 1402, 1404, 1406, 1408, 1410, 1412, 1414, 1416, |
| | | | | 1418, 1420, 1422, 1424, 1426, 1428, 1430, 1432, 1434, 1436, 1438, 1440, 1442, |
| | | | | 1444, 1446, 1448, 1450, 1452, 1454, 1456, 1458, 1460, 1462, 1464, 1466, 1468, 1470, |
| | | | | 1472, 1474, 1476, 1478, 1480, 1482, 1484, 1486, 1488, 1490, 1492, 1494, 1496, |
| | | | | 1498, 1500, 1502, 1504, 1506, 1508, 1510, 1512, 1514, 1516, 1518, 1520, 1522, 1524, |
| | | | | 1526, 1528, 1530, 1532, 1534, 1536, 1538, 1540, 1542, 1544, 1546, 1548, 1550, |
| | | | | 1552, 1554, 1556, 1558, 1560, 1562, 1564, 1566, 1568, 1570, 1572, 1574, 1576, 1578, |
| | | | | 1580, 1582, 1584, 1586, 1588, 1590, 1592, 1594, 1596, 1598, 1600, 1602, 1604, |
| | | | | 1606, 1608, 1610, 1612, 1614, 1616, 1618, 1620 |
| 5 | b3164_stress | Escherichia coli | 1625 | 1627, 1629, 1631, 1633, 1635, 1637, 1639, 1641, 1643, 1645, 1647, 1649, 1651, 1653, |
| | | | | 1655, 1657, 1659, 1661, 1663, 1665, 1667, 1669, 1671, 1673, 1675, 1677, 1679, |
| | | | | 1681, 1683, 1685, 1687, 1689, 1691, 1693, 1695, 1697, 1699, 1701, 1703, 1705, 1707, |
| | | | | 1709, 1711, 1713, 1715, 1717, 1719, 1721, 1723, 1725, 1727, 1729, 1731, 1733, |
| | | | | 1735, 1737, 1739, 1741, 1743, 1745, 1747, 1749, 1751, 1753, 1755, 1757, 1759, 1761, |
| | | | | 1763, 1765, 1767, 1769, 1771, 1773, 1775, 1777, 1779, 1781, 1783, 1785, 1787, |
| | | | | 1789, 1791, 1793, 1795, 1797, 1799, 1801, 1803, 1805, 1807, 1809, 1811, 1813, 1815, |
| | | | | 1817, 1819, 1821, 1823, 1825, 1827, 1829, 1831, 1833, 1835, 1837, 1839, 1841, |
| | | | | 1843, 1845, 1847, 1849, 1851, 1853, 1855, 1857, 1859, 1861, 1863, 1865, 1867, 1869, |
| | | | | 1871, 1873, 1875, 1877, 1879, 1881, 1883, 1885, 1887, 1889, 1891, 1893, 1895, |
| | | | | 1897, 1899, 1901, 1903, 1905, 1907, 1909, 1911, 1913, 1915, 1917, 1919, 1921, 1923, |
| | | | | 1925, 1927, 1929, 1931, 1933, 1935, 1937, 1939, 1941, 1943, 1945, 1947, 1949, |
| | | | | 1951, 1953, 1955, 1957, 1959, 1961, 1963, 1965, 1967, 1969, 1971, 1973, 1975, 1977, |
| | | | | 1979, 1981, 1983, 1985, 1987, 1989, 1991, 1993, 1995, 1997, 1999, 2001, 2003, |
| | | | | 2005, 2007, 2009, 2011, 2013, 2015, 2017, 2019, 2021, 2023, 2025, 2027, 2029, 2031, |
| | | | | 2033, 2035, 2037 |
| 6 | YBL002W_stress | Saccharomyces | 2042 | 2044, 2046, 2048, 2050, 2052, 2054, 2056, 2058, 2060, 2062, 2064, 2066, 2068, 2070, |
| | | cerevisiae | | 2072, 2074, 2076, 2078, 2080, 2082, 2084, 2086, 2088, 2090, 2092, 2094, 2096, |
| | | | | 2098, 2100, 2102, 2104, 2106, 2108, 2110, 2112, 2114, 2116, 2118, 2120, 2122, 2124, |
| | | | | 2126, 2128, 2130, 2132, 2134, 2136, 2138, 2140, 2142, 2144, 2146, 2148, 2150, |
| | | | | 2152, 2154, 2156, 2158, 2160, 2162, 2164, 2166, 2168, 2170, 2172, 2174, 2176, 2178, |
| | | | | 2180, 2182, 2184, 2186, 2188, 2190, 2192, 2194, 2196, 2198, 2200, 2202, 2204, |
| | | | | 2206, 2208, 2210, 2212, 2214, 2216, 2218, 2220, 2222, 2224, 2226, 2228, 2230, 2232, |
| | | | | 2234, 2236, 2238, 2240, 2242, 2244, 2246, 2248, 2250, 2252, 2254, 2256, 2258, |
| | | | | 2260, 2262, 2264, 2266, 2268, 2270, 2272, 2274, 2276, 2278, 2280, 2282, 2284 |
| 7 | YBR002C_stress | Saccharomyces | 2614 | 2616, 2618, 2620, 2622, 2624, 2626, 2628, 2630, 2632, 2634, 2636, 2638, 2640, 2642, |
| | | cerevisiae | | 2644, 2646, 2648, 2650, 2652, 2654, 2656, 2658, 2660, 2662, 2664, 2666, 2668, |
| | | | | 2670, 2672, 2674, 2676, 2678, 2680, 2682, 2684, 2686, 2688, 2690, 2692, 2694, 2696, |
| | | | | 2698, 2700, 2702, 2704, 2706, 2708, 2710, 2712, 2714, 2716, 2718, 2720, 2722, |
| | | | | 2724, 2726, 2728, 2730, 2732, 2734, 2736, 2738, 2740, 2742, 2744, 2746, 2748, 2750, |
| | | | | 2752, 2754, 2756, 2758, 2760, 2762, 2764, 2766, 2768, 2770, 2772, 2774, 2776, |
| | | | | 2778, 2780, 2782, 2784, 2786, 2788, 2790, 2792, 2794, 2796, 2798, 2800, 2802, 2804, |
| | | | | 2806, 2808, 2810, 2812, 2814, 2816, 2818, 2820, 2822, 2824, 2826, 2828, 2830, |
| | | | | 2832, 2834, 2836, 2838, 2840, 2842, 2844, 2846, 2848, 2850, 2852, 2854, 2856, 2858, |
| | | | | 2860, 2862, 2864, 2866, 2868, 2870, 2872, 2874, 2876, 2878, 2880, 2882, 2884, |
| | | | | 2886, 2888, 2890, 2892, 2894, 2896, 2898, 2900, 2902, 2904, 2906, 2908, 2910, 2912, |
| | | | | 2914, 2916, 2918, 2920, 2922, 2924, 2926, 2928, 2930, 2932, 2934, 2936, 2938, |
| | | | | 2940, 2942, 2944, 2946, 2948, 2950, 2952, 2954, 2956, 2958, 2960, 2962, 2964, 2966, |
| | | | | 2968, 2970, 2972, 2974, 2976, 2978, 2980, 2982, 2984, 2986, 2988, 2990, 2992, |
| | | | | 2994, 2996, 2998, 3000, 3002, 3004, 3006, 3008, 3010, 3012, 3014, 3016, 3018, 3020, |
| | | | | 3022, 3024, 3026, 3028, 3030, 3032, 3034, 3036, 3038, 3040, 3042, 3044, 3046, |
| | | | | 3048, 3050, 3052, 3054, 3056, 3058, 3060, 3062, 3064, 3066, 3068, 3070, 3072, 3074, |
| | | | | 3076, 3078, 3080, 3082, 3084, 3086, 3088, 3090, 3092, 3094, 3096, 3098, 3100, |
| | | | | 3102, 3104, 3106, 3108, 3110, 3112, 3114, 3116, 3118, 3120, 3122, 3124, 3126, 3128, |
| | | | | 3130, 3132, 3134, 3136 |
| 8 | YBR010W_stress | Saccharomyces | 3158 | 3160, 3162, 3164, 3166, 3168, 3170, 3172, 3174, 3176, 3178, 3180, 3182, 3184, 3186, |
| | | cerevisiae | | 3188, 3190, 3192, 3194, 3196, 3198, 3200, 3202, 3204, 3206, 3208, 3210, 3212, |
| | | | | 3214, 3216, 3218, 3220, 3222, 3224, 3226, 3228, 3230, 3232, 3234, 3236, 3238, 3240, |
| | | | | 3242, 3244, 3246, 3248, 3250, 3252, 3254, 3256, 3258, 3260, 3262, 3264, 3266, |
| | | | | 3268, 3270, 3272, 3274, 3276, 3278, 3280, 3282, 3284, 3286, 3288, 3290, 3292, 3294, |
| | | | | 3296, 3298, 3300, 3302 |
| 9 | YBR090c_stress | Saccharomyces | 3335 | 3337 |
| | | cerevisiae | | |
| 10 | YBR109C_stress | Saccharomyces | 3342 | 3344, 3346, 3348, 3350, 3352, 3354, 3356, 3358, 3360, 3362, 3364, 3366, 3368, 3370, |
| | | cerevisiae | | 3372, 3374, 3376, 3378, 3380, 3382, 3384, 3386, 3388, 3390, 3392, 3394, 3396, |
| | | | | 3398, 3400, 3402, 3404, 3406, 3408, 3410, 3412, 3414, 3416, 3418, 3420, 3422, 3424, |
| | | | | 3426, 3428, 3430, 3432, 3434, 3436 |
| 11 | YBR288C_stress | Saccharomyces | 3571 | 3573, 3575, 3577, 3579, 3581, 3583, 3585, 3587, 3589, 3591, 3593, 3595, 3597, 3599, |
| | | cerevisiae | | 3601, 3603, 3605, 3607, 3609, 3611, 3613, 3615, 3617, 3619, 3621, 3623, 3625, |
| | | | | 3627, 3629, 3631, 3633, 3635, 3637, 3639, 3641, 3643, 3645, 3647, 3649, 3651, 3653, |
| | | | | 3655, 3657, 3659, 3661, 3663, 3665, 3667 |
| 12 | YEL001C_stress | Saccharomyces | 3672 | 3674, 3676, 3678, 3680, 3682, 3684, 3686, 3688, 3690 |
| | | cerevisiae | | |
| 13 | YER062c_stress | Saccharomyces | 3695 | 3697, 3699, 3701, 3703, 3705, 3707, 3709, 3711, 3713, 3715, 3717, 3719, 3721, 3723, |
| | | cerevisiae | | 3725, 3727, 3729, 3731, 3733, 3735, 3737, 3739, 3741, 3743, 3745, 3747, 3749, |
| | | | | 3751, 3753, 3755, 3757, 3759, 3761, 3763, 3765, 3767, 3769, 3771, 3773, 3775, 3777, |
| | | | | 3779, 3781, 3783, 3785, 3787, 3789, 3791, 3793, 3795, 3797, 3799, 3801, 3803, |
| | | | | 3805, 3807, 3809, 3811, 3813, 3815, 3817, 3819, 3821, 3823, 3825, 3827, 3829, 3831, |
| | | | | 3833, 3835, 3837, 3839, 3841, 3843 |
| 14 | YER145C_stress | Saccharomyces | 3848 | 3850, 3852, 3854, 3856, 3858, 3860, 3862, 3864, 3866, 3868, 3870, 3872, 3874, 3876, |
| | | cerevisiae | | 3878, 3880, 3882, 3884, 3886, 3888, 3890, 3892, 3894, 3896, 3898, 3900, 3902, |
| | | | | 3904, 3906, 3908, 3910, 3912, 3914, 3916, 3918, 3920, 3922, 3924, 3926, 3928, 3930, |
| | | | | 3932, 3934, 3936, 3938, 3940, 3942, 3944, 3946, 3948 |
| 15 | YER146W_stress | Saccharomyces | 3953 | 3955, 3957, 3959, 3961, 3963, 3965, 3967, 3969, 3971, 3973, 3975, 3977, 3979, 3981, |
| | | cerevisiae | | 3983, 3985, 3987, 3989, 3991, 3993, 3995, 3997, 3999, 4001, 4003, 4005, 4007, |
| | | | | 4009, 4011, 4013, 4015, 4017, 4019, 4021, 4023, 4025, 4027, 4029, 4031, 4033, 4035, |
| | | | | 4037, 4039, 4041, 4043, 4045, 4047, 4049, 4051, 4053, 4055, 4057, 4059, 4061, |
| | | | | 4063, 4065, 4067, 4069, 4071, 4073, 4075, 4077, 4079, 4081, 4083, 4085, 4087, 4089, |
| | | | | 4091, 4093, 4095, 4097, 4099 |
| 16 | YGL151W_stress | Saccharomyces | 4104 | 4106, 4108, 4110, 4112, 4114, 4116, 4118, 4120 |
| | | cerevisiae | | |
| 17 | YGR046W_stress | Saccharomyces | 4125 | 4127, 4129, 4131, 4133, 4135, 4137, 4139, 4141, 4143, 4145, 4147, 4149, 4151, 4153, |
| | | cerevisiae | | 4155, 4157, 4159, 4161, 4163, 4165, 4167, 4169, 4171, 4173, 4175, 4177, 4179, |
| | | | | 4181, 4183, 4185, 4187, 4189, 4191 |
| 18 | YGR060W_stress | Saccharomyces | 4196 | 4198, 4200, 4202, 4204, 4206, 4208, 4210, 4212, 4214, 4216, 4218, 4220, 4222, 4224, |
| | | cerevisiae | | 4226, 4228, 4230, 4232, 4234, 4236, 4238, 4240, 4242, 4244, 4246, 4248, 4250, |
| | | | | 4252, 4254, 4256, 4258, 4260, 4262, 4264, 4266, 4268, 4270, 4272, 4274, 4276, 4278, |
| | | | | 4280, 4282, 4284, 4286, 4288, 4290, 4292, 4294, 4296, 4298, 4300, 4302, 4304, |
| | | | | 4306, 4308, 4310, 4312, 4314, 4316, 4318, 4320, 4322, 4324, 4326, 4328, 4330, 4332, |
| | | | | 4334, 4336, 4338, 4340, 4342 |
| 19 | YGR141W_stress | Saccharomyces | 4369 | 4371, 4373, 4375, 4377, 4379, 4381, 4383, 4385, 4387, 4389, 4391, 4393, 4395, 4397, |
| | | cerevisiae | | 4399 |
| 20 | YIL002C_stress | Saccharomyces | 4404 | 4406, 4408, 4410, 4412, 4414, 4416, 4418, 4420, 4422, 4424, 4426, 4428, 4430, 4432, |
| | | cerevisiae | | 4434, 4436, 4438, 4440, 4442, 4444, 4446, 4448, 4450, 4452, 4454, 4456, 4458, |
| | | | | 4460, 4462, 4464, 4466, 4468, 4470, 4472, 4474, 4476, 4478, 4480, 4482, 4484, 4486, |
| | | | | 4488, 4490, 4492, 4494, 4496, 4498, 4500, 4502, 4504, 4506, 4508, 4510 |
| 21 | YIL031W_stress | Saccharomyces | 4517 | 4519, 4521, 4523, 4525, 4527, 4529, 4531 |
| | | cerevisiae | | |
| 22 | YIL076W_stress | Saccharomyces | 4536 | 4538, 4540, 4542, 4544, 4546, 4548, 4550, 4552, 4554, 4556, 4558, 4560, 4562, 4564, |
| | | cerevisiae | | 4566, 4568, 4570, 4572, 4574, 4576, 4578, 4580, 4582 |
| 23 | YIL077C_stress | Saccharomyces | 4587 | 4589, 4591, 4593, 4595 |
| | | cerevisiae | | |
| 24 | YIL121W_stress | Saccharomyces | 4600 | 4602, 4604, 4606, 4608, 4610, 4612, 4614, 4616, 4618, 4620, 4622, 4624, 4626, 4628, |
| | | cerevisiae | | 4630, 4632, 4634, 4636, 4638, 4640, 4642, 4644, 4646, 4648, 4650, 4652, 4654, |
| | | | | 4656, 4658, 4660, 4662, 4664, 4666, 4668, 4670, 4672, 4674, 4676, 4678, 4680, 4682, |
| | | | | 4684, 4686, 4688, 4690, 4692, 4694, 4696 |
| 25 | YIL156W_stress | Saccharomyces | 4701 | 4703, 4705, 4707, 4709, 4711, 4713, 4715, 4717, 4719, 4721, 4723, 4725, 4727 |
| | | cerevisiae | | |
| 26 | YJR044C_stress | Saccharomyces | 4732 | 4734, 4736, 4738, 4740, 4742, 4744, 4746, 4748, 4750, 4752, 4754, 4756, 4758, 4760, |
| | | cerevisiae | | 4762, 4764, 4766, 4768, 4770, 4772, 4774, 4776, 4778, 4780, 4782, 4784, 4786, |
| | | | | 4788, 4790, 4792, 4794, 4796, 4798, 4800, 4802, 4804, 4806, 4808, 4810, 4812, 4814, |
| | | | | 4816, 4818, 4820, 4822, 4824, 4826, 4828, 4830, 4832, 4834, 4836, 4838, 4840, |
| | | | | 4842, 4844 |
| 27 | YKL057C_stress | Saccharomyces | 4849 | 4851, 4853, 4855, 4857, 4859, 4861, 4863, 4865, 4867 |
| | | cerevisiae | | |
| 28 | YKL150W_stress | Saccharomyces | 4872 | 4874, 4876, 4878, 4880, 4882, 4884, 4886, 4888, 4890, 4892, 4894, 4896, 4898, 4900, |
| | | cerevisiae | | 4902, 4904, 4906, 4908, 4910, 4912, 4914, 4916, 4918, 4920, 4922, 4924, 4926, |
| | | | | 4928, 4930, 4932, 4934, 4936, 4938, 4940, 4942, 4944, 4946, 4948, 4950, 4952, 4954, |
| | | | | 4956, 4958, 4960, 4962, 4964, 4966, 4968, 4970, 4972, 4974, 4976, 4978, 4980, |
| | | | | 4982, 4984, 4986, 4988, 4990, 4992, 4994, 4996, 4998, 5000, 5002, 5004, 5006, 5008, |
| | | | | 5010, 5012, 5014, 5016, 5018, 5020, 5022, 5024, 5026, 5028, 5030, 5032, 5034, |
| | | | | 5036, 5038, 5040, 5042, 5044, 5046, 5048, 5050, 5052, 5054, 5056, 5058, 5060, 5062, |
| | | | | 5064, 5066, 5068, 5070, 5072, 5074, 5076, 5078, 5080, 5082, 5084, 5086, 5088, |
| | | | | 5090, 5092, 5094, 5096, 5098, 5100, 5102, 5104, 5106, 5108, 5110, 5112, 5114, 5116, |
| | | | | 5118, 5120, 5122, 5124, 5126, 5128, 5130, 5132, 5134, 5136, 5138, 5140, 5142, |
| | | | | 5144 |
| 29 | YGL151W_stress | Saccharomyces | 5167 | 5249, 5251, 5253, 5255, 5257, 5259, 5261, 5263, 5265, 5267, 5269, 5271, 5273, 5275, |
| | | cerevisiae | | 5277, 5279, 5281, 5283, 5285, 5287, 5289, 5291, 5293, 5295, 5297, 5299, 5301, |
| | | | | 5303, 5305, 5307, 5309, 5311, 5313, 5315, 5317, 5319, 5321, 5323, 5325, 5327, 5329, |
| | | | | 5331, 5333, 5335, 5337, 5339, 5341, 5343, 5345, 5347, 5349, 5351, 5353, 5355, |
| | | | | 5357, 5359, 5361, 5363, 5365, 5367, 5369, 5371, 5373, 5375, 5377, 5379, 5381, 5383, |
| | | | | 5385, 5387, 5389, 5391, 5393, 5395, 5397, 5399, 5401, 5403 |
| 30 | YLR062c_stress | Saccharomyces | 5240 | 5242 |
| | | cerevisiae | | |
| 31 | YLR142W_stress | Saccharomyces | 5247 | 5249, 5251, 5253, 5255, 5257, 5259, 5261, 5263, 5265, 5267, 5269, 5271, 5273, 5275, |
| | | cerevisiae | | 5277, 5279, 5281, 5283, 5285, 5287, 5289, 5291, 5293, 5295, 5297, 5299, 5301, |
| | | | | 5303, 5305, 5307, 5309, 5311, 5313, 5315, 5317, 5319, 5321, 5323, 5325, 5327, 5329, |
| | | | | 5331, 5333, 5335, 5337, 5339, 5341, 5343, 5345, 5347, 5349, 5351, 5353, 5355, |
| | | | | 5357, 5359, 5361, 5363, 5365, 5367, 5369, 5371, 5373, 5375, 5377, 5379, 5381, 5383, |
| | | | | 5385, 5387, 5389, 5391, 5393, 5395, 5397, 5399, 5401, 5403 |
| 32 | YLR173W_stress | Saccharomyces | 5408 | 5410, 5412, 5414 |
| | | cerevisiae | | |
| 33 | YLR274W_stress | Saccharomyces | 5419 | 5421, 5423, 5425, 5427, 5429, 5431, 5433, 5435, 5437, 5439, 5441, 5443, 5445, 5447, |
| | | cerevisiae | | 5449, 5451, 5453, 5455, 5457, 5459, 5461, 5463, 5465, 5467, 5469, 5471, 5473, |
| | | | | 5475, 5477, 5479, 5481, 5483, 5485, 5487, 5489, 5491, 5493, 5495, 5497, 5499, 5501, |
| | | | | 5503, 5505, 5507, 5509, 5511, 5513, 5515, 5517, 5519, 5521, 5523, 5525, 5527, |
| | | | | 5529, 5531, 5533, 5535, 5537, 5539, 5541, 5543, 5545, 5547, 5549, 5551, 5553, 5555, |
| | | | | 5557, 5559, 5561, 5563, 5565, 5567, 5569, 5571, 5573, 5575, 5577, 5579, 5581, |
| | | | | 5583, 5585, 5587, 5589, 5591, 5593, 5595, 5597, 5599, 5601, 5603, 5605, 5607, 5609, |
| | | | | 5611, 5613, 5615, 5617, 5619, 5621, 5623, 5625, 5627, 5629, 5631, 5633, 5635, |
| | | | | 5637, 5639, 5641, 5643, 5645, 5647, 5649, 5651, 5653, 5655, 5657, 5659, 5661, 5663, |
| | | | | 5665, 5667, 5669, 5671, 5673, 5675, 5677, 5679, 5681, 5683, 5685, 5687, 5689, |
| | | | | 5691, 5693, 5695, 5697, 5699, 5701, 5703, 5705 |
| 34 | YLR394W_stress | Saccharomyces | 5714 | 5716, 5718, 5720 |
| | | cerevisiae | | |
| 35 | YNL108C_stress | Saccharomyces | 5725 | 5727, 5729, 5731, 5733, 5735, 5737, 5739, 5741, 5743, 5745, 5747, 5749, 5751, 5753, |
| | | cerevisiae | | 5755, 5757, 5759, 5761, 5763, 5765, 5767, 5769, 5771, 5773, 5775, 5777, 5779, |
| | | | | 5781, 5783, 5785, 5787, 5789, 5791, 5793, 5795, 5797, 5799, 5801, 5803, 5805, 5807, |
| | | | | 5809, 5811, 5813, 5815, 5817 |
| 36 | YNL141W_stress | Saccharomyces | 5822 | 5824, 5826, 5828, 5830, 5832, 5834, 5836, 5838, 5840, 5842, 5844, 5846, 5848, 5850, |
| | | cerevisiae | | 5852, 5854, 5856, 5858, 5860, 5862, 5864, 5866, 5868, 5870, 5872, 5874, 5876, |
| | | | | 5878, 5880, 5882, 5884, 5886, 5888, 5890, 5892, 5894, 5896, 5898, 5900, 5902, 5904, |
| | | | | 5906, 5908, 5910, 5912, 5914, 5916, 5918, 5920, 5922, 5924, 5926, 5928, 5930, |
| | | | | 5932, 5934, 5936, 5938, 5940, 5942, 5944, 5946, 5948, 5950, 5952, 5954, 5956, 5958, |
| | | | | 5960, 5962, 5964, 5966, 5968, 5970, 5972, 5974, 5976, 5978, 5980, 5982, 5984, |
| | | | | 5986, 5988, 5990, 5992, 5994, 5996, 5998, 6000, 6002, 6004, 6006, 6008, 6010, 6012, |
| | | | | 6014, 6016, 6018, 6020, 6022, 6024, 6026, 6028, 6030, 6032, 6034, 6036, 6038, |
| | | | | 6040, 6042, 6044 |
| 37 | YNL282W_stress | Saccharomyces | 6049 | 6051, 6053, 6055, 6057 |
| | | cerevisiae | | |
| 38 | YNL283C_stress | Saccharomyces | 6062 | 6064, 6066, 6068, 6070, 6072, 6074, 6076, 6078, 6080, 6082, 6084, 6086, 6088, 6090, |
| | | cerevisiae | | 6092, 6094, 6096, 6098, 6100, 6102, 6104, 6106, 6108 |
| 39 | YNL286W_stress | Saccharomyces | 6113 | 6115, 6117, 6119, 6121, 6123, 6125, 6127, 6129, 6131, 6133, 6135, 6137, 6139, 6141, |
| | | cerevisiae | | 6143, 6145, 6147, 6149, 6151, 6153, 6155, 6157, 6159, 6161, 6163, 6165, 6167, |
| | | | | 6169, 6171, 6173, 6175, 6177, 6179, 6181, 6183, 6185, 6187, 6189, 6191, 6193, 6195, |
| | | | | 6197, 6199, 6201, 6203, 6205, 6207 |
| 40 | YOL056W_stress | Saccharomyces | 6212 | 6214, 6216, 6218, 6220, 6222, 6224, 6226, 6228, 6230, 6232, 6234, 6236, 6238, 6240, |
| | | cerevisiae | | 6242, 6244, 6246, 6248, 6250, 6252, 6254, 6256, 6258, 6260, 6262, 6264, 6266, |
| | | | | 6268, 6270, 6272, 6274, 6276, 6278, 6280, 6282, 6284, 6286, 6288, 6290, 6292, 6294, |
| | | | | 6296, 6298, 6300, 6302, 6304, 6306, 6308, 6310, 6312, 6314, 6316, 6318, 6320, |
| | | | | 6322, 6324, 6326, 6328, 6330, 6332, 6334, 6336, 6338, 6340, 6342, 6344, 6346, 6348, |
| | | | | 6350, 6352, 6354, 6356, 6358, 6360, 6362, 6364, 6366, 6368, 6370, 6372, 6374, |
| | | | | 6376, 6378, 6380, 6382, 6384, 6386, 6388, 6390, 6392, 6394, 6396, 6398, 6400, 6402, |
| | | | | 6404, 6406, 6408, 6410, 6412, 6414, 6416, 6418, 6420, 6422, 6424, 6426, 6428, |
| | | | | 6430, 6432, 6434, 6436, 6438, 6440, 6442, 6444, 6446, 6448, 6450, 6452, 6454, 6456, |
| | | | | 6458, 6460, 6462, 6464, 6466, 6468, 6470, 6472, 6474, 6476, 6478, 6480, 6482, |
| | | | | 6484, 6486, 6488, 6490, 6492, 6494, 6496, 6498, 6500, 6502, 6504, 6506, 6508, 6510, |
| | | | | 6512, 6514, 6516, 6518, 6520, 6522, 6524, 6526, 6528, 6530, 6532, 6534, 6536, |
| | | | | 6538, 6540, 6542, 6544, 6546, 6548, 6550, 6552, 6554, 6556, 6558, 6560, 6562, 6564, |
| | | | | 6566, 6568, 6570, 6572, 6574, 6576, 6578, 6580, 6582, 6584, 6586, 6588, 6590, |
| | | | | 6592, 6594, 6596 |
| 41 | YOR154W_stress | Saccharomyces | 6603 | 6605, 6607, 6609, 6611, 6613, 6615, 6617, 6619, 6621, 6623, 6625, 6627, 6629, 6631, |
| | | cerevisiae | | 6633, 6635, 6637, 6639, 6641, 6643, 6645, 6647, 6649, 6651, 6653, 6655, 6657 |
| 42 | YOR266W_stress | Saccharomyces | 6662 | 6664, 6666, 6668, 6670 |
| | | cerevisiae | | |
| 43 | YOR298C- | Saccharomyces | 6675 | 6677, 6679, 6681, 6683, 6685, 6687, 6689, 6691, 6693, 6695, 6697, 6699, 6701, 6703, |
| | A_stress | cerevisiae | | 6705, 6707, 6709, 6711, 6713, 6715, 6717, 6719, 6721, 6723, 6725, 6727, 6729, |
| | | | | 6731, 6733, 6735, 6737, 6739, 6741, 6743, 6745, 6747, 6749, 6751, 6753, 6755, 6757, |
| | | | | 6759, 6761, 6763, 6765, 6767, 6769, 6771, 6773, 6775, 6777 |
| 44 | YPL030W_stress | Saccharomyces | 6782 | 6784, 6786, 6788, 6790, 6792, 6794, 6796, 6798, 6800, 6802, 6804, 6806, 6808, 6810, |
| | | cerevisiae | | 6812, 6814, 6816, 6818, 6820, 6822, 6824, 6826, 6828, 6830, 6832, 6834, 6836, |
| | | | | 6838, 6840, 6842, 6844 |
| 45 | YPL103C_stress | Saccharomyces | 6849 | 6851, 6853, 6855, 6857, 6859, 6861, 6863, 6865, 6867, 6869, 6871, 6873, 6875, 6877, |
| | | cerevisiae | | 6879, 6881, 6883, 6885, 6887, 6889, 6891, 6893, 6895, 6897, 6899, 6901, 6903, |
| | | | | 6905, 6907, 6909, 6911, 6913, 6915, 6917, 6919, 6921, 6923, 6925, 6927, 6929, 6931, |
| | | | | 6933, 6935, 6937, 6939, 6941, 6943, 6945, 6947, 6949, 6951, 6953, 6955, 6957, |
| | | | | 6959, 6961, 6963, 6965, 6967, 6969, 6971, 6973, 6975, 6977, 6979, 6981, 6983, 6985, |
| | | | | 6987, 6989, 6991, 6993, 6995, 6997, 6999, 7001, 7003, 7005, 7007, 7009, 7011, |
| | | | | 7013, 7015, 7017, 7019, 7021, 7023, 7025, 7027, 7029, 7031, 7033, 7035, 7037, 7039, |
| | | | | 7041, 7043, 7045, 7047, 7049 |
| 46 | YPL211W_stress | Saccharomyces | 7058 | 7060, 7062, 7064, 7066, 7068, 7070, 7072, 7074, 7076, 7078, 7080, 7082, 7084, 7086, |
| | | cerevisiae | | 7088, 7090, 7092, 7094, 7096, 7098, 7100, 7102, 7104, 7106, 7108, 7110, 7112, |
| | | | | 7114, 7116, 7118, 7120, 7122, 7124, 7126, 7128, 7130, 7132, 7134, 7136, 7138, 7140, |
| | | | | 7142, 7144, 7146, 7148, 7150, 7152, 7154, 7156, 7158, 7160, 7162, 7164, 7166 |
| 47 | YLR210W | Saccharomyces | 7181 | 7183; 7185; 7187; 7189; 7191; 7193; 7195; 7197; 7199; 7201; 7203; 7205; |
| | | cerevisiae | | 7207; 7209; 7211; 7213; 7215; 7217; 7219; 7221; 7223; 7225; 7227; 7229; |
| | | | | 7231; 7233; 7235; 7237; 7239; 7241; 7243; 7245; 7247; 7249; 7251; 7253; |
| | | | | 7255; 7257; 7259; 7261; 7263; 7265; 7267; 7269; 7271; 7273; 7275; 7277; |
| | | | | 7279; 7281; 7283; 7285; 7287; 7289; 7291; 7293; 7295; 7297; 7299; 7301; |
| | | | | 7303; 7305; 7307; 7309; 7311; 7313; 7315; 7317; 7319; 7321; 7323; 7325; |
| | | | | 7327; 7329; 7331; 7333; 7335; 7337; 7339; 7341; 7343; 7345; 7347; 7349; |
| | | | | 7351; 7353; 7355; 7357; 7359; 7361; 7363; 7365; 7367; 7369; 7371; 7373; |
| | | | | 7375; 7377; 7379; 7381; 7383; 7385; 7387; 7389; 7391; 7393; 7395; 7397; |
| | | | | 7399; 7401; 7403; 7405; 7407; 7409; 7411; 7413; 7415; 7417; 7419; 7421; |
| | | | | 7423; 7425; 7427; 7429; 7431; 7433; 7435; 7437; 7439; 7441; 7443; 7445; |
| | | | | 7447; 7449; 7451; 7453; 7455; 7457; 7459; 7461; 7463; 7465; 7467; 7469; |
| | | | | 7471; 7473; 7475; 7477; 7479; 7481; 7483; 7485; 7487; 7489; 7491; 7493; |
| | | | | 7495; 7497 |
| 48 | YNL231C_stress | Saccharomyces | 7524 | 7526; 7528; 7530; 7532; 7534; 7536; 7538; 7540; 7542; 7544; 7546; 7548; |
| | | cerevisiaei | | 7550; 7552; 7554; 7556; 7558; 7560; 7562; 7564; 7566; 7568; 7570; 7572; |
| | | | | 7574; 7576; 7578; 7580; 7582; 7584; 7586; 7588; 7590; 7592; 7594; 7596; |
| | | | | 7598; 7600; 7602; 7604; 7606; 7608; 7610; 7612; 7614; 7616; 7618; 7620; |
| | | | | 7622; 7624; 7626; 7628; 7630; 7632; 7634; 7636; 7638; 7640; 7642; 7644; |
| | | | | 7646; 7648; 7650; 7652; 7654; 7656; 7658; 7660; 7662; 7664; 7666; 7668; |
| | | | | 7670; 7672; 7674; 7676; 7678 |
| 49 | YNR029C_stress | Saccharomyces | 7695 | 7697; 7699; 7701; 7703; 7705; 7707; 7709; 7711; 7713; 7715; 7717; 7719; |
| | | cerevisiae | | 7721; 7723; 7725; 7727; 7729; 7731; 7733; 7735; 7737; 7739; 7741; 7743; |
| | | | | 7745; 7747; 7749; 7751; 7753; 7755; 7757; 7759; 7761; 7763; 7765; 7767; |
| | | | | 7769; 7771; 7773; 7775; 7777; 7779; 7781; 7783; 7785; 7787; 7789; 7791; |
| | | | | 7793; 7795; 7797; 7799; 7801; 7803; 7805; 7807; 7809; 7811; 7813; 7815; |
| | | | | 7817; 7819; 7821; 7823; 7825; 7827; 7829; 7831; 7833; 7835; 7837; 7839; |
| | | | | 7841; 7843; 7845; 7847; 7849; 7851; 7853; 7855; 7857; 7859; 7861; 7863; |
| | | | | 7865; 7867; 7869; 7871; 7873; 7875; 7877; 7879; 7881; 7883; 7885; 7887; |
| | | | | 7889; 7891; 7893; 7895; 7897; 7899; 7901; 7903; 7905; 7907; 7909; 7911; |
| | | | | 7913; 7915; 7917; 7919; 7921; 7923; 7925; 7927; 7929; 7931; 7933; 7935; |
| | | | | 7937; 7939; 7941; 7943; 7945; 7947; 7949; 7951; 7953; 7955; 7957; 7959; |
| | | | | 7961; 7963; 7965; 7967; 7969; 7971; 7973; 7975; 79777; 7979; 7981; 7983; |
| | | | | 7985; 7987; 7989; 7991; 7993; 7995; 7997; 7999; 8001; 8003; 8005; 8007; |
| | | | | 8009; 8011; 8013; 8015; 8017; 8019; 8021; 8023; 8025; 8027; 8029; 8031; |
| | | | | 8033; 8035; 8037; 8039; 8041; 8043; 8045; 8047; 8049; 8051; 8053; 8055; |
| | | | | 8057; 8059; 8061; 8063; 8065; 8067; 8069; 8071; 8073; 8075; 8077; 8079; |
| | | | | 8081; 8083; 8085; 8087; 8089; 8091; 8093; 8095; 8097; 8099; 8101; 8103; |
| | | | | 8105; 8107; 8109; 8111; 8113; 8115; 8117; 8119; 8121; 8123; 8125; 8127; |
| | | | | 8129; 8131; 8133; 8135; 8137; 8139; 8141; 8143; 8145; 8147; 8149; 8151; |
| | | | | 8153; 8155; 8157; 8159; 8161; 8163; 8165; 8167; 8169; 8171; 8173; 8175; |
| | | | | 8177; 8179; 8181; 8183; 8185; 8187; 8189; 8191; 8193; 8195; 8197; 8199; |
| | | | | 8201; 8203; 8205; 8207; 8209; 8211; 8213; 8215; 8217; 8219; 8221; 8223; |
| | | | | 8225; 8227; 8229; 8231; 8233; 8235; 8237; 8239; 8241; 8243; 8245; 8247; |
| | | | | 8249; 8251; 8253; 8255; 8257; 8259; 8261; 8263; 8265; 8267; 8269; 8271; |
| | | | | 8273; 8275; 8277; 8279; 8281; 8283; 8285; 8287 |

TABLE IB
Nucleic acid sequence ID numbers

| | | | 4. | |
|---|---|---|---|---|
| | 2. | | Lead | |
| 1. | Gene/ORF Locus | 3. | NA SEQ | 5. |
| Hit no. | Name | Organism | ID | Homologs NA SEQ IDs |
| 1 | b0019_stress | Escherichia coli | 1 | |
| 2 | b0730_stress | Escherichia coli | 276 | |
| | | K12 | | |
| 3 | b1528_stress | Escherichia coli | 699 | |
| | | K12 | | |
| 4 | b1829_stress | Escherichia coli | 1226 | |
| | | K12 | | |
| 5 | b3164_stress | Escherichia coli | 1625 | |
| 6 | YBL002W_stress | Saccharomyces | 2042 | 2286, 2288, 2290, 2292, 2294, 2296, 2298, 2300, 2302, 2304, |
| | | cerevisiae | | 2306, 2308, 2310, 2312, 2314, 2316, 2318, 2320, 2322, 2324, |
| | | | | 2326, 2328, 2330, 2332, 2334, 2336, 2338, 2340, 2342, 2344, |
| | | | | 2346, 2348, 2350, 2352, 2354, 2356, 2358, 2360, 2362, 2364, |
| | | | | 2366, 2368, 2370, 2372, 2374, 2376, 2378, 2380, 2382, 2384, |
| | | | | 2386, 2388, 2390, 2392, 2394, 2396, 2398, 2400, 2402, 2404, |
| | | | | 2406, 2408, 2410, 2412, 2414, 2416, 2418, 2420, 2422, 2424, |
| | | | | 2426, 2428, 2430, 2432, 2434, 2436, 2438, 2440, 2442, 2444, |
| | | | | 2446, 2448, 2450, 2452, 2454, 2456, 2458, 2460, 2462, 2464, |
| | | | | 2466, 2468, 2470, 2472, 2474, 2476, 2478, 2480, |
| | | | | 2482, 2484, 2486, 2488, 2490, 2492, 2494, 2496, 2498, 2500, 2502, 2504, |
| | | | | 2506, 2508, 2510, 2512, 2514, 2516, 2518, 2520, 2522, 2524, 2526, 2528, |
| | | | | 2530, 2532, 2534, 2536, 2538, 2540, 2542, 2544, 2546, 2548, 2550, 2552, |
| | | | | 2554, 2556, 2558, 2560, 2562, 2564, 2566, 2568, 2570, 2572, 2574, |
| | | | | 2576, 2578, 2580, 2582, 2584, 2586, 2588, 2590, 2592, 2594, 2596, 2598, |
| | | | | 2600, 2602, 2604, 2606, 2608 |
| 7 | YBR002C_stress | Saccharomyces | 2614 | 3138, 3140, 3142, 3144, 3146, 3148, 3150 |
| | | cerevisiae | | |
| 8 | YBR010W_stress | Saccharomyces | 3158 | 3304, 3306, 3308, 3310, 3312, 3314, 3316, 3318, 3320, 3322, |
| | | cerevisiae | | 3324, 3326, 3328, 3330 |
| 9 | YBR090c_stress | Saccharomyces | 3335 | |
| | | cerevisiae | | |
| 10 | YBR109C_stress | Saccharomyces | 3342 | 3438, 3440, 3442, 3444, 3446, 3448, 3450, 3452, 3454, 3456, |
| | | cerevisiae | | 3458, 3460, 3462, 3464, 3466, 3468, 3470, 3472, 3474, 3476, |
| | | | | 3478, 3480, 3482, 3484, 3486, 3488, 3490, 3492, 3494, 3496, |
| | | | | 3498, 3500, 3502, 3504, 3506, 3508, 3510, 3512, 3514, 3516, |
| | | | | 3518, 3520, 3522, 3524, 3526, 3528, 3530, 3532, 3534, 3536, |
| | | | | 3538, 3540, 3542, 3544, 3546, 3548, 3550, 3552, 3554, 3556, |
| | | | | 3558, 3560, 3562, 3564, 3566 |
| 11 | YBR288C_stress | Saccharomyces | 3571 | |
| | | cerevisiae | | |
| 12 | YEL001C_stress | Saccharomyces | 3672 | |
| | | cerevisiae | | |
| 13 | YER062c_stress | Saccharomyces | 3695 | |
| | | cerevisiae | | |
| 14 | YER145C_stress | Saccharomyces | 3848 | |
| | | cerevisiae | | |
| 15 | YER146W_stress | Saccharomyces | 3953 | |
| | | cerevisiae | | |
| 16 | YGL151W_stress | Saccharomyces | 4104 | |
| | | cerevisiae | | |
| 17 | YGR046W_stress | Saccharomyces | 4125 | |
| | | cerevisiae | | |
| 18 | YGR060W_stress | Saccharomyces | 4196 | 4344, 4346, 4348, 4350, 4352, 4354, 4356, 4358, 4360, 4362, |
| | | cerevisiae | | 4364 |
| 19 | YGR141W_stress | Saccharomyces | 4369 | |
| | | cerevisiae | | |
| 20 | YIL002C_stress | Saccharomyces | 4404 | 4512 |
| | | cerevisiae | | |
| 21 | YIL031W_stress | Saccharomyces | 4517 | |
| | | cerevisiae | | |
| 22 | YIL076W_stress | Saccharomyces | 4536 | |
| | | cerevisiae | | |
| 23 | YIL077C_stress | Saccharomyces | 4587 | |
| | | cerevisiae | | |
| 24 | YIL121W_stress | Saccharomyces | 4600 | |
| | | cerevisiae | | |
| 25 | YIL156W_stress | Saccharomyces | 4701 | |
| | | cerevisiae | | |
| 26 | YJR044C_stress | Saccharomyces | 4732 | |
| | | cerevisiae | | |
| 27 | YKL057C_stress | Saccharomyces | 4849 | |
| | | cerevisiae | | |
| 28 | YKL150W_stress | Saccharomyces | 4872 | 5146, 5148, 5150, 5152, 5154, 5156, 5158, 5160, 5162 |
| | | cerevisiae | | |
| 29 | YGL151W_stress | Saccharomyces | 5167 | 5221, 5223, 5225, 5227, 5229, 5231, 5233 |
| | | cerevisiae | | |
| 30 | YLR062c_stress | Saccharomyces | 5240 | |
| | | cerevisiae | | |
| 31 | YLR142W_stress | Saccharomyces | 5247 | |
| | | cerevisiae | | |
| 32 | YLR173W_stress | Saccharomyces | 5408 | |
| | | cerevisiae | | |
| 33 | YLR274W_stress | Saccharomyces | 5419 | 5707, 5709 |
| | | cerevisiae | | |
| 34 | YLR394W_stress | Saccharomyces | 5714 | |
| | | cerevisiae | | |
| 35 | YNL108C_stress | Saccharomyces | 5725 | |
| | | cerevisiae | | |
| 36 | YNL141W_stress | Saccharomyces | 5822 | |
| | | cerevisiae | | |
| 37 | YNL282W_stress | Saccharomyces | 6049 | |
| | | cerevisiae | | |
| 38 | YNL283C_stress | Saccharomyces | 6062 | |
| | | cerevisiae | | |
| 39 | YNL286W_stress | Saccharomyces | 6113 | |
| | | cerevisiae | | |
| 40 | YOL056W_stress | Saccharomyces | 6212 | 6598 |
| | | cerevisiae | | |
| 41 | YOR154W_stress | Saccharomyces | 6603 | |
| | | cerevisiae | | |
| 42 | YOR266W_stress | Saccharomyces | 6662 | |
| | | cerevisiae | | |
| 43 | YOR298C- | Saccharomyces | 6675 | |
| | A_stress | cerevisiae | | |
| 44 | YPL030W_stress | Saccharomyces | 6782 | |
| | | cerevisiae | | |
| 45 | YPL103C_stress | Saccharomyces | 6849 | |
| | | cerevisiae | | |
| 46 | YPL211W_stress | Saccharomyces | 7058 | 7168, 7170, 7172, 7174, 7176 |
| | | cerevisiae | | |
| 47 | YLR210W_stress | Saccharomyces | 7181 | 7499; 7501; 7503; 7505 7507; 7509; 7511; 7513; 7515; 7517; |
| | | cerevisiae | | 7519 |
| 48 | YNL231C_stress | Saccharomyces | 7524 | 7680; 7682; 7684; 7686; 7688; 7690 |
| | | cerevisiaei | | |
| 49 | YNR029C_stress | Saccharomyces | 7695 | 8289; 8291; 8293 |
| | | cerevisiae | | |

TABLE IIA
Amino acid sequence ID numbers

| | | | 4. | |
|---|---|---|---|---|
| | 2. | | Lead | |
| 1. | Gene/ORF | 3. | AA | 5. |
| Hit no. | Locus Name | Organism | SEQ ID | Homologs AA SEQ IDs |
| 1 | b0019_stress | Escherichia coli | 2 | 4, 6, 8, 10, 12, 14, 16, 18, 20, 22, 24, 26, 28, 30, 32, 34, 36, 38, 40, 42, |
| | | | | 44, 46, 48, 50, 52, 54, 56, 58, 60, 62, 64, 66, 68, 70, 72, 74, 76, 78, 80, |
| | | | | 82, 84, 86, 88, 90, 92, 94, 96, 98, 100, 102, 104, 106, 108, 110, 112, 114, |
| | | | | 116, 118, 120, 122, 124, 126, 128, 130, 132, 134, 136, 138, 140, 142, |
| | | | | 144, 146, 148, 150, 152, 154, 156, 158, 160, 162, 164, 166, 168, 170, |
| | | | | 172, 174, 176, 178, 180, 182, 184, 186, 188, 190, 192, 194, 196, 198, |
| | | | | 200, 202, 204, 206, 208, 210, 212, 214, 216, 218, 220, 222, 224, 226, |
| | | | | 228, 230, 232, 234, 236, 238, 240, 242, 244, 246, 248, 250, 252, 254, |
| | | | | 256, 258, 260, 262, 264, 266, 268, 270, 272 |
| 2 | b0730_stress | Escherichia coli | 277 | 279, 281, 283, 285, 287, 289, 291, 293, 295, 297, 299, 301, 303, 305, |
| | | K12 | | 307, 309, 311, 313, 315, 317, 319, 321, 323, 325, 327, 329, 331, 333, |
| | | | | 335, 337, 339, 341, 343, 345, 347, 349, 351, 353, 355, 357, 359, 361, |
| | | | | 363, 365, 367, 369, 371, 373, 375, 377, 379, 381, 383, 385, 387, 389, |
| | | | | 391, 393, 395, 397, 399, 401, 403, 405, 407, 409, 411, 413, 415, 417, |
| | | | | 419, 421, 423, 425, 427, 429, 431, 433, 435, 437, 439, 441, 443, 445, |
| | | | | 447, 449, 451, 453, 455, 457, 459, 461, 463, 465, 467, 469, 471, 473, |
| | | | | 475, 477, 479, 481, 483, 485, 487, 489, 491, 493, 495, 497, 499, 501, |
| | | | | 503, 505, 507, 509, 511, 513, 515, 517, 519, 521, 523, 525, 527, 529, |
| | | | | 531, 533, 535, 537, 539, 541, 543, 545, 547, 549, 551, 553, 555, 557, |
| | | | | 559, 561, 563, 565, 567, 569, 571, 573, 575, 577, 579, 581, 583, 585, |
| | | | | 587, 589, 591, 593, 595, 597, 599, 601, 603, 605, 607, 609, 611, 613, |
| | | | | 615, 617, 619, 621, 623, 625, 627, 629, 631, 633, 635, 637, 639, 641, |
| | | | | 643, 645, 647, 649, 651, 653, 655, 657, 659, 661, 663, 665, 667, 669, |
| | | | | 671, 673, 675, 677, 679, 681, 683, 685, 687, 689, 691, 693, 695 |
| 3 | b1528_stress | Escherichia coli | 700 | 702, 704, 706, 708, 710, 712, 714, 716, 718, 720, 722, 724, 726, 728, |
| | | K12 | | 730, 732, 734, 736, 738, 740, 742, 744, 746, 748, 750, 752, 754, 756, |
| | | | | 758, 760, 762, 764, 766, 768, 770, 772, 774, 776, 778, 780, 782, 784, |
| | | | | 786, 788, 790, 792, 794, 796, 798, 800, 802, 804, 806, 808, 810, 812, |
| | | | | 814, 816, 818, 820, 822, 824, 826, 828, 830, 832, 834, 836, 838, 840, |
| | | | | 842, 844, 846, 848, 850, 852, 854, 856, 858, 860, 862, 864, 866, 868, |
| | | | | 870, 872, 874, 876, 878, 880, 882, 884, 886, 888, 890, 892, 894, 896, |
| | | | | 898, 900, 902, 904, 906, 908, 910, 912, 914, 916, 918, 920, 922, 924, |
| | | | | 926, 928, 930, 932, 934, 936, 938, 940, 942, 944, 946, 948, 950, 952, |
| | | | | 954, 956, 958, 960, 962, 964, 966, 968, 970, 972, 974, 976, 978, 980, |
| | | | | 982, 984, 986, 988, 990, 992, 994, 996, 998, 1000, 1002, 1004, 1006, |
| | | | | 1008, 1010, 1012, 1014, 1016, 1018, 1020, 1022, 1024, 1026, 1028, |
| | | | | 1030, 1032, 1034, 1036, 1038, 1040, 1042, 1044, 1046, 1048, 1050, |
| | | | | 1052, 1054, 1056, 1058, 1060, 1062, 1064, 1066, 1068, 1070, 1072, |
| | | | | 1074, 1076, 1078, 1080, 1082, 1084, 1086, 1088, 1090, 1092, 1094, |
| | | | | 1096, 1098, 1100, 1102, 1104, 1106, 1108, 1110, 1112, 1114, 1116, |
| | | | | 1118, 1120, 1122, 1124, 1126, 1128, 1130, 1132, 1134, 1136, 1138, |
| | | | | 1140, 1142, 1144, 1146, 1148, 1150, 1152, 1154, 1156, 1158, 1160, |
| | | | | 1162, 1164, 1166, 1168, 1170, 1172, 1174, 1176, 1178, 1180, 1182, |
| | | | | 1184, 1186, 1188, 1190, 1192, 1194, 1196, 1198, 1200, 1202, 1204, |
| | | | | 1206, 1208, 1210, 1212, 1214, 1216, 1218, 1220, 1222 |
| 4 | b1829_stress | Escherichia coli | 1227 | 1229, 1231, 1233, 1235, 1237, 1239, 1241, 1243, 1245, 1247, 1249, |
| | | K12 | | 1251, 1253, 1255, 1257, 1259, 1261, 1263, 1265, 1267, 1269, 1271, |
| | | | | 1273, 1275, 1277, 1279, 1281, 1283, 1285, 1287, 1289, 1291, 1293, |
| | | | | 1295, 1297, 1299, 1301, 1303, 1305, 1307, 1309, 1311, 1313, 1315, |
| | | | | 1317, 1319, 1321, 1323, 1325, 1327, 1329, 1331, 1333, 1335, 1337, |
| | | | | 1339, 1341, 1343, 1345, 1347, 1349, 1351, 1353, 1355, 1357, 1359, |
| | | | | 1361, 1363, 1365, 1367, 1369, 1371, 1373, 1375, 1377, 1379, 1381, |
| | | | | 1383, 1385, 1387, 1389, 1391, 1393, 1395, 1397, 1399, 1401, 1403, |
| | | | | 1405, 1407, 1409, 1411, 1413, 1415, 1417, 1419, 1421, 1423, 1425, |
| | | | | 1427, 1429, 1431, 1433, 1435, 1437, 1439, 1441, 1443, 1445, 1447, |
| | | | | 1449, 1451, 1453, 1455, 1457, 1459, 1461, 1463, 1465, 1467, 1469, |
| | | | | 1471, 1473, 1475, 1477, 1479, 1481, 1483, 1485, 1487, 1489, 1491, |
| | | | | 1493, 1495, 1497, 1499, 1501, 1503, 1505, 1507, 1509, 1511, 1513, |
| | | | | 1515, 1517, 1519, 1521, 1523, 1525, 1527, 1529, 1531, 1533, 1535, |
| | | | | 1537, 1539, 1541, 1543, 1545, 1547, 1549, 1551, 1553, 1555, 1557, |
| | | | | 1559, 1561, 1563, 1565, 1567, 1569, 1571, 1573, 1575, 1577, 1579, |
| | | | | 1581, 1583, 1585, 1587, 1589, 1591, 1593, 1595, 1597, 1599, 1601, |
| | | | | 1603, 1605, 1607, 1609, 1611, 1613, 1615, 1617, 1619, 1621 |
| 5 | b3164_stress | Escherichia coli | 1626 | 1628, 1630, 1632, 1634, 1636, 1638, 1640, 1642, 1644, 1646, 1648, |
| | | | | 1650, 1652, 1654, 1656, 1658, 1660, 1662, 1664, 1666, 1668, 1670, |
| | | | | 1672, 1674, 1676, 1678, 1680, 1682, 1684, 1686, 1688, 1690, 1692, |
| | | | | 1694, 1696, 1698, 1700, 1702, 1704, 1706, 1708, 1710, 1712, 1714, |
| | | | | 1716, 1718, 1720, 1722, 1724, 1726, 1728, 1730, 1732, 1734, 1736, |
| | | | | 1738, 1740, 1742, 1744, 1746, 1748, 1750, 1752, 1754, 1756, 1758, |
| | | | | 1760, 1762, 1764, 1766, 1768, 1770, 1772, 1774, 1776, 1778, 1780, |
| | | | | 1782, 1784, 1786, 1788, 1790, 1792, 1794, 1796, 1798, 1800, 1802, |
| | | | | 1804, 1806, 1808, 1810, 1812, 1814, 1816, 1818, 1820, 1822, 1824, |
| | | | | 1826, 1828, 1830, 1832, 1834, 1836, 1838, 1840, 1842, 1844, 1846, |
| | | | | 1848, 1850, 1852, 1854, 1856, 1858, 1860, 1862, 1864, 1866, 1868, |
| | | | | 1870, 1872, 1874, 1876, 1878, 1880, 1882, 1884, 1886, 1888, 1890, |
| | | | | 1892, 1894, 1896, 1898, 1900, 1902, 1904, 1906, 1908, 1910, 1912, |
| | | | | 1914, 1916, 1918, 1920, 1922, 1924, 1926, 1928, 1930, 1932, 1934, |
| | | | | 1936, 1938, 1940, 1942, 1944, 1946, 1948, 1950, 1952, 1954, 1956, |
| | | | | 1958, 1960, 1962, 1964, 1966, 1968, 1970, 1972, 1974, 1976, 1978, |
| | | | | 1980, 1982, 1984, 1986, 1988, 1990, 1992, 1994, 1996, 1998, 2000, |
| | | | | 2002, 2004, 2006, 2008, 2010, 2012, 2014, 2016, 2018, 2020, 2022, |
| | | | | 2024, 2026, 2028, 2030, 2032, 2034, 2036, 2038 |
| 6 | YBL002W_stress | Saccharomyces | 2043 | 2045, 2047, 2049, 2051, 2053, 2055, 2057, 2059, 2061, 2063, 2065, |
| | | cerevisiae | | 2067, 2069, 2071, 2073, 2075, 2077, 2079, 2081, 2083, 2085, 2087, |
| | | | | 2089, 2091, 2093, 2095, 2097, 2099, 2101, 2103, 2105, 2107, 2109, |
| | | | | 2111, 2113, 2115, 2117, 2119, 2121, 2123, 2125, 2127, 2129, 2131, |
| | | | | 2133, 2135, 2137, 2139, 2141, 2143, 2145, 2147, 2149, 2151, 2153, |
| | | | | 2155, 2157, 2159, 2161, 2163, 2165, 2167, 2169, 2171, 2173, 2175, |
| | | | | 2177, 2179, 2181, 2183, 2185, 2187, 2189, 2191, 2193, 2195, 2197, |
| | | | | 2199, 2201, 2203, 2205, 2207, 2209, 2211, 2213, 2215, 2217, 2219, |
| | | | | 2221, 2223, 2225, 2227, 2229, 2231, 2233, 2235, 2237, 2239, 2241, |
| | | | | 2243, 2245, 2247, 2249, 2251, 2253, 2255, 2257, 2259, 2261, 2263, |
| | | | | 2265, 2267, 2269, 2271, 2273, 2275, 2277, 2279, 2281, 2283, 2285 |
| 7 | YBR002C_stress | Saccharomyces | 2615 | 2617, 2619, 2621, 2623, 2625, 2627, 2629, 2631, 2633, 2635, 2637, |
| | | cerevisiae | | 2639, 2641, 2643, 2645, 2647, 2649, 2651, 2653, 2655, 2657, 2659, |
| | | | | 2661, 2663, 2665, 2667, 2669, 2671, 2673, 2675, 2677, 2679, 2681, |
| | | | | 2683, 2685, 2687, 2689, 2691, 2693, 2695, 2697, 2699, 2701, 2703, |
| | | | | 2705, 2707, 2709, 2711, 2713, 2715, 2717, 2719, 2721, 2723, 2725, |
| | | | | 2727, 2729, 2731, 2733, 2735, 2737, 2739, 2741, 2743, 2745, 2747, |
| | | | | 2749, 2751, 2753, 2755, 2757, 2759, 2761, 2763, 2765, 2767, 2769, |
| | | | | 2771, 2773, 2775, 2777, 2779, 2781, 2783, 2785, 2787, 2789, 2791, |
| | | | | 2793, 2795, 2797, 2799, 2801, 2803, 2805, 2807, 2809, 2811, 2813, |
| | | | | 2815, 2817, 2819, 2821, 2823, 2825, 2827, 2829, 2831, 2833, 2835, |
| | | | | 2837, 2839, 2841, 2843, 2845, 2847, 2849, 2851, 2853, 2855, 2857, |
| | | | | 2859, 2861, 2863, 2865, 2867, 2869, 2871, 2873, 2875, 2877, 2879, |
| | | | | 2881, 2883, 2885, 2887, 2889, 2891, 2893, 2895, 2897, 2899, 2901, |
| | | | | 2903, 2905, 2907, 2909, 2911, 2913, 2915, 2917, 2919, 2921, 2923, |
| | | | | 2925, 2927, 2929, 2931, 2933, 2935, 2937, 2939, 2941, 2943, 2945, |
| | | | | 2947, 2949, 2951, 2953, 2955, 2957, 2959, 2961, 2963, 2965, 2967, |
| | | | | 2969, 2971, 2973, 2975, 2977, 2979, 2981, 2983, 2985, 2987, 2989, |
| | | | | 2991, 2993, 2995, 2997, 2999, 3001, 3003, 3005, 3007, 3009, 3011, |
| | | | | 3013, 3015, 3017, 3019, 3021, 3023, 3025, 3027, 3029, 3031, 3033, |
| | | | | 3035, 3037, 3039, 3041, 3043, 3045, 3047, 3049, 3051, 3053, 3055, |
| | | | | 3057, 3059, 3061, 3063, 3065, 3067, 3069, 3071, 3073, 3075, 3077, |
| | | | | 3079, 3081, 3083, 3085, 3087, 3089, 3091, 3093, 3095, 3097, 3099, |
| | | | | 3101, 3103, 3105, 3107, 3109, 3111, 3113, 3115, 3117, 3119, 3121, |
| | | | | 3123, 3125, 3127, 3129, 3131, 3133, 3135, 3137 |
| 8 | YBR010W_stress | Saccharomyces | 3159 | 3161, 3163, 3165, 3167, 3169, 3171, 3173, 3175, 3177, 3179, 3181, |
| | | cerevisiae | | 3183, 3185, 3187, 3189, 3191, 3193, 3195, 3197, 3199, 3201, 3203, |
| | | | | 3205, 3207, 3209, 3211, 3213, 3215, 3217, 3219, 3221, 3223, 3225, |
| | | | | 3227, 3229, 3231, 3233, 3235, 3237, 3239, 3241, 3243, 3245, 3247, |
| | | | | 3249, 3251, 3253, 3255, 3257, 3259, 3261, 3263, 3265, 3267, 3269, |
| | | | | 3271, 3273, 3275, 3277, 3279, 3281, 3283, 3285, 3287, 3289, 3291, |
| | | | | 3293, 3295, 3297, 3299, 3301, 3303 |
| 9 | YBR090c_stress | Saccharomyces | 3336 | 3338 |
| | | cerevisiae | | |
| 10 | YBR109C_stress | Saccharomyces | 3343 | 3345, 3347, 3349, 3351, 3353, 3355, 3357, 3359, 3361, 3363, 3365, |
| | | cerevisiae | | 3367, 3369, 3371, 3373, 3375, 3377, 3379, 3381, 3383, 3385, 3387, |
| | | | | 3389, 3391, 3393, 3395, 3397, 3399, 3401, 3403, 3405, 3407, 3409, |
| | | | | 3411, 3413, 3415, 3417, 3419, 3421, 3423, 3425, 3427, 3429, 3431, |
| | | | | 3433, 3435, 3437 |
| 11 | YBR288C_stress | Saccharomyces | 3572 | 3574, 3576, 3578, 3580, 3582, 3584, 3586, 3588, 3590, 3592, 3594, |
| | | cerevisiae | | 3596, 3598, 3600, 3602, 3604, 3606, 3608, 3610, 3612, 3614, 3616, |
| | | | | 3618, 3620, 3622, 3624, 3626, 3628, 3630, 3632, 3634, 3636, 3638, |
| | | | | 3640, 3642, 3644, 3646, 3648, 3650, 3652, 3654, 3656, 3658, 3660, |
| | | | | 3662, 3664, 3666, 3668 |
| 12 | YEL001C_stress | Saccharomyces | 3673 | 3675, 3677, 3679, 3681, 3683, 3685, 3687, 3689, 3691 |
| | | cerevisiae | | |
| 13 | YER062c_stress | Saccharomyces | 3696 | 3698, 3700, 3702, 3704, 3706, 3708, 3710, 3712, 3714, 3716, 3718, |
| | | cerevisiae | | 3720, 3722, 3724, 3726, 3728, 3730, 3732, 3734, 3736, 3738, 3740, |
| | | | | 3742, 3744, 3746, 3748, 3750, 3752, 3754, 3756, 3758, 3760, 3762, |
| | | | | 3764, 3766, 3768, 3770, 3772, 3774, 3776, 3778, 3780, 3782, 3784, |
| | | | | 3786, 3788, 3790, 3792, 3794, 3796, 3798, 3800, 3802, 3804, 3806, |
| | | | | 3808, 3810, 3812, 3814, 3816, 3818, 3820, 3822, 3824, 3826, 3828, |
| | | | | 3830, 3832, 3834, 3836, 3838, 3840, 3842, 3844 |
| 14 | YER145C_stress | Saccharomyces | 3849 | 3851, 3853, 3855, 3857, 3859, 3861, 3863, 3865, 3867, 3869, 3871, |
| | | cerevisiae | | 3873, 3875, 3877, 3879, 3881, 3883, 3885, 3887, 3889, 3891, 3893, |
| | | | | 3895, 3897, 3899, 3901, 3903, 3905, 3907, 3909, 3911, 3913, 3915, |
| | | | | 3917, 3919, 3921, 3923, 3925, 3927, 3929, 3931, 3933, 3935, 3937, |
| | | | | 3939, 3941, 3943, 3945, 3947, 3949 |
| 15 | YER146W_stress | Saccharomyces | 3954 | 3956, 3958, 3960, 3962, 3964, 3966, 3968, 3970, 3972, 3974, 3976, |
| | | cerevisiae | | 3978, 3980, 3982, 3984, 3986, 3988, 3990, 3992, 3994, 3996, 3998, |
| | | | | 4000, 4002, 4004, 4006, 4008, 4010, 4012, 4014, 4016, 4018, 4020, |
| | | | | 4022, 4024, 4026, 4028, 4030, 4032, 4034, 4036, 4038, 4040, 4042, |
| | | | | 4044, 4046, 4048, 4050, 4052, 4054, 4056, 4058, 4060, 4062, 4064, |
| | | | | 4066, 4068, 4070, 4072, 4074, 4076, 4078, 4080, 4082, 4084, 4086, |
| | | | | 4088, 4090, 4092, 4094, 4096, 4098, 4100 |
| 16 | YGL151W_stress | Saccharomyces | 4105 | 4107, 4109, 4111, 4113, 4115, 4117, 4119, 4121 |
| | | cerevisiae | | |
| 17 | YGR046W_stress | Saccharomyces | 4126 | 4128, 4130, 4132, 4134, 4136, 4138, 4140, 4142, 4144, 4146, 4148, |
| | | cerevisiae | | 4150, 4152, 4154, 4156, 4158, 4160, 4162, 4164, 4166, 4168, 4170, |
| | | | | 4172, 4174, 4176, 4178, 4180, 4182, 4184, 4186, 4188, 4190, 4192 |
| 18 | YGR060W_stress | Saccharomyces | 4197 | 4199, 4201, 4203, 4205, 4207, 4209, 4211, 4213, 4215, 4217, 4219, |
| | | cerevisiae | | 4221, 4223, 4225, 4227, 4229, 4231, 4233, 4235, 4237, 4239, 4241, |
| | | | | 4243, 4245, 4247, 4249, 4251, 4253, 4255, 4257, 4259, 4261, 4263, |
| | | | | 4265, 4267, 4269, 4271, 4273, 4275, 4277, 4279, 4281, 4283, 4285, |
| | | | | 4287, 4289, 4291, 4293, 4295, 4297, 4299, 4301, 4303, 4305, 4307, |
| | | | | 4309, 4311, 4313, 4315, 4317, 4319, 4321, 4323, 4325, 4327, 4329, |
| | | | | 4331, 4333, 4335, 4337, 4339, 4341, 4343 |
| 19 | YGR141W_stress | Saccharomyces | 4370 | 4372, 4374, 4376, 4378, 4380, 4382, 4384, 4386, 4388, 4390, 4392, |
| | | cerevisiae | | 4394, 4396, 4398, 4400 |
| 20 | YIL002C_stress | Saccharomyces | 4405 | 4407, 4409, 4411, 4413, 4415, 4417, 4419, 4421, 4423, 4425, 4427, |
| | | cerevisiae | | 4429, 4431, 4433, 4435, 4437, 4439, 4441, 4443, 4445, 4447, 4449, |
| | | | | 4451, 4453, 4455, 4457, 4459, 4461, 4463, 4465, 4467, 4469, 4471, |
| | | | | 4473, 4475, 4477, 4479, 4481, 4483, 4485, 4487, 4489, 4491, 4493, |
| | | | | 4495, 4497, 4499, 4501, 4503, 4505, 4507, 4509, 4511 |
| 21 | YIL031W_stress | Saccharomyces | 4518 | 4520, 4522, 4524, 4526, 4528, 4530, 4532 |
| | | cerevisiae | | |
| 22 | YIL076W_stress | Saccharomyces | 4537 | 4539, 4541, 4543, 4545, 4547, 4549, 4551, 4553, 4555, 4557, 4559, |
| | | cerevisiae | | 4561, 4563, 4565, 4567, 4569, 4571, 4573, 4575, 4577, 4579, 4581, |
| | | | | 4583 |
| 23 | YIL077C_stress | Saccharomyces | 4588 | 4590, 4592, 4594, 4596 |
| | | cerevisiae | | |
| 24 | YIL121W_stress | Saccharomyces | 4601 | 4603, 4605, 4607, 4609, 4611, 4613, 4615, 4617, 4619, 4621, 4623, |
| | | cerevisiae | | 4625, 4627, 4629, 4631, 4633, 4635, 4637, 4639, 4641, 4643, 4645, |
| | | | | 4647, 4649, 4651, 4653, 4655, 4657, 4659, 4661, 4663, 4665, 4667, |
| | | | | 4669, 4671, 4673, 4675, 4677, 4679, 4681, 4683, 4685, 4687, 4689, |
| | | | | 4691, 4693, 4695, 4697 |
| 25 | YIL156W_stress | Saccharomyces | 4702 | 4704, 4706, 4708, 4710, 4712, 4714, 4716, 4718, 4720, 4722, 4724, |
| | | cerevisiae | | 4726, 4728 |
| 26 | YJR044C_stress | Saccharomyces | 4733 | 4735, 4737, 4739, 4741, 4743, 4745, 4747, 4749, 4751, 4753, 4755, |
| | | cerevisiae | | 4757, 4759, 4761, 4763, 4765, 4767, 4769, 4771, 4773, 4775, 4777, |
| | | | | 4779, 4781, 4783, 4785, 4787, 4789, 4791, 4793, 4795, 4797, 4799, |
| | | | | 4801, 4803, 4805, 4807, 4809, 4811, 4813, 4815, 4817, 4819, 4821, |
| | | | | 4823, 4825, 4827, 4829, 4831, 4833, 4835, 4837, 4839, 4841, 4843, |
| | | | | 4845 |
| 27 | YKL057C_stress | Saccharomyces | 4850 | 4852, 4854, 4856, 4858, 4860, 4862, 4864, 4866, 4868 |
| | | cerevisiae | | |
| 28 | YKL150W_stress | Saccharomyces | 4873 | 4875, 4877, 4879, 4881, 4883, 4885, 4887, 4889, 4891, 4893, 4895, |
| | | cerevisiae | | 4897, 4899, 4901, 4903, 4905, 4907, 4909, 4911, 4913, 4915, 4917, |
| | | | | 4919, 4921, 4923, 4925, 4927, 4929, 4931, 4933, 4935, 4937, 4939, |
| | | | | 4941, 4943, 4945, 4947, 4949, 4951, 4953, 4955, 4957, 4959, 4961, |
| | | | | 4963, 4965, 4967, 4969, 4971, 4973, 4975, 4977, 4979, 4981, 4983, |
| | | | | 4985, 4987, 4989, 4991, 4993, 4995, 4997, 4999, 5001, 5003, 5005, |
| | | | | 5007, 5009, 5011, 5013, 5015, 5017, 5019, 5021, 5023, 5025, 5027, |
| | | | | 5029, 5031, 5033, 5035, 5037, 5039, 5041, 5043, 5045, 5047, 5049, |
| | | | | 5051, 5053, 5055, 5057, 5059, 5061, 5063, 5065, 5067, 5069, 5071, |
| | | | | 5073, 5075, 5077, 5079, 5081, 5083, 5085, 5087, 5089, 5091, 5093, |
| | | | | 5095, 5097, 5099, 5101, 5103, 5105, 5107, 5109, 5111, 5113, 5115, |
| | | | | 5117, 5119, 5121, 5123, 5125, 5127, 5129, 5131, 5133, 5135, 5137, |
| | | | | 5139, 5141, 5143, 5145 |
| 29 | YGL151W_stress | Saccharomyces | 5168 | 5170, 5172, 5174, 5176, 5178, 5180, 5182, 5184, 5186, 5188, 5190, |
| | | cerevisiae | | 5192, 5194, 5196, 5198, 5200, 5202, 5204, 5206, 5208, 5210, 5212, |
| | | | | 5214, 5216, 5218, 5220 |
| 30 | YLR062c_stress | Saccharomyces | 5241 | 5243 |
| | | cerevisiae | | |
| 31 | YLR142W_stress | Saccharomyces | 5248 | 5250, 5252, 5254, 5256, 5258, 5260, 5262, 5264, 5266, 5268, 5270, |
| | | cerevisiae | | 5272, 5274, 5276, 5278, 5280, 5282, 5284, 5286, 5288, 5290, 5292, |
| | | | | 5294, 5296, 5298, 5300, 5302, 5304, 5306, 5308, 5310, 5312, 5314, |
| | | | | 5316, 5318, 5320, 5322, 5324, 5326, 5328, 5330, 5332, 5334, 5336, |
| | | | | 5338, 5340, 5342, 5344, 5346, 5348, 5350, 5352, 5354, 5356, 5358, |
| | | | | 5360, 5362, 5364, 5366, 5368, 5370, 5372, 5374, 5376, 5378, 5380, |
| | | | | 5382, 5384, 5386, 5388, 5390, 5392, 5394, 5396, 5398, 5400, 5402, |
| | | | | 5404 |
| 32 | YLR173W_stress | Saccharomyces | 5409 | 5411, 5413, 5415 |
| | | cerevisiae | | |
| 33 | YLR274W_stress | Saccharomyces | 5420 | 5422, 5424, 5426, 5428, 5430, 5432, 5434, 5436, 5438, 5440, 5442, |
| | | cerevisiae | | 5444, 5446, 5448, 5450, 5452, 5454, 5456, 5458, 5460, 5462, 5464, |
| | | | | 5466, 5468, 5470, 5472, 5474, 5476, 5478, 5480, 5482, 5484, 5486, |
| | | | | 5488, 5490, 5492, 5494, 5496, 5498, 5500, 5502, 5504, 5506, 5508, |
| | | | | 5510, 5512, 5514, 5516, 5518, 5520, 5522, 5524, 5526, 5528, 5530, |
| | | | | 5532, 5534, 5536, 5538, 5540, 5542, 5544, 5546, 5548, 5550, 5552, |
| | | | | 5554, 5556, 5558, 5560, 5562, 5564, 5566, 5568, 5570, 5572, 5574, |
| | | | | 5576, 5578, 5580, 5582, 5584, 5586, 5588, 5590, 5592, 5594, 5596, |
| | | | | 5598, 5600, 5602, 5604, 5606, 5608, 5610, 5612, 5614, 5616, 5618, |
| | | | | 5620, 5622, 5624, 5626, 5628, 5630, 5632, 5634, 5636, 5638, 5640, |
| | | | | 5642, 5644, 5646, 5648, 5650, 5652, 5654, 5656, 5658, 5660, 5662, |
| | | | | 5664, 5666, 5668, 5670, 5672, 5674, 5676, 5678, 5680, 5682, 5684, |
| | | | | 5686, 5688, 5690, 5692, 5694, 5696, 5698, 5700, 5702, 5704, 5706 |
| 34 | YLR394W_stress | Saccharomyces | 5715 | 5717, 5719, 5721 |
| | | cerevisiae | | |
| 35 | YNL108C_stress | Saccharomyces | 5726 | 5728, 5730, 5732, 5734, 5736, 5738, 5740, 5742, 5744, 5746, 5748, |
| | | cerevisiae | | 5750, 5752, 5754, 5756, 5758, 5760, 5762, 5764, 5766, 5768, 5770, |
| | | | | 5772, 5774, 5776, 5778, 5780, 5782, 5784, 5786, 5788, 5790, 5792, |
| | | | | 5794, 5796, 5798, 5800, 5802, 5804, 5806, 5808, 5810, 5812, 5814, |
| | | | | 5816, 5818 |
| 36 | YNL141W_stress | Saccharomyces | 5823 | 5825, 5827, 5829, 5831, 5833, 5835, 5837, 5839, 5841, 5843, 5845, |
| | | cerevisiae | | 5847, 5849, 5851, 5853, 5855, 5857, 5859, 5861, 5863, 5865, 5867, |
| | | | | 5869, 5871, 5873, 5875, 5877, 5879, 5881, 5883, 5885, 5887, 5889, |
| | | | | 5891, 5893, 5895, 5897, 5899, 5901, 5903, 5905, 5907, 5909, 5911, |
| | | | | 5913, 5915, 5917, 5919, 5921, 5923, 5925, 5927, 5929, 5931, 5933, |
| | | | | 5935, 5937, 5939, 5941, 5943, 5945, 5947, 5949, 5951, 5953, 5955, |
| | | | | 5957, 5959, 5961, 5963, 5965, 5967, 5969, 5971, 5973, 5975, 5977, |
| | | | | 5979, 5981, 5983, 5985, 5987, 5989, 5991, 5993, 5995, 5997, 5999, |
| | | | | 6001, 6003, 6005, 6007, 6009, 6011, 6013, 6015, 6017, 6019, 6021, |
| | | | | 6023, 6025, 6027, 6029, 6031, 6033, 6035, 6037, 6039, 6041, 6043, |
| | | | | 6045 |
| 37 | YNL282W_stress | Saccharomyces | 6050 | 6052, 6054, 6056, 6058 |
| | | cerevisiae | | |
| 38 | YNL283C_stress | Saccharomyces | 6063 | 6065, 6067, 6069, 6071, 6073, 6075, 6077, 6079, 6081, 6083, 6085, |
| | | cerevisiae | | 6087, 6089, 6091, 6093, 6095, 6097, 6099, 6101, 6103, 6105, 6107, |
| | | | | 6109 |
| 39 | YNL286W_stress | Saccharomyces | 6114 | 6116, 6118, 6120, 6122, 6124, 6126, 6128, 6130, 6132, 6134, 6136, |
| | | cerevisiae | | 6138, 6140, 6142, 6144, 6146, 6148, 6150, 6152, 6154, 6156, 6158, |
| | | | | 6160, 6162, 6164, 6166, 6168, 6170, 6172, 6174, 6176, 6178, 6180, |
| | | | | 6182, 6184, 6186, 6188, 6190, 6192, 6194, 6196, 6198, 6200, 6202, |
| | | | | 6204, 6206, 6208 |
| 40 | YOL056W_stress | Saccharomyces | 6213 | 6215, 6217, 6219, 6221, 6223, 6225, 6227, 6229, 6231, 6233, 6235, |
| | | cerevisiae | | 6237, 6239, 6241, 6243, 6245, 6247, 6249, 6251, 6253, 6255, 6257, |
| | | | | 6259, 6261, 6263, 6265, 6267, 6269, 6271, 6273, 6275, 6277, 6279, |
| | | | | 6281, 6283, 6285, 6287, 6289, 6291, 6293, 6295, 6297, 6299, 6301, |
| | | | | 6303, 6305, 6307, 6309, 6311, 6313, 6315, 6317, 6319, 6321, 6323, |
| | | | | 6325, 6327, 6329, 6331, 6333, 6335, 6337, 6339, 6341, 6343, 6345, |
| | | | | 6347, 6349, 6351, 6353, 6355, 6357, 6359, 6361, 6363, 6365, 6367, |
| | | | | 6369, 6371, 6373, 6375, 6377, 6379, 6381, 6383, 6385, 6387, 6389, |
| | | | | 6391, 6393, 6395, 6397, 6399, 6401, 6403, 6405, 6407, 6409, 6411, |
| | | | | 6413, 6415, 6417, 6419, 6421, 6423, 6425, 6427, 6429, 6431, 6433, |
| | | | | 6435, 6437, 6439, 6441, 6443, 6445, 6447, 6449, 6451, 6453, 6455, |
| | | | | 6457, 6459, 6461, 6463, 6465, 6467, 6469, 6471, 6473, 6475, 6477, |
| | | | | 6479, 6481, 6483, 6485, 6487, 6489, 6491, 6493, 6495, 6497, 6499, |
| | | | | 6501, 6503, 6505, 6507, 6509, 6511, 6513, 6515, 6517, 6519, 6521, |
| | | | | 6523, 6525, 6527, 6529, 6531, 6533, 6535, 6537, 6539, 6541, 6543, |
| | | | | 6545, 6547, 6549, 6551, 6553, 6555, 6557, 6559, 6561, 6563, 6565, |
| | | | | 6567, 6569, 6571, 6573, 6575, 6577, 6579, 6581, 6583, 6585, 6587, |
| | | | | 6589, 6591, 6593, 6595, 6597 |
| 41 | YOR154W_stress | Saccharomyces | 6604 | 6606, 6608, 6610, 6612, 6614, 6616, 6618, 6620, 6622, 6624, 6626, |
| | | cerevisiae | | 6628, 6630, 6632, 6634, 6636, 6638, 6640, 6642, 6644, 6646, 6648, |
| | | | | 6650, 6652, 6654, 6656, 6658 |
| 42 | YOR266W_stress | Saccharomyces | 6663 | 6665, 6667, 6669, 6671 |
| | | cerevisiae | | |
| 43 | YOR298C- | Saccharomyces | 6676 | 6678, 6680, 6682, 6684, 6686, 6688, 6690, 6692, 6694, 6696, 6698, |
| | A_stress | cerevisiae | | 6700, 6702, 6704, 6706, 6708, 6710, 6712, 6714, 6716, 6718, 6720, |
| | | | | 6722, 6724, 6726, 6728, 6730, 6732, 6734, 6736, 6738, 6740, 6742, |
| | | | | 6744, 6746, 6748, 6750, 6752, 6754, 6756, 6758, 6760, 6762, 6764, |
| | | | | 6766, 6768, 6770, 6772, 6774, 6776, 6778 |
| 44 | YPL030W_stress | Saccharomyces | 6783 | 6785, 6787, 6789, 6791, 6793, 6795, 6797, 6799, 6801, 6803, 6805, |
| | | cerevisiae | | 6807, 6809, 6811, 6813, 6815, 6817, 6819, 6821, 6823, 6825, 6827, |
| | | | | 6829, 6831, 6833, 6835, 6837, 6839, 6841, 6843, 6845 |
| 45 | YPL103C_stress | Saccharomyces | 6850 | 6852, 6854, 6856, 6858, 6860, 6862, 6864, 6866, 6868, 6870, 6872, |
| | | cerevisiae | | 6874, 6876, 6878, 6880, 6882, 6884, 6886, 6888, 6890, 6892, 6894, |
| | | | | 6896, 6898, 6900, 6902, 6904, 6906, 6908, 6910, 6912, 6914, 6916, |
| | | | | 6918, 6920, 6922, 6924, 6926, 6928, 6930, 6932, 6934, 6936, 6938, |
| | | | | 6940, 6942, 6944, 6946, 6948, 6950, 6952, 6954, 6956, 6958, 6960, |
| | | | | 6962, 6964, 6966, 6968, 6970, 6972, 6974, 6976, 6978, 6980, 6982, |
| | | | | 6984, 6986, 6988, 6990, 6992, 6994, 6996, 6998, 7000, 7002, 7004, |
| | | | | 7006, 7008, 7010, 7012, 7014, 7016, 7018, 7020, 7022, 7024, 7026, |
| | | | | 7028, 7030, 7032, 7034, 7036, 7038, 7040, 7042, 7044, 7046, 7048, |
| | | | | 7050 |
| 46 | YPL211W_stress | Saccharomyces | 7059 | 7061, 7063, 7065, 7067, 7069, 7071, 7073, 7075, 7077, 7079, 7081, |
| | | cerevisiae | | 7083, 7085, 7087, 7089, 7091, 7093, 7095, 7097, 7099, 7101, 7103, |
| | | | | 7105, 7107, 7109, 7111, 7113, 7115, 7117, 7119, 7121, 7123, 7125, |
| | | | | 7127, 7129, 7131, 7133, 7135, 7137, 7139, 7141, 7143, 7145, 7147, |
| | | | | 7149, 7151, 7153, 7155, 7157, 7159, 7161, 7163, 7165, 7167 |
| 47 | YLR210W_stress | Saccharomyces | 7182 | 7184; 7186; 7188; 7190; 7192; 7194; 7196; 7198; 7200; 7202; 7204; |
| | | cerevisiae | | 7206; 7208; 7210; 7212; 7214; 7216; 7218; 7220; 7222; 7224; 7226; |
| | | | | 7228; 7230; 7232; 7234; 7236; 7238; 7240; 7242; 7244; 7246; 7248; |
| | | | | 7250; 7252; 7254; 7256; 7258; 7260; 7262; 7264; 7266; 7268; 7270; |
| | | | | 7272; 7274; 7276; 7278; 7280; 7282; 7284; 7286; 7288; 7290; 7292; |
| | | | | 7294; 7296; 7298; 7300; 7302; 7304; 7306; 7308; 7310; 7312; 7314; |
| | | | | 7316; 7318; 7320; 7322; 7324; 7326; 7328; 7330; 7332; 7334; 7336; |
| | | | | 7338; 7340; 7342; 7344; 7346; 7348; 7350; 7352; 7354; 7356; 7358; |
| | | | | 7360; 7362; 7364; 7366; 7368; 7370; 7372; 7374; 7376; 7378; 7380; |
| | | | | 7382; 7384; 7386; 7388; 7390; 7392; 7394; 7396; 7398; 7400; 7402; |
| | | | | 7404; 7406; 7408; 7410; 7412; 7414; 7416; 7418; 7420; 7422; 7424; |
| | | | | 7426; 7428; 7430; 7432; 7434; 7436; 7438; 7440; 7442; 7444; 7446; |
| | | | | 7448; 7450; 7452; 7454; 7456; 7458; 7460; 7462; 7464; 7466; 7468; |
| | | | | 7470; 7472; 7474; 7476; 7478; 7480; 7482; 7484; 7486; 7488; 7490; |
| | | | | 7492; 7494; 7496; 7498 |
| 48 | YNL231C_stress | Saccharomyces | 7525 | 7527; 7529; 7531; 7533; 7535; 7537; 7539; 7541; 7543; 7545; 7547; |
| | | cerevisiae | | 7549; 7551; 7553; 7555; 7557; 7559; 7561; 7563; 7565; 7567; 7569; |
| | | | | 7571; 7573; 7575; 7577; 7579; 7581; 7583; 7585; 7587; 7589; 7591; |
| | | | | 7593; 7595; 7597; 7599; 7601; 7603; 7605; 7607; 7609; 7611; 7613; |
| | | | | 7615; 7617; 7619; 7621; 7623; 7625; 7627; 7629; 7631; 7633; 7635; |
| | | | | 7637; 7639; 7641; 7643; 7645; 7647; 7649; 7651; 7653; 7655; 7657; |
| | | | | 7659; 7661; 7663; 7665; 7667; 7669; 7671; 7673; 7675; 7677; 7679 |
| 49 | YNR029C_stress | Saccharomyces | 7696 | 7698; 7700; 7702; 7704; 7706; 7708; 7710; 7712; 7714; 7716; 7718; |
| | | cerevisiae | | 7720; 7722; 7724; 7726; 7728; 7730; 7732; 7734; 7736; 7738; 7740; |
| | | | | 7742; 7744; 7746; 7748; 7750; 7752; 7754; 7756; 7758; 7760; 7762; |
| | | | | 7764; 7766; 7768; 7770; 7772; 7774; 7776; 7778; 7780; 7782; 7784; |
| | | | | 7786; 7788; 7790; 7792; 7794; 7796; 7798; 7800; 7802; 7804; 7806; |
| | | | | 7808; 7810; 7812; 7814; 7816; 7818; 7820; 7822; 7824; 7826; 7828; |
| | | | | 7830; 7832; 7834; 7836; 7838; 7840; 7842; 7844; 7846; 7848; 7850; |
| | | | | 7852; 7854; 7856; 7858; 7860; 7862; 7864; 7866; 7868; 7870; 7872; |
| | | | | 7874; 7876; 7878; 7880; 7882; 7884; 7886; 7888; 7890; 7892; 7894; |
| | | | | 7896; 7898; 7900; 7902; 7904; 7906; 7908; 7910; 7912; 7914; 7916; |
| | | | | 7918; 7920; 7922; 7924; 7926; 7928; 7930; 7932; 7934; 7936; 7938; |
| | | | | 7940; 7942; 7944; 7946; 7948; 7950; 7952; 7954; 7956; 7958; 7960; |
| | | | | 7962; 7964; 7966; 7968; 7970; 7972; 7974; 7976; 7978; 7980; 7982; |
| | | | | 7984; 7986; 7988; 7990; 7992; 7994; 7996; 7998; 8000; 8002; 8004; |
| | | | | 8006; 8008; 8010; 8012; 8014; 8016; 8018; 8020; 8022; 8024; 8026; |
| | | | | 8028; 8030; 8032; 8034; 8036; 8038; 8040; 8042; 8044; 8046; 8048; |
| | | | | 8050; 8052; 8054; 8056; 8058; 8060; 8062; 8064; 8066; 8068; 8070; |
| | | | | 8072; 8074; 8076; 8078; 8080; 8082; 8084; 8086; 8088; 8090; 8092; |
| | | | | 8094; 8096; 8098; 8100; 8102; 8104; 8106; 8108; 8110; 8112; 8114; |
| | | | | 8116; 8118; 8120; 8122; 8124; 8126; 8128; 8130; 8132; 8134; 8136; |
| | | | | 8138; 8140; 8142; 8142; 8146; 8148; 8150; 8152; 8154; 8156; 8158; |
| | | | | 8160; 8162; 8164; 8166; 8168; 8170; 8172; 8174; 8176; 8178; 8180; |
| | | | | 8182; 8184; 8186; 8188; 8190; 8192; 8194; 8196; 8198; 8200; 8202; |
| | | | | 8204; 8206; 8208; 8210; 8212; 8214; 8216; 8218; 8220; 8222; 8224; |
| | | | | 8226; 8228; 8230; 8232; 8234; 8236; 8238; 8240; 8242; 8244; 8246; |
| | | | | 8248; 8250; 8252; 8254; 8256; 8258; 8260; 8262; 8264; 8266; 8268; |
| | | | | 8270; 8272; 8274; 8276; 8278; 8280; 8282; 8284; 8286; 8288 |

TABLE IIB
Amino acid sequence ID numbers

| 1. | | | 4. | |
|---|---|---|---|---|
| Hit | 2. | 3. | Lead AA | 5. |
| no. | Gene/ORF Locus Name | Organism | SEQ ID | Homologs AA SEQ IDs |
| 1 | b0019_stress | Escherichia coli | 2 | |
| 2 | b0730_stress | Escherichia coli | 277 | |
| | | K12 | | |
| 3 | b1528_stress | Escherichia coli | 700 | |
| | | K12 | | |
| 4 | b1829_stress | Escherichia coli | 1227 | |
| | | K12 | | |
| 5 | b3164_stress | Escherichia coli | 1626 | |
| 6 | YBL002W_stress | Saccharomyces | 2043 | 2287, 2289, 2291, 2293, 2295, 2297, 2299, 2301, 2303, 2305, 2307, 2309, 2311, 2313, |
| | | cerevisiae | | 2315, 2317, 2319, 2321, 2323, 2325, 2327, 2329, 2331, 2333, 2335, 2337, 2339, |
| | | | | 2341, 2343, 2345, 2347, 2349, 2351, 2353, 2355, 2357, 2359, 2361, 2363, 2365, |
| | | | | 2367, 2369, 2371, 2373, 2375, 2377, 2379, 2381, 2383, 2385, 2387, 2389, 2391, |
| | | | | 2393, 2395, 2397, 2399, 2401, 2403, 2405, 2407, 2409, 2411, 2413, 2415, 2417, |
| | | | | 2419, 2421, 2423, 2425, 2427, 2429, 2431, 2433, 2435, 2437, 2439, 2441, 2443, 2445, |
| | | | | 2447, 2449, 2451, 2453, 2455, 2457, 2459, 2461, 2463, 2465, 2467, 2469, 2471, |
| | | | | 2473, 2475, 2477, 2479, 2481, 2483, 2485, 2487, 2489, 2491, 2493, |
| | | | | 2495, 2497, 2499, 2501, 2503, 2505, 2507, 2509, 2511, 2513, 2515, 2517, |
| | | | | 2519, 2521, 2523, 2525, 2527, 2529, 2531, 2533, 2535, 2537, 2539, 2541, |
| | | | | 2543, 2545, 2547, 2549, 2551, 2553, 2555, 2557, 2559, 2561, 2563, 2565, |
| | | | | 2567, 2569, 2571, 2573, 2575, 2577, 2579, 2581, 2583, 2585, 2587, 2589, |
| | | | | 2591, 2593, 2595, 2597, 2599, 2601, 2603, 2605, 2607 |
| 7 | YBR002C_stress | Saccharomyces | 2615 | 3139, 3141, 3143, 3145, 3147, 3149, 3151 |
| | | cerevisiae | | |
| 8 | YBR010W_stress | Saccharomyces | 3159 | 3305, 3307, 3309, 3311, 3313, 3315, 3317, 3319, 3321, 3323, 3325, 3327, 3329, 3331 |
| | | cerevisiae | | |
| 9 | YBR090c_stress | Saccharomyces | 3336 | |
| | | cerevisiae | | |
| 10 | YBR109C_stress | Saccharomyces | 3343 | 3439, 3441, 3443, 3445, 3447, 3449, 3451, 3453, 3455, 3457, 3459, 3461, 3463, 3465, |
| | | cerevisiae | | 3467, 3469, 3471, 3473, 3475, 3477, 3479, 3481, 3483, 3485, 3487, 3489, 3491, |
| | | | | 3493, 3495, 3497, 3499, 3501, 3503, 3505, 3507, 3509, 3511, 3513, 3515, 3517, |
| | | | | 3519, 3521, 3523, 3525, 3527, 3529, 3531, 3533, 3535, 3537, 3539, 3541, 3543, |
| | | | | 3545, 3547, 3549, 3551, 3553, 3555, 3557, 3559, 3561, 3563, 3565, 3567 |
| 11 | YBR288C_stress | Saccharomyces | 3572 | |
| | | cerevisiae | | |
| 12 | YEL001C_stress | Saccharomyces | 3673 | |
| | | cerevisiae | | |
| 13 | YER062c_stress | Saccharomyces | 3696 | |
| | | cerevisiae | | |
| 14 | YER145C_stress | Saccharomyces | 3849 | |
| | | cerevisiae | | |
| 15 | YER146W_stress | Saccharomyces | 3954 | |
| | | cerevisiae | | |
| 16 | YGL151W_stress | Saccharomyces | 4105 | |
| | | cerevisiae | | |
| 17 | YGR046W_stress | Saccharomyces | 4126 | |
| | | cerevisiae | | |
| 18 | YGR060W_stress | Saccharomyces | 4197 | 4345, 4347, 4349, 4351, 4353, 4355, 4357, 4359, 4361, 4363, 4365 |
| | | cerevisiae | | |
| 19 | YGR141W_stress | Saccharomyces | 4370 | |
| | | cerevisiae | | |
| 20 | YIL002C_stress | Saccharomyces | 4405 | 4513 |
| | | cerevisiae | | |
| 21 | YIL031W_stress | Saccharomyces | 4518 | |
| | | cerevisiae | | |
| 22 | YIL076W_stress | Saccharomyces | 4537 | |
| | | cerevisiae | | |
| 23 | YIL077C_stress | Saccharomyces | 4588 | |
| | | cerevisiae | | |
| 24 | YIL121W_stress | Saccharomyces | 4601 | |
| | | cerevisiae | | |
| 25 | YIL156W_stress | Saccharomyces | 4702 | |
| | | cerevisiae | | |
| 26 | YJR044C_stress | Saccharomyces | 4733 | |
| | | cerevisiae | | |
| 27 | YKL057C_stress | Saccharomyces | 4850 | |
| | | cerevisiae | | |
| 28 | YKL150W_stress | Saccharomyces | 4873 | 5147, 5149, 5151, 5153, 5155, 5157, 5159, 5161, 5163 |
| | | cerevisiae | | |
| 29 | YGL151W_stress | Saccharomyces | 5168 | 5222, 5224, 5226, 5228, 5230, 5232, 5234 |
| | | cerevisiae | | |
| 30 | YLR062c_stress | Saccharomyces | 5241 | |
| | | cerevisiae | | |
| 31 | YLR142W_stress | Saccharomyces | 5248 | |
| | | cerevisiae | | |
| 32 | YLR173W_stress | Saccharomyces | 5409 | |
| | | cerevisiae | | |
| 33 | YLR274W_stress | Saccharomyces | 5420 | 5708, 5710 |
| | | cerevisiae | | |
| 34 | YLR394W_stress | Saccharomyces | 5715 | |
| | | cerevisiae | | |
| 35 | YNL108C_stress | Saccharomyces | 5726 | |
| | | cerevisiae | | |
| 36 | YNL141W_stress | Saccharomyces | 5823 | |
| | | cerevisiae | | |
| 37 | YNL282W_stress | Saccharomyces | 6050 | |
| | | cerevisiae | | |
| 38 | YNL283C_stress | Saccharomyces | 6063 | |
| | | cerevisiae | | |
| 39 | YNL286W_stress | Saccharomyces | 6114 | |
| | | cerevisiae | | |
| 40 | YOL056W_stress | Saccharomyces | 6213 | 6599 |
| | | cerevisiae | | |
| 41 | YOR154W_stress | Saccharomyces | 6604 | |
| | | cerevisiae | | |
| 42 | YOR266W_stress | Saccharomyces | 6663 | |
| | | cerevisiae | | |
| 43 | YOR298C- | Saccharomyces | 6676 | |
| | A_stress | cerevisiae | | |
| 44 | YPL030W_stress | Saccharomyces | 6783 | |
| | | cerevisiae | | |
| 45 | YPL103C_stress | Saccharomyces | 6850 | |
| | | cerevisiae | | |
| 46 | YPL211W_stress | Saccharomyces | 7059 | 7169, 7171, 7173, 7175, 7177 |
| | | cerevisiae | | |
| 47 | YLR210W_stress | Saccharomyces | 7182 | 7500; 7502; 7504; 7506; 7508; 7510; 7512; 7514; 7516; 7518; 7520 |
| | | cerevisiae | | |
| 48 | YNL231C_stress | Saccharomyces | 7525 | 7681; 7683; 7685; 7687; 7689; 7691 |
| | | cerevisiae | | |
| 49 | YNR029C_stress | Saccharomyces | 7696 | 8290; 8292; 8294 |
| | | cerevisiae | | |

TABLE III
Primer nucleic acid sequence ID numbers

| | | | 4. | |
|---|---|---|---|---|
| 1. | 2. | | Lead | 5. |
| Hit | Gene/ORF Locus | 3. | NA | Primer NA |
| no. | Name | Organism | SEQ ID | SEQ IDs |
| 1 | b0019_stress | Escherichia coli | 1 | 273, 274 |
| 2 | b0730_stress | Escherichia coli | 276 | 696, 697 |
| | | K12 | | |
| 3 | b1528_stress | Escherichia coli | 699 | 1223, 1224 |
| | | K12 | | |
| 4 | b1829_stress | Escherichia coli | 1226 | 1622, 1623 |
| | | K12 | | |
| 5 | b3164_stress | Escherichia coli | 1625 | 2039, 2040 |
| 6 | YBL002W_stress | Saccharomyces | 2042 | 2609, 2610 |
| | | cerevisiae | | |
| 7 | YBR002C_stress | Saccharomyces | 2614 | 3152, 3153 |
| | | cerevisiae | | |
| 8 | YBR010W_stress | Saccharomyces | 3158 | 3332, 3333 |
| | | cerevisiae | | |
| 9 | YBR090c_stress | Saccharomyces | 3335 | 3339, 3340 |
| | | cerevisiae | | |
| 10 | YBR109C_stress | Saccharomyces | 3342 | 3568, 3569 |
| | | cerevisiae | | |
| 11 | YBR288C_stress | Saccharomyces | 3571 | 3669, 3670 |
| | | cerevisiae | | |
| 12 | YEL001C_stress | Saccharomyces | 3672 | 3692, 3693 |
| | | cerevisiae | | |
| 13 | YER062c_stress | Saccharomyces | 3695 | 3845, 3846 |
| | | cerevisiae | | |
| 14 | YER145C_stress | Saccharomyces | 3848 | 3950, 3951 |
| | | cerevisiae | | |
| 15 | YER146W_stress | Saccharomyces | 3953 | 4101, 4102 |
| | | cerevisiae | | |
| 16 | YGL151W_stress | Saccharomyces | 4104 | 4122, 4123 |
| | | cerevisiae | | |
| 17 | YGR046W_stress | Saccharomyces | 4125 | 4193, 4194 |
| | | cerevisiae | | |
| 18 | YGR060W_stress | Saccharomyces | 4196 | 4366, 4367 |
| | | cerevisiae | | |
| 19 | YGR141W_stress | Saccharomyces | 4369 | 4401, 4402 |
| | | cerevisiae | | |
| 20 | YIL002C_stress | Saccharomyces | 4404 | 4514, 4515 |
| | | cerevisiae | | |
| 21 | YIL031W_stress | Saccharomyces | 4517 | 4533, 4534 |
| | | cerevisiae | | |
| 22 | YIL076W_stress | Saccharomyces | 4536 | 4584, 4585 |
| | | cerevisiae | | |
| 23 | YIL077C_stress | Saccharomyces | 4587 | 4597, 4598 |
| | | cerevisiae | | |
| 24 | YIL121W_stress | Saccharomyces | 4600 | 4698, 4699 |
| | | cerevisiae | | |
| 25 | YIL156W_stress | Saccharomyces | 4701 | 4729, 4730 |
| | | cerevisiae | | |
| 26 | YJR044C_stress | Saccharomyces | 4732 | 4846, 4847 |
| | | cerevisiae | | |
| 27 | YKL057C_stress | Saccharomyces | 4849 | 4869, 4870 |
| | | cerevisiae | | |
| 28 | YKL150W_stress | Saccharomyces | 4872 | 5164, 5165 |
| | | cerevisiae | | |
| 29 | YGL151W_stress | Saccharomyces | 5167 | 5235, 5236 |
| | | cerevisiae | | |
| 30 | YLR062c_stress | Saccharomyces | 5240 | 5244, 5245 |
| | | cerevisiae | | |
| 31 | YLR142W_stress | Saccharomyces | 5247 | 5405, 5406 |
| | | cerevisiae | | |
| 32 | YLR173W_stress | Saccharomyces | 5408 | 5416, 5417 |
| | | cerevisiae | | |
| 33 | YLR274W_stress | Saccharomyces | 5419 | 5711, 5712 |
| | | cerevisiae | | |
| 34 | YLR394W_stress | Saccharomyces | 5714 | 5722, 5723 |
| | | cerevisiae | | |
| 35 | YNL108C_stress | Saccharomyces | 5725 | 5819, 5820 |
| | | cerevisiae | | |
| 36 | YNL141W_stress | Saccharomyces | 5822 | 6046, 6047 |
| | | cerevisiae | | |
| 37 | YNL282W_stress | Saccharomyces | 6049 | 6059, 6060 |
| | | cerevisiae | | |
| 38 | YNL283C_stress | Saccharomyces | 6062 | 6110, 6111 |
| | | cerevisiae | | |
| 39 | YNL286W_stress | Saccharomyces | 6113 | 6209, 6210 |
| | | cerevisiae | | |
| 40 | YOL056W_stress | Saccharomyces | 6212 | 6600, 6601 |
| | | cerevisiae | | |
| 41 | YOR154W_stress | Saccharomyces | 6603 | 6659, 6660 |
| | | cerevisiae | | |
| 42 | YOR266W_stress | Saccharomyces | 6662 | 6672, 6673 |
| | | cerevisiae | | |
| 43 | YOR298C- | Saccharomyces | 6675 | 6779, 6780 |
| | A_stress | cerevisiae | | |
| 44 | YPL030W_stress | Saccharomyces | 6782 | 6846, 6847 |
| | | cerevisiae | | |
| 45 | YPL103C_stress | Saccharomyces | 6849 | 7051, 7052 |
| | | cerevisiae | | |
| 46 | YPL211W_stress | Saccharomyces | 7058 | 7178, 7179 |
| | | cerevisiae | | |
| 47 | YLR210W_stress | Saccharomyces | 7181 | 7521; 7522 |
| | | cerevisiae | | |
| 48 | YNL231C_stress | Saccharomyces | 7524 | 7692; 7693 |
| | | cerevisiae | | |
| 49 | YNR029C_stress | Saccharomyces | 7695 | 8295; 8296 |
| | | cerevisiae | | |

TABLE IV
Consensus nucleic acid sequence ID numbers

| 1. | 2. | | 4. | 5. |
|---|---|---|---|---|
| Hit | Gene/ORF Locus | 3. | Lead AA | Consensus AA |
| no. | Name | Organism | SEQ ID | SEQ ID |
| 1 | b0019_stress | Escherichia coli | 2 | 275 |
| 2 | b0730_stress | Escherichia coli | 277 | 698 |
| | | K12 | | |
| 3 | b1528_stress | Escherichia coli | 700 | 1225 |
| | | K12 | | |
| 4 | b1829_stress | Escherichia coli | 1227 | 1624 |
| | | K12 | | |
| 5 | b3164_stress | Escherichia coli | 1626 | 2041 |
| 6 | YBL002W_stress | Saccharomyces | 2043 | 2611, 2612, |
| | | cerevisiae | | 2613 |
| 7 | YBR002C_stress | Saccharomyces | 2615 | 3154, 3155, |
| | | cerevisiae | | 3156, 3157 |
| 8 | YBR010W_stress | Saccharomyces | 3159 | 3334 |
| | | cerevisiae | | |
| 9 | YBR090c_stress | Saccharomyces | 3336 | 3341 |
| | | cerevisiae | | |
| 10 | YBR109C_stress | Saccharomyces | 3343 | 3570 |
| | | cerevisiae | | |
| 11 | YBR288C_stress | Saccharomyces | 3572 | 3671 |
| | | cerevisiae | | |
| 12 | YEL001C_stress | Saccharomyces | 3673 | 3694 |
| | | cerevisiae | | |
| 13 | YER062c_stress | Saccharomyces | 3696 | 3847 |
| | | cerevisiae | | |
| 14 | YER145C_stress | Saccharomyces | 3849 | 3852 |
| | | cerevisiae | | |
| 15 | YER146W_stress | Saccharomyces | 3954 | 4103 |
| | | cerevisiae | | |
| 16 | YGL151W_stress | Saccharomyces | 4105 | 4124 |
| | | cerevisiae | | |
| 17 | YGR046W_stress | Saccharomyces | 4126 | 4195 |
| | | cerevisiae | | |
| 18 | YGR060W_stress | Saccharomyces | 4197 | 4368 |
| | | cerevisiae | | |
| 19 | YGR141W_stress | Saccharomyces | 4370 | 4403 |
| | | cerevisiae | | |
| 20 | YIL002C_stress | Saccharomyces | 4405 | 4516 |
| | | cerevisiae | | |
| 21 | YIL031W_stress | Saccharomyces | 4518 | 4535 |
| | | cerevisiae | | |
| 22 | YIL076W_stress | Saccharomyces | 4537 | 4586 |
| | | cerevisiae | | |
| 23 | YIL077C_stress | Saccharomyces | 4588 | 4599 |
| | | cerevisiae | | |
| 24 | YIL121W_stress | Saccharomyces | 4601 | 4700 |
| | | cerevisiae | | |
| 25 | YIL156W_stress | Saccharomyces | 4702 | 4731 |
| | | cerevisiae | | |
| 26 | YJR044C_stress | Saccharomyces | 4733 | 4848 |
| | | cerevisiae | | |
| 27 | YKL057C_stress | Saccharomyces | 4850 | 4871 |
| | | cerevisiae | | |
| 28 | YKL150W_stress | Saccharomyces | 4873 | 5166 |
| | | cerevisiae | | |
| 29 | YGL151W_stress | Saccharomyces | 5168 | 5237, 5238, |
| | | cerevisiae | | 5239 |
| 30 | YLR062c_stress | Saccharomyces | 5241 | 5246 |
| | | cerevisiae | | |
| 31 | YLR142W_stress | Saccharomyces | 5248 | 5407 |
| | | cerevisiae | | |
| 32 | YLR173W_stress | Saccharomyces | 5409 | 5418 |
| | | cerevisiae | | |
| 33 | YLR274W_stress | Saccharomyces | 5420 | 5713 |
| | | cerevisiae | | |
| 34 | YLR394W_stress | Saccharomyces | 5715 | 5724 |
| | | cerevisiae | | |
| 35 | YNL108C_stress | Saccharomyces | 5726 | 5821 |
| | | cerevisiae | | |
| 36 | YNL141W_stress | Saccharomyces | 5823 | 6048 |
| | | cerevisiae | | |
| 37 | YNL282W_stress | Saccharomyces | 6050 | 6061 |
| | | cerevisiae | | |
| 38 | YNL283C_stress | Saccharomyces | 6063 | 6112 |
| | | cerevisiae | | |
| 39 | YNL286W_stress | Saccharomyces | 6114 | 6211 |
| | | cerevisiae | | |
| 40 | YOL056W_stress | Saccharomyces | 6213 | 6602 |
| | | cerevisiae | | |
| 41 | YOR154W_stress | Saccharomyces | 6604 | 6661 |
| | | cerevisiae | | |
| 42 | YOR266W_stress | Saccharomyces | 6663 | 6674 |
| | | cerevisiae | | |
| 43 | YOR298C-A_stress | Saccharomyces | 6676 | 6781 |
| | | cerevisiae | | |
| 44 | YPL030W_stress | Saccharomyces | 6783 | 6848 |
| | | cerevisiae | | |
| 45 | YPL103C_stress | Saccharomyces | 6850 | 7053, 7054, |
| | | cerevisiae | | 7055, 7056, |
| | | | | 7057 |
| 46 | YPL211W_stress | Saccharomyces | 7059 | 7180 |
| | | cerevisiae | | |
| 47 | YLR210W_stress | Saccharomyces | 7182 | 7523 |
| | | cerevisiae | | |
| 48 | YNL231C_stress | Saccharomyces | 7525 | 7694 |
| | | cerevisiae | | |
| 49 | YNR029C_stress | Saccharomyces | 7696 | 8297 |
| | | cerevisiae | | |

1. A transgenic plant cell wherein the tolerance and/or resistance to environmental stress is increased as compared to a corresponding non-transformed wild type plant cell by transformation with a Stress-Related Protein (SRP) coding nucleic acid selected from the group consisting of:
a) nucleic acid molecule encoding one of the polypeptides to as shown in Table II, column 4 and 5 or a fragment thereof, which confers an increased tolerance and/or resistance to environmental stress in an organism or a part thereof;
b) nucleic acid molecule comprising one of the nucleic acid molecule as shown in Table I, column 4 and 5;
c) nucleic acid molecule whose sequence can be deduced from a polypeptide sequence encoded by a nucleic acid molecule of (a) or (b) as a result of the degeneracy of the genetic code and conferring an increased tolerance and/or resistance to environmental stress as compared to a corresponding non-transformed wild type plant in an organism or a part thereof;
d) nucleic acid molecule which encodes a polypeptide which has at least 50% identity with the amino acid sequence of the polypeptide encoded by the nucleic acid molecule of (a) to (c) and conferring an increased tolerance and/or resistance to environmental stress in an organism or a part thereof;
e) nucleic acid molecule which hybridizes with a nucleic acid molecule of (a) to (c) under stringent hybridization conditions and conferring an increased tolerance and/or resistance to environmental stress in an organism or a part thereof,
f) nucleic acid molecule which encompasses a nucleic acid molecule which is obtained by amplifying nucleic acid molecules from a cDNA library or a genomic library using the primers as shown in Table III, column 5 and conferring an increased tolerance and/or resistance to environmental stress as compared to a corresponding non-transformed wild type plant in an organism or a part thereof;
g) nucleic acid molecule encoding a polypeptide which is isolated with the aid of monoclonal antibodies against a polypeptide encoded by one of the nucleic acid molecules of (a) to (f) and conferring an increased tolerance and/or resistance to environmental stress as compared to a corresponding non-transformed wild type plant in an organism or a part thereof
h) nucleic acid molecule encoding a polypeptide comprising the consensus sequence shown in table IV, column 5 and conferring an increased tolerance and/or resistance to environmental stress as compared to a corresponding non-transformed wild type plant in an organism or a part thereof; and
i) nucleic acid molecule which is obtainable by screening a suitable nucleic acid library under stringent hybridization conditions with a probe comprising one of the sequences of the nucleic acid molecule of (a) to (g) or with a fragment thereof having at least 15 nt, preferably 20 nt, 30 nt, 50 nt, 100 nt, 200 nt or 500 nt of the nucleic acid molecule characterized in (a) to (i) and conferring an increased tolerance and/or resistance to environmental stress as compared to a corresponding non-transformed wild type plant in an organism or a part thereof,
or comprising a sequence which is complementary thereto.

2. The transgenic plant cell of claim 1 derived from a monocotyledonous plant.

3. The trans genic plant cell of claim 1 derived from a dicotyledonous plant.

4. The transgenic plant cell of claim 1, wherein the plant is selected from the group consisting of maize, wheat, rye, oat, triticale, rice, barley, soybean, peanut, cotton, rapeseed, canola, manihot, pepper, sunflower, flax, borage, safflower, linseed, primrose, rapeseed, turnip rape, tagetes, solanaceous plants, potato, tobacco, eggplant, tomato, Vicia species, pea, alfalfa, coffee, cacao, tea, Salix species, oil palm, coconut, perennial grass, forage crops and Arabidopsis thaliana.

5. The transgenic plant cell of claim 1, derived from a gymnosperm plant.

6. A transgenic plant generated from the plant cell of claim 1 and which is a monocot or dicot plant.

7. The transgenic plant of claim 6, which is selected from the group consisting of maize, wheat, rye, oat, triticale, rice, barley, soybean, peanut, cotton, rapeseed, canola, manihot, pepper, sunflower, flax, borage, safflower, linseed, primrose, rapeseed, turnip rape, tagetes, solanaceous plants, potato, tobacco, eggplant, tomato, Vicia species, pea, alfalfa, coffee, cacao, tea, Salix species, oil palm, coconut, perennial grass, forage crops and Arabidopsis thaliana.

8. A transgenic plant generated from the plant cell of claim 1 and which is a gymnosperm plant.

9. A seed produced by the transgenic plant of claim 6, wherein the seed is genetically homozygous for a transgene conferring increased tolerance and/or resistance to environmental stress as compared to a corresponding non-transformed wild type plant cell resulting in an increased tolerance to environmental stress as compared to a corresponding non-transformed wild type plant.

10. An isolated nucleic acid molecule comprising a nucleic acid molecule selected from the group consisting of:
a) nucleic acid molecule encoding one of the polypeptides to as shown in Table II, column 4 and 5 or a fragment thereof, which confers an increased tolerance and/or resistance to environmental stress in an organism or a part thereof;
b) nucleic acid molecule comprising one of the nucleic acid molecule as shown in Table 1, column 4 and 5;
c) nucleic acid molecule whose sequence can be deduced from a polypeptide sequence encoded by a nucleic acid molecule of (a) or (b) as a result of the degeneracy of the genetic code and conferring an increased tolerance and/or resistance to environmental stress as compared to a corresponding non-transformed wild type plant in an organism or a part thereof;
d) nucleic acid molecule which encodes a polypeptide which has at least 50% identity with the amino acid sequence of the polypeptide encoded by the nucleic acid molecule of (a) to (c) and conferring an increased tolerance and/or resistance to environmental stress in an organism or a part thereof;
e) nucleic acid molecule which hybridizes with a nucleic acid molecule of (a) to (c) under stringent hybridization conditions and conferring an increased tolerance and/or resistance to environmental stress in an organism or a part thereof;
i) nucleic acid molecule which encompasses a nucleic acid molecule which is obtained by amplifying nucleic acid molecules from a cDNA library or a genomic library using the primers as shown in Table III, column 5 and conferring an increased tolerance and/or resistance to environmental stress as compared to a corresponding non-transformed wild type plant in an organism or a part thereof;
g) nucleic acid molecule encoding a polypeptide which is isolated with the aid of monoclonal antibodies against a polypeptide encoded by one of the nucleic acid molecules of (a) to (f) and conferring an increased tolerance and/or resistance to environmental stress as compared to a corresponding non-transformed wild type plant in an organism or a part thereof;
h) nucleic acid molecule encoding a polypeptide comprising the consensus sequence shown in table IV, column 5 and conferring an increased tolerance and/or resistance to environmental stress as compared to a corresponding non-transformed wild type plant in an organism or a part thereof; and
i) nucleic acid molecule which is obtainable by screening a suitable nucleic acid library under stringent hybridization conditions with a probe comprising one of the sequences of the nucleic acid molecule of (a) to (g) or with a fragment thereof having at least 15 nt, preferably 20 nt, 30 nt, 50 nt, 100 nt, 200 nt or 500 nt of the nucleic acid molecule characterized in (a) to (i) and conferring an increased tolerance and/or resistance to environmental stress as compared to a corresponding non-transformed wild type plant in an organism or a part thereof, whereby the nucleic acid molecule distinguishes over the sequence as shown in Table I A and/or table I B, column 4 and 5 by one or more nucleotides.

11. An isolated nucleic acid molecule comprising a nucleic acid molecule selected from the group consisting of:
a) nucleic acid molecule encoding one of the polypeptides to as shown in Table II, preferably Table II B, column 4 and 5 or a fragment thereof, which confers an increased tolerance and/or resistance to environmental stress in an organism or a part thereof;
b) nucleic acid molecule comprising one of the nucleic acid molecule as shown in Table I, preferably Table I B, column 4 and/or 5;
c) nucleic acid molecule whose sequence can be deduced from a polypeptide sequence encoded by a nucleic acid molecule of (a) or (b) as a result of the degeneracy of the genetic code and conferring an increased tolerance and/or resistance to environmental stress as compared to a corresponding non-transformed wild type plant in an organism or a part thereof;
d) nucleic acid molecule which encodes a polypeptide which has at least 50% identity with the amino acid sequence of the polypeptide encoded by the nucleic acid molecule of (a) to (c) and conferring an increased tolerance and/or resistance to environmental stress in an organism or a part thereof;
e) nucleic acid molecule which hybridizes with a nucleic acid molecule of (a) to (c) under stringent hybridization conditions and conferring an increased tolerance and/or resistance to environmental stress in an organism or a part thereof;
f) nucleic acid molecule which encompasses a nucleic acid molecule which is obtained by amplifying nucleic acid molecules from a cDNA library or a genomic library using the primers as shown in Table 1 μl, column 5 and conferring an increased tolerance and/or resistance to environmental stress as compared to a corresponding non-transformed wild type plant in an organism or a part thereof;
g) nucleic acid molecule encoding a polypeptide which is isolated with the aid of monoclonal antibodies against a polypeptide encoded by one of the nucleic acid molecules of (a) to (f) and conferring an increased tolerance and/or resistance to environmental stress as compared to a corresponding non-transformed wild type plant in an organism or a part thereof;
h) nucleic acid molecule encoding a polypeptide comprising the consensus sequence shown in table IV, column 5 and conferring an increased tolerance and/or resistance to environmental stress as compared to a corresponding non-transformed wild type plant in an organism or a part thereof; and
i) nucleic acid molecule which is obtainable by screening a suitable nucleic acid library under stringent hybridization conditions with a probe comprising one of the sequences of the nucleic acid molecule of (a) to (g) or with a fragment thereof having at least 15 nt, preferably 20 nt, 30 nt, 50 nt, 100 nt, 200 nt or 500 nt of the nucleic acid molecule characterized in (a) to (i) and conferring an increased tolerance and/or resistance to environmental stress as compared to a corresponding non-transformed wild type plant in an organism or a part thereof.

12. A nucleic acid construct which confers the expression of the nucleic acid molecule of claim 11, comprising one or more regulatory elements, whereby expression of the nucleic acid in a host cell results in increased tolerance and/or resistance to environmental stress as compared to a corresponding non-transformed wild type plant cell.

13. A vector comprising the nucleic acid molecule of claim 11 or a nucleic acid construct comprising said nucleic acid molecule, whereby expression of the nucleic acid in a host cell results in increased tolerance and/or resistance to environmental stress as compared to a corresponding non-transformed wild type plant cell.

14. A host cell, which has been transformed stably or transiently with the nucleic acid molecule as of claim 11, a nucleic acid construct comprising said nucleic acid molecule, or a vector comprising the nucleic acid molecule or said nucleic acid construct.

15. An isolated Stress Related Protein (SRP) which is selected from the group consisting of the sequences as shown in table II, preferably table II B, column 4 and/or 5, and homologs thereof.

16. The isolated Stress Related Protein (SRP) of claim 15 which is from yeast, Saccharomyces cerevisiae, E. coli, Brassica napus, Glycine max, Zea mays, Hordeum vulgare, Helianthus annuus, Linum usitatissimum, Triticum aestivum, or Oryza sativa.

17. A method of producing a transgenic plant with increased tolerance and/or resistance to environmental stress compared to a corresponding non transformed wild type plant cell, wherein the tolerance and/or resistance to environmental stress is altered by expression of a Stress-Related Protein (SRP) coding nucleic acid and results in increased tolerance and/or resistance to an environmental stress as compared to a corresponding non-transformed wild type plant cell, comprising
a) transforming a plant cell with an expression vector according to claim 16 and
b) generating from the plant cell a transgenic plant with an increased tolerance to environmental stress as compared to a corresponding non-transformed wild type plant.

18. The method of claim 17, wherein the SRP coding nucleic acid is selected from the group consisting of:
a) nucleic acid molecule encoding. one of the polypeptides to as shown in Table II, preferably Table II B, column 4 and 5 or a fragment thereof, which confers an increased tolerance and/or resistance to environmental stress in an organism or a part thereof;
b) nucleic acid molecule comprising one of the nucleic acid molecule as shown in Table T preferably Table I B, column 4 and/or 5;
c) nucleic acid molecule whose sequence can be deduced from a polypeptide sequence encoded by a nucleic acid molecule of (a) or (b) as a result of the degeneracy of the genetic code and conferring an increased tolerance and/or resistance to environmental stress as compared to a corresponding non-transformed wild type plant in an organism or a part thereof;
d) nucleic acid molecule which encodes a polypeptide which has at least 50% identity with the amino acid sequence of the polypeptide encoded by the nucleic acid molecule of (a to (c) and conferring an increased tolerance and/or resistance to environmental stress in an organism or a part thereof;
e) nucleic acid molecule which hybridizes with a nucleic acid molecule of (a) to (c) under stringent hybridization conditions and conferring an increased tolerance and/or resistance to environmental stress in an organism or a part thereof;
f) nucleic acid molecule which encompasses a nucleic acid molecule which is obtained by amplifying nucleic acid molecules from a cDNA library or a genomic library using the primers as shown in Table III, column 5 and conferring an increased tolerance and/or resistance to environmental stress as compared to a corresponding non-transformed wild type plant in an organism or a part thereof;
g) nucleic acid molecule encoding a polypeptide which is isolated with the aid of monoclonal antibodies against a polypeptide encoded by one of the nucleic acid molecules of (a) to (f) and conferring an increased tolerance and/or resistance to environmental stress as compared to a corresponding non-transformed wild type plant in an organism or a part thereof;
h) nucleic acid molecule encoding a polypeptide comprising the consensus sequence shown in table IV, column 5 and conferring an increased tolerance and/or resistance to environmental stress as compared to a corresponding non-transformed wild type plant in an organism or a part thereof; and
i) nucleic acid molecule which is obtainable by screening a suitable nucleic acid library under stringent hybridization conditions with a probe comprising one of the sequences of the nucleic acid molecule of (a) to (g) or with a fragment thereof having at least 15 nt, preferably 20 nt, 30 nt, 50 nt, 100 nt, 200 nt or 500 nt of the nucleic acid molecule characterized in (a) to (i) and conferring an increased tolerance and/or resistance to environmental stress as compared to a corresponding non-transformed wild type plant in an organism or a part thereof.

19. A method of modifying stress tolerance of a plant comprising, modifying the level of expression of an SRP in the plant.

20. A method of modifying stress tolerance of a plant comprising modifying the level of expression of an SRP in the plant wherein the vector of claim 13 is used.

21. The method of claim 19, wherein the stress tolerance is decreased.

22. (canceled)

22. A method for selecting plants or plant cells with increased tolerance to environmental stress, comprising using increased tolerance and/or resistance to environmental stress and/or a SRP encoding nucleic acid comprising the isolated nucleic acid of claim 11 or parts thereof as selection markers.

23. A method for detecting stress in plants or plant cells, comprising using increased tolerance and/or resistance to environmental stress and/or a SRP encoding nucleic acid comprising the isolated nucleic acid of claim 11 or parts thereof as detection markers.

24. A nucleic acid construct which confers the expression of the nucleic acid molecule of claim 10, comprising one or more regulatory elements, whereby expression of the SRP coding nucleic acid in a host cell results in increased tolerance and/or resistance to environmental stress as compared to a corresponding non-transformed wild type host cell.

25. A vector comprising the nucleic acid molecule of claim 10 or a nucleic acid construct comprising said nucleic acid molecule, whereby expression of the SRP coding nucleic acid in a host cell results in increased tolerance and/or resistance to environmental stress as compared to a corresponding non-transformed wild type host cell.

26. A plant cell comprising the nucleic acid construct of claim 24 or a vector comprising said nucleic acid construct.

27. A plant comprising the plant cell of claim 26.

28. A host cell, which has been transformed stably or transiently with the nucleic acid molecule of claim 10, a nucleic acid construct comprising said nucleic acid molecule, or a vector comprising the nucleic acid molecule or said nucleic acid construct.

The application's sequence listing, which the Patent Office published only in electronic form, follows.

SEQUENCE LISTING (8300 sequences)

SEQ ID NO: 1 - DNA, 1167 bp, Escherichia coli
  CDS (1)..(1167)
atgaaacatctgcatcgattctttagcagtgatgcctcgggaggcattattcttatcattgccgctatcctggcgatgattatggccaacagcggcgcaaccagtggatggtatcacgactttctggagacgccggttcagctccgggttggttcactcgaaatcaacaaaaacatgctgttatggataaatgacgcgctgatggcggtatttttcctgttagtcggtctggaagttaaacgtgaactgatgcaaggatcgctagccagcttacgccaggccgcatttccagttatcgccgctattggtgggatgattgtgccggcattactctatctggcttttaactatgccgatccgattacccgcgaagggtgggcgatcccggcggctactgacattgcttttgcacttggtgtactggcgctgttgggaagtcgtgttccgttagcgctgaagatctttttgatggctctggctattatcgacgatcttggggccatcattatcatcgcattgttctacactaatgacttatcgatggcctctcttggcgtcgcggctgtagcaattgcggtactcgcggtattgaatctgtgtggtgcacgccgcacgggcgtctatattcttgttggcgtggtgttgtggactgcggtgttgaaatcgggggttcacgcaactctggcgggggtaattgtcggcttctttattcctttgaaagagaagcatgggcgttctccagcgaagcgactggagcatgtgttgcacccgtgggtggcgtatctgattttgccgctgtttgcatttgctaatgctggcgtttcactgcaaggcgtcacgctggatggcttgacctccattctgccattggggatcatcgctggcttgctgattggcaaaccgctggggattagtctgttctgctggttggcgctgcgtttgaaactggcgcatctgcctgagggaacgacttatcagcaaattatggtggtggggatcctgtgcggtatcggttttactatgtctatctttattgccagcctggcctttggtagcgtagatccagaactgattaactgggcgaaactcggtatcctggtcggttctatctcttcggcggtaattggatacagctggttacgcgttcgtttgcgtccatcagtttga

SEQ ID NO: 2 - protein, 388 aa, Escherichia coli
MKHLHRFFSSDASGGIILIIAAILAMIMANSGATSGWYHDFLETPVQLRVGSLEINKNMLLWINDALMAVFFLLVGLEVKRELMQGSLASLRQAAFPVIAAIGGMIVPALLYLAFNYADPITREGWAIPAATDIAFALGVLALLGSRVPLALKIFLMALAIIDDLGAIIIIALFYTNDLSMASLGVAAVAIAVLAVLNLCGARRTGVYILVGVVLWTAVLKSGVHATLAGVIVGFFIPLKEKHGRSPAKRLEHVLHPWVAYLILPLFAFANAGVSLQGVTLDGLTSILPLGIIAGLLIGKPLGISLFCWLALRLKLAHLPEGTTYQQIMVVGILCGIGFTMSIFIASLAFGSVDPELINWAKLGILVGSISSAVIGYSWLRVRLRPSV

SEQ ID NO: 3 - DNA, 1197 bp, Mesorhizobium loti MAFF303099
  CDS (1)..(1197): transl_table=11
atgcaggatttgaagcagcggccggtttccgtctttcgcgaattcctcgacagcgaggcggccggcggtatcatcctgatggtggcggcggcactcgccttgatcgtcgccaactcaccgctcgccgaaacctatttctccgttctccatgcctatctcggcccgctcagcgtctcgcattgggtcaatgacgggctgatggcggtgttcttcctgcttgtcgggctggagatcaagcgcgagatgctggacggccagctgtcgacctggccacgccgcgtcctgcccggcatcgcggcggccggcggcatgctggttccggcgctggtctatgtcttcatcaaccgcaacaattcagccgcactctcgggctgggcgatcccgaccgccaccgacatcgccttcgcgctcggcgtgctgtcgctgctcggcagccgcgtgccggcttcgctgaaagtcttcctgaccgcgctcgccatcatcgacgacctcggcgccgtcatcatcatcgccatcttctatacgagcggcctgtcgctggcctatctcggtgccgccttcgccgtcattgcagcgcttgtcgtgctcaaccgcatgcgggtgatgacgctgctgccctatctcgtgctcggcgccatcctgtgggtgctggttctcaagtcgggcgtccacgccacgcttgccggcgttgcgctggcgctgaccattccgctcgagcgctctgccggggtcggccacgatctcgatcattcgccgctgcaccggctcgagcatggcctgcacaaaatcgtgccctttttcgtcatcccgatcttcggcttcgccaatgccggcgtttcgctcgccggcctcagtcttggcgcgctgatcgagccgctgacgctgggcgtcgccgccggccttgttgtcggcaagctcgtcggcgtgttcggctcttcggcgcttgccataaggctcggcctggccgacctgccggcccataccggctggtcacatatgatcggcatctcgctgctctgcggcatcggcttcaccatgagcctgttcatcggcctgctcgccttcgccagcgatgtggctctgcaggacgcggtcaaggtcggcatcctcgccggctccttcgtcgccgccatactcggcgccgccgtgctgctgatggcgccggctgcgggtgttgcggaagaagagacggagtag

SEQ ID NO: 4 - protein, 398 aa, Mesorhizobium loti MAFF303099
MQDLKQRPVSVFREFLDSEAAGGIILMVAAALALIVANSPLAETYFSVLHAYLGPLSVSHWVNDGLMAVFFLLVGLEIKREMLDGQLSTWPRRVLPGIAAAGGMLVPALVYVFINRNNSAALSGWAIPTATDIAFALGVLSLLGSRVPASLKVFLTALAIIDDLGAVIIIAIFYTSGLSLAYLGAAFAVIAALVVLNRMRVMTLLPYLVLGAILWVLVLKSGVHATLAGVALALTIPLERSAGVGHDLDHSPLHRLEHGLHKIVPFFVIPIFGFANAGVSLAGLSLGALIEPLTLGVAAGLVVGKLVGVFGSSALAIRLGLADLPAHTGWSHMIGISLLCGIGFTMSLFIGLLAFASDVALQDAVKVGILAGSFVAAILGAAVLLMAPAAGVAEEETE

SEQ ID NO: 5 - DNA, 1317 bp, Helicobacter pylori 26695
  CDS (1)..(1317): transl_table=11
atgaatctcaaaaaaacagaaaacgcgctcagtttgacgcttaagaacttcattaaaagcgagtcttttggagggattttcctctttttaaacgctgttttagcgatggtggtggctaattcgtttttaaaagaaagttattttgcactatggcacaccccttttgggtttcaaataggggattttttcatcggctttagtttgcacaactggattgatgatgtcttaatggcgttattctttttaatgataggcttagaaatcaaacgagaattgttgtttggggaattatccagtttcaaaaaagcttcttttcctgtgattgcggccatagggggcatgatagccccaggattgatttatttttttcttaacgctaacacgccttcccagcatggttttgggatccctatggcgacggatattgcgttcgctttaggcgtgatcatgcttttaggcaagagggtgccaaccgctttaaaggtttttttaatcactctagcggtggctgatgacttgggggctattgtggtgatcgcgctcttttataccacgaatttaaaattcgcatggcttttaggggctttaggggtggttcttgttttagccgtattaaaccgcctgaatatgcgctcgctcatcccttacttgcttttaggggtgttgctttggttttgcgtgcatcaaagcggtatccatgcgacgattgctgcagtgattctagcttttatgataccggtgaagatccctaaagattctaaaaatgtagagcttttggaactaggcaaacgatacgcagaaacgagttcaggagcgcttttgagtaaagagcagcaagaaatcttgcattctattgaagaaaaagcgagcgccttacaaagccccttagaaagattggagcattttctagcccccattagcgggtatttcatcatgcccttattcgcgtttgcaaacgctggggtgagcgttgattctagcatcaatttagaagtggataaggtgcttttaggggttattttagggctttgcttgggcaaacctttagggattttcttaatcacttttataagcgaaaagcttaaaatcaccgcacgccctaaaggcatcagctggtggcatattttaggggctgggcttttagcagggattggctttaccatgtctatgtttatttctaatctggccttcacgagcgagcataaagacgctatggaagtggcaaaaattgcgattttactcggatctttgatttctgggatcataggggctttgtatttatttgcgctagacaaaagagcggctttaaagaaatag

SEQ ID NO: 6 - protein, 438 aa, Helicobacter pylori 26695
MNLKKTENALSLTLKNFIKSESFGGIFLFLNAVLAMVVANSFLKESYFALWHTPFGFQIGDFFIGFSLHNWIDDVLMALFFLMIGLEIKRELLFGELSSFKKASFPVIAAIGGMIAPGLIYFFLNANTPSQHGFGIPMATDIAFALGVIMLLGKRVPTALKVFLITLAVADDLGAIVVIALFYTTNLKFAWLLGALGVVLVLAVLNRLNMRSLIPYLLLGVLLWFCVHQSGIHATIAAVILAFMIPVKIPKDSKNVELLELGKRYAETSSGALLSKEQQEILHSIEEKASALQSPLERLEHFLAPISGYFIMPLFAFANAGVSVDSSINLEVDKVLLGVILGLCLGKPLGIFLITFISEKLKITARPKGISWWHILGAGLLAGIGFTMSMFISNLAFTSEHKDAMEVAKIAILLGSLISGIIGALYLFALDKRAALKK

SEQ ID NO: 7 - DNA, 1317 bp, Helicobacter pylori J99
  CDS (1)..(1317): transl_table=11
atgaatctcaaaaaaacagaaaacgcgctcagtttgacgcttaaaaacttcattaaaagcgagtcttttggagggattttcctctttttgaacgccgttttagcgatggtggtggctaattcgtttttaaaagaaagttattttgcgctatggcacaccccttttgggtttcaagtaggggatttttttatcggctttagtttgcacaactggattgatgatgtcttaatggcgttattctttttaatgataggcttagagatcaagcgagaattgttgtttggggaattatccagttttaaaaaagcttctttccctgtgatcgcagccatagggggcatgatagctccaggattgatttatttttttcttaacgccaacacgccctctcagcatggttttgggatccctatggcaacggatattgcgttcgctttaggcgtgatcatgcttttaggcaagagggtgccaaccgccttaaaggtttttttaatcactctagcggtggctgatgacttaggggctattgtggtgatcgcgctcttttataccacgaatttaaaattcgcatggcttttaggggctttaggggtggttcttgttttagccatattgaaccgcctgaatatccgatcgctcatcccttacttgcttttaggggtgttgctttggttttgcgtgcatcaaagcggtatccatgcgacgatcgctgcggtggttctagcttttatgataccggtgaaaatccctaaagattctaaaaatgtagagcttttggaattaggcaaacgatacgcagagacgagttcaggagtgcttttaaccaaagagcagcaagaaatcttgcattctattgaagaaaaagcgagtgctttacaaagccccttagaaagattggagcattttctagcccccatcagcgggtatttcatcatgcccttattcgcgtttgcaaacgctggggtgagcgttgattctagcatcaatttagaagtggataaggtgcttttaggggttattttagggctttgtttgggcaagcctttagggattttcttaatcactttcataagcgaaaagcttaaaatcactgcgcgccctaaaggcatcggctggtggcatattttaggggctgggcttttagcagggattggctttaccatgtctatgttcatttctaatctggctttcacgagcgaacataaggacgctatggaagtggcaaaaattgcgattttactcggatctttgatttctgggatcataggggctttatatttattcgcactagataaaagagcggctttaaagaaatag

SEQ ID NO: 8 - protein, 438 aa, Helicobacter pylori J99
MNLKKTENALSLTLKNFIKSESFGGIFLFLNAVLAMVVANSFLKESYFALWHTPFGFQVGDFFIGFSLHNWIDDVLMALFFLMIGLEIKRELLFGELSSFKKASFPVIAAIGGMIAPGLIYFFLNANTPSQHGFGIPMATDIAFALGVIMLLGKRVPTALKVFLITLAVADDLGAIVVIALFYTTNLKFAWLLGALGVVLVLAILNRLNIRSLIPYLLLGVLLWFCVHQSGIHATIAAVVLAFMIPVKIPKDSKNVELLELGKRYAETSSGVLLTKEQQEILHSIEEKASALQSPLERLEHFLAPISGYFIMPLFAFANAGVSVDSSINLEVDKVLLGVILGLCLGKPLGIFLITFISEKLKITARPKGIGWWHILGAGLLAGIGFTMSMFISNLAFTSEHKDAMEVAKIAILLGSLISGIIGALYLFALDKRAALKK

SEQ ID NO: 9 - DNA, 1149 bp, Vibrio cholerae O1 biovar eltor str. N16961
  CDS (1)..(1149): transl_table=11
atgtctgacatgattcgagatttcttcaagatggaatctgcggggggcattctgctggtgattgcggcggccattgctatggtcattgccaattcagcaatgggtgaagggtaccaagcatttttacatacctatgtctttggtatgtcggtttcacactggattaatgatggcctaatggcggtgtttttcttattgatcggtttagaggtcaaacgtgaactgctggaaggagcgctgaaatcccgtgaaacagcgattttccctgcgatagcggcggtaggcggtatgctcgctcctgcattaatctatgtagccttcaattttaacgatccggctgccattcaaggttgggcgattcctgcggccaccgatattgcgtttgcgctcgggatcatggcgctactgggtaagcgtgtgcctgtgagtttgaaagtgtttctgctggcgctggcgatcattgatgaccttggcgtagtagtgatcatcgctctgttttacagcagtgatttatcaaccattgcactcactatcggctttatcatgacgggtgtgctgtttatgcttaatgccaagcacgttactaaattgagtatttatttggtggcaggcctcatcctatggatcgccgtattaaagtcgggtgtccacgccacattggctggagtagtgatcggatttgctattccgctgaaaggcaataagggtgagcattcaccgttgaaacaccttgagcatgcactgcatccttatgttgcctttgcgattttacctgtgtttgcttttgccaatgctggtatctcactgcaaggcgtgtcattagcagggcttacttctatgctgccactgggtgtagcactgggtctgttccttggtaaaccactcggcatctttagcttcagttgggctgcggttaaactcggggtagcaaaactgccagaagggatcaacttcaagcatatttttgcagtatcggtactgtgtggcatcggttttactatgtcgatcttcatttcatcactggcctttggtcaagcgaatgaagcttatgatacttatgcgcgcttaggtattttaatggggtcaaccaccgcggcattacttggttattctttactgcgactctctctgccgctcaaaaaagcgtaa

SEQ ID NO: 10 - protein, 382 aa, Vibrio cholerae O1 biovar eltor str. N16961
MSDMIRDFFKMESAGGILLVIAAAIAMVIANSAMGEGYQAFLHTYVFGMSVSHWINDGLMAVFFLLIGLEVKRELLEGALKSRETAIFPAIAAVGGMLAPALIYVAFNFNDPAAIQGWAIPAATDIAFALGIMALLGKRVPVSLKVFLLALAIIDDLGVVVIIALFYSSDLSTIALTIGFIMTGVLFMLNAKHVTKLSIYLVAGLILWIAVLKSGVHATLAGVVIGFAIPLKGNKGEHSPLKHLEHALHPYVAFAILPVFAFANAGISLQGVSLAGLTSMLPLGVALGLFLGKPLGIFSFSWAAVKLGVAKLPEGINFKHIFAVSVLCGIGFTMSIFISSLAFGQANEAYDTYARLGILMGSTTAALLGYSLLRLSLPLKKA

SEQ ID NO: 11 - DNA, 1140 bp, Pasteurella multocida subsp. multocida str. Pm70
  CDS (1)..(1140): transl_table=11
atgttaacaccaattcaaaactttctgaaacaagaagcggcaggtggtattctgctgttcatttttgcaaccttagccattattttagccaataccccattaagttatttatactttgattttttgcaaacaccagtgagtgtccaaattggtgcattcatcatcaataaaccgcttttaatgtgggtcaacgatggtcttatggccgtgtttttcatgctcgtcggaatggaagttaaacgtgaattactagaaggctcgttatccagttatcaacgtgctgtttttcccgccattgcggcaacaggcggtatggttgttcctgcaattgtctttcttgtgtttaacgcaacacatcctgaatttcaagagggatgggcgatcccgatggcaacggatatcgcttttgcccttggcgtcatcgccttattaggtaaacgtgttccactcgcgctgaaaattttcttgttggcactggcgattattgatgacttaggggcgattgttgttattgcgctatttttctctcatgatttaagtccacaagcctttatcttcgcggggattgctgtggcaattttgatcacaatgaaccgtttaaaaattactgcactctcggcttacggcattgtcggtattattctttgggcatccgtactcaaatcaggtgtacacgccactttggcgggagtgattatcggtttttgtatcccattaaacggtaagaaaggcgagcgcccactagatgactttgaacatactttatcaccttggagtgcctttgcgattctcccactgtttgctttctgtaatgctggggtttcattaattggtatgggaatggataacttaacctctacgttaccaatggggattgcccttggcttactcttaggtaaacctctggggattttctcattctgttttgtggcagtaaaattaggcattgctaagctgtctgaaggcattaatttcaaacaaatttttgctgtgtctgtactctgtggaattggatttaccatgtccatgttccttgctggtctcgcctttggtggagaaagtgatagcgaaaatgtcactgcactcgcccgtttaggtattctgattggttctggtttctccgcggtgttaggttattga

SEQ ID NO: 12 - protein, 379 aa, Pasteurella multocida subsp. multocida str. Pm70
MLTPIQNFLKQEAAGGILLFIFATLAIILANTPLSYLYFDFLQTPVSVQIGAFIINKPLLMWVNDGLMAVFFMLVGMEVKRELLEGSLSSYQRAVFPAIAATGGMVVPAIVFLVFNATHPEFQEGWAIPMATDIAFALGVIALLGKRVPLALKIFLLALAIIDDLGAIVVIALFFSHDLSPQAFIFAGIAVAILITMNRLKITALSAYGIVGIILWASVLKSGVHATLAGVIIGFCIPLNGKKGERPLDDFEHTLSPWSAFAILPLFAFCNAGVSLIGMGMDNLTSTLPMGIALGLLLGKPLGIFSFCFVAVKLGIAKLSEGINFKQIFAVSVLCGIGFTMSMFLAGLAFGGESDSENVTALARLGILIGSGFSAVLGY

SEQ ID NO: 13 - DNA, 1170 bp, Campylobacter jejuni subsp. jejuni NCTC 11168
  CDS (1)..(1170): transl_table=11
atgaataatatagtacataaattaaaaactttagttttaaatgaggcttttggcggcgttttacttatagtttgcactttgcttgctttgcttgtgcaaaacgggtcttttagcgaacattatcgagaatttctaaatttaaaagtcggatttagtgtaggtgaatttgagcttaacaagccttttttactttggataaatgatgggcttatatctatatttttctttgctatagggcttgagcttaagaaggaatttttgcacggagattttaaaaatcctaaaaatattgttttgccttttatggctgcgttagggggtatacttataccagcaatgttgtttgctttggtgaatataggagatgcttatactttaaaaggttgggcaatacctacagctacagatacagcgtttgccttagcgattttaatgatgtgcggcaagcacattccatcaagtttaaaaattttcttactttctttggctatttttgatgatgtgggtgctattttaattatagctattttttatacgacaaaattatcaatagctgcttttgtaattgcaggacttgctattttggtaatgcttattttaaatcttttagggataacaagaaagtctttttattttatttgctcagttattctttggattagtgttttaaaaagtggagtacatgcaactttagctggaattgtaacagcattttttataccgatgcaaactaaaaatggggaagcatttttagaagaaatttatgaaagcttaaaattttggattgcttttattattttacctttatttgcttttgctaacgctggagtaaatttatccaatatcgatataggagcaattttttcaggtgtaagtataggtattttcttagggctttttgtgggtaaacaagtgggtgtatttttattttcttatttggcaatccgctttaaatttgcagctttgccccaaggttcaaatttgaaacaactttatggggtttgcatacttacaggaattggttttacaatgagtttgtttattgatggattggcgtatgaagttagtgatatttttaattatgcagataacttagctattctcatagcctcattttgttctgggatttggggttttatttatcttaaattctttactactcgatcttaa

SEQ ID NO: 14 - protein, 389 aa, Campylobacter jejuni subsp. jejuni NCTC 11168
MNNIVHKLKTLVLNEAFGGVLLIVCTLLALLVQNGSFSEHYREFLNLKVGFSVGEFELNKPFLLWINDGLISIFFFAIGLELKKEFLHGDFKNPKNIVLPFMAALGGILIPAMLFALVNIGDAYTLKGWAIPTATDTAFALAILMMCGKHIPSSLKIFLLSLAIFDDVGAILIIAIFYTTKLSIAAFVIAGLAILVMLILNLLGITRKSFYFICSVILWISVLKSGVHATLAGIVTAFFIPMQTKNGEAFLEEIYESLKFWIAFIILPLFAFANAGVNLSNIDIGAIFSGVSIGIFLGLFVGKQVGVFLFSYLAIRFKFAALPQGSNLKQLYGVCILTGIGFTMSLFIDGLAYEVSDIFNYADNLAILIASFCSGIWGFIYLKFFTTRS

SEQ ID NO: 15 - DNA, 1149 bp, Campylobacter jejuni subsp. jejuni NCTC 11168
  CDS (1)..(1149): transl_table=11
atgcaaatgataaagaagatggttttaagtgaaactttccctggtattttgcttatattttttacatttttagctttattatgtaaaaattcttctttaagtgttatttatacagatttttttcatgctaattttacagtaggatttgatcattttcaaatttcaaaatcgttggatttatggataaatgatggtttgatagctatattttttctatgtatagggcttgagttaaaatatgaaattttacgtgggcaacttaaaaatataagagctgtatctttacctatatttggagctttagggggtatgattactccggctttaatttttattgctattaattattctcatgattttgctatgaaaggttgggcaatacctacagcaactgatatagcttttgcagtgggtattttaatgcttttgggaaataaaattcctacaagtttaaaactttttttgctctctttagctatttttgatgatttgggtgctattgttattattgctttgttttatacagatcagctttcagctttagcaattattatttgtttgttttgtatatttgctctgcttttgttaaattattatcacatcacccatctttctttgtacgtgttggtaggtgttgtgttgtggatagctatgcttaaaagtggagtgcatgcaactttggctggtgtgatcatttctttgtttatacctcttgatacaaaaaataaaaaaccttatttacatgaagttcttaaggatttaaatccttgggtagtttattttattttacctttatttgcttttgccaatgctggaattgatattagagatatgcatcttggttcagtattttctcctgtaagtcttgggattattttaggactatttttaggaaaacaattaggtgttttcactttttgttttattgctatcaaacttaaacttgcaaaattacctgaaaatattaaatatggaaaattttatggtatatgtattttaacaggcatcggttttacgatgagcttgtttattgatggtttggcttataaaaatagtgatatttttgaatatgcggataaacttgctattttagtagctagttttttaagtgccattgttggttttatttatcttaagattgttaaatga

SEQ ID NO: 16 - protein, 382 aa, Campylobacter jejuni subsp. jejuni NCTC 11168
MQMIKKMVLSETFPGILLIFFTFLALLCKNSSLSVIYTDFFHANFTVGFDHFQISKSLDLWINDGLIAIFFLCIGLELKYEILRGQLKNIRAVSLPIFGALGGMITPALIFIAINYSHDFAMKGWAIPTATDIAFAVGILMLLGNKIPTSLKLFLLSLAIFDDLGAIVIIALFYTDQLSALAIIICLFCIFALLLLNYYHITHLSLYVLVGVVLWIAMLKSGVHATLAGVIISLFIPLDTKNKKPYLHEVLKDLNPWVVYFILPLFAFANAGIDIRDMHLGSVFSPVSLGIILGLFLGKQLGVFTFCFIAIKLKLAKLPENIKYGKFYGICILTGIGFTMSLFIDGLAYKNSDIFEYADKLAILVASFLSAIVGFIYLKIVK

SEQ ID NO: 17 - DNA, 1242 bp, Caulobacter crescentus CB15
  CDS (1)..(1242): transl_table=11
atgctgcaacgcgtccgcaaactgtcccttctgagagagcttctggaaagcggggccgccggcggtctgcttctgatggcctgcgccgttcttgccctcttcgtcgccaactcgccgctggcggagggctatttccacgccctgcatgtcccgttcgccgggcttgatctgctgcactggatcaacgacggcctgatggcgatcttctttctgttcgtcggcctggagatcaagcgagagttcctggacgggcagttgtcgacctgggccaaccgcgcgctgccatgcatcgctgcggcggggggcgtcgttgttccaggcctcatctacgcaagtctgaacgccggcagtccagagacgctgcgcggctgggcaattccgacggcgacggatatagccttcgcgctgggcgtcctctcgcttctgggatcacgcgtcccgaccagcctcaagatcttcctcgcgacgctggcgatcgtcgacgacctcgtggcggttctgatcatcgccgtgttctataccgctgaactcaacaccgccgccctgatgggcgcggcgctggtgacgctcgttctgctcggcttcaatcgactgaaggtgaagcggctcgcgccgtatctggtcatgggcgtggcgctgtggtggctggtccttctgtccggagttcatgcgaccatcgccggcgtggtgctggccatgaccatccccttgcacgcctcgaaggctgcgccggacgacgcgacctcgccgctgcatcgcctggagcatgcgctctcgccctgggtggccttcctggtggtgccgatcttcggcttcgccaatgcgggcctgtcgttcgccggcatgacgccgtcggtcctggcggagcccgtgacgctcggcgtggccctggggctgttcttcggcaagcagatcggcgtgttcggggcggcgtggctcgccatccgcctgggcgtcgcgcgcctgccggtggcggcctcctgggcgcagctctatggggtcagcctgctctgcggcatcggcttcaccatgagtctcttcattggtctgctggcgttccgcgatgcagcgctgcaaaacgaggtgaaggtcggcgtgctggtcggctcgctcagctcggccctgatcggcgcgaccctgctgagcctgacgaaaaggcggctaccggctgtcgatccgtcgcgcgatcatcaggctgacgccaccgcgttggacgacctcggccgcgaagacgcgcgctga

SEQ ID NO: 18 - protein, 413 aa, Caulobacter crescentus CB15
MLQRVRKLSLLRELLESGAAGGLLLMACAVLALFVANSPLAEGYFHALHVPFAGLDLLHWINDGLMAIFFLFVGLEIKREFLDGQLSTWANRALPCIAAAGGVVVPGLIYASLNAGSPETLRGWAIPTATDIAFALGVLSLLGSRVPTSLKIFLATLAIVDDLVAVLIIAVFYTAELNTAALMGAALVTLVLLGFNRLKVKRLAPYLVMGVALWWLVLLSGVHATIAGVVLAMTIPLHASKAAPDDATSPLHRLEHALSPWVAFLVVPIFGFANAGLSFAGMTPSVLAEPVTLGVALGLFFGKQIGVFGAAWLAIRLGVARLPVAASWAQLYGVSLLCGIGFTMSLFIGLLAFRDAALQNEVKVGVLVGSLSSALIGATLLSLTKRRLPAVDPSRDHQADATALDDLGREDAR

SEQ ID NO: 19 - DNA, 1314 bp, Sinorhizobium meliloti 1021
  CDS (1)..(1314)
atgaacgacagtctctcacggcttcccagggaaccggcagatcggcttaccaagccgtttatgcggttcctccggatcgaggccaccgcgggcattatccttttgctcagcacgctcttggcgctcggcctcgcaaataccgcgtggtcgtcgtcgtttctcgccttttgggagatgcccgcgggtgtcagactgggcgacatcgggatctatcgttcgctgaagcactggatcaacgacgggctgatgacgttttttttcttcgtcatcgcccttgagctgaagcgtgagctggtgctgggggagctgcgcaatccgcgcatggccgccctacccgtcgccgccgctctcgggggaatggctgcgccggccggaatctatttgctgcttgtcggcggggggccgggtgcgagcggctggggcaccgttatgtccacggacacggcgttcgtcatcggatgccttgctttgctcggttcccgcgtacctggtagcttgcgactgttcctgctctctcttgcgatcttcgacgacatcggcgcaatattgatcgtggcggtcggctatggcgaaccgttgaattgggtggcactcggaaccggaggactcggatttgccttcgtcgcaggaattgcgcttctgggcatccgcagcattccggtctatttcgcgatgggtagcgccatctggctggcattcgacgcatcgggcgttcacgcgacgctcgtcggagtgatacttggcttgatgacgccggcgcggaggtgggtaagcgagatccgcctccacgcgatactcgaccgggtgatcgcccatccccccggcgaccatcgcagccgtgacacggcggcacgcagcgaccttcatcgggcaggcgtcgcgacccgcgaagcagtgtcgccgatcgagcgtctcgagatcgccctccatccctgggtcgcattcgcaatcatgccgctctttgccgtctccaacgcgggcatcccgatagaggatgcaaacttcgacgttcccctcacgatcgcaattgtcgtcgccttcgtggtcggcaagccggctggcattgtgctcttcagtttcctcgccgtgaaacttcgcctcgcgagtcgtccggaacagctatcctggagcctgttggcggccggcagtctgctgaccgggatcggcttcaccatggctctgttcattgccgagcttgctttcgagcccgagcttctgatccccgtcaagctcggtgtgctcggcgcttccgtcatatcggccgcactcggttttatggcgctgaccttactgacgtctcctaatagacgatag

SEQ ID NO: 20 - protein, 437 aa, Sinorhizobium meliloti 1021
MNDSLSRLPREPADRLTKPFMRFLRIEATAGIILLLSTLLALGLANTAWSSSFLAFWEMPAGVRLGDIGIYRSLKHWINDGLMTFFFFVIALELKRELVLGELRNPRMAALPVAAALGGMAAPAGIYLLLVGGGPGASGWGTVMSTDTAFVIGCLALLGSRVPGSLRLFLLSLAIFDDIGAILIVAVGYGEPLNWVALGTGGLGFAFVAGIALLGIRSIPVYFAMGSAIWLAFDASGVHATLVGVILGLMTPARRWVSEIRLHAILDRVIAHPPGDHRSRDTAARSDLHRAGVATREAVSPIERLEIALHPWVAFAIMPLFAVSNAGIPIEDANFDVPLTIAIVVAFVVGKPAGIVLFSFLAVKLRLASRPEQLSWSLLAAGSLLTGIGFTMALFIAELAFEPELLIPVKLGVLGASVISAALGFMALTLLTSPNRR

SEQ ID NO: 21 - DNA, 2292 bp, Brucella melitensis 16M
  CDS (1)..(2292): transl_table=11
ttgttctgcctttccggcccgtttttattccaactgtgccgaaggtcatccttagacgataaaaacaataaacggaaaccgatgaatcatagcccgcaatccgctcgccccgtttccatcatgcgacgttttctggacagcgaggccgctggcggcataacgctcatggctgcagcggcgcttgccctcatcgttgcaaattcgccctttgcccagacctatttcgatgcgttgcatctatatatcggcccgctcagccttgcgcactggatcaacgatgcgctgatggcaatattctttttgctggtgggactggaaatcaagcgcgagatgctggacgggcagctcgcaagctggcccaaccgcatgttgccgggcattgcggcagcgggcggcgtcattttgcctgcaatcattttcgcggttctcaaccatgacaatccggccaagctgcgcggctgggcggtgccatcggcaaccgatatcgcctttgcgctcggcgtactgtcgcttctgggttcgcgcgcgccgtcaagcctcaaggtgtttctggcaacgcttgccattcttgacgaccttgccgccgtggtcatcatcgcaatcttctacacggctgaaatttccatgccctatctgggcgcggcctttatcaccgccgcggtcctctttgtcatgaaccgcatggacgtggtgaagctcctgccttatctgatcagcgctgtgatcctctggttcttcgtcttcaattccggcgttcatgccacggttgccggtgttgtcgcagccctcatgatcccgctaaaacctgcacccggcagacccgacgacatgacctcgcccctgcacaagctggaacatgcactggccaagcccgttgccttcatcgtcgtgccgatcttcggctttgccaatgcgggcatttccttcaaggggcttgaggcttccgtcctgggcgacacgctgacactcggcatcctgctcggccttttcctcggcaagcagttcggcgtcttcggcgcggcctggctcgccatcaaaacggggcttgccgaaaagccgatgggcgcaagctgggttcagctttacggcgtcgccattctttgcggcatcggctttacgatgagcatcttcatcggccttctctccttcccgtccgacctcatgcagacggaaacgaagatcggtgtcctttccggctccgccctttcggccatttgcggctatctcctgttgcgggcggcgcggccagaccaaagcgcggctaacccgctctggaaagctgatgagtcgcccgaagcgaaaaatttcgggcgatttctttgtgttttccactttgcttcctacattgcatccacatattgcacggagcggttgcaagccgcttcatcccttttgcgccgttcaagtttggagttcgccttgcccggtctgttgaaacgccttattccccgccgttttcgcgccgtggaaacggaaatccccgtcgtgcgcctgcatggcgcaatcatgaccggcggcacatccttgcggcccacgctttcgctcgcatcgacggccggtattctggaaaaggcctttgccgacaagcatgcccctgcggttgccatatccatcaattcgccgggcggcgcgccggtgcaatcgcgcctgatctatcgccgcatccgcgatcttgccgcggaacatcaaaagaaggttttcgtcttcgtggaagatgtggcggcctccggcggctacatgatcgcgcttgcgggcgacgaaatcatcgccgacccctcctccatcgttggctccatcggcgtcgtttcggcctctttcggctttcccgaattgctgaagaagatcggtgtggagcggcgtgtctatacggcgggcagcaacaaggtgacactcgatccgttccagccggaaaaggccgaggacatcgaacggctgaaagcacttcagcttgaaatccacgccaccttcatcgacatggtgaaggagcggcgcgccggcaagcttggcgacaatcccgatcttttcagcggcctgttctggaccggcaccaccgccgcctcgctcggcctcatcgacgggcttggcgacatgctcagttttctgcgcaagacctatggcgacaaggtgaaactgaagctcatccagccgcaacgcggccttctgggccgcaagctgcccggcatcggcatggattcaggcagtgtcgagccagcgcaaatcgccgcccatcttggcgacgggctgctttgtgtcgcggaagaaaaagcaatctgggcacgctatgggctttga

SEQ ID NO: 22 - protein, 763 aa, Brucella melitensis 16M
MFCLSGPFLFQLCRRSSLDDKNNKRKPMNHSPQSARPVSIMRRFLDSEAAGGITLMAAAALALIVANSPFAQTYFDALHLYIGPLSLAHWINDALMAIFFLLVGLEIKREMLDGQLASWPNRMLPGIAAAGGVILPAIIFAVLNHDNPAKLRGWAVPSATDIAFALGVLSLLGSRAPSSLKVFLATLAILDDLAAVVIIAIFYTAEISMPYLGAAFITAAVLFVMNRMDVVKLLPYLISAVILWFFVFNSGVHATVAGVVAALMIPLKPAPGRPDDMTSPLHKLEHALAKPVAFIVVPIFGFANAGISFKGLEASVLGDTLTLGILLGLFLGKQFGVFGAAWLAIKTGLAEKPMGASWVQLYGVAILCGIGFTMSIFIGLLSFPSDLMQTETKIGVLSGSALSAICGYLLLRAARPDQSAANPLWKADESPEAKNFGRFLCVFHFASYIASTYCTERLQAASSLLRRSSLEFALPGLLKRLIPRRFRAVETEIPVVRLHGAIMTGGTSLRPTLSLASTAGILEKAFADKHAPAVAISINSPGGAPVQSRLIYRRIRDLAAEHQKKVFVFVEDVAASGGYMIALAGDEIIADPSSIVGSIGVVSASFGFPELLKKIGVERRVYTAGSNKVTLDPFQPEKAEDIERLKALQLEIHATFIDMVKERRAGKLGDNPDLFSGLFWTGTTAASLGLIDGLGDMLSFLRKTYGDKVKLKLIQPQRGLLGRKLPGIGMDSGSVEPAQIAAHLGDGLLCVAEEKAIWARYGL

SEQ ID NO: 23 - DNA, 1233 bp, Streptomyces coelicolor A3(2)
  CDS (1)..(1233): transl_table=11
atgtctgctccctcgcggatcactgctgccctgcgctcagacgcggtcggtggctctctgctgatcggcgccgccgtcatcgcgctcatctgggcgaactcgcccctgtcccactcctacgaggccctgcgctcgttcaccttcggcccttccgccctccacctgaacctgtccgtggagacgtgggcggcggacgggctgctggcggtgttcttcttcatcgtcggcaacgagctgaagcaggaactcgtccacggcgagctgcgcgacccacgccgcgcggccctgccgatcgccgccgcgctcggcggcgtcgccgtgcccgccctggtcttcctggccttcaccctcggctccggcggggaggcggccggaggctggggcatcccgatggctaccggcatcgccttcgccgtggccgtcctggcggtggtcggccggcacctgccgacgccgctgcggaccttcctgctcaccctggccaccgtggacgacatgtccgcggtcctggtcatcgccgtcgcctgcaccagcggcatcaacttcaccgccctcgccttggctgccgtcggcctggccgtgttcggctacttgcagaacgggtccgggcgggcggtggcccgggtgcgcgcgatggtcccggcgtggctgctgttcgtgccgctggccgcggtcgtctgggcgctgatgcacgcctgcggtgtacacgcgaccatcgccggggtcgtcatgggcctgttgatgcgcacccgcccccagggggcggagcgggtgtcgccctcgcaccgcgcggaggaggtcttgcgcccgttctccgccgggatcgcactgccgctcttcgcgctgatgtcagccggcgtctccctggccggggcgggaggcttcgtcacctccgccatcacctggaacgtcctcgccggcctgctcgtgggcaaggtcgtcgggatcttcggcggcacctggccgaccagccgcctcaccagcgcccacctcaacccgctgctcggctgggccgacatcgccgggatcgccgtgctgggcgggatcggcttcacggtctccctgccgatcgccgaactctcctccaccagccaggcgcatctcaccgacgccaagggcgccatcctcctggcctccaccaccgcggccctgctcgccgcgctcctgctgggccgccgcagccgccaccaccagcgcctcgcccgccaggccgcgcagcaggcgacgacgtga

SEQ ID NO: 24 - protein, 410 aa, Streptomyces coelicolor A3(2)
MSAPSRITAALRSDAVGGSLLIGAAVIALIWANSPLSHSYEALRSFTFGPSALHLNLSVETWAADGLLAVFFFIVGNELKQELVHGELRDPRRAALPIAAALGGVAVPALVFLAFTLGSGGEAAGGWGIPMATGIAFAVAVLAVVGRHLPTPLRTFLLTLATVDDMSAVLVIAVACTSGINFTALALAAVGLAVFGYLQNGSGRAVARVRAMVPAWLLFVPLAAVVWALMHACGVHATIAGVVMGLLMRTRPQGAERVSPSHRAEEVLRPFSAGIALPLFALMSAGVSLAGAGGFVTSAITWNVLAGLLVGKVVGIFGGTWPTSRLTSAHLNPLLGWADIAGIAVLGGIGFTVSLPIAELSSTSQAHLTDAKGAILLASTTAALLAALLLGRRSRHHQRLARQAAQQATT

SEQ ID NO: 25 - DNA, 1890 bp, Streptomyces coelicolor A3(2)
  CDS (1)..(1890): transl_table=11
gtgataatcggcgtcgtgagtggtcaggagcccgaggaggcgacgccgagcctctctgctcggagcacggtgcgatggcggaccttcgtgcggaccgagacgagcagcgcggtgttcctgcttgccgcggtcgctgccgccctggtctgggccaacgtgggtccgcactcctacgaggcggtgtggcaggccaggttcaccgtgggattcgacacgcgccgcctctcgctcaccgtgcacgagtggatcaactcggggctgatgagcctcttcttcttcgtggtgggcctggaggcgcggcgggacttcgacatgggagagctgcgcgaccgccgctggctgctgctcagcgcgatcgccggtctgggcagcatgatcgtcccggccctgatcttcgtcctcgtcaacgcggggcgggagtcggtgcacggctggggcaccgccatgtccaccgacaccgcgttcgcgctgggcgtcctggcggtgttcgggtctcggctgcccgcgtcgttgcgcgcgttcctgctgtcggtctccgtcgtcgacgatctggtcgcactgctggtgatcgccgtcttctacagcgacgagatccggctgcccgccctgctggtcgccgtctgcgcgctgctggcgatcgccctgctgcgcctggccggcgtgcgcggagccctgtactgcgcggtgctgtcggtggtggtgtgggtggcgctgcacgaggccggggtcgacccggtcgtcgcgggtctggccgtgggcgtcctggtggcggcctaccccgcgccccgcggcgatctggagcaggcgagccggctgttccggctctttcgcgagcagccgacgcccgagctgcaccgcagcgccgtccaggggctggatgcggcgatctcgccgaacgagcggctggagcagcggttcctgccgtgggtgagtttcggcatcgtcccgctgttcgccctggccaacgccggtatcgaactctccggcccggccctcgccgacgccttcacctcccccgtcaccctgggcatcgtcctcggctgcgtggtgggcaaggtgatcggcacggtcgggtcgatggcggccgcccgcctgctgtcgggtgggcggctgcggccgaacgtgggctgggggtcggtgaccgtcggcggcgcgatcgccgggtcggcgttcaccgtgtcgttgctcatcgcgtccctggcgttcgacggcgcggaactcgaggaggcgcggatcggcatcctggtcacgctggtcggcgcgttcctgaccagttgggcggtgaccgcggtgatcggcctgctgccggagcgacgcagggcgcgggcgctgctgggcgacgtcgacccactgacggacctggccgtgcccgtcgacaggcggcacgaccgcatccgcgggcccgagagcgcggtggtgacggtggtggagtacggggacttcgagtgtccgtactgtggacaggccgaacccgtggtgcgggacctcctcggccaggagagcgacgtccgctatgtgtggcggcacttgccgctgagggacgttcatcccagggcccagctggccgcggaggcgtccgaggccgctgcccggcaggaccgcttctgggagatgcacgacctgctgctggaacggcagaacgccctcgccgcgccggacctgctgcgctacgccggtgagctcggtctggacgtcgagcggttccggcaggacctcagggaccatctcggtgcccggcgggtggcggaggacgtcgactcggcggatctgagcagggtgtccgggacgcccacgttcttcatcaacggacgccgccatcacggcgcctatgacatcgccgcgctcacacgggcggtggagctggcgcggcagcgtgcgctgaccgggtga

SEQ ID NO: 26 - protein, 629 aa, Streptomyces coelicolor A3(2)
MIIGVVSGQEPEEATPSLSARSTVRWRTFVRTETSSAVFLLAAVAAALVWANVGPHSYEAVWQARFTVGFDTRRLSLTVHEWINSGLMSLFFFVVGLEARRDFDMGELRDRRWLLLSAIAGLGSMIVPALIFVLVNAGRESVHGWGTAMSTDTAFALGVLAVFGSRLPASLRAFLLSVSVVDDLVALLVIAVFYSDEIRLPALLVAVCALLAIALLRLAGVRGALYCAVLSVVVWVALHEAGVDPVVAGLAVGVLVAAYPAPRGDLEQASRLFRLFREQPTPELHRSAVQGLDAAISPNERLEQRFLPWVSFGIVPLFALANAGIELSGPALADAFTSPVTLGIVLGCVVGKVIGTVGSMAAARLLSGGRLRPNVGWGSVTVGGAIAGSAFTVSLLIASLAFDGAELEEARIGILVTLVGAFLTSWAVTAVIGLLPERRRARALLGDVDPLTDLAVPVDRRHDRIRGPESAVVTVVEYGDFECPYCGQAEPVVRDLLGQESDVRYVWRHLPLRDVHPRAQLAAEASEAAARQDRFWEMHDLLLERQNALAAPDLLRYAGELGLDVERFRQDLRDHLGARRVAEDVDSADLSRVSGTPTFFINGRRHHGAYDIAALTRAVELARQRALTG

SEQ ID NO: 27 - DNA, 1425 bp, Streptomyces coelicolor A3(2)
  CDS (1)..(1425): transl_table=11
gtgaccgcgccccgcaccccccgcaaagccttcggacggctgtccctgccggagcgcacctacctcgcggacgcgctgcgcaccgagaccgtcggcggcgtcctgctgctcgtcgccgcgatcgccgccctggtgtgggcgaacataccggcgctgcacgacagctacgagagcgtcagccacttccacttcggtcccgcggccctcggtctgaacctgtcggtcgcacactgggccgccgacgggcttctggcgatcttcttcttcgtcgccggcatcgaactcaaacgcgaactggtcgccggtgatctgaaggaccccaaggccgccgcgctcccggtggtggcggcgctgtgcggcatggtcgtaccggcggtcgtctacaccgtcaccagcaccgcgggcggcggctccctgtccggctgggccgtgccgaccgccaccgacatcgccttcgcgctcgccgtactcgccgtcatcggcacgtcgctgccgagcgcgctgcgcgccttcctgctgacgctcgccgtcgtcgacgacctgttcgccatcctgatcatcgcggtcttcttcaccgagaccctgaacttcgccgcgctgggcggcgcggtcgtcggcctcgcggtcttctggctgctgctgcgcaagggggtgcgcggctggtacgtgtacgtgccgctcggcctggtgatctgggccctcatgtacaacagcggcgtccacgccaccatcgccggcgtcgcgatgggcctgatgctgcgctgccaccggcgcgagggcgaggaccactcccccggcgagcacatcgaacacctggtgcgcccgctgtcggcgggcctggccgtgccgctgttcgcgctgttcagcgcgggtgtggccatcaccggcggggcgctggccgacgtgttcaccaagccggagaccctcggtgtcgtactcgggctcgtcgtcggcaagacgctgggcatcttcggcggcacctggctgacctcgcgcttcaccagggcttcgctcagcgacgacctccagtgggccgacgtgttcgcggtggcgaccctggccggcatcgggttcaccgtctcgctgctgatcggcgagctggccttcgaggacgacgcggcgatgacgagcgaggtcaaggccgccgtcctgaccggctcgctgatcgcggcggccctggccacggtgctgctgaagatacggaacgcgaagtaccgggggatggtcgcggaggaggagcgcgacgacgacctcagcggtgtccccgacatctacgaggaggacgaccccgcgtaccacctgcgggtggccgccatctacgagaagaaggccgccgagcaccgccggatcgccgaggagatggagtcggcgcggcttgccgaagtggcgggcggggcaggcgatgagggcgacggtccggcatga

SEQ ID NO: 28 - protein, 474 aa, Streptomyces coelicolor A3(2)
MTAPRTPRKAFGRLSLPERTYLADALRTETVGGVLLLVAAIAALVWANIPALHDSYESVSHFHFGPAALGLNLSVAHWAADGLLAIFFFVAGIELKRELVAGDLKDPKAAALPVVAALCGMVVPAVVYTVTSTAGGGSLSGWAVPTATDIAFALAVLAVIGTSLPSALRAFLLTLAVVDDLFAILIIAVFFTETLNFAALGGAVVGLAVFWLLLRKGVRGWYVYVPLGLVIWALMYNSGVHATIAGVAMGLMLRCHRREGEDHSPGEHIEHLVRPLSAGLAVPLFALFSAGVAITGGALADVFTKPETLGVVLGLVVGKTLGIFGGTWLTSRFTRASLSDDLQWADVFAVATLAGIGFTVSLLIGELAFEDDAAMTSEVKAAVLTGSLIAAALATVLLKIRNAKYRGMVAEEERDDDLSGVPDIYEEDDPAYHLRVAAIYEKKAAEHRRIAEEMESARLAEVAGGAGDEGDGPA

SEQ ID NO: 29 - DNA, 1185 bp, Yersinia pestis KIM
  CDS (1)..(1185): transl_table=11
gtgacaaatatcattcgtcaatttttacgccaagaggccgcaggtggcctgattctgattattgctgccgctatcgccttgttgatggcgaacagcgccctacaaggggtttatcaatcatttcttgatataccagtctcgataaaaatagcttcgctggatatcagtaaaccgttattactgtggattaacgatggtctaatggcggtgtttttcctgatgatcgggctggaagttaaacgtgagttgatggaaggctctttggcgggccgcgataaagcagttttccccgcgattgcggcattgggggggatgttagccccagcgctgatttacttactgttcaatggtgctgatgaggtgacccgccaagggtgggcgatcccggcagcgactgacattgcgtttgccttgggagtgatggcgctattaggtaaccgggtacccaccgggctgaaggtctttttactggcattagccattatcgatgaccttggtgtcattattattattgcgttgttctatacccagcaggtttcattacaatctttgggtattgctgcggctgctattgctttactggcgtatatgaactggcgtggtgtagggaaaacatcagcttatctgctggtcggcttggttttgtgggtctgtattcttaaatcgggtgtacatgcgactttggctggggtgattgttggctttatgatcccgctgcatacccaagaccaacgctctccttctgaatcgctggagcatggtttacatccgtgggttgcctatttaattttgccattgtttgcttttgccaatgcgggggtctctttacaaggcgtttctctttcagggctgacgtcactactgccaatggggattgcaaccggtctgtttatcggtaaaccgttgggaattttcacttttagttggctcgcggttaagttaggtattgctaaactacccgacgcaataaattttaagcaaatttttgcagtttcagtgttgtgtgggatcggctttactatgtcgatatttatcgcatcactggcatttgaaggcacagatatcgctctgacgacctattccaaactagggatattgctaggctctaccacagcggctgttgtgggttacagcttactgcgtttggttttacccgctcggcggaaggctgttaacgtaaggtaa

SEQ ID NO: 30 - protein, 394 aa, Yersinia pestis KIM
MTNIIRQFLRQEAAGGLILIIAAAIALLMANSALQGVYQSFLDIPVSIKIASLDISKPLLLWINDGLMAVFFLMIGLEVKRELMEGSLAGRDKAVFPAIAALGGMLAPALIYLLFNGADEVTRQGWAIPAATDIAFALGVMALLGNRVPTGLKVFLLALAIIDDLGVIIIIALFYTQQVSLQSLGIAAAAIALLAYMNWRGVGKTSAYLLVGLVLWVCILKSGVHATLAGVIVGFMIPLHTQDQRSPSESLEHGLHPWVAYLILPLFAFANAGVSLQGVSLSGLTSLLPMGIATGLFIGKPLGIFTFSWLAVKLGIAKLPDAINFKQIFAVSVLCGIGFTMSIFIASLAFEGTDIALTTYSKLGILLGSTTAAVVGYSLLRLVLPARRKAVNVR

SEQ ID NO: 31 - DNA, 1419 bp, Bifidobacterium longum NCC2705
  CDS (1)..(1419): transl_table=11
atggccacgaccgccggcgcgaagaagggactttggtccaccatcaggcgaatcgccgcctcagaccgtatttccggactcatcatgcttggcttcgcgctcaccggcctggtgctcgcgaatctgcccgccaccgcgcatgcgttcgagaccgtagcggaaacgcatctgttcatcccctacaccaatctcgacctgcctattggccactgggcccaggatggtctgcttaccatcttcttcctgaccgtgggcctcgaactgaagcaggaactcaccaccggctcgcttgccaatccgaaagcggccgccgtgccgatgctgtgcgcggtgggcggcatgatcgccccgcccatcctgttcctggccgtcacggcattgttctctcagatcgggcctggtgaacccggcacgctgattctgaccaccaccggcagcagcatcccgttctcggagatgtcgcacggctgggcagtgcccaccgccacggatatcgcgttctcgctggccgtgctcgccctgttcgccaaggccctgcccggttcgatccgcgcgttcctgatgacgcttgccaccgtcgacgacctgctggccattattctgatcgccgtattcttctcctcgattaacgcctggtattggttcatcggcatcgccgtatgcgccgccatctgggcatacctcgtacgactgaaaaaagtgccgtggatcgcggttggcatcgtcggtatcctcgcttggatcatgatgttcgaggcaggcgtgcaccccacactggccggcgtgctggttggcctgctgaccccctctcgtgaaatgcacggcgaactctcgccgcgtgccgaacgctatgccaacaagctccagccattctccgcactgctggccctgcccatcttcgccttgttcgccaccggcgtacacttcgagtcgatgagcccgctattgttggcctcgccgctggtcatcgcactgattgtggctttggtggtcggcaaacctctgggtatcatcaccaccgcatggctgtccacgcatgtgggcgggctcaagatggccaaggggctgcgtgtgcgcgacatgattcctgctgccgtcgcttgcggcattggcttcactgtgtccttcctcatcgcttcgctggcgtacaagaacgcggaactttccgctgaggcgcgcttcggcgtgctggtggcctccctgatcgccgccgcgatttccggtgtgctgctgagccgtcagtccaagcgattcgagaagaccgcagccgcagcagcggctgatgaggaggatgacgaatcgattgatggtgatggcatcgggcagccaagccacaccacagagcccaccacgcccacggaacaccccggcaccctcgccgacggcaccgccagtgtggaaatcgacttccgccactga

SEQ ID NO: 32 - protein, 472 aa, Bifidobacterium longum NCC2705
MATTAGAKKGLWSTIRRIAASDRISGLIMLGFALTGLVLANLPATAHAFETVAETHLFIPYTNLDLPIGHWAQDGLLTIFFLTVGLELKQELTTGSLANPKAAAVPMLCAVGGMIAPPILFLAVTALFSQIGPGEPGTLILTTTGSSIPFSEMSHGWAVPTATDIAFSLAVLALFAKALPGSIRAFLMTLATVDDLLAIILIAVFFSSINAWYWFIGIAVCAAIWAYLVRLKKVPWIAVGIVGILAWIMMFEAGVHPTLAGVLVGLLTPSREMHGELSPRAERYANKLQPFSALLALPIFALFATGVHFESMSPLLLASPLVIALIVALVVGKPLGIITTAWLSTHVGGLKMAKGLRVRDMIPAAVACGIGFTVSFLIASLAYKNAELSAEARFGVLVASLIAAAISGVLLSRQSKRFEKTAAAAAADEEDDESIDGDGIGQPSHTTEPTTPTEHPGTLADGTASVEIDFRH

SEQ ID NO: 33 - DNA, 1182 bp, Brucella suis 1330
  CDS (1)..(1182): transl_table=11
atgaatcatagcccgcaatccgctcgccccgtttccatcatgcgacgttttctggacagcgaagccgctggcggcataacgctcatggctgcagcggcgcttgccctcatcgttgcaaattcgccctttgcccagacctatttcgatgcgttgcatctatatatcggcccgctcagccttgcgcactggatcaacgatgcgctgatggcaatattctttttgctggtgggactggaaatcaagcgcgagatgctggacgggcagctcgcaagctggcccaaccgcatgttgccgggcattgcggcagcgggcggcgtcattttgcctgcaatcattttcgcggttctcaaccatgacaatccggccaagctgcgcggctgggcggtgccatcggcaaccgatatcgcctttgcgctcggcgtactgtcgcttctgggttcgcgcgcgccgtcaagcctcaaggtgtttctggcaacgcttgccattcttgacgaccttgccgccgtggtcatcatcgcaatcttctacacggctgaaatttccatgccctatctgggcgcggcctttatcaccgccgcggtcctctttgtcatgaaccgcatgggcgtggtgaagctcctgccttatctgatcagcgctgtgatcctctggttcttcgtcttcaattccggcgttcatgccacggttgccggtgttgtcgcagccctcatgatcccgctaaaacctgcacccggcagacccgacgacatgacctcgcccctgcacaagctggaacatgcactggccaagcccgttgccttcatcgtcgtgccgatcttcggctttgccaatgcgggcatttccttcaaggggcttgaggcttccgtcctgggcgacacgctgacactcggcatcctgctcggccttttcctcggcaagcagttcggcgtcttcggcgcggcctggctcgccatcaaaacggggcttgccgaaaagccgatgggcgcaagctgggttcagctttacggcgtcgccattctttgcggcatcggctttacgatgagcatcttcatcggccttctctccttcccgtccgacctcatgcagacggaaacgaagatcggtgtcctttccggctccgccctttcggccatttgcggctatctcctgttgcgggcggcggccagaccaaagcgcggctaa

SEQ ID NO: 34 - protein, 393 aa, Brucella suis 1330
MNHSPQSARPVSIMRRFLDSEAAGGITLMAAAALALIVANSPFAQTYFDALHLYIGPLSLAHWINDALMAIFFLLVGLEIKREMLDGQLASWPNRMLPGIAAAGGVILPAIIFAVLNHDNPAKLRGWAVPSATDIAFALGVLSLLGSRAPSSLKVFLATLAILDDLAAVVIIAIFYTAEISMPYLGAAFITAAVLFVMNRMGVVKLLPYLISAVILWFFVFNSGVHATVAGVVAALMIPLKPAPGRPDDMTSPLHKLEHALAKPVAFIVVPIFGFANAGISFKGLEASVLGDTLTLGILLGLFLGKQFGVFGAAWLAIKTGLAEKPMGASWVQLYGVAILCGIGFTMSIFIGLLSFPSDLMQTETKIGVLSGSALSAICGYLLLRAAARPKRG

SEQ ID NO: 35 - DNA, 1170 bp, Shewanella oneidensis MR-1
  CDS (1)..(1170): transl_table=11
atggaaaaagcaattagaaattttttgagccaagagtcggcaggtggcatcctcttattaattgccgtggcctttgccatgttaatggcgaattctcctctggctggattctatcaaggttttctcggtactgaagttcaagtacgagttggcgcgctcgatctgcataagccattgttgttgtggattaacgatggtttgatggcattgtttttcttgctgattggtttagaagttaaacgtgagctattggaaggggcactatcgagtgtggctcaggcctcattgccaaccttcgcagccattggtggcatgttagtgccagcgggtatttacctgttatttaactatggcgatcctatcacacaagcaggttgggcaatcccagctgcgacagatattgcttttgctttggggatcatggctttactgggtagccgcgtgcctgtggcgttaaaggttttcctgctggcgttagccatcattgacgatttaggcgttattgtgattatcgcgcttttctacagcagtgatctatcaaccgttagcttaattattgccagcattgcgattgttggtttggttgccttaaaccgcaagggcgtgacctcattagccccttatggagtactcggactaattctgtgggtggctgtacttaagtctggtgtgcatgccacattagcgggtgtcattattgctttctgtattcctctgcgagcaaaagatggcagttcgccttctgagcatttagagcatagtttgcatccttggagcactttcctgatcctgccagtgttcgccttcgccaatgctggggtcgctttaggaaacatgagtttagatacgctaatgtcccctgtaccagtggggattgcattgggactcatgctaggtaagccgattggtgtgatgttgtttagttttgtcgccgtcaaacttaagttagcacaattgcctgatggtattggttggaaacaaattgcgccagtggcagcgatgtgtggtatcggttttaccatgtcaatgtttattgcttcgttggcatttgagcaggcagaccctatgtttggtgatttagcacgcctaggcaccttaatgggctcaatttttgcggccttaatcgggtatttctggttatcaaaagtgttacctaaaaaaggagtataa

SEQ ID NO: 36 - protein, 389 aa, Shewanella oneidensis MR-1
MEKAIRNFLSQESAGGILLLIAVAFAMLMANSPLAGFYQGFLGTEVQVRVGALDLHKPLLLWINDGLMALFFLLIGLEVKRELLEGALSSVAQASLPTFAAIGGMLVPAGIYLLFNYGDPITQAGWAIPAATDIAFALGIMALLGSRVPVALKVFLLALAIIDDLGVIVIIALFYSSDLSTVSLIIASIAIVGLVALNRKGVTSLAPYGVLGLILWVAVLKSGVHATLAGVIIAFCIPLRAKDGSSPSEHLEHSLHPWSTFLILPVFAFANAGVALGNMSLDTLMSPVPVGIALGLMLGKPIGVMLFSFVAVKLKLAQLPDGIGWKQIAPVAAMCGIGFTMSMFIASLAFEQADPMFGDLARLGTLMGSIFAALIGYFWLSKVLPKKGV

SEQ ID NO: 37 - DNA, 1194 bp, Pseudomonas putida KT2440
  CDS (1)..(1194): transl_table=11
atggagggcctacagcccgtgcgtagcctgtttacccgtttcttccagctcgaagccgccagtggcctgctgttgatcgccgccgccgttctggccctgatcatcaacaactcgccactgtcctacctgtacggcggcttgctcgaggtacccgtcgccgtccaggtcggcgcgctgaacatcgccaagccattgctactgtggatcaacgacggcctgatggccctgttcttcctgctcatcggcctggaggtcaaacgcgaggtggtcgacggtcacctgtccaagccctcacaagtgattctgcctgccaccgcagccgtgggcggcatggtggtgccagcgctgatctactggttcatcaaccgtgacaaccctgcagccgtggcaggctgggcgatccctaccgccaccgacatcgccttcgccctcggcgtcctggccctgctcggcaagcgcgtaccagtgtcactgaagttgttcctgatgaccctggcgatcatcgacgacctgggtgcgatcattgtcatcgccctgttctactccggcaccctgtcgagtgtgtcgctgctgctggctgcggcctgtctgctggtgctggtggcgatgaaccggcttggcgtgatcaagcttggcccctacatgatcgttggcctgatcctgtgggtttgtgtgctcaagagtggcgtgcatgccaccttggccggtgtcgcgctggccttttgcatcccgctgcgtacacgcaatgctgaatcgtcgccgctgctggcgctggaacatgccctgcacccctgggtggcctatgccatcctgccaattttcgcctttgccaatgccggcgtttcgctggcaggcatgaccgtagacagcttcacccaccccgtgccgatgggcatcacgatcggcctgttgctgggcaagaccgtgggggttttcggcctgacctgggtggcggtcaagctgcgcctagccgcgctgcctgcgggcgctggttgggggcaaattctgggggtggcgatactctgcggcattggctttaccatgagcctgttcgtaggctcgctcgccttcgccccgggtagcagtgagtacgccggcatggaccgcatgggcattcttactggttcgttctttgctgcggtgatcggctacgccgtcaccgcaatggccagccgcaaaaccagcattgcctga

SEQ ID NO: 38 - protein, 397 aa, Pseudomonas putida KT2440
MEGLQPVRSLFTRFFQLEAASGLLLIAAAVLALIINNSPLSYLYGGLLEVPVAVQVGALNIAKPLLLWINDGLMALFFLLIGLEVKREVVDGHLSKPSQVILPATAAVGGMVVPALIYWFINRDNPAAVAGWAIPTATDIAFALGVLALLGKRVPVSLKLFLMTLAIIDDLGAIIVIALFYSGTLSSVSLLLAAACLLVLVAMNRLGVIKLGPYMIVGLILWVCVLKSGVHATLAGVALAFCIPLRTRNAESSPLLALEHALHPWVAYAILPIFAFANAGVSLAGMTVDSFTHPVPMGITIGLLLGKTVGVFGLTWVAVKLRLAALPAGAGWGQILGVAILCGIGFTMSLFVGSLAFAPGSSEYAGMDRMGILTGSFFAAVIGYAVTAMASRKTSIA

SEQ ID NO: 39 - DNA, 1362 bp, Pseudomonas putida KT2440
  CDS (1)..(1362): transl_table=11
atgcataaacaagaattacctcgcgcccagaaactggccgagcgcgccttcgccaaccttgaacgctttttgcacattgaagcggtcagcggcatcgttctgttgattgccgcagtcgctgccctgatctgggcgaattccccggctgccgacagttatgaagccctttggcataccccgttgacgttcggcgtgggctcgcatgtctattcgcagtccctgcatttctggatcaatgatggcctgatgaccatctttttcctggtcgtgggcatggagatccgccgcgagatccacgaaggtgcactgtccagcctgcgtcaagccacgcttcccatggcagccgctgtcggcggcgtagcggtacccgcactcctctacctgagttttggtcacgcgccagcagaccaacaaggttgggccgtgccaacggcgacggatatcgcctttgcggtgggcgtattggccctgctcggcaagtcgatcccgtccaacgtacgtgtattcctcctcgccctggcaatcatcgatgacatcatcgcagtcctgatcatcgcgttcttctactcaggcggccttgattacaccggcttcggcgttgcagtgatcggcctgctaatggtgatcgggcttcagaagatcggagtgggttcagcctacgcctatgtcattcccggtgcgatcgtctggctgggcatcttgttgaccggcgcccacccgaccctcgcaggcgtcgtgctgggcctgatgacacctgtcaccgcaatgccgatgcgtgagcgcccactggacgccattacccgcttcaccggcgaattgctggggcgcgccaaagcgcctgagcaagatgccagcgacctcatggacccgttgaaacgactgcgcctggcccagcgcgaactgctgccgccggtagtgcgcatgcaaggcaccctgcacccctgggtagccttcggcatcatgccggtgtttgccttggccaacgccggggtcagcctttcgggcgtcgacctgtccgcagaaggcccccagtgggtcatgatcgccgtcgctgtcgccctggttgcaggaaagcccttgggcatcgtcagcgtcagttggctgatggtccgcctgggctggtgcgtgcttcccgccgaggtcaactggcgtagcatcatgctggtcgggctgctggccggcatcggtttcaccatgtcgatcttcatcgccaacctcgcgttcgtcgaccctggctcacttggggccgcgaaactcggtgtgctatccgcgtcgttgatcgcagccgtgctggggttgacctggggggtgtggagcatgcgcagcgcagcgtctgctaccaaagccggttcgcccacctag

SEQ ID NO: 40 - protein, 453 aa, Pseudomonas putida KT2440
MHKQELPRAQKLAERAFANLERFLHIEAVSGIVLLIAAVAALIWANSPAADSYEALWHTPLTFGVGSHVYSQSLHFWINDGLMTIFFLVVGMEIRREIHEGALSSLRQATLPMAAAVGGVAVPALLYLSFGHAPADQQGWAVPTATDIAFAVGVLALLGKSIPSNVRVFLLALAIIDDIIAVLIIAFFYSGGLDYTGFGVAVIGLLMVIGLQKIGVGSAYAYVIPGAIVWLGILLTGAHPTLAGVVLGLMTPVTAMPMRERPLDAITRFTGELLGRAKAPEQDASDLMDPLKRLRLAQRELLPPVVRMQGTLHPWVAFGIMPVFALANAGVSLSGVDLSAEGPQWVMIAVAVALVAGKPLGIVSVSWLMVRLGWCVLPAEVNWRSIMLVGLLAGIGFTMSIFIANLAFVDPGSLGAAKLGVLSASLIAAVLGLTWGVWSMRSAASATKAGSPT

SEQ ID NO: 41 - DNA, 1344 bp, Vibrio vulnificus CMCP6
  CDS (1)..(1344): transl_table=11
atgactaaaagaaagaagagagcagccattaatctgacccggctaccaatagagtacattgattggttatctcgtcctatataccgttttattcatattgaatctgccgctggaattgtactgtttatttcaacgctcttagctgttttattggctaattcacatttaagtgaggagtttgctcgtttttggcagatttcgctagggatgacggttggtgatttagtttttgagcgttcattacacaaatgggtcaatgatgccggaatgaccctatttttctttcttattgccttggagcttaagcgtgagttagtgctaggtgaacttcgcaatccccaattagctctcctttccattgctgctgctcttggaggcatgtcgaccccgcctcttttttacttacttctacagtacggtgaatccggtcagcatggttgggggacggtcatggcaacggataccgcctttgtgatcggatgtcttgcactcttagggcgaagcattccaagcagtttgcggatattcatgttatcaatggccgtggtggatgatatcggtgcgatctttgttgtcgctattggttacggagaagcggttgactggctggtgttatcctatgcgttgttgggctttatgcttgtccgtgcgatggctttcttaggggtccgtagtcttgtactcttttctattgtcggcggagcaatatggttggttatcgatatgtctggtgttcatccaacaattacaggagtgattctcggcttactaacccccacgaataaatggatgagtaggcagcatctttttatcattatggaggctttagtgccatcttcacctagtcaacaatggagtggtgacaagagagaaggagagatcttaaaaaccgcagcggcggctgcacgagaaacgctttcacctgtagagcggctggaaatgttgcttcatccttgggtcgggtttgttgttttaccgttgtttgctcttgctaacgcgggagtttcattgaccagtgtaaacctaacgtctcctattacgctggctgtttttgtgggttttgtttttggtaaacctatcggtattgtcttgtttagttggattgctgtctggctagggatcgcgaaattgcctgaaaatttgaattggggaatggtatttgggggaggtatgttggctggtattggttttactatggcactattcatctcggaactagcgtataacccagaccaaataaatgctgcgaaattgggtatcttcatcgcgtccattacttcggctttaattggtttcctctgtttacggtatttcgcggctagagaaaaacagaagaggacttaa

SEQ ID NO: 42 - protein, 447 aa, Vibrio vulnificus CMCP6
MTKRKKRAAINLTRLPIEYIDWLSRPIYRFIHIESAAGIVLFISTLLAVLLANSHLSEEFARFWQISLGMTVGDLVFERSLHKWVNDAGMTLFFFLIALELKRELVLGELRNPQLALLSIAAALGGMSTPPLFYLLLQYGESGQHGWGTVMATDTAFVIGCLALLGRSIPSSLRIFMLSMAVVDDIGAIFVVAIGYGEAVDWLVLSYALLGFMLVRAMAFLGVRSLVLFSIVGGAIWLVIDMSGVHPTITGVILGLLTPTNKWMSRQHLFIIMEALVPSSPSQQWSGDKREGEILKTAAAAARETLSPVERLEMLLHPWVGFVVLPLFALANAGVSLTSVNLTSPITLAVFVGFVFGKPIGIVLFSWIAVWLGIAKLPENLNWGMVFGGGMLAGIGFTMALFISELAYNPDQINAAKLGIFIASITSALIGFLCLRYFAAREKQKRT

SEQ ID NO: 43 - DNA, 1158 bp, Tropheryma whipplei str. Twist
  CDS (1)..(1158): transl_table=11
atgagcattattagatctgagcgatattcggcaatttttcttctttgctcggcagcgctagcaattatatttgctaatgttcttgacccggacacatggcatgccgtgcacagcgctgtaagcgaataccacatctttggactgataaccccccatgacatagttgcagatttccttcttgcagttttcttctttgctgttgcaattgagctaaaacacgagcttgtaaagggcgagctgagtagcttttccaaagcaataatccctggggtgtgtgcagcaggtgggatactcgttccaatatctatttatttgtccgttgcaagtgttttgccaaacggatggcctgttccgacggccacagatgttgcattttctcttggcattttggctatttttggctcttcacttccttctaaggtgcgaatattcttattggctcttgctgtcttggatgatctggccggaatagtgataattgccacggcatttagcgtctcgataagttactggtggattattgttgcgtgcattacagttgggctttttgggttttgcagctataggctagccagatgcaagacctcaaagacatttctgatcatccctgcaatgttgctttgtgcgctcgcggcatgggtttctgtttaccagtccggtattcatgcgactatcgctggcgttatgcttggcatcatgctcaatcgtaaacagggtgcggctattgaacacgctcttgagccgtatataaacgggattattctgcccgcgtttgcttttcttgctgcaatggttcgggtaccacatttacctctggatgagataagtccggcgctatggggaattctgcttggtctgttatttggcaaactcctcggaataagcgtttttggcataatagccctgaagttcttcagaaaaaagagtatttcattcttcaacttgcttgtggtaagtgctcttggcggaattggatttacggtgtctttgctcatgaacgagctagcttttttgggaacccctgttcatgaacagggggttattgccgttttgattggttcgcttttgtctgccatattggcaattattctcatgaggtgttataaaggccgtaaatctaagtcattgccaggtacaaagggccgggtcagccattga

SEQ ID NO: 44 - protein, 385 aa, Tropheryma whipplei str. Twist
MSIIRSERYSAIFLLCSAALAIIFANVLDPDTWHAVHSAVSEYHIFGLITPHDIVADFLLAVFFFAVAIELKHELVKGELSSFSKAIIPGVCAAGGILVPISIYLSVASVLPNGWPVPTATDVAFSLGILAIFGSSLPSKVRIFLLALAVLDDLAGIVIIATAFSVSISYWWIIVACITVGLFGFCSYRLARCKTSKTFLIIPAMLLCALAAWVSVYQSGIHATIAGVMLGIMLNRKQGAAIEHALEPYINGIILPAFAFLAAMVRVPHLPLDEISPALWGILLGLLFGKLLGISVFGIIALKFFRKKSISFFNLLVVSALGGIGFTVSLLMNELAFLGTPVHEQGVIAVLIGSLLSAILAIILMRCYKGRKSKSLPGTKGRVSH

SEQ ID NO: 45 - DNA, 1158 bp, Tropheryma whipplei TW08/27
  CDS (1)..(1158): transl_table=11
atgagcattattagatctgagcgatattcggcaatttttcttctttgctcggcagcgctagcaattatatttgctaatgttcttgacccggacacatggcatgccgtgcacagcgctgtaagcgaataccacatctttggactgataaccccccatgacatagttgcagatttccttcttgcagttttcttctttgctgttgcaattgagctaaaacacgagcttgtaaagggcgagctgagtagcttttccaaagcaataatccctggggtgtgtgcagcaggtgggatactcgttccaatatctatttatttgtccgttgcaagtgttttgccaaacggatggcctgttccgacggccacagatgttgcattttctcttggcattttggctatttttggctcttcacttccttctaaggtgcgaatattcttattggctcttgctgtcttggatgatctggccggaatagtgataattgccacggcatttagcgtctcgataagttactggtggattattgttgcgtgcattacagttgggctttttgggttttgcagctataggctagccagatgcaagacctcaaagacatttctgatcatccctgcaatgttgctttgtgcgctcgcggcatgggtttctgtttaccagtccggtattcatgcgactatcgctggcgttatgcttggcatcatgctcaatcgtaaacagggtgcggctattgaacacgctcttgagccgtatataaacgggattattctgcccgcgtttgcttttcttgctgcaatggttcgggtaccacatttacctctggatgagataagtccggcgctatggggaattctgcttggtctgttatttggcaaactcctcggaataagcgtttttggcataatagccctgaagttcttcagaaaaaagagtatttcattcttcaacttgcttgtggtaagtgctcttggcggaattggatttacggtgtctttgctcatgaacgagctagcttttttgggaacccctgttcatgaacagggggttattgccgttttgattggttcgcttttgtctgccatattggcaattattctcatgaggtgttataaaggccgtaaatctaagtcattgccaggtagaaagggccgggtcagccattga

SEQ ID NO: 46 - protein, 385 aa, Tropheryma whipplei TW08/27
MSIIRSERYSAIFLLCSAALAIIFANVLDPDTWHAVHSAVSEYHIFGLITPHDIVADFLLAVFFFAVAIELKHELVKGELSSFSKAIIPGVCAAGGILVPISIYLSVASVLPNGWPVPTATDVAFSLGILAIFGSSLPSKVRIFLLALAVLDDLAGIVIIATAFSVSISYWWIIVACITVGLFGFCSYRLARCKTSKTFLIIPAMLLCALAAWVSVYQSGIHATIAGVMLGIMLNRKQGAAIEHALEPYINGIILPAFAFLAAMVRVPHLPLDEISPALWGILLGLLFGKLLGISVFGIIALKFFRKKSISFFNLLVVSALGGIGFTVSLLMNELAFLGTPVHEQGVIAVLIGSLLSAILAIILMRCYKGRKSKSLPGRKGRVSH

SEQ ID NO: 47 - DNA, 1179 bp, Pseudomonas syringae pv. tomato str. DC3000
  CDS (1)..(1179): transl_table=11
atgcacaaccccaccccccgtaccgaatccccgaacgcgctggcgttcatcaagcgctttttcgccgccgaagccgctggcggtctgattttgatggcggctgcactggctgccctgatcgtcgccaattcgccgttggctgacagctattttgcagcgctgcacaccgtgctcgccggcatgtcggtagagcactggatcaacgacggcctgatggcaatcttcttcatgctggtgggccttgagatcaaacgcgaaatgctggcaggccagcttgcgtcctggagtcagcgcgccttgccgggctttgcggcgctgggtggcatggtggtgccggcgttgatctacgtggcattcaactggggccagccagaaaccatcggcggttgggccatcccggctgcgaccgacatcgcctttgccctgggtgtgctttctctgctcggcaaacgcgtaccgttgtccctgaaaatcttcctgtcggcattggcgattctcgatgacctcggcgcggtattgatcatcgcgctgttctacaccagtgatctgtccatccccatgctgctggcggcgctgggctccatcgccgtactcgtggcgctgaaccgtctgggcgttaaaaagctgttgccgtacctgctcatcggcgcgctgctatggtttttcatgctccagtccggcattcacgccacccttgcaggtgtggccctggcgctgtgcattccgctcggcaaagctgatgaagaagccagctcgccactgcttcatctggaagagaaactgcacccgtgggtcgcttttgctgtggtaccgatcttcgggttcgccaatgcgggcgtgtcgctggccggtatcaccgtcgacaaactggtagacccggtgccgctgggcgtcgcgctggggttgttgatcggcaaacaggtcggcatcttcgcccttgcggcactggccatccgcgccggcctggcacgcttgcctgacggcagtaattggggtcagctttacggcgtcgcggcactgtgcgggatcggtttcaccatgagcctgttcatcggcgcactggccttcccgggcgcgccggcactggtggacgaggtcaaggtgggcgtgttgatcgggtcggtgttttcggcgttgttgggggtggtggtgttgcgcaggtttggggcgcgggggtga

SEQ ID NO: 48 - protein, 392 aa, Pseudomonas syringae pv. tomato str. DC3000
MHNPTPRTESPNALAFIKRFFAAEAAGGLILMAAALAALIVANSPLADSYFAALHTVLAGMSVEHWINDGLMAIFFMLVGLEIKREMLAGQLASWSQRALPGFAALGGMVVPALIYVAFNWGQPETIGGWAIPAATDIAFALGVLSLLGKRVPLSLKIFLSALAILDDLGAVLIIALFYTSDLSIPMLLAALGSIAVLVALNRLGVKKLLPYLLIGALLWFFMLQSGIHATLAGVALALCIPLGKADEEASSPLLHLEEKLHPWVAFAVVPIFGFANAGVSLAGITVDKLVDPVPLGVALGLLIGKQVGIFALAALAIRAGLARLPDGSNWGQLYGVAALCGIGFTMSLFIGALAFPGAPALVDEVKVGVLIGSVFSALLGVVVLRRFGARG

SEQ ID NO: 49 - DNA, 1176 bp, Pseudomonas syringae pv. tomato str. DC3000
  CDS (1)..(1176): transl_table=11
atgactcaagtcccaaaccgggaaacgccccgtggcgttgccattcttacccgttttctcgcctccgaatcagcgggcggcatcgtgctgatggccgcagcgctggccgcactgatcgtcgccaactcgcccttgtccgcgggctacttctcgacgctgcacagcgtctggctggggctgtcggtcgagttgtggatcaacgacgggctgatggcgatcttctttctgatggtcggtttggagatcaagcgcgaagtgctggccggtggcctggcaacctgggggcaacgcgccctgcccggctttgcagcccttggcggcatgctggtgcccgcgctgatctacatcgcgatcaactggggcaacccgcagaccctgagcggctgggcgatcccggcggccaccgacatcgccttcgccctcggcgtgctgtcgctgctgggcaatcgcgtgccgacctcgctaaaagtcttcctcgccgcgctggcgattctcgatgacctgggggctgtgaccatcatcgcgtttttctacagctccgggcttaatctgccgatgctggccgccgcgttcgtgaccctcgccgtgttggtcgcgctgaaccgcctgaacatccgtcgtctgctgccgtatttgctgctcggtgcgctgctgtggttcttcgtcctgcagtcgggcgtgcacgcgacgctggccggtgtcgcgctggcgctgtgtatcccgatgggcaagcccgaggaagaagcacgctcgccgctgctgttgctggaagaaaaaatgcattactgggtcgcgtttgccgtggtaccgatctttggctttgccaatgccggcgtatcgctttccggcattaccctggcaaacctgatcgacccggtgccgctgggcgttgcattgggcctgtttgtgggcaagcagatcggcgtgtttctcgccgcagtgctggccatccgcgcagggctcgccgtgctgccggagggcagcaactgggtgcagctgtacggcgtggcgatcctgtgtggcatcggcttcaccatgagcctgttcatcggcaacctggcattccccggctcgcagcacctgatcgacgaagtcaaagtcggtgtgctgatcggctcggggcttgcggcggttgccggcatagtgctgctgcgcagccgtttcagccggcactga

SEQ ID NO: 50 - protein, 391 aa, Pseudomonas syringae pv. tomato str. DC3000
MTQVPNRETPRGVAILTRFLASESAGGIVLMAAALAALIVANSPLSAGYFSTLHSVWLGLSVELWINDGLMAIFFLMVGLEIKREVLAGGLATWGQRALPGFAALGGMLVPALIYIAINWGNPQTLSGWAIPAATDIAFALGVLSLLGNRVPTSLKVFLAALAILDDLGAVTIIAFFYSSGLNLPMLAAAFVTLAVLVALNRLNIRRLLPYLLLGALLWFFVLQSGVHATLAGVALALCIPMGKPEEEARSPLLLLEEKMHYWVAFAVVPIFGFANAGVSLSGITLANLIDPVPLGVALGLFVGKQIGVFLAAVLAIRAGLAVLPEGSNWVQLYGVAILCGIGFTMSLFIGNLAFPGSQHLIDEVKVGVLIGSGLAAVAGIVLLRSRFSRH

SEQ ID NO: 51 - DNA, 1152 bp, Vibrio parahaemolyticus RIMD 2210633
  CDS (1)..(1152): transl_table=11
atgaacgatgtcatccgtgactttttcaaaatggaatccgcaggtggtattcttctcgtgattgcagcggcaatagcgatgaccattgcaaactcaccactgggcgaaacttatcaatctctactgcatacttatgtatttggtatgtctgtttctcactggatcaacgacggtctgatggctgtgttcttcctacttattggccttgaagtaaagcgcgagctgcttgaaggcgcgttaaaatcgaaagaaactgccatcttccctgcaattgctgcggtcggtggtatgttggctccggcacttatttacgttgcttttaatgcaaatgaccctgaagcgatctctggttgggcaattcctgcggcgacagacattgcatttgctctgggtatcatggcattacttggtaagcgcgtaccagtgagcctaaaagtatttttgttggctcttgcgatcattgacgacttaggtgttgtagtcatcattgctctgttctacaccggtgatctttcttcaatggcattgcttgtcggcttcgtcatgacaggtgtactgttcatgctgaacgcgaaagaagtcaccaagctaacaccgtacatgattgtaggtgcgattctgtggtttgctgtacttaagtctggtgttcacgcaacattggcaggtgttgtgatcggtttcgcgattccgctgaaaggaaagcagggcgaacactctccactgaaacacatggagcatgctcttcacccttatgtcgcatttggtattcttcctctgtttgcatttgcgaacgcaggtatctcgctagaaggcgtatcgatgtctggcctaacttcaatgctgcctctaggtattgcactaggtctattgattggtaagcctctaggtatcttcagctttagctgggcagctgtgaaactgggcgttgcgaagctaccagagggtataaacttcaagcatatcttcgcggtatcagtgttgtgtggtatcggttttacgatgtcgatctttatctcttcactggcgttcggtaacgtaagccctgagtttgatacatacgctcgattaggtattttgatgggctcaactactgcagcggtacttggttacgctctactgcatttctcattaccaaagaaagcacaagactaa

SEQ ID NO: 52 - protein, 383 aa, Vibrio parahaemolyticus RIMD 2210633
MNDVIRDFFKMESAGGILLVIAAAIAMTIANSPLGETYQSLLHTYVFGMSVSHWINDGLMAVFFLLIGLEVKRELLEGALKSKETAIFPAIAAVGGMLAPALIYVAFNANDPEAISGWAIPAATDIAFALGIMALLGKRVPVSLKVFLLALAIIDDLGVVVIIALFYTGDLSSMALLVGFVMTGVLFMLNAKEVTKLTPYMIVGAILWFAVLKSGVHATLAGVVIGFAIPLKGKQGEHSPLKHMEHALHPYVAFGILPLFAFANAGISLEGVSMSGLTSMLPLGIALGLLIGKPLGIFSFSWAAVKLGVAKLPEGINFKHIFAVSVLCGIGFTMSIFISSLAFGNVSPEFDTYARLGILMGSTTAAVLGYALLHFSLPKKAQD

SEQ ID NO: 53 - DNA, 1320 bp, Bacteroides thetaiotaomicron VPI-5482
  CDS (1)..(1320): transl_table=11
atgacaattttgcgtacaatgcgaaatttctcgtcaatgaatattgcggcgagtatccttttgtttgtagcggcaatagcggctgctatcatagccaattctccggttgctccggtttatcaggagttccttttgcatgaacttcatttgcagatcggtaattttaatctgctttcgcatggcggagagaatctgcggatgatcgagttcatcaatgacgggttgatgaccatctttttcttgctggtaggattggaaatcaaacgggagttgttggttggtgagctttcttccttccgcaaggcggcgcttccctttattgctgcctgtggcggtatgctgtttccggtgattgtttacatgtcaatctgtcctccgggcagtgcgggaagtcagggattggccattccaatggcaacggatattgctttttcgttaggggtattaagtctgttgggaagccgtgtgccgttgagcctgaagatatttctgacggcttttgcggtagttgatgatatcggaggtatccttgtaattgctcttttttatagttcgcatgtgtcgtatgggtatattttgatagccgcattgctttacgttttactttattttatagggaagcgtgggactaccaataagattttctttttagtgatcggtgtcgttatatggtatttatttttgcaatccggtattcatagtaccatttcgggagttattctggcgtttgttattccggcgaaaccccgtctagatgttggaaaatatatcgagcatattcgtcatacaattgcaggtttcccggtggtggaatcgggaagtatcgtattgactaatgagcagattgccaaactgaaagaggtcgaatctgcttccgaccgtgttatcagtcctctgcagtctttggaggataatttgcatggagctgtcaattatctgattcttccgttgtttgcctttgtcaatgcaggcgttgtctttagtggcggcggtgagttggtgggaagtgtagggatggcagtggcagcagggttgctgtttggtaaatttgcgggaatttatttctttacctggttggctataaagataaaacttactccaatgccgccgggcatgacttggaagaatctttccggtatagctctgttgggagggatcggttttacggtgtcgcttttcattgccaatctttcttttggtgcaaactaccctgttctgttgaatcaggctaagttcggagtgctatcggggactattctttccggattattaggatacattgtactcaggatagtattacctgtccgaaagcggaaataa

SEQ ID NO: 54 - protein, 439 aa, Bacteroides thetaiotaomicron VPI-5482
MTILRTMRNFSSMNIAASILLFVAAIAAAIIANSPVAPVYQEFLLHELHLQIGNFNLLSHGGENLRMIEFINDGLMTIFFLLVGLEIKRELLVGELSSFRKAALPFIAACGGMLFPVIVYMSICPPGSAGSQGLAIPMATDIAFSLGVLSLLGSRVPLSLKIFLTAFAVVDDIGGILVIALFYSSHVSYGYILIAALLYVLLYFIGKRGTTNKIFFLVIGVVIWYLFLQSGIHSTISGVILAFVIPAKPRLDVGKYIEHIRHTIAGFPVVESGSIVLTNEQIAKLKEVESASDRVISPLQSLEDNLHGAVNYLILPLFAFVNAGVVFSGGGELVGSVGMAVAAGLLFGKFAGIYFFTWLAIKIKLTPMPPGMTWKNLSGIALLGGIGFTVSLFIANLSFGANYPVLLNQAKFGVLSGTILSGLLGYIVLRIVLPVRKRK

SEQ ID NO: 55 - DNA, 1401 bp, Streptomyces avermitilis MA-4680
  CDS (1)..(1401): transl_table=11
gtggccgccccccgcaccagcacccgcaagttcctcggacggctctcgctgcccgagcggaacttcgtcgcggaggcgctgcgcaccgagaccgtcggcggcgtcctgctcctcctcgccgcgatcaccgcgctgatctgggcgaacgtacccgcgctgcaccacagctacgagagcgtcagccacttccacttcggccccgcccccctcggcctggacctctccgtccagcactgggccgccgacgggctgctcgcggtcttcttcttcgtcgccggcatcgaactcaagcgcgagctggtcgcaggggacctcaaggaccccaaggcggccgcgctccccgtggccgccgccctgtgcggcatggccgtacccgcgctcgtctacaccctcaccaacctcaccggtggcggctccctccgcggctgggcggtacccacggccaccgacatcgccttcgcgctggccgtcctcgcggtcatcgggacctcgctcccgtccgcgctgcgcgccttcctgctcaccctcgccgtcgtcgacgacctcttcgcgatcctgatcatcgcggtcttcttcaccgccgacctgaacttcgccgccctcgccggcgccgtgatcggcctcgccgtcttctggctgctgctgcgcaagggcgtacgcggctggtacgtgtacgtgccgctcgcgctcgtcatctgggggctgatgtacaacagcggcatccacgccaccatcgccggtgtggcgatgggactgatgctgcgctgccaccgccaccagggtgaggagcacgctcccggtgagcacatcgagcatcttgtacgccccctgtcggccggcctggccgtgcccctgttcgccctgttcagcgcgggtgtcgtgatctccgggggtgcgctcggggacgtgttcaccaggccggagaccctcggggtggtcctcgggctcgtcgtcggcaaggcgatcggcatcttcggcggaacgtggctgacggcccgcttcacccgcgcgtcgctcagcgacgacctcgcctggcccgacgtcttcgcggtggcgtcgctggccggcatcggcttcaccgtctccctgctcatcggcgaactcgcgttcgacggtgatccggtgctgaccgacgaggtcaaggccgccgtcctcaccggttcccttctggcggcgctgatcgcgacgacgctgctgaagctgcgcaacgccaagtaccgtgccctgtgcgaggacgaggagcgcgacgaggacagcgacggcatccccgacatctacgagcaggacaacccggcgtaccacctgcgcatggccgagatctacgagcgcaaggccgccgagcaccgaaggcttgccgaagtgacgggcggggcaggcgcggagaacgatggtccggcatga

SEQ ID NO: 56 - protein, 466 aa, Streptomyces avermitilis MA-4680
MAAPRTSTRKFLGRLSLPERNFVAEALRTETVGGVLLLLAAITALIWANVPALHHSYESVSHFHFGPAPLGLDLSVQHWAADGLLAVFFFVAGIELKRELVAGDLKDPKAAALPVAAALCGMAVPALVYTLTNLTGGGSLRGWAVPTATDIAFALAVLAVIGTSLPSALRAFLLTLAVVDDLFAILIIAVFFTADLNFAALAGAVIGLAVFWLLLRKGVRGWYVYVPLALVIWGLMYNSGIHATIAGVAMGLMLRCHRHQGEEHAPGEHIEHLVRPLSAGLAVPLFALFSAGVVISGGALGDVFTRPETLGVVLGLVVGKAIGIFGGTWLTARFTRASLSDDLAWPDVFAVASLAGIGFTVSLLIGELAFDGDPVLTDEVKAAVLTGSLLAALIATTLLKLRNAKYRALCEDEERDEDSDGIPDIYEQDNPAYHLRMAEIYERKAAEHRRLAEVTGGAGAENDGPA

SEQ ID NO: 57 - DNA, 1335 bp, Helicobacter hepaticus ATCC 51449
  CDS (1)..(1335): transl_table=11
atggcagcaaagcaaaatagaatttcggaagcattaagtagttttatccgcgcagaatcttttagtggtatttttttatttttttgcgcagtgagtgcaatgattgtggctaattcgcctttctctgatatttataaaaacttttgggaacaaccttttggtttcagctttgcagggggattttatggatttagtattcacgattggattaatgatgtattgatgtcaattttttttcttatggttgggcttgaaattaaacgcgaattgctttttggggatttatccggattccaaaaagcagcttttcctgttataggcgcagtaggtggtatgattgtgccaggtgttatttattatgtgctcaatatgaatactccctcttatcacggatttggaatccctatggctaccgatattgcctttgcgctcggtgtcatcttgcttcttggcaaacgtgttcctttggcacttaaagtatttcttgtaacacttgctgtggctgatgatttaggagcaattgttgttattgcagtattttatccttcgcctgaaggtttgcattttatatatttaggtgtagcagcagggcttttaatacttctcacaggtatcaatcatttaggggtgcgccatttaggagtgtatatagggattggtattttgttgtggttttgtgtgcaccatagcgggattcacgcaactattgcagctgtggcattagcgttttgtattcctgtaaagcccaaaattgagagcaaggaatttattcaagtcgttcaacagatgatagaaatttttgagagcaaagacaaagagcgtaaaaatattttacttgatacgcaacaaatgagtgcaattgatgaagcagggagagattttgcaaaggtccaaaatccacttttgcgtttagagcacgctttgcaacctctgtgtgcattcattattatgcccctttttgcttttgctaatgcaggcgtagatattcgtgcagaagtaaattttcacattgaccatattatgcttggggttatacttggacttgtagtaggcaaacctttgggtattttaagtttaacatttttatgtgagaaatgtaaaattgcttcacgtccagcaggagtgtcttggagtcatatttttggtgcaggaatgctcgcaggcattggctttacaatgtctatgtttgtctcaaatcttgcatttgatgctcctcaagcaagtgatgtgtcaaaaatagcaattttgcttgcttcaagcattgcaggtattgtgggttcattgtatttgataatcaattataaaatcaactctcgggcaaaagtcaaatcttaa

SEQ ID NO: 58 - protein, 444 aa, Helicobacter hepaticus ATCC 51449
MAAKQNRISEALSSFIRAESFSGIFLFFCAVSAMIVANSPFSDIYKNFWEQPFGFSFAGGFYGFSIHDWINDVLMSIFFLMVGLEIKRELLFGDLSGFQKAAFPVIGAVGGMIVPGVIYYVLNMNTPSYHGFGIPMATDIAFALGVILLLGKRVPLALKVFLVTLAVADDLGAIVVIAVFYPSPEGLHFIYLGVAAGLLILLTGINHLGVRHLGVYIGIGILLWFCVHHSGIHATIAAVALAFCIPVKPKIESKEFIQVVQQMIEIFESKDKERKNILLDTQQMSAIDEAGRDFAKVQNPLLRLEHALQPLCAFIIMPLFAFANAGVDIRAEVNFHIDHIMLGVILGLVVGKPLGILSLTFLCEKCKIASRPAGVSWSHIFGAGMLAGIGFTMSMFVSNLAFDAPQASDVSKIAILLASSIAGIVGSLYLIINYKINSRAKVKS

SEQ ID NO: 59 - DNA, 1323 bp, Rhodopirellula baltica SH 1
  CDS (1)..(1323): transl_table=11
atgaatcacatcgaaactagactcccgctaccgattcaacctattgatcggtggctacgtccgtttgcacgcttcttacacatcgaggcaaccagcgggctggtgctgattttgtgcacggtggtcgccctcgtcgcggccaactcttcttgggcagatagctatctagcgttttggcataccgatctgacgattgccgtcggtgacatcgtctttcatcactcactgcatcacgtcatcaacgatggattgatggcggtgtttttctttgtgattggtctggaagtcaaacgtgaactcgcccatgggtcgctatcggatttgaaacaggccactctgccgattgccgcggcgatcggtgggatgatcgtgccggccacgctttatctatccatgcagtacggccagcccggggtgcagggatggggcattccaatggcgactgacatcgccttcgtcgtgggatgcctggcgatccttggttctcgcgtaccgcacagccttcgagtgcttctgctttcgctcgccatcgtggatgacattggcgcaatattggtgatcgcaatcggctacaccgaatcgctggacggtcgctacttgtttctcgcagcggtcgcggtcggcgcagtccatttcctttcgcgaatcggagtgcgtcgtttcccaccgtacgtgatcgtcggcgttctcgcttggattgcgctccacgaatctggcattcacgcgacactgatcggcgtgatcctcggactgatgactcctgccacgccgacattggtgcccgagcgttttcgcgaatacttgcacgaaaaggagcacgaatttcaaccgaaggagtggagtcggcggctacaccgcgctgaggtggttcgagaagttcagcagctcacgcgagaaacagtttcaccgctggagtacttggaggtaacactgcacccttggaccgcctatgtgatcatgcccgtcttcgcgctcgcgaatgcgggagtgttgattgaaccggccaacctgagtgactccgttgcaatcgcggtcgtgatcggtctggtcgtcggcaagccacttggaattgcgctgttcagttggttggtgattcgattgggcgtggcacgtttgccgagcggtttgaactggccaattttgatgtcgggaagtttccttgccggtatcggattcacgatggcattgttcatcgacgggttggcattcggagccgatgggctcgatactgccaagactggcgtgctggtcgggtccgcaatcagcgcaatcgctgggatgggactgctgctgtggactctgcccaaaccaactcgtcaatga

SEQ ID NO: 60 - protein, 440 aa, Rhodopirellula baltica SH 1
MNHIETRLPLPIQPIDRWLRPFARFLHIEATSGLVLILCTVVALVAANSSWADSYLAFWHTDLTIAVGDIVFHHSLHHVINDGLMAVFFFVIGLEVKRELAHGSLSDLKQATLPIAAAIGGMIVPATLYLSMQYGQPGVQGWGIPMATDIAFVVGCLAILGSRVPHSLRVLLLSLAIVDDIGAILVIAIGYTESLDGRYLFLAAVAVGAVHFLSRIGVRRFPPYVIVGVLAWIALHESGIHATLIGVILGLMTPATPTLVPERFREYLHEKEHEFQPKEWSRRLHRAEVVREVQQLTRETVSPLEYLEVTLHPWTAYVIMPVFALANAGVLIEPANLSDSVAIAVVIGLVVGKPLGIALFSWLVIRLGVARLPSGLNWPILMSGSFLAGIGFTMALFIDGLAFGADGLDTAKTGVLVGSAISAIAGMGLLLWTLPKPTRQ

SEQ ID NO: 61 - DNA, 1191 bp, Wigglesworthia glossinidia endosymbiont of Glossina brevipalpis
  CDS (1)..(1191): transl_table=11
atgaaaaaattttttatttgtaaatcaaaattttttaaaaatccaacttttagtggattattattaattttattttgttttttagctatatttataagtaatacaaatttctggaaaacatataattacatcataaattatcctttaattaaaattaatacgcacgataaaaatttttcattaactaacattgttaatgatattttgatgacatttttttttctagaaataggtattgagatcaagcacgagatgttagtaggatcgttaaaaaataaatctagagcaattttgccaggaatagctgcaataggaggaatgattttccctgcattaatatataattttataacgaaagaagatagctctatctcttcaggatgggcaattacagtagctactgatatagcttttgccgttggcgttttaaaaattttaggacattctattcctcacagtttgctaattttccttctttctttagctatttttgatgatataggagcaatattaattattgcgtttttctatagcaatcatattgatcaatatatgatattgttatctacattagttatattaacaatattatcaattaattatttaagagtaacttgtatatatatatatattatttttggaatattattatgggaatcaatattcctatcaggaatacattctactatatctggagttatattaggaatattgatgcctcactcttcttatttatccagtagtaaatatgaaaaatcgatggcttttcttaagaagagtttaagttttttaaacaaatattttattttacctatttttgctttttttaattctggaattaatttttccaattttgaaaatctttcctcttcacttttgccttttggcattttttttggattagttcttggaaagcctattggagtatttctattttcttatttatcagtaaaatttaaattgtctaaattaccagttggaatttcttttaaagaaattgcaggaatttcatttttatgcggcatagggtttactatgtctatttttatttctaatttagcttttcaaaatattaatgaaaaaattatatatattgcaaaatttagtatattaatttcatctatagtatctagcgtaattggatttttgtttttatattttttatataaaaaaattaaattaaaaaattaa

SEQ ID NO: 62 - protein, 396 aa, Wigglesworthia glossinidia endosymbiont of Glossina brevipalpis
MKKFFICKSKFFKNPTFSGLLLILFCFLAIFISNTNFWKTYNYIINYPLIKINTHDKNFSLTNIVNDILMTFFFLEIGIEIKHEMLVGSLKNKSRAILPGIAAIGGMIFPALIYNFITKEDSSISSGWAITVATDIAFAVGVLKILGHSIPHSLLIFLLSLAIFDDIGAILIIAFFYSNHIDQYMILLSTLVILTILSINYLRVTCIYIYIIFGILLWESIFLSGIHSTISGVILGILMPHSSYLSSSKYEKSMAFLKKSLSFLNKYFILPIFAFFNSGINFSNFENLSSSLLPFGIFFGLVLGKPIGVFLFSYLSVKFKLSKLPVGISFKEIAGISFLCGIGFTMSIFISNLAFQNINEKIIYIAKFSILISSIVSSVIGFLFLYFLYKKIKLKN

SEQ ID NO: 63 - DNA, 1185 bp, Haemophilus ducreyi 35000HP
  CDS (1)..(1185): transl_table=11
atgatcgagaaaattcagaaatttctaaaattagaagccgcgggcggcattttactgttaattgctgcattattagccatgctatgtgcaaattctgtatttagcccatattatttcgaatttttacaaacacaagtcgctgtaaaattaggcgcttttagtattgataaaccgctattaatgtggattaacgatggctttatggcggtcttttttattctagtcggtatggaagtaaaacgtgagctgttagaaggttcattatcgagctatcaaaaagcgattttccctgcttttgctgcaattggtggtatggttgtaccggcccttatttattggtttattaaccgtgattatccagaatatcagcaaggttgggcaattccaatggcaacagatattgcctttgccttagggattgtggcgttattaagtaaacaagttcctgcgacattaaaggtctttttacttgcattagcaattattgacgatattggcgctattatcgtgattgcattattcttttctaatgagttaagtatgctagcacttatcattgctagcattgctattatgattttaattacaatgaatcgttacaaagtaaccggtatcattcattacgtgattgtaggcacaattctatgggcttctgtcttaaaatcgggcgtacacgcgacacttgcgggggtaattatcggcttttgtattccattacgcggtaaaaaaggcgaaactccgttacacgatttagaacatacgcttgcgccttggtgtgctttcgctattttgcctttattcgctttttcaaatgcgggcgtctctctagccggaatgagtttagctaaattaacgtctcccttaccgttgggcattacattaggtttattaattggtaaaccggttggcgtcttctctttctgctatctagctgtacgagcgggcttagccaaactgccagaaggtatcaactttaagcaagtgtttgcgatagcggtattatgtggtattggttttacgatgtctgtttttattgcgggattatcatttggtgaagaacacccagatgaaacgattcttgcattatcgaggttaggcattttaattggaaccagtattgcggcgattgttggttatattttgctaaaaaaaaccacaaataaaccgcttgtacaagcgggctaa

SEQ ID NO: 64 - protein, 394 aa, Haemophilus ducreyi 35000HP
MIEKIQKFLKLEAAGGILLLIAALLAMLCANSVFSPYYFEFLQTQVAVKLGAFSIDKPLLMWINDGFMAVFFILVGMEVKRELLEGSLSSYQKAIFPAFAAIGGMVVPALIYWFINRDYPEYQQGWAIPMATDIAFALGIVALLSKQVPATLKVFLLALAIIDDIGAIIVIALFFSNELSMLALIIASIAIMILITMNRYKVTGIIHYVIVGTILWASVLKSGVHATLAGVIIGFCIPLRGKKGETPLHDLEHTLAPWCAFAILPLFAFSNAGVSLAGMSLAKLTSPLPLGITLGLLIGKPVGVFSFCYLAVRAGLAKLPEGINFKQVFAIAVLCGIGFTMSVFIAGLSFGEEHPDETILALSRLGILIGTSIAAIVGYILLKKTTNKPLVQAG

SEQ ID NO: 65 - DNA, 1197 bp, Bordetella bronchiseptica RB50
  CDS (1)..(1197): transl_table=11
gtgcccacgactcctacccgcgctccatccctcctgcaggctttcctgcgctccgaagccctgggcggctatgtgctgatgatcgccgccgtcctggccctgatcgtggccaattcgccgctggcgccagcctatttccagttgctgggcaccaagctgggctatgcatcggaagccttcaccctcaaggagtcggtgctgcactggatcaacgacggcctgatggcggtgttcttcctgctggtcggcctggaaatcaagcgcgagatgctcgacggccagttgcggggcgtgtcgcgcatcgtgctgcccggcgtggcggcggccggcggcatgctgatgccggccctcgtctatctcctggtcaaccagggcgacccggcggggctgcgcggctgggccatcccggcggccaccgatatcgccttcgcgctcggcatcctggcgctgctgggcagccgcgttcccacgtcgctgaagatcttcctgaccgccctggccattctcgatgacctgggcgccatcgccatcatcgcggtgttctataccgccgagctcaatacctccgcgctggccgcggccggcggcttgctggcggcgctgtgcgtgctgaaccgcctgcgcgtgctgcgcctggcgccctatctgctggtgggcgcgctgctgtggtatttcgtcctgaaatccggcgtgcacgccacgctggccggggtggcgctggcgctggccattccgctgcgccgccaggatccgcgccagccgggcgccgagcattcgcccctgcatgcgctggagcacgccctgcaccgtcccgtggccctgctgatcgttcctgttttcggattcgccaacgccggcgtatcgttcgacggcatgggcatcgacagcctgaccgcgcccatcccgctgggcatcgcactgggcctgttcctgggcaagcagctgggcgtgttcggctttgcctggctggccatccggaccgggctggccagcatgccgcgccatgcctcgttcgcgcagctctatggcgttgcgctgctgtgcggcatcggtttcaccatgagcctgttcatcggcgcgctggccttcgacgacgcggccaccatcgacgccaccaagatcggcgtgctgaccggctcgctggtgtcggccgtgctgggctacgcgctgctgcgcgtgctgccgccggccgactga

SEQ ID NO: 66 - protein, 398 aa, Bordetella bronchiseptica RB50
MPTTPTRAPSLLQAFLRSEALGGYVLMIAAVLALIVANSPLAPAYFQLLGTKLGYASEAFTLKESVLHWINDGLMAVFFLLVGLEIKREMLDGQLRGVSRIVLPGVAAAGGMLMPALVYLLVNQGDPAGLRGWAIPAATDIAFALGILALLGSRVPTSLKIFLTALAILDDLGAIAIIAVFYTAELNTSALAAAGGLLAALCVLNRLRVLRLAPYLLVGALLWYFVLKSGVHATLAGVALALAIPLRRQDPRQPGAEHSPLHALEHALHRPVALLIVPVFGFANAGVSFDGMGIDSLTAPIPLGIALGLFLGKQLGVFGFAWLAIRTGLASMPRHASFAQLYGVALLCGIGFTMSLFIGALAFDDAATIDATKIGVLTGSLVSAVLGYALLRVLPPAD

SEQ ID NO: 67 - DNA, 1359 bp, Porphyromonas gingivalis W83
  CDS (1)..(1359): transl_table=11
atgaaacagacttttcgctttatcaaaccaattgaacggattactcacctgaagccgaatgctacgatgatgttgttcttggcttcggtgttggcagtcatcatggctaatagttcgttgagtactatctatcatgaaattttagagtaccctatcaatcttacgatcggaggtcatgaggtcttttctcatcatggagagaccatgaccttgctccagtttgtgaatgatgtgctgatggtcattttcttccttgctgtcggtttggagatcaagcaggagattttggtcggcgaattgtcttctttcaagaaagctatgctccccattgtaggagccataggagggatgatcgtccctgtccttttcttcctgctggttgttcatgaaggccctggtgcaagaggtgctgccatccctatgtctacggatatagcttttgccttggcggccttggctgttttgggaagtcgggttccggcaagcctcaaggtattcctgacggctttggctgttgccgacgatataggtggtattatcgttattgcgctcttctatagttcccatatcaacatcgggatgttggccattgccttcggtatcctattcatcatgtatttgatggggcgtatgcatgtgagcaacttagggctttacttcgtctgtactttctttgtttggctctttttcctacagagcggtatccataccacaatagccggtgtgctggcagctttcatgattccggcccgtcctggactacatgccaagaatcttcgtgccgagatgcgttcccttttcgaggcaatgcccaatgacaagatacgacaatcaggtagctctctgatcttgagccataaccaaatcaacgtaatcaactccatgcgtaagattgcgcgtaaggctataagtcctatgcagctcatggaagagtatctcagcccgatagtaggctacttcgtcttgcctctctttgcctttgccaatgctggcatcacgctcggaggagtcacggcagatgccttgtggggcgtgccgatggctgtattcttgggcttgtttgtcggcaaacctttgggtatttactttttcacctatggttttgtcaagatgaggctctgcccttggcctgaaggaatgagccgcctcaacctgatggcagtctccttatttggaggtatcggttttactgtttccctctttatcgctaccctttcttacgccggagccgagcatttgctcttcctcaacgaggccaagctcggtatcttcgttgcttcgattttcgctgctctggtcggtatcgttacattgcgatatgagctgaatctggaaagcgccaaggcgcaaaagagttga

SEQ ID NO: 68 - protein, 452 aa, Porphyromonas gingivalis W83
MKQTFRFIKPIERITHLKPNATMMLFLASVLAVIMANSSLSTIYHEILEYPINLTIGGHEVFSHHGETMTLLQFVNDVLMVIFFLAVGLEIKQEILVGELSSFKKAMLPIVGAIGGMIVPVLFFLLVVHEGPGARGAAIPMSTDIAFALAALAVLGSRVPASLKVFLTALAVADDIGGIIVIALFYSSHINIGMLAIAFGILFIMYLMGRMHVSNLGLYFVCTFFVWLFFLQSGIHTTIAGVLAAFMIPARPGLHAKNLRAEMRSLFEAMPNDKIRQSGSSLILSHNQINVINSMRKIARKAISPMQLMEEYLSPIVGYFVLPLFAFANAGITLGGVTADALWGVPMAVFLGLFVGKPLGIYFFTYGFVKMRLCPWPEGMSRLNLMAVSLFGGIGFTVSLFIATLSYAGAEHLLFLNEAKLGIFVASIFAALVGIVTLRYELNLESAKAQKS

SEQ ID NO: 69 - DNA, 1359 bp, Wolinella succinogenes DSM 1740
  CDS (1)..(1359): transl_table=11
atggcagagaatcaagattacgcttcgggaaatggtggcatcaaagcgctacttctcaacttcatccacagtcagtcctttagtgggattttcctcttcttttgtgctgtagtcgcgatgattagcgccaactcggcattgagcgagagctactttcatctctggcatacagagatcgggtttttcatcggtgagacctttattggcatgagtctccatcactggatcaatgatgttcttatgtctttcttcttcttgatggtggggctagagatcaagcgcgaattgctctttggggagcttgcaggtattaagcgcgctgcttttcctgctattgccgctttgggtgggatgatcgttcccgcgattgtttatacgctctttaactttggcaccgattcggcgcatggctttggtattcctatggctaccgatattgcctttgccttgggtgtgcttctcctcctgggagacaaagtctctttggcgctcaaagtctttcttgtctctttggcggtagtggatgacctaggcgcggtggtagtgattgctattttttacaccgaagaccttcaaacgctttggcttctctattctgtcgtgattttagggcttcttattggacttaacaaaatgggtgtgcgatcgctcttcccctatgcgattcttggagtgttgctctggattaccgtgcataactgtggaattcacgccacaatcgctgctgtggcgctggccttcacgattcctgtgaagccaaaaattgagagtgagaactttgcccaagaggctaaagagttattggagcgattcttgagccatgacaaagagcgtgccaatcttcttttagcgagcgagcaggtgcatagcgtcgagttgctcagcaagcactctaagagcgttcaaagtccgctagtgagacttgagcatgccctccatccttggagcgcctacttcattatgcccgtctttgcttttgccaacgcgggtgtggccatcagtagtaatattcattttgatattgatggggtgttgccaggaatcatgcttggccttattgtgggtaaacctgtgggaatcctcggactcacctatttagccgagaagatgggaattgccacccgaccagaaggggtcatgtggattgatattttgggggcaggaatgcttgcagggattggtttcaccatgtctatttttatcaccaacctcgccttcaccaaccctgaagccaccgatgtggctaaaatcgccatcctctctgcttcattgtttgcaggagctttgggttatttcttcatttcgattcgatgccgcttcaaaaagaaaaaagaggcttgctgcacgatcaaaagctaa

SEQ ID NO: 70 - protein, 452 aa, Wolinella succinogenes DSM 1740
MAENQDYASGNGGIKALLLNFIHSQSFSGIFLFFCAVVAMISANSALSESYFHLWHTEIGFFIGETFIGMSLHHWINDVLMSFFFLMVGLEIKRELLFGELAGIKRAAFPAIAALGGMIVPAIVYTLFNFGTDSAHGFGIPMATDIAFALGVLLLLGDKVSLALKVFLVSLAVVDDLGAVVVIAIFYTEDLQTLWLLYSVVILGLLIGLNKMGVRSLFPYAILGVLLWITVHNCGIHATIAAVALAFTIPVKPKIESENFAQEAKELLERFLSHDKERANLLLASEQVHSVELLSKHSKSVQSPLVRLEHALHPWSAYFIMPVFAFANAGVAISSNIHFDIDGVLPGIMLGLIVGKPVGILGLTYLAEKMGIATRPEGVMWIDILGAGMLAGIGFTMSIFITNLAFTNPEATDVAKIAILSASLFAGALGYFFISIRCRFKKKKEACCTIKS

SEQ ID NO: 71 - DNA, 1167 bp, Photorhabdus luminescens subsp. laumondii TTO1
  CDS (1)..(1167): transl_table=11
gtgacagcaattattcgtcaattcctgaaattagaagcggctggagggcttcttcttatcatcactgccattattgcgttgataatggcaaactcgccattacagggtatttatcagcaatttcttaatatttcggtggcagtacaattcgctgcactggagatcaataagcctttgttgttgtggattaatgacggcttgatggcggtcttctttttgattgttggtttggaagtaaaacgggaactgttggaaggctctttggcagggcgtgataaggcactatttccggtgatagcggcgataggtggtatggtcgctccggcactaatatatctactctttaatggcaatgatgagtttacccgtcagggttgggctattcctgcggcaaccgatattgcttttgccttgggtgtgatggcgctattgtctaagcgagtaccaacagaactcaaggttttcttgttggcacttgcgattattgatgatctgggcgttatcgtgattatcgctctgttttataccaaaacggtttctcttgtggcgcttggattgtcagcggcaatgattgctttgctggtttggatgaattggcgcggtgtcgaaaaaacatcggcttatttggctgttggcgctatcctttgggtttgcatcttgaaatcgggtgttcatgcaacactcgccggcgtcattgttggttttctgattcctctgcgtggccagaatggtcattcaccatctgaattacttgagcacggtttgcatccttgggtggcgtatcttattttgccattatttgcatttgccaatgcaggtgtagccctgaatggcgttacgttaaatggtttgaccgatatattgccgttaggtattgctgtggctctgtttcttggtaaaccattgggcatttttctttttagctatatttctattcagatcggatttgctaaattgccacagcagattaatcttaaacagatatttgcggtttctgttctttgtggaattggctttactatgtctatctttatttcaggattggcttttgaaggggtggatgaatctttcagtgtctattcccgtcttggcattctgatgggttcaaccatcgctgcgtttatggggtatggcttgttacgaatggtcttaccaaagaaaaagtga

SEQ ID NO: 72 - protein, 388 aa, Photorhabdus luminescens subsp. laumondii TTO1
MTAIIRQFLKLEAAGGLLLIITAIIALIMANSPLQGIYQQFLNISVAVQFAALEINKPLLLWINDGLMAVFFLIVGLEVKRELLEGSLAGRDKALFPVIAAIGGMVAPALIYLLFNGNDEFTRQGWAIPAATDIAFALGVMALLSKRVPTELKVFLLALAIIDDLGVIVIIALFYTKTVSLVALGLSAAMIALLVWMNWRGVEKTSAYLAVGAILWVCILKSGVHATLAGVIVGFLIPLRGQNGHSPSELLEHGLHPWVAYLILPLFAFANAGVALNGVTLNGLTDILPLGIAVALFLGKPLGIFLFSYISIQIGFAKLPQQINLKQIFAVSVLCGIGFTMSIFISGLAFEGVDESFSVYSRLGILMGSTIAAFMGYGLLRMVLPKKK

SEQ ID NO: 73 - DNA, 1170 bp, Vibrio vulnificus YJ016
  CDS (1)..(1170): transl_table=11
atgaacgatgtcattcgtgactttttcaaaatggaatctgctggtggcattttgcttgtgatcgctgccgcgatcgcaatggtgattgcaaactcgcctctcaatgaaagttaccaagcggttttgcatacttatgtatttggcatgtcagtatctcactggatcaatgatggcctaatggcaattttcttcttgctgatcggcttggaagtcaagcgtgaattattagaaggcgcattgaaatcgcgtgaaacggcgatcttcccagcgattgccgcagtgggtggtatgttggcgccagcgcttatctatgttgctttcaatggaaacgatccggaagcgattaaaggttgggcaattccagcagcgaccgatattgcatttgctttgggtatcatggcgctgctaggtaagcgcgttcctgtcagtcttaaagtgttccttttggcattagcgatcatcgatgacttgggcgtcgttgtgattattgcgctcttctacagtggcgatttgtcgacacttgcgttgacggttggattcgcgatgacgggtgtcttgttcatgctaaacgctaagaatgtgacaaagttaatttggtatatcgttgtcggctttatcttgtgggttgcggtactgaaatccggagtccatgcaaccttggcaggtgtcgtgattggtttctctatcccattacagggtaaaaaaggtgagcactctccgttgaaacacatggaacatgcgcttcacccatatgttgcctttgctatcttacctgtctttgcctttgctaacgctggtatctcgcttgaaggggtgtctctttctggcttgacttccatgttgccgctgggtatcgcgctaggactattggttggtaaaccactgggtatctttacgtttagctgggcagcggtgaagtttggtgtggctaaattgcctgaaggtgtgaacttcaagcatatctttgccgtgtcagtgctctgtggtatcggtttcaccatgtcgatctttatttcatcgctggctttcggtggtgcaaatccagacttcgatacttattcacgactaggtatcttaatgggatcgacgacagcggcagtgcttggttatttcttactgcatgtatcgctgccaaagacagcggcggaaagtgagaaagcaatcagctaa

SEQ ID NO: 74 - protein, 389 aa, Vibrio vulnificus YJ016
MNDVIRDFFKMESAGGILLVIAAAIAMVIANSPLNESYQAVLHTYVFGMSVSHWINDGLMAIFFLLIGLEVKRELLEGALKSRETAIFPAIAAVGGMLAPALIYVAFNGNDPEAIKGWAIPAATDIAFALGIMALLGKRVPVSLKVFLLALAIIDDLGVVVIIALFYSGDLSTLALTVGFAMTGVLFMLNAKNVTKLIWYIVVGFILWVAVLKSGVHATLAGVVIGFSIPLQGKKGEHSPLKHMEHALHPYVAFAILPVFAFANAGISLEGVSLSGLTSMLPLGIALGLLVGKPLGIFTFSWAAVKFGVAKLPEGVNFKHIFAVSVLCGIGFTMSIFISSLAFGGANPDFDTYSRLGILMGSTTAAVLGYFLLHVSLPKTAAESEKAIS

SEQ ID NO: 75 - DNA, 1149 bp, Geobacter sulfurreducens PCA
  CDS (1)..(1149): transl_table=11
ttgagaaaaaggatcaacctgctgcgtgaattttcggtgcctctgatcgccggtgtcgtggtggccctgctctgggccaacctcgacccggccggctaccactctttcatagaacagcccttcttcggtgggatgagcttccacttcgtggtgaatgagctgttcatggtcctttttttcggaatagcggcagttgaaataactcaaagctgcctgccgggcggcgatctgaatccgttgagaaaggcggtcaatccgcttctggcgactcttggaggggtcgtcggcccggtgctcgtctacctgggactcaacgccatcatcggtggtccggaactgacgcgcggctggggtatccccaccgccaccgatatcgcgctggcatggctggtagcccggctcgtcttcggagccgggcatcccgcggtatcgtttctgcttctgctggcggtagcggacgatgccataggacttgccatcattgccgtattctatcccgacccgaaccacccgaccgagccgatctggcttttcctgacggtcgccggcatggttgtcgcctatatcctcaggagcctgaaatcaagaagctactggccctatgtagtcgtgggaggcggacttgcatggaccggcctgttcaaggcccacttgcacccagccctcgccctcgtcttcatcattcccttcctgccgcatccaagccgggaaacggctcacctgttcgaggccgatccgcgcgacacctcgaccctggcccggttcgagcatgattggaagatcgtcgtcgacttcggtctcttcatgttcggccttgccaatgcgggagtcggtttttcgtccgtgggggcggcaacctggctcgtgctggcatcgctcgtaatcggcaagacgctcggcatctttgccatgggatacgttggcagggccctcggattccccctgccgcagcaggtcggcgccaaggaactggccatgacggggctggtggcgggcatcggcctgaccgtggccctgtttgtggccggtgtggcatttgttgaaccggacatccaggggtcggccaaaatgggggcccttttgtcgggaggtgtctccattgtggcgatcatgctcggaagagcgctgaacgtgagacgaatcccctga

SEQ ID NO: 76 - protein, 382 aa, Geobacter sulfurreducens PCA
MRKRINLLREFSVPLIAGVVVALLWANLDPAGYHSFIEQPFFGGMSFHFVVNELFMVLFFGIAAVEITQSCLPGGDLNPLRKAVNPLLATLGGVVGPVLVYLGLNAIIGGPELTRGWGIPTATDIALAWLVARLVFGAGHPAVSFLLLLAVADDAIGLAIIAVFYPDPNHPTEPIWLFLTVAGMVVAYILRSLKSRSYWPYVVVGGGLAWTGLFKAHLHPALALVFIIPFLPHPSRETAHLFEADPRDTSTLARFEHDWKIVVDFGLFMFGLANAGVGFSSVGAATWLVLASLVIGKTLGIFAMGYVGRALGFPLPQQVGAKELAMTGLVAGIGLTVALFVAGVAFVEPDIQGSAKMGALLSGGVSIVAIMLGRALNVRRIP

SEQ ID NO: 77 - DNA, 1377 bp, Bartonella quintana str. Toulouse
  CDS (1)..(1377): transl_table=11
atgtctgctttatcctcaaatcgcttgccaaatcgcgcctctcttgtcacaaatcgagcgttctctgctcttgagggttttctccatgttgaggctttcagtggtattgttcttttattagccgctgctgccgcactcatttttgctaactctcaatatgcttctgtttatgaatcgctctggcatactcctcttggctttaattttggccattttacactctcatgggatttacatttctgggttaatgacgctcttatgaccgttttctttctcgtagcgggaatggaaattcggcgtgagattcatgaaggcgctctcgctgattttaaacaagcaattttgccaatagtttcagcaataggtggagtttgttttcctgcacttatttatcttagcttcaactttaacagtgaacatacgcatggttgggctgtgccaacagcaacagatattgcctttgcgctaggtattcttgctcttcttggaaaaaaaatccctgctaaccttcatgttattctcttatcactagcaattattgatgatattatcgctgttcttatcattgctttcttctattcaacgaacattgatcctagtggtttagccattgcaatagcaggtattgctctggtgttattttttcaatggattgggctcgcatcggcatggctttacattctacctggtgcaatcatctggtggggtttaatgatcacaggcgttcatccatcactgacgggcgtgattttaggtatgatgactccggtttttcctacgcgtactcttgtagctccgcttacaatactgagcaacgccatgcaaatccttcaagaaaaaaatataaaaacagacctccatcatatctcaactgcattaaaaaaaatgcgcaaaggacaacgcgatatgattgcaccagtaatacgtgttcagaagacattgcatccatgggttgcatacggtgtgatgccaatttttgcctttgcaaatgctggtgttagttttgcaaattttgatctttcttctcatgaatcattcttggttgttcttagtgttgtaataggtctctttattggtaaacctttgggtattattactgctagttatctggcagtaaaatcagggctatgccgattgcctccccatatgacatggacaggcattctgttgattggatttttagcaggaattggttttacaatgtctatcttcgtttcaatgctcgctttcaaagatattgtcctgttggattctgcaaaaattggtgttctctgtggatctggtttatctgctcttgccggccttggatatgggctcatttatatcaaacgcaataaaaataaaaaagtacttcataatctcaatggaatcaaatag

SEQ ID NO: 78 - protein, 458 aa, Bartonella quintana str. Toulouse
MSALSSNRLPNRASLVTNRAFSALEGFLHVEAFSGIVLLLAAAAALIFANSQYASVYESLWHTPLGFNFGHFTLSWDLHFWVNDALMTVFFLVAGMEIRREIHEGALADFKQAILPIVSAIGGVCFPALIYLSFNFNSEHTHGWAVPTATDIAFALGILALLGKKIPANLHVILLSLAIIDDIIAVLIIAFFYSTNIDPSGLAIAIAGIALVLFFQWIGLASAWLYILPGAIIWWGLMITGVHPSLTGVILGMMTPVFPTRTLVAPLTILSNAMQILQEKNIKTDLHHISTALKKMRKGQRDMIAPVIRVQKTLHPWVAYGVMPIFAFANAGVSFANFDLSSHESFLVVLSVVIGLFIGKPLGIITASYLAVKSGLCRLPPHMTWTGILLIGFLAGIGFTMSIFVSMLAFKDIVLLDSAKIGVLCGSGLSALAGLGYGLIYIKRNKNKKVLHNLNGIK

SEQ ID NO: 79 - DNA, 1362 bp, Bartonella henselae str. Houston-1
  CDS (1)..(1362): transl_table=11
atgtctgatttatcttcaaatcgcctgcctaatcgcgcttctcgtgttacgaatcaagcgctttcagctattgagcgttttctccatatcgaagccctcagcggtgttgtccttttattagccgctgctgctgcactcatgtttgccaattctgaatatgcttctctttacgaatccttctggcatacacctcttggctttaactttggccattttaccctttcatgggatttacatttctgggttaacgatgctctcatggctgttttctttctcgtagctggaatggaaatccgacgtgaaattcatgaaggtgctctagccgattttaaacaagcaattttaccaattgttgcagcaataggtggagtttgtcttcctgcaattatttatttcagcttcaactttaacagtggacagatacatggttgggctgtgccaacagcaacagatattgcctttgcgctaggtattcttgctcttcttggaaaaaaaattccttctaaccttcatatcattctcttatccttagcaattattgatgatattatagctgttcttattattgcttttttctattcaacgaacattgatcctagtggtctcgttattgctatagcaggtattgctttagtattattttttcaatggattggattcgcatcagcatggctttacattctacctggtgcaatcatttggtggggcttaatggtaacgggcattcatccatcacttgcaggtgtgattttaggtatgatgactccagttcttccgactcgtacgcttatagctccgcttacaatactgagcaacgctatgcaaattcttcaagaaaaaaatacaaaaacagacctgcatcatatctcaactgcactgaaaaaaatgcgtaaaggacaacgtgatataattgcgccagtaacacgtattcaaaaagcattgcatccatgggtcgcatatggtgtgatgccaattttcgcttttgcaaatgctggtgttagttttgcaaattttgatctttcttctgataaatctttcttgattgttcttggtgttgtaattggtctctttattggtaaacctcttggtattataactgcaagttatctagcagtaaaatcagggctgtgtcgattgcctcctcaaatgacatgggcaggaattttgttgattgggtttttagcaggaattggctttacaatgtctatctttgtttcaatgcttgcttttaaagatattgttctgcttgattctgcaaaaattggtgttctttgtggatctggtttatctgctcttatcgggcttggatatggcctcatttatatcaaacgcaataaaaaagcgtctcatagttctcaataa

SEQ ID NO: 80 - protein, 453 aa, Bartonella henselae str. Houston-1
MSDLSSNRLPNRASRVTNQALSAIERFLHIEALSGVVLLLAAAAALMFANSEYASLYESFWHTPLGFNFGHFTLSWDLHFWVNDALMAVFFLVAGMEIRREIHEGALADFKQAILPIVAAIGGVCLPAIIYFSFNFNSGQIHGWAVPTATDIAFALGILALLGKKIPSNLHIILLSLAIIDDIIAVLIIAFFYSTNIDPSGLVIAIAGIALVLFFQWIGFASAWLYILPGAIIWWGLMVTGIHPSLAGVILGMMTPVLPTRTLIAPLTILSNAMQILQEKNTKTDLHHISTALKKMRKGQRDIIAPVTRIQKALHPWVAYGVMPIFAFANAGVSFANFDLSSDKSFLIVLGVVIGLFIGKPLGIITASYLAVKSGLCRLPPQMTWAGILLIGFLAGIGFTMSIFVSMLAFKDIVLLDSAKIGVLCGSGLSALIGLGYGLIYIKRNKKASHSSQ

SEQ ID NO: 81 - DNA, 1182 bp, Erwinia carotovora subsp. atroseptica SCRI1043
  CDS (1)..(1182): transl_table=11
atgataacaatgattcgtcgctttattcgattagatgcggcagcgggtatgatgctaatgatggcaacggttttggcgatcgcacttgctaattggtctgttactgctgcgggctatcaacaatttctgatgattccagtggaaatgcggtttggcgcactggagatcaataagaacctgctgctgtggattaatgatgccctgatggctattttcttcctgctgattggtctggaagtgaaacgcgagttagtcgaaggcacgttagctagccgccaacaggcgatgctgccacttgcagccgcagtaggaggaatggtttttcccgccttgctctttctgctttttaacgcgaatgatgacgtgacacgtgctgggtgggctattcccgccgcgacagatatcgcgtttgccattggtgtgttgacgttattaggcaagcgtgttcccgcagggttaaaagtcttcctgttagcgttggcgatcattgacgatctgggcgcgatcctgattatcgccctgttttatacacagcaggtcttttggcctgcgctggccggtgcggtgctggcgattgctgtcctggcctatatgaacaagctgcaggttggcaaaacgtccgcctatttattagtggggggcgtcttgtgggtctgcattctgaaatgtggcgttcatgcaacgttggccggggtcattgtcggattttttattcccctgcgtacgtccgacggggaaccttctccggcaacctcgctggaacatggcttacaaacgtgggtcgcgtttcttattgttccgctgtttgccttcgccaacgcaggcattgtattgcaaggaattgtgctggaaaaactgttttcccctttgagccttggcatcgccgctgggctgttgcttggtaaaccactgggcattaccttgttcagttggctaacgatacgattgggctatgcgcgcctgcctgttggtgtgcactttaaccagatcgtggcagtctctgtgctgtgtggtatcggttttaccatgtcgatattcattacgctgctggcattctctggtggtgatgcggagttgattacctatgccaagctgggaatcttgctggcatcagggctggcagcattacttggctatctggcattacgcggagtattgccagcgctggacaaggcggtttag

SEQ ID NO: 82 - protein, 393 aa, Erwinia carotovora subsp. atroseptica SCRI1043
MITMIRRFIRLDAAAGMMLMMATVLAIALANWSVTAAGYQQFLMIPVEMRFGALEINKNLLLWINDALMAIFFLLIGLEVKRELVEGTLASRQQAMLPLAAAVGGMVFPALLFLLFNANDDVTRAGWAIPAATDIAFAIGVLTLLGKRVPAGLKVFLLALAIIDDLGAILIIALFYTQQVFWPALAGAVLAIAVLAYMNKLQVGKTSAYLLVGGVLWVCILKCGVHATLAGVIVGFFIPLRTSDGEPSPATSLEHGLQTWVAFLIVPLFAFANAGIVLQGIVLEKLFSPLSLGIAAGLLLGKPLGITLFSWLTIRLGYARLPVGVHFNQIVAVSVLCGIGFTMSIFITLLAFSGGDAELITYAKLGILLASGLAALLGYLALRGVLPALDKAV

SEQ ID NO: 83 - DNA, 1263 bp, Propionibacterium acnes KPA171202
  CDS (1)..(1263): transl_table=11
atgacggattcccgcaagaacaagcggcctcgcaagagcatccttcgaccggtgacaggcccgaacgcccttcacctgtctgacatcttccgaaacgaaaccactggcggcatgctgatgctggcagccacggtcgcagccctcttgtgggccaatcttggtcatcactcgtaccatttcttccgtgaattggctcttggtccgctcacaatcgagcagtgggcggctgacggccttctaacggtcttcttcttcatcgccggcctcgaactcaagcgagaattcgttgagggatcgctatcgcgacctgctgacgcattggtccccatcgttgccgcagtatgcggaatggtgttcccggctggcatctacacgctattcaacgtgttagccagcgacggacacccggcaggttgggccatcccgatggcaaccgacatcgccttcgccttggcggtactagccatcgtcggagcaggcttgccacaggccgtacgagccttcctgctcaccttggccattgccgatgacctcggttcgatcatcgtgatcgcagtctttttctccacgggcctggacatctggtggctcgccggtgcgatcgcctgcatcggcctctggggagtgatgcaacacttccacgtcgataacggctggtggtacgtgccgatcttcatcgtcgggtggtggtgcatgctgcgctccggcgtccacgccaccatcgccggcgtcgcttttggcctcctgacccgcactgaggaagacgtcctggacgaccccgttgatcgctggcagcacaaagtggagccatggtcggccggtgtcgtcgtcccctttttcgctctcatgagcgccggtgtccacgtcagcgggaaaaccttcctggccctatggactcacccaatctcgctgggtatcgtctgcgggctcattcttggaaaggtcatcggcatcaccctcggatcctgtctcaccgcccgattcacctcggctgagctgggtcgcggtgttgtatggcgcgacatcatcgcggtagctgtgttggcgggcatcggatttaccgtctcaatgctcatgaccgatctatccttcccaaagaaccacgaattcgcggacgaggccaaggcatccgtgctgatggcatccttcttggcggccatccttggtggtgccatgctgcaccatcgcggcaaaagtcacgccatgcgccagaccaagcattcccacgaggttccggttgcagccggtacctgcaacgactaa

SEQ ID NO: 84 - protein, 420 aa, Propionibacterium acnes KPA171202
MTDSRKNKRPRKSILRPVTGPNALHLSDIFRNETTGGMLMLAATVAALLWANLGHHSYHFFRELALGPLTIEQWAADGLLTVFFFIAGLELKREFVEGSLSRPADALVPIVAAVCGMVFPAGIYTLFNVLASDGHPAGWAIPMATDIAFALAVLAIVGAGLPQAVRAFLLTLAIADDLGSIIVIAVFFSTGLDIWWLAGAIACIGLWGVMQHFHVDNGWWYVPIFIVGWWCMLRSGVHATIAGVAFGLLTRTEEDVLDDPVDRWQHKVEPWSAGVVVPFFALMSAGVHVSGKTFLALWTHPISLGIVCGLILGKVIGITLGSCLTARFTSAELGRGVVWRDIIAVAVLAGIGFTVSMLMTDLSFPKNHEFADEAKASVLMASFLAAILGGAMLHHRGKSHAMRQTKHSHEVPVAAGTCND

SEQ ID NO: 85 - DNA, 1197 bp, Desulfotalea psychrophila LSv54
  CDS (1)..(1197): transl_table=11
atgggaacacaaaaagaaaaaaaatccgtcttcgctctattaaagagcaactccataggcggcatacttcttatgcttgcaaccgctcttgcccttatcatggcaaactccccaggccactacctctacagtatgctgatcaccactccggtggaggtacgcttcgggccactggaaattgccaagccacttctgctatggataaacgatggactcatggcaggtttcttttttctggtgggtttagaacttaaaagagagatatttgaaggaggtctctcccagcggagtaatattattctcccggccatcggtgccctgggaggaatggtggtaccctcctgtatctaccttgccttcaactatcaggatcccgttgccctaaggggctgggccattcctgccgccacagatatcgcctttgcccttggtatcctctctcttcttggttcacgggtgcccacaagcctcaagatactacttaccacgcttgccatctttgatgatattggagccattcttatcattgcctgtttttacaccaatgatatctatcttcccggcctcctgatcgcccttctctgtatgctcatcctctttattgtcaacagatgcaaggtggagcgcaccactgtttatatattcatcggctcaatcatgtggattgccatgctcaaatcaggtgtacacgcaacccttgctggcgtaatccttgccatgttcatccccatgtattctcggaaacaccctgggcagtcgcctctgaaaaaccttgaacacgacctgcaaggcaccgcaaccttcattattctacccatttttgcctttgcaaattcaggcatcaacctcaccaatataagcatggattttttcacccatgccgtgccaatgggtattgccctgggtctctttataggtaaacccctgggaattatttcttttctctgggtgggggtgcaactccgcctcaccaaactccccgttgatcttaactggtctacggttacaggcatgtcagctctggcaggaataggattcaccatgagtctcttcgtgggttccctggcctttgatcaggctatcacaggactcatatttgatgaacgactgggaattattatgggttcacttttctccggactgcttggctatctgctcttaaataaaaccctgccaggggacaagcatgagatgtga

SEQ ID NO: 86 - protein, 398 aa, Desulfotalea psychrophila LSv54
MGTQKEKKSVFALLKSNSIGGILLMLATALALIMANSPGHYLYSMLITTPVEVRFGPLEIAKPLLLWINDGLMAGFFFLVGLELKREIFEGGLSQRSNIILPAIGALGGMVVPSCIYLAFNYQDPVALRGWAIPAATDIAFALGILSLLGSRVPTSLKILLTTLAIFDDIGAILIIACFYTNDIYLPGLLIALLCMLILFIVNRCKVERTTVYIFIGSIMWIAMLKSGVHATLAGVILAMFIPMYSRKHPGQSPLKNLEHDLQGTATFIILPIFAFANSGINLTNISMDFFTHAVPMGIALGLFIGKPLGIISFLWVGVQLRLTKLPVDLNWSTVTGMSALAGIGFTMSLFVGSLAFDQAITGLIFDERLGIIMGSLFSGLLGYLLLNKTLPGDKHEM

SEQ ID NO: 87 - DNA, 1185 bp, Yersinia pseudotuberculosis IP 32953
  CDS (1)..(1185): transl_table=11
gtgacaaatatcattcgtcaatttttacgccaagaggccgcaggtggcctgattctgattattgctgccgctatcgccttgttgatggcgaacagcgccctacaaggggtttatcaatcatttcttgatataccagtctcgataaaaatagcttcgctggatatcagtaaaccgttattactgtggattaacgatggtctaatggcggtgtttttcctgatggtcgggctggaagttaaacgtgagttgatggaaggctctttggcgggccgcgataaagcagttttccccgcgattgcggcattgggggggatgttagccccagcgctgatttacttactgttcaatggtgctgatgaggtgacccgccaagggtgggcgatcccggcagcgactgacattgcgtttgccttgggagtgatggcgctattaggtaaccgggtacccaccgggctgaaggtctttttactggcattagccattatcgatgaccttggtgtcattattattattgcgttgttctatacccagcaggtttcattacaatctttgggtattgctgcggctgctattgctttactggcgtatatgaactggcgtggtgtagggaaaacatcagcttatctgctggtcggcttggttttgtgggtctgtattcttaaatcgggtgtacatgcgactttggctggggtgattgttggctttatgatcccgctgcatacccaagaccaacgctctccttctgaatcgctggagcatggtttacatccgtgggttgcctatttaattttgccattgtttgcttttgccaatgcgggggtctctttacaaggcgtttctctttcagggctgacgtcactactgccaatggggattgcaaccggtctgtttatcggtaaaccgttgggaattttcacttttagttggctcgcggttaagttaggtattgctaaactacccgacgcaataaattttaagcaaatttttgcagtttcagtgttgtgtgggatcggctttactatgtcgatatttatcgcatcactggcatttgaaggcacagatatcgctctgacgacctattccaaactagggatattgctaggctctaccacagcggctgttgtgggttacagcttactgcgtttggttttacccgctcggcggaaggctgttaacgtaaggtaa

SEQ ID NO: 88 - protein, 394 aa, Yersinia pseudotuberculosis IP 32953
MTNIIRQFLRQEAAGGLILIIAAAIALLMANSALQGVYQSFLDIPVSIKIASLDISKPLLLWINDGLMAVFFLMVGLEVKRELMEGSLAGRDKAVFPAIAALGGMLAPALIYLLFNGADEVTRQGWAIPAATDIAFALGVMALLGNRVPTGLKVFLLALAIIDDLGVIIIIALFYTQQVSLQSLGIAAAAIALLAYMNWRGVGKTSAYLLVGLVLWVCILKSGVHATLAGVIVGFMIPLHTQDQRSPSESLEHGLHPWVAYLILPLFAFANAGVSLQGVSLSGLTSLLPMGIATGLFIGKPLGIFTFSWLAVKLGIAKLPDAINFKQIFAVSVLCGIGFTMSIFIASLAFEGTDIALTTYSKLGILLGSTTAAVVGYSLLRLVLPARRKAVNVR

SEQ ID NO: 89 - DNA, 1209 bp, Mannheimia succiniciproducens MBEL55E
  CDS (1)..(1209): transl_table=11
atgagcccatctataaatctaacatttaaaggaggatgcaacatgtttatggctcaaatccagcgcttttttaagatgggctcggcaagtggcattttattatttttctttgcattattagcaataatttttgctaatacgtctttgaataatttttattttaactttttggacattcctgttagcgttcagtttggcgaatttatgatcaacaaaaccctgttacactggattaatgacgggtttatggcggttttcttcgtactcgtagggcttgaagtaaaacgagaaatgcttgagggttcgctttcccgctatcaactggctatttttccggcggttgccgccatcggcggtatgattgtgccggctctcatctattacttaatcaccaatcaacacccggaattaagtaacggctgggctattccaatggcgacggatattgcctttgctttagggattgtcgcattgctcggcactcgcgtacctttgccgttgaaagtctttttgctggcgttagctattattgacgacttaggcgctatcgtagttattgccgttttcttctccgaggaattgagtattcaggcgctaagcgtagcaattgtggcgatagccggcttaattaccctcaaccgtatgaaagtgggacatttatgcgcctatttaattttcggcttaattttatgggctgcggtattaaaatccggcgttcatgcaactcttgccggtgtaattatcggtttctgtatcccgcaaaaagatagcgaaggcaaaagtcctctgcatacctttgaacatattctcaccccttggtgttcattttttgtcttaccgttattcgcctttgccaatgcgggggtgtcattaggcacgattaatacggatatgatcttctccaccctgccgttgggtattgcgctgggtttaattgtgggcaaacctctaggcgtattcagctttagttatttttcggtcaaactggggattgccaaactgccggaaggtataaaatggaagcaggtttttgctatcgcaattttgtgcggtatcggtttcactatgtcgatgttcctggcgggcttagcctttaccgacgggcaatcggacagcttaatcaataccttgtcaagattaggtattttgcttggttcgtccgtatcggcaatattaggttatttattgcttaaaagtacaaccaaataa

SEQ ID NO: 90 - protein, 402 aa, Mannheimia succiniciproducens MBEL55E
MSPSINLTFKGGCNMFMAQIQRFFKMGSASGILLFFFALLAIIFANTSLNNFYFNFLDIPVSVQFGEFMINKTLLHWINDGFMAVFFVLVGLEVKREMLEGSLSRYQLAIFPAVAAIGGMIVPALIYYLITNQHPELSNGWAIPMATDIAFALGIVALLGTRVPLPLKVFLLALAIIDDLGAIVVIAVFFSEELSIQALSVAIVAIAGLITLNRMKVGHLCAYLIFGLILWAAVLKSGVHATLAGVIIGFCIPQKDSEGKSPLHTFEHILTPWCSFFVLPLFAFANAGVSLGTINTDMIFSTLPLGIALGLIVGKPLGVFSFSYFSVKLGIAKLPEGIKWKQVFAIAILCGIGFTMSMFLAGLAFTDGQSDSLINTLSRLGILLGSSVSAILGYLLLKSTTK

SEQ ID NO: 91 - DNA, 1314 bp, Bacteroides fragilis YCH46
  CDS (1)..(1314): transl_table=11
atgacagttttacgttcgatgaaggatttctcgtcgatgaatattacggcgagtattttattgtttgtcacagcgattgccgctgcggtaatcgctaactctccggcagcatcggtgtatcaggagtttttgtcgcatgaacttcattttcgcatcggaggctttaatttactttcgcatgcgggacacaatctgacgatgattgagttcattaatgacggtctgatgacgattttcttcttaatggtcggactggagattaagcgagagttactggtaggcgagctttcctcgttccgtaaagctgcactgccattcattgccgcatgtggcggaatggtagtgcctgttgtcatctattccatggtttgtgctccgggcactgaaggcgggcaaggactggctatccctatggcaaccgatattgccttttctttgggagtgctcagcctgttgggcaagcgtgttccgttgagtctgaaaatcttccttacagcgtttgcggtagtcgatgatataggcggtatattggtgattgccattttctacagttcacacgtggcttatgaatatttgttatgggcggcgctgctttacgttctgttatattttataggtaagaagggagctaccaataagattttctttttagttgtcggtgtggttatctggtatcttttcctgcaatcgggtatccatagtacgatttccggtgttattctggcctttgtcattccggccaaaccacagttgaacgtcggtacatatattgagcgtatccggcgcattatcagtacattccccgaaatgggagcaaacaacatcgtactgaccaatcaacagatagccaagctgaaagaggttgagtcggcttccgaccgtgtcatcagtccccttcagtcgcttgaggataacctgcatggtgcagtgaattatcttgtccttccgttgttcgcttttgtcaatgcaggtgttatgtttagtggcgaaggtgaagttattggcggggttacccttgcggttgctttgggattattggcaggcaaatttctggggatttattcttttacctggctggctgtcaaaagcggtcttactccgatgcctttggggatgaactggaagaatatatccggagtggcgttactgggtggaataggctttacggtatcgctttttatcgccaatctttcgttcggctccgcccatcctgtattattgaaccaggccaaactcggtgttttatccggtacggtaatggcgggtatcttgggatacctggttttgcattgggtcttaccccaaagaagataa

SEQ ID NO: 92 - protein, 437 aa, Bacteroides fragilis YCH46
MTVLRSMKDFSSMNITASILLFVTAIAAAVIANSPAASVYQEFLSHELHFRIGGFNLLSHAGHNLTMIEFINDGLMTIFFLMVGLEIKRELLVGELSSFRKAALPFIAACGGMVVPVVIYSMVCAPGTEGGQGLAIPMATDIAFSLGVLSLLGKRVPLSLKIFLTAFAVVDDIGGILVIAIFYSSHVAYEYLLWAALLYVLLYFIGKKGATNKIFFLVVGVVIWYLFLQSGIHSTISGVILAFVIPAKPQLNVGTYIERIRRIISTFPEMGANNIVLTNQQIAKLKEVESASDRVISPLQSLEDNLHGAVNYLVLPLFAFVNAGVMFSGEGEVIGGVTLAVALGLLAGKFLGIYSFTWLAVKSGLTPMPLGMNWKNISGVALLGGIGFTVSLFIANLSFGSAHPVLLNQAKLGVLSGTVMAGILGYLVLHWVLPQRR

SEQ ID NO: 93 - DNA, 1251 bp, Nocardia farcinica IFM 10152
  CDS (1)..(1251): transl_table=11
gtgatcacccgcgttcgctccgaactcacccgctacctgcgcaccgagaccgtcggtggcgccatcctcctggtggcggccgccatcgcgttgctgtgggtgaactcgccgtggggcgacagctatctgcggatgaccgagaccgtgctggcgatcgagccgttgcacctggagctgacgctggcggactggaccaaggacggcctgctcgcggtcttcttcttcgtcgccgggctggagctcaaacgcgaactcgtcgtcggtgagctggccgatcccaagcgggccgcgttgcccatcatcgccgccgtcggcggtgtcgtgacccccgcgctgatcgccgcggtgatcggccacggcgcacccggtatggacaagggctgggcgatcccggtggccaccgacatcgccttcgcgctcggtgtgctggcgctgaccggctcccgcatccccgccaccgcccgggtgttcctgctgagcctggccgtggtggacgatctgctcgcgatcatcctcatcgccgtgctgttcaccgtgggggtctcgctgctgtggttgctcgcggccgcggcctgcatggccggctggtggctggcccagcgccgccgcctgcgcaccccgctggtgtacgtgccgcttgccctggtgacctggtacgcgctgcacgaggcgggcgtgcatccgaccctggcgggtgtcgcgctcggcctgctcacccgggtgcgccccgacccggacgaggaatgggcgcccgcggcccggctcgagcacctgatccagccggtgtcggcaggtatctgcgtgccgctgttcgcgctgttcgccgcgggtgttccgctgaacgcgacggtgttcggggaactgttcaccgatcggctcgccctggccgtgatgctcggcctgctgctcggcaagaccatcggcatcttcgggatcagctgggtggcaatccgattcgggctcgccacgcgtccgtccgggctcggctaccgtgacatgttcgccctctcggtgctcggcgccatcggtttcaccgtcagcctgctcgtcgcggagctggccttgcccgacggcgacaccgtcgaattggccaaggccgcagtcctgatcacctccttggcggcctcgctggccggttcggcgctactgttgcggcgtgggcgtgtccatcaggccagacaagacgccctcgagctacaaccggacgagggcgacgcgagcgacccgtcggaaggcggtagcctccgttag

SEQ ID NO: 94 - protein, 416 aa, Nocardia farcinica IFM 10152
MITRVRSELTRYLRTETVGGAILLVAAAIALLWVNSPWGDSYLRMTETVLAIEPLHLELTLADWTKDGLLAVFFFVAGLELKRELVVGELADPKRAALPIIAAVGGVVTPALIAAVIGHGAPGMDKGWAIPVATDIAFALGVLALTGSRIPATARVFLLSLAVVDDLLAIILIAVLFTVGVSLLWLLAAAACMAGWWLAQRRRLRTPLVYVPLALVTWYALHEAGVHPTLAGVALGLLTRVRPDPDEEWAPAARLEHLIQPVSAGICVPLFALFAAGVPLNATVFGELFTDRLALAVMLGLLLGKTIGIFGISWVAIRFGLATRPSGLGYRDMFALSVLGAIGFTVSLLVAELALPDGDTVELAKAAVLITSLAASLAGSALLLRRGRVHQARQDALELQPDEGDASDPSEGGSLR

SEQ ID NO: 95 - DNA, 1149 bp, Legionella pneumophila str. Paris
  CDS (1)..(1149): transl_table=11
atgaataaatcgggttctttctacaatctggaaactatagggggtattctcttatttattgctgctgtgattgcgataatcatagccaactcgcctttccgggttgggtatgaatactttttaagcatcaatggcagtgtttctgtgggaaatttgtctataacaaaacccctgcttttatggatcaatgatggattaatggccatttatttcctgttgattggtttggaaataaaacgggaagttaatcgaggcattttaagtgacaaaacaaatcttttggtgcctgcccttacggcgttagccggattgatattccccgcattaatatttattttctttaatgctcaccatcctgtgtatctgaaaggttgggcaattcctaccgctactgatattgcctttacccttggaattgtctctcttttaggctcacgcgtacctttctcactcaagattttgctgaccgccattgccatttttgatgatattgcagctattgtcattattgcattattttataccgaacaattatcgttgctctctctttcacttgctttggtatttaccctgattttgattggcttaaattattttaaatgtcgtcgtatttcagtcttcatgctgttcggggtagctctatggattgccgttttaaaatccggtgttcatgccactcttgcagggattgtgattgccatgacgattcctgatgagggtaaggaatccatgctggcccgtttggaagacggtttacatcactgggttgtgtttttaattctccccttatttgcttttgccaatgcaggggttagctttgtcggacttgatgcgtccatgtttactcatcccgttgttttagggattggattaggattatttcttggcaagcaattgggtattttcttgtctttgggttattttgttcaatttaaaaaatttcttaaagccgataaagtgaatcttgcccaggtttatggcattgcgctcatttgtggggtgggctttaccatgagtttgtttattggctctttggcttaccaaaattacgatttaagtttaatgccaatggttaaaattggtgtagtacttggttcttttatagcgggattaaccggatttttagtgttaaaattgaaacagcaatga

SEQ ID NO: 96 - protein, 382 aa, Legionella pneumophila str. Paris
MNKSGSFYNLETIGGILLFIAAVIAIIIANSPFRVGYEYFLSINGSVSVGNLSITKPLLLWINDGLMAIYFLLIGLEIKREVNRGILSDKTNLLVPALTALAGLIFPALIFIFFNAHHPVYLKGWAIPTATDIAFTLGIVSLLGSRVPFSLKILLTAIAIFDDIAAIVIIALFYTEQLSLLSLSLALVFTLILIGLNYFKCRRISVFMLFGVALWIAVLKSGVHATLAGIVIAMTIPDEGKESMLARLEDGLHHWVVFLILPLFAFANAGVSFVGLDASMFTHPVVLGIGLGLFLGKQLGIFLSLGYFVQFKKFLKADKVNLAQVYGIALICGVGFTMSLFIGSLAYQNYDLSLMPMVKIGVVLGSFIAGLTGFLVLKLKQQ

SEQ ID NO: 97 - DNA, 1155 bp, Legionella pneumophila str. Lens
  CDS (1)..(1155): transl_table=11
atgaataaatcggattctttctacaatctggaaaccatagggggtattctcttatttattgctgccgtgcttgcgataatcatagccaactcgccttaccggattggctatgattactttttaagcatcaatggcagtgtttctgtgggaaatttgtctataacaaaacccctgcttttatggatcaacgatggattaatggccatttatttcctgttgattggtttggaaataaaacgggaagttaatcgaggcattttaagtgacaaaactaatcttttggtgcctgcccttacggcgttagctggattgctattccccgcattaatatttattttctttaatgctcaccatcctgtgtatctgaaaggttgggccattcctaccgctactgatattgcctttacacttggaattgtctctctgttaggctcacgcgtccctttctcactcaaaattttgctgactgccattgccatttttgatgatattgcagcgattgtcattattgcattattttatactgaacaattatcgttgctttctctttcacttgctttggtatttactctgattttgattggtttaaattattttaaatgtcgtcgtatttcagtcttcatgctgtttggggtagctctatggatcgccgttttaaaatcaggtgttcatgccacccttgcagggattgtgattgccatgacgattcctgatgagggtaaggagtccatgctgacccgtttggaagacggtttgcatcactgggttgtgtttttaattctccccttgtttgcttttgccaatgcaggggttagctttgtcggacttgatgcatccatgttgactcatcctgttgttttaggaattgggttaggattatttctaggcaagcaattgggtattttcttgtctttgggttattttgttcaatttaaaaaatttcttaaagccgataaagtaaatctcgcccaagtttatggcattgcgctcatttgtggggtgggctttaccatgagtttatttattggctctttagcttaccaaaattacgatttaagtttaatgcctatggttaaaattggtgtagtatttggttcttttatcgcgggattaaccgggtttttagtgttaaaaatgacttctctcaaacgctag

SEQ ID NO: 98 - protein, 384 aa, Legionella pneumophila str. Lens
MNKSDSFYNLETIGGILLFIAAVLAIIIANSPYRIGYDYFLSINGSVSVGNLSITKPLLLWINDGLMAIYFLLIGLEIKREVNRGILSDKTNLLVPALTALAGLLFPALIFIFFNAHHPVYLKGWAIPTATDIAFTLGIVSLLGSRVPFSLKILLTAIAIFDDIAAIVIIALFYTEQLSLLSLSLALVFTLILIGLNYFKCRRISVFMLFGVALWIAVLKSGVHATLAGIVIAMTIPDEGKESMLTRLEDGLHHWVVFLILPLFAFANAGVSFVGLDASMLTHPVVLGIGLGLFLGKQLGIFLSLGYFVQFKKFLKADKVNLAQVYGIALICGVGFTMSLFIGSLAYQNYDLSLMPMVKIGVVFGSFIAGLTGFLVLKMTSLKR

SEQ ID NO: 99 - DNA, 1158 bp, Photobacterium profundum SS9
  CDS (1)..(1158): transl_table=11
atgaccgatgctatacgtaagtttttaaagttagagtctgcgggcggtatcattctcattattgccgcagcagtagcaatggttattgcaaactccccattacaatctctatacagcggtacattgagttcatatatcgcgggtttatctgttgagcattggattaatgatggcctgatggctattttcttcatgttaattggacttgaagtaaaaagagagttgattgaaggtgcgctaaatacaaaagagaaagctattttccctgctattgctgcagtgggtggcatggttgcgccagcattagtttatgtagcgtttaactttgcagatcctattgcgcttcaaggttgggctattcctgctgcaaccgatattgcttttgcattgggtgtaatggcgttactgggtaatcgtgtacctgttagcttgaaagtatttttattagcgctggctattatcgatgacctgggcgttattgtgattattgctctgttttacagcagtgatttatcaacattggcacttgccgttgcatttgctgcaactgcgacgttgttcgtgatgaatgcgaagaatgttaccaagacttctctgtacttaattgtgggggcaatactgtggtttagtgtgttgaagtcaggcgtacacgcaacattggcgggtgtagtacttggttttgctattccattaacaggtaaagacgggcgttctgataagcattcacccctgaaacacctagagcatgttttgcatccttatgttgctttcttaattctaccgttatttgcatttgcgaatgctggtatctctttagatggcgtatcgctagaaagtgttacaggcatgctgccgctaggtatcgctgctggactattccttggtaagccattgggtattttcacggcaagctatatcgcagttaaaatggggttagccacattacctgatggtattaatctgaagcatatctttgctgtatcagtgttgtgtggtatcggctttacgatgtcgatctttatatcgtcattggcatttgtaggtgcccctgctgatttcaatacctattcacgtctaggtatattaatgggttcaacagttgctgctgttgtgggttacatcttattgagtcggactttgcctaaaacggaggcataa

SEQ ID NO: 100 - protein, 385 aa, Photobacterium profundum SS9
MTDAIRKFLKLESAGGIILIIAAAVAMVIANSPLQSLYSGTLSSYIAGLSVEHWINDGLMAIFFMLIGLEVKRELIEGALNTKEKAIFPAIAAVGGMVAPALVYVAFNFADPIALQGWAIPAATDIAFALGVMALLGNRVPVSLKVFLLALAIIDDLGVIVIIALFYSSDLSTLALAVAFAATATLFVMNAKNVTKTSLYLIVGAILWFSVLKSGVHATLAGVVLGFAIPLTGKDGRSDKHSPLKHLEHVLHPYVAFLILPLFAFANAGISLDGVSLESVTGMLPLGIAAGLFLGKPLGIFTASYIAVKMGLATLPDGINLKHIFAVSVLCGIGFTMSIFISSLAFVGAPADFNTYSRLGILMGSTVAAVVGYILLSRTLPKTEA

SEQ ID NO: 101 - DNA, 1167 bp, Salmonella enterica subsp. enterica serovar Paratyphi A str. ATCC
  CDS (1)..(1167): transl_table=11
gtgaaacatctgcaccgattttttagcagcgatgcctctgggggcatcattctcatcatcgccgctgcgctggctatgctgatggccaatatgggcgcgaccagtggatggtatcatgattttctggagacgccggttcagctacgggttggggcgcttgagatcaacaaaaacatgctgttgtggatcaacgatgcgctgatggccgtgtttttcctgttgattggcctggaagttaagcgcgaactgatgcaaggctcgttagccagtctgcgccaggccgcttttccggtgattgccgccatcggcgggatgattgtaccagcattgctctatctggcctttaactactccgatccggtcactcgtgagggctgggctattcctgccgcgacggatatcgcctttgcgctgggcgtgctggcgctgttaggcagccgggttccgctggcgctgaaaattttcctgatggcgctggcgatcatcgatgacctcggcgccatcattattatcgcactgttttataccagcgatctttctatcgtctcgctgggcgtggcggcgttcgcgattgccgtgctggcgctgctgaacctgtgcggcgtcaggcggacaggggtatatattctggtcggggcagtgctgtggacggcggtactgaagtccggcgttcacgcgacgctggcaggcgtcattgtcggcttctttattccgctgaaagaaaaacacggacgctcgccggccaagcgtctggagcatgttctgcacccgtgggtcgcatacctgatcctgccgctcttcgcttttgcgaatgccggcgtttctcttcagggcgtcacgatggacggtctgacctccatgctgccgttgggaattattgctggtctgctgattggtaagccgctggggattagcctgttttgctggctggcgctgcgtttcaagctggcgcatctgccgcaggggaccacttatcagcaaatcatggcggtcggcattttgtgtggcattggctttacgatgtccatctttatcgccagcctggcatttggcaatatcgatccggaacttattaactgggcgaaattgggcattttgattggttcattgctctccgcagtggtggggtatagctggttgcgcgcgcgtttgaacgcgccggcataa

SEQ ID NO: 102 - protein, 388 aa, Salmonella enterica subsp. enterica serovar Paratyphi A str. ATCC
MKHLHRFFSSDASGGIILIIAAALAMLMANMGATSGWYHDFLETPVQLRVGALEINKNMLLWINDALMAVFFLLIGLEVKRELMQGSLASLRQAAFPVIAAIGGMIVPALLYLAFNYSDPVTREGWAIPAATDIAFALGVLALLGSRVPLALKIFLMALAIIDDLGAIIIIALFYTSDLSIVSLGVAAFAIAVLALLNLCGVRRTGVYILVGAVLWTAVLKSGVHATLAGVIVGFFIPLKEKHGRSPAKRLEHVLHPWVAYLILPLFAFANAGVSLQGVTMDGLTSMLPLGIIAGLLIGKPLGISLFCWLALRFKLAHLPQGTTYQQIMAVGILCGIGFTMSIFIASLAFGNIDPELINWAKLGILIGSLLSAVVGYSWLRARLNAPA

SEQ ID NO: 103 - DNA, 1068 bp, Zymomonas mobilis subsp. mobilis ZM4
  CDS (1)..(1068): transl_table=11
ttgtccgaaagttattttaaggtgcttcatctgaaaatgccattttcggctttggatgatgcccctaatctggcagagtttatttctattgcgccgatgtcgcttttcttttttgtcgttattgcagaaataaaagaagaaattatttcgggacatctggcttctttccggcgggttatcttgcccctgatttcagctttagggggaatgatgattcccgcttgtctatatgggctgattacatctggtcatttagaagtaagccgtggctgggcgataccaatcgcaacggatgccgcctttaccttacctattattttggcgttaggacgccatgtttctgaaggcgcaagggtctggttaatggctttggctattttcgatgacctattaggtattgttgttattgctcttttttatgcgtcccatttgaatggatatgcccttttcgcagcgggcttaatcactgccgtgatgattgggctgaataaaaaatctgtccagaatttatgggtctatgcttctgctggtgttgtcttatggtgggctctattggtttctggcctccatcctaccatcgccggtgtgataacaggtcttgcccttccttctgttgcggatcaaccggaaaaagcctctcctttagagcgaggaaaacaaattattgcgccttgggtgacatggctcattctgcctttatttggctttgttagtatgggaatgtcgctgtctgctatgtcctttcatgttttgctggcacctgtccctttgggggttgcgttgggcttgtttttgggaaagcccataggggtttttggtgctactataatggcaacccgactaaagattgcgacccttcctaagggaacttccttgaggatgttgttcgggctatccttgttatgcggtatcggttttacgattagtttatttattgcagaattggctttttctggttcagattttctggttccggccaaatatgggatattgatgggctctctcttatccgctttagctggatggttatggttacgttttttaaagtttccggcaaaaggcgtttga

SEQ ID NO: 104 - protein, 355 aa, Zymomonas mobilis subsp. mobilis ZM4
MSESYFKVLHLKMPFSALDDAPNLAEFISIAPMSLFFFVVIAEIKEEIISGHLASFRRVILPLISALGGMMIPACLYGLITSGHLEVSRGWAIPIATDAAFTLPIILALGRHVSEGARVWLMALAIFDDLLGIVVIALFYASHLNGYALFAAGLITAVMIGLNKKSVQNLWVYASAGVVLWWALLVSGLHPTIAGVITGLALPSVADQPEKASPLERGKQIIAPWVTWLILPLFGFVSMGMSLSAMSFHVLLAPVPLGVALGLFLGKPIGVFGATIMATRLKIATLPKGTSLRMLFGLSLLCGIGFTISLFIAELAFSGSDFLVPAKYGILMGSLLSALAGWLWLRFLKFPAKGV

SEQ ID NO: 105 - DNA, 1152 bp, Francisella tularensis subsp. tularensis SCHU S4
  CDS (1)..(1152): transl_table=11
atgggtgcaagccaaaaaaatcaagagctcattggtggtttaatacttttctcagcagctttgttagctattgttgttaataattcgccattagcaagctactatgcaatgcttgaaactatcaatgtaaaacttgggatagaaaacttggtaattgataagaatctaatgcattggataaatgatggtttaatggcgatatattttttgtatattggtttagaaataaaaagagaaatcatcgttggcaccctttcaaagccatcaaatataataacaccagctatagcggcatttgcaggtttggcgatgccaagcttgatatatctatcaataaaccatgatattaaggttatcaatggttgggcaataccatcagctacagatatagcatttacattgggtatattagcactactaggaacaagagttccagctaaattaaagttactggttattactatagctatttttgatgatatagctgcgatagctattatagcgatattttataccaaatctttatctttactttcgttatctctaggaacgctttttattcttgcgatgattatttgcaatcgtatatttaagataaatagaagttcggtgtatgtagtgcttggcttttttgcatggttttgtacgatcaaatctggggtgcatgcgactttagcaggttttactacggctctatgtataccttttagagagaatgataaagattctccagctaattttatggaagattctcttcacccttggattatctattttatattaccagtttttgcctttgctaatgctggaataagcttctctgggataagcttttcgatattgtttgagcctattacattaggtattatttggggcttatttgttggcaaacagcttggaattttttcaatattagcagttttcaaaaagttaaaatggtttaaactcggcgagtctttttcaaacttacagttatatggtataagtttgttgtgtggtattggctttactatgagtttatttataggagtacttgcttttaatgatactcacttacttaatgctataaaaataggtgtggttgttggttcagttctttcaggattttttggttatattgttttgagatttattgttacaaatcctagctaa

SEQ ID NO: 106 - protein, 383 aa, Francisella tularensis subsp. tularensis SCHU S4
MGASQKNQELIGGLILFSAALLAIVVNNSPLASYYAMLETINVKLGIENLVIDKNLMHWINDGLMAIYFLYIGLEIKREIIVGTLSKPSNIITPAIAAFAGLAMPSLIYLSINHDIKVINGWAIPSATDIAFTLGILALLGTRVPAKLKLLVITIAIFDDIAAIAIIAIFYTKSLSLLSLSLGTLFILAMIICNRIFKINRSSVYVVLGFFAWFCTIKSGVHATLAGFTTALCIPFRENDKDSPANFMEDSLHPWIIYFILPVFAFANAGISFSGISFSILFEPITLGIIWGLFVGKQLGIFSILAVFKKLKWFKLGESFSNLQLYGISLLCGIGFTMSLFIGVLAFNDTHLLNAIKIGVVVGSVLSGFFGYIVLRFIVTNPS

SEQ ID NO: 107 - DNA, 1170 bp, Campylobacter jejuni RM1221
  CDS (1)..(1170): transl_table=11
atgaataatatagtacataaattaaaaactttagttttaaatgaggcttttggcggcgttttacttatagtttgtactttgcttgctttgcttgtgcaaaatggatcttttagcgaacattatcgagaatttctaaatttaaaagtcggatttagtgtaggtgaatttgagcttaataagccttttttactttggataaatgatgggcttatatctatatttttctttgctatagggcttgagcttaagaaggaatttttgcacggggattttaaaaatcctaaaaatattgttttaccttttatggctgctttagggggtatacttatacctgcgatgttgtttgctttggtaaatataggagatgcttatactttaaaaggttgggctatacctacagccacagatacagcgtttgccttagcgattttaatgatgtgtggcaagcacattccatcaagtttaaaaattttcttactttctttggctatttttgatgatgtgggtgctattttaattatagctattttttatacgacaaaattatcaatagttgcttttgtcgttgcaggacttgctattttggcaatgcttattttaaatcttttagggataacaagaaagtctttttattttatttgctcagttattctttggattagtgttttaaaaagtggagtacatgcaactttagctggaattgtaacagcattttttataccgatgcaaactaaaaatggagaagcatttttagaagaaatttatgaaagcttaaaattttggattgcttttattattttacctttatttgcttttgctaacgctggagtaaatttatccaatatcgatataggagcaattttttcaggtgtaagtataggtattttcttagggctttttgtgggtaaacaagtgggtgtatttttattttcttatttggcaatccgctttaaatttgcagctttgccccaaggttcaaatttgaaacaactttatggggtttgcatacttacaggaattggttttacaatgagtttgtttattgatggattggcgtatgaagttagtgatatttttaattatgcagataacttagctattcttatagcctcattttgttctgggatttggggttttatttatcttaaattctttactactcgatcttaa

SEQ ID NO: 108 - protein, 389 aa, Campylobacter jejuni RM1221
MNNIVHKLKTLVLNEAFGGVLLIVCTLLALLVQNGSFSEHYREFLNLKVGFSVGEFELNKPFLLWINDGLISIFFFAIGLELKKEFLHGDFKNPKNIVLPFMAALGGILIPAMLFALVNIGDAYTLKGWAIPTATDTAFALAILMMCGKHIPSSLKIFLLSLAIFDDVGAILIIAIFYTTKLSIVAFVVAGLAILAMLILNLLGITRKSFYFICSVILWISVLKSGVHATLAGIVTAFFIPMQTKNGEAFLEEIYESLKFWIAFIILPLFAFANAGVNLSNIDIGAIFSGVSIGIFLGLFVGKQVGVFLFSYLAIRFKFAALPQGSNLKQLYGVCILTGIGFTMSLFIDGLAYEVSDIFNYADNLAILIASFCSGIWGFIYLKFFTTRS

SEQ ID NO: 109 - DNA, 1149 bp, Campylobacter jejuni RM1221
  CDS (1)..(1149): transl_table=11
atgcaaatgataaagaagatggttttaagtgaaactttccctggtattttgcttatattttttacatttttagctttattatgtaaaaattcttctttaagtgttatttatacagatttttttcatgctaattttacagtaggatttgatcattttcaaatttcaaagtcgttggatttatggataaatgatggtttgatagctatattttttctatgtatagggcttgagttaaaatatgaaattttacgtgggcaacttaaaaatataagagctgtatctttacctatatttggagctttagggggtatgattactccggctttaatttttattgctattaattatgctcatgattttgctatgaaaggttgggcaatacctacagcaactgatatagcttttgcagtgggtattttaatgcttttgggaaataaaattcctacaagtttaaaactttttttactctctttagctatttttgatgatttgggtgctattgttattattgctttgttttatacagatcagctttcagctttagcaattattatttgtttgttttgtatatttgctctgcttttgttaaattattatcacatcacccatctttctttgtacgtgttggtaggtgttgtgttgtggatagctatgcttaaaagtggagtgcatgcaactttggctggtgtgatcatttctttgtttatacctcttgatacaaaaaataaaaaaccttatttacatgaagttcttaaggatttaaatccttgggtagtttattttattttacctttatttgcttttgctaatgctgggattgatattagagatatgcatcttggttcagtattttcgcctgtaagtcttgggattattttaggactatttttaggaaaacaattaggtgttttcactttttgttttattgctatcaaacttaaacttgcaaaattacctgaaaatattaaatatggaaaattttatggtatatgtattttaacaggcatcggttttacgatgagcttgtttattgatggtttggcttataaaaatagtgatatttttgaatatgcggataaacttgctattttagtagctagttttttaagtgccattgttggttttatttatcttaagattgttaaatga

SEQ ID NO: 110 - protein, 382 aa, Campylobacter jejuni RM1221
MQMIKKMVLSETFPGILLIFFTFLALLCKNSSLSVIYTDFFHANFTVGFDHFQISKSLDLWINDGLIAIFFLCIGLELKYEILRGQLKNIRAVSLPIFGALGGMITPALIFIAINYAHDFAMKGWAIPTATDIAFAVGILMLLGNKIPTSLKLFLLSLAIFDDLGAIVIIALFYTDQLSALAIIICLFCIFALLLLNYYHITHLSLYVLVGVVLWIAMLKSGVHATLAGVIISLFIPLDTKNKKPYLHEVLKDLNPWVVYFILPLFAFANAGIDIRDMHLGSVFSPVSLGIILGLFLGKQLGVFTFCFIAIKLKLAKLPENIKYGKFYGICILTGIGFTMSLFIDGLAYKNSDIFEYADKLAILVASFLSAIVGFIYLKIVK

SEQ ID NO: 111 - DNA, 1149 bp, Vibrio fischeri ES114
  CDS (1)..(1149): transl_table=11
atgagtgatgttattaagaattttttcaaattagaatctgccggtgggattctgttagtgatcgcagctgcgattgctatgatgattgcaaactcttcattagcaccaatgtacgatacatttttacattcttatatcggtggaatgtcagtatcacattggattaatgacggtctaatggctgttttcttcctattgatcggattagaagtaaaaagagaattattagaaggtgcgttaaaatcaaaagaaaccgctatcttccctgcaattgcagcggtaggtggtatgttagcgccagctttagtttacgttgcatttaatatgggcgatcctgaagctctatctggttgggctattcctgcggcaacagatattgcgtttgcattaggtatcatggcgcttcttggtaatcgagttcctgttagcttaaaagtgttcttacttgcactagctattattgatgatttaggcgttgttgttattatcgctttcttctacacaagtgatctatctgttcttgctcttgtaattggttttgtaatgacaggtttactgttcttactgaatgcaaaacatgtaacaaagatccgctggtatttattggttggctttatcctgtgggtgagcgtactgcaatcaggtgttcacgcaacgttagctggtgtggttcttggttttgctatccctcttaaaggcaataaaggtgagcgttcaccactaaaacacatggaacacgcattacacccttatgttgcgtttgctatccttcctgtgttcgcatttgctaatgctggtatctctctagaaggtgtgtcacttgatagtttgacgacaacattacctctaggtgttgctttaggtctgttccttggtaagcctctaggtatcttcagctttagttaccttgctgttaagtctggtgtagcaaaactaccaacaggcgtaaacatgaagcatatttttgctgtatcagtgctgtgtggtatcggctttactatgtccatctttatctcatcactggcatttggtggtgtgaacccagagtttgataaactggctcgcttaggtatcttgatgggctcgacatttgcagcggttgttggctatgcgttgttaagcatctcattaccaaagaaagcagcataa

SEQ ID NO: 112 - protein, 382 aa, Vibrio fischeri ES114
MSDVIKNFFKLESAGGILLVIAAAIAMMIANSSLAPMYDTFLHSYIGGMSVSHWINDGLMAVFFLLIGLEVKRELLEGALKSKETAIFPAIAAVGGMLAPALVYVAFNMGDPEALSGWAIPAATDIAFALGIMALLGNRVPVSLKVFLLALAIIDDLGVVVIIAFFYTSDLSVLALVIGFVMTGLLFLLNAKHVTKIRWYLLVGFILWVSVLQSGVHATLAGVVLGFAIPLKGNKGERSPLKHMEHALHPYVAFAILPVFAFANAGISLEGVSLDSLTTTLPLGVALGLFLGKPLGIFSFSYLAVKSGVAKLPTGVNMKHIFAVSVLCGIGFTMSIFISSLAFGGVNPEFDKLARLGILMGSTFAAVVGYALLSISLPKKAA

SEQ ID NO: 113 - DNA, 1314 bp, Bacteroides fragilis NCTC 9343
  CDS (1)..(1314): transl_table=11
atgacagttttacgttcgatgaaggatttctcgtcgatgaatattacggcgagtattctattgtttgtcacagcgattgccgctgcggtaatcgctaactctccggcagcatcggtgtatcaggagtttttgtcgcatgaacttcattttcgcatcggaggctttaatttactttcgcatgcgggacacaatctgacgatgattgagttcattaatgacggtctgatgacgattttcttcttaatggtcggactggagattaagcgagagttactggtaggcgagctttcctcgttccgtaaagctgcactgccattcattgccgcatgtggcggaatggtagtgcctgttgtcatctattccatggtttgtgctccgggcactgaaggcgggcaaggactggctatccctatggcaaccgatattgccttttctttgggagtgctcagcctgttgggcaagcgtgttccgttgagtctgaaaatcttccttacagcgtttgcggtagtcgatgatataggcggtatattggtgattgccattttctacagttcacacgtggcttatgaatatttgttatgggcggcgctgctttacgttctgttatattttataggtaagaagggagctaccaataagattttctttttagttgtcggtgtggttatctggtatcttttcctgcaatcgggtatccatagtacgatttccggtgttattctggcctttgtcattccggccaaaccacagttgaacgtcggtacatatattgagcgtatccgacgcattatcagtacattccccgaaatgggagcaaacaacatcgtactgaccaatcaacagatagccaagctgaaagaggttgagtcggcttccgaccgtgtcatcagtccccttcagtcgcttgaggataacctgcatggtgcagtgaattatcttgtccttccgttgttcgcttttgtcaatgcaggtgttatgtttagtggcgaaggtgaagttattggcggggttacccttgcggttgctttgggattattggcaggcaaatttctggggatttattcttttacctggctggctgtcaaaagcggtcttactccgatgcctttggggatgaactggaagaatatatccggagtggcgttactgggtggaataggctttacggtatcgcttttcatcgccaatctttcgttcggctccgcccatcctgtattattgaaccaggccaaactcggtgttttatccggtacggtaatggcgggtatcttgggatacctggttttgcattgggtcttgcccaaaagaagataa

SEQ ID NO: 114 - protein, 437 aa, Bacteroides fragilis NCTC 9343
MTVLRSMKDFSSMNITASILLFVTAIAAAVIANSPAASVYQEFLSHELHFRIGGFNLLSHAGHNLTMIEFINDGLMTIFFLMVGLEIKRELLVGELSSFRKAALPFIAACGGMVVPVVIYSMVCAPGTEGGQGLAIPMATDIAFSLGVLSLLGKRVPLSLKIFLTAFAVVDDIGGILVIAIFYSSHVAYEYLLWAALLYVLLYFIGKKGATNKIFFLVVGVVIWYLFLQSGIHSTISGVILAFVIPAKPQLNVGTYIERIRRIISTFPEMGANNIVLTNQQIAKLKEVESASDRVISPLQSLEDNLHGAVNYLVLPLFAFVNAGVMFSGEGEVIGGVTLAVALGLLAGKFLGIYSFTWLAVKSGLTPMPLGMNWKNISGVALLGGIGFTVSLFIANLSFGSAHPVLLNQAKLGVLSGTVMAGILGYLVLHWVLPKRR

SEQ ID NO: 115 - DNA, 1167 bp, Salmonella enterica subsp. enterica serovar Choleraesuis str
  CDS (1)..(1167): transl_table=11
gtgaaacatctgcaccgattttttagcagcgatgcctctgggggcatcattctcatcatcgccgctgcgctggctatgctgatggccaatatgggcgcgaccagtggatggtatcatgattttctggagacgccggttcagctacgggttggggcgcttgagatcaacaaaaacatgctgttgtggatcaacgatgcgctgatggccgtgtttttcctgttgattggcctggaagttaagcgcgaactgatgcaaggctcgttagccagtctgcgccaggccgcttttccggtgattgccgccatcggcgggatgattgtaccggcattgctctatctggcctttaactactccgatccagtcactcgcgagggctgggctattcctgccgcgacggatatcgcctttgcgctgggcgtgctggcgctgttgggcagccgggttccgctggcgctgaaaattttcctgatggcgctggcgatcatcgatgatctcggcgccatcgttattatcgcactgttttataccagcgatctttctatcgtctcgctgggcgtggcggcgttcgcgattgccgtgctggcgctgctgaacctgtgcggcgtcagacggactggggtatatattctggtcggggcagtgctgtggacggcggtactgaagtccggcgttcacgcgacgctggcaggcgtcattgtcggcttctttattccgctgaaagaaaaacacggacgctcgccggccaagcgtctggagcatgttctgcacccgtgggttgcgtacctgatcctgccgctcttcgcttttgcgaatgccggcgtttctcttcagggcgtcacgattgacggtctgacctccatgctgccgttgggaattattgccggtctgctgattggtaagccgctggggattagcctgttttgctggctggcgctgcgtttcaagctggcgcatctgccgcaagggaccacttatcagcaaatcatggcggtcggcattttgtgtggcattggctttacgatgtccatctttatcgccagcctggcatttggcaatgtcgatccggaacttattaactgggcgaaattgggcattttgattggttcattgctctccgcagtggtggggtatagctggttgcgcgcgcgtttgaacgcgccggcataa

SEQ ID NO: 116 - protein, 388 aa, Salmonella enterica subsp. enterica serovar Choleraesuis str
MKHLHRFFSSDASGGIILIIAAALAMLMANMGATSGWYHDFLETPVQLRVGALEINKNMLLWINDALMAVFFLLIGLEVKRELMQGSLASLRQAAFPVIAAIGGMIVPALLYLAFNYSDPVTREGWAIPAATDIAFALGVLALLGSRVPLALKIFLMALAIIDDLGAIVIIALFYTSDLSIVSLGVAAFAIAVLALLNLCGVRRTGVYILVGAVLWTAVLKSGVHATLAGVIVGFFIPLKEKHGRSPAKRLEHVLHPWVAYLILPLFAFANAGVSLQGVTIDGLTSMLPLGIIAGLLIGKPLGISLFCWLALRFKLAHLPQGTTYQQIMAVGILCGIGFTMSIFIASLAFGNVDPELINWAKLGILIGSLLSAVVGYSWLRARLNAPA

SEQ ID NO: 117 - DNA, 1176 bp, Pseudomonas syringae pv. syringae B728a
  CDS (1)..(1176): transl_table=11
atgactcaagttccgaaccgggaaacgcccagaggcattgccatcctcgcccgcttcctcgcctccgaatcagccggcggcatcgtgttgatggtggctgcgctggcggccttgatcgttgccaactcgccgctttctgccggctatttctcgatcctgcacagcgtctggctgggtctctcggtcgagctgtggatcaacgacgggctgatggcgatcttcttcctgatggtcggcctggagatcaagcgtgaagtcctcgccggtggtctggcgagctgggggcaacgtgccctgcccggctttgcggcggccggcggcatgctggtgccggcgctgatctacatcgcgatcaattggggtaatccgcagaccctgagcggctgggcgatcccggcagccaccgacatcgccttcgccctcggcgtgctgtcgctgctcggcaatcgggtgccgacctcgctgaaggtctttctggccgcacttgcgatcctcgacgatctgggcgccgtgaccatcatcgccttcttttacagcgccggtctgaacctgccgatgctggccgccgccttcgtgacactggcggtgctgatcgtcatgaaccgtttgaacgtgcgtcgtttgctgccctatctgctgcttggcgcgctgctgtggttcttcgtcctgcaatcgggcgtacacgccacgctggccggtgtcgccctggcgctgtgcatcccgatgggcaagcccgaggaagaagcccgctcgccactgctgttcctcgaagaaaagatgcactactgggtggccttcgccgtggtgccgatctttggttttgccaacgctggcgtttcgctggctggcattactctgggcaatctggtcgatcctgtgccgctgggcgttgcgctggggctgttcgtgggcaagcagatcggcgtgtttctcgccgccgtgctggccatccgcgccgggctggcggtattgccggaaggcagcaactgggtgcaactgtacggcgtggcgatgctgtgcggcatcggtttcaccatgagcctgttcatcggcaacctggcgttccccggctcgcaacacctgatcgacgaggtgaaggtcggcgtactgatcggctcggggctggccgcaattgccggaattgtgttgctgcgcagccgtttcagcaggccctga

SEQ ID NO: 118 - protein, 391 aa, Pseudomonas syringae pv. syringae B728a
MTQVPNRETPRGIAILARFLASESAGGIVLMVAALAALIVANSPLSAGYFSILHSVWLGLSVELWINDGLMAIFFLMVGLEIKREVLAGGLASWGQRALPGFAAAGGMLVPALIYIAINWGNPQTLSGWAIPAATDIAFALGVLSLLGNRVPTSLKVFLAALAILDDLGAVTIIAFFYSAGLNLPMLAAAFVTLAVLIVMNRLNVRRLLPYLLLGALLWFFVLQSGVHATLAGVALALCIPMGKPEEEARSPLLFLEEKMHYWVAFAVVPIFGFANAGVSLAGITLGNLVDPVPLGVALGLFVGKQIGVFLAAVLAIRAGLAVLPEGSNWVQLYGVAMLCGIGFTMSLFIGNLAFPGSQHLIDEVKVGVLIGSGLAAIAGIVLLRSRFSRP

SEQ ID NO: 119 - DNA, 1179 bp, Pseudomonas syringae pv. syringae B728a
  CDS (1)..(1179): transl_table=11
atgcacaaacccacccctcgtaccgaatccccgaatgcactggcgttcatcacgcgtttcttcgctgctgaatccgctggcgggctggtgttgatggcagccgcgctggcggccctgatcgttgccaactcaccgctgggcgacagctacttcgccgcgctgcacgcagtgttcgccggtttgtcggtttcgcactggatcaacgacggtctgatggcgatcttcttcatgctcgtcggcctggagatcaagcgcgaggtgctcgccggtcagcttgcctcctggagccagagagccttgccgggctttgcggcgcttggcggcatgctggttccggcgctgatctacgtggccttcaactgggggcggccagacaccatcggcggctgggccattccggcagcgaccgatatcgcgttcgccctgggtgtgctgtcactgctgggcaagcgcgtgccgctgtcgcttaagatcttcctgtcggcactggcgattctcgatgatctcggcgcggtgctgatcatcgcgttgttctacaccagcgatctctccattcccatgctgctcgcagcgctgggctccatcgccatgctcgtcgcgctgaatcgtctgggtgttaaaaaactgctgccttacctcatcgtcggcgcgctgctgtggtttttcatgctccagtccggcatccacgccaccctcgcgggcgtcgcgctggcgctgtgcatcccgttgggcaaacccgatgaagaggcccgctcgccgctgctgcacctggaagaaaagctgcacccatgggtggcgtttgccgtcgtaccgatctttggttttgccaacgctggcgtgtcactgtcgggcattaccgccgacacgctcgtggacccggtcccgctcggcgttgcgctaggactgctggtcggcaaacaggtcggcatattcgccatggccgcgctggcgattcgcgcaggcctggcgcgcttgccggatggcagcaactggggccagctttatggcgttgcagccttgtgtggtatcggcttcaccatgagcctgttcattggcgcactggccttcccgggcgcgccggaactggtcgatgaggtcaaggtgggcgtgctgatcggttcggtgttgtcggctgtgctgggtgtggtggtgttgcgcaggtttgcgcagcgggggtga

SEQ ID NO: 120 - protein, 392 aa, Pseudomonas syringae pv. syringae B728a
MHKPTPRTESPNALAFITRFFAAESAGGLVLMAAALAALIVANSPLGDSYFAALHAVFAGLSVSHWINDGLMAIFFMLVGLEIKREVLAGQLASWSQRALPGFAALGGMLVPALIYVAFNWGRPDTIGGWAIPAATDIAFALGVLSLLGKRVPLSLKIFLSALAILDDLGAVLIIALFYTSDLSIPMLLAALGSIAMLVALNRLGVKKLLPYLIVGALLWFFMLQSGIHATLAGVALALCIPLGKPDEEARSPLLHLEEKLHPWVAFAVVPIFGFANAGVSLSGITADTLVDPVPLGVALGLLVGKQVGIFAMAALAIRAGLARLPDGSNWGQLYGVAALCGIGFTMSLFIGALAFPGAPELVDEVKVGVLIGSVLSAVLGVVVLRRFAQRG

SEQ ID NO: 121 - DNA, 1203 bp, Haemophilus influenzae 86-028NP
  CDS (1)..(1203): transl_table=11
gtgaattttttgctatgtatttttaaaggggtttatgtgataaaactgatccaacgtttttttaaattagaatctgctggcggtatattattgcttttttcagctgttgttgcgatgttgctggctaattcgccgttaagcaaccaatataatgattttttaaatttgcctgtaagtttacaaattggtagtttctcaattaataaaaccttaattcactggattaacgatggttttatggcggtgttttttgtattagtgggaatggaagtcaaaaaagaattatttgaaggcgcgctttctacctatcagcaagctattttccctgctattgcagctattggcggaatggttataccggctgtagtttattggtttatcgctaaacaagatccaagtttagctaatggctgggcaattccaatggcaacagacattgcttttgcactgggaattatggcgttattgagtaaacaagtgccacttccactgaaaatatttttacttgcccttgctattattgatgacctcggtgcgatagttgttattgcattatttttctcgcacggattgagtgtacaagcactaattttttctgccgtggcaattattgtgctgatattactaaatcgtttcaaagtttccgcactttgcgcttatatggtcgtaggtgcaattttatgggcttccgtattaaagtctggtgtgcatgctactttagcaggcgttattattggttttagcattccattgaaaggtaaaaaaggagaacgcccattagatgatttcgagcatattttatcctcttggtcatctttcgttattttaccacttttcgcatttgccaatgctggtgtgagttttgctggcatagatgtgaatatgatttcgtcgccattattattggctatagcaagcggtttaattattggtaaaccagtcggtatatttggatttagttatctttctgttaaattgggattagctaaattaccagatggaattaattttaaacaaatttttgctgttgcggttttatgtggaatcggttttacgatgtcaatgttcttagcaagccttgcgtttgatgctaatgcgggggaaagtgtcaatactctttctcgtttaggtattctacttggatcaactgtttcggcaatacttggttatttattcttaaaacagacgacaaaactaagttaa

SEQ ID NO: 122 - protein, 400 aa, Haemophilus influenzae 86-028NP
MNFLLCIFKGVYVIKLIQRFFKLESAGGILLLFSAVVAMLLANSPLSNQYNDFLNLPVSLQIGSFSINKTLIHWINDGFMAVFFVLVGMEVKKELFEGALSTYQQAIFPAIAAIGGMVIPAVVYWFIAKQDPSLANGWAIPMATDIAFALGIMALLSKQVPLPLKIFLLALAIIDDLGAIVVIALFFSHGLSVQALIFSAVAIIVLILLNRFKVSALCAYMVVGAILWASVLKSGVHATLAGVIIGFSIPLKGKKGERPLDDFEHILSSWSSFVILPLFAFANAGVSFAGIDVNMISSPLLLAIASGLIIGKPVGIFGFSYLSVKLGLAKLPDGINFKQIFAVAVLCGIGFTMSMFLASLAFDANAGESVNTLSRLGILLGSTVSAILGYLFLKQTTKLS

SEQ ID NO: 123 - DNA, 1188 bp, Pseudomonas fluorescens Pf-5
  CDS (1)..(1188): transl_table=11
ttgcctctgcgtagcactttcactcgtttctttgccatggaagctgccagcggtctgttattgatcgccgctgccatcctggccctgattatcaacaactcccccctgtcctggctgtacaacggcctgctggaaaccccggtggtggcccaggttggcgccctgaagatcgccaagccgctgctgctgtggatcaacgatggcctgatggcactgttcttcctgctgataggcctggaggtcaagcgcgaagtgctggaggggcagttggccaagccgtcgcagatcgtcctgcccggcgcagcggccatcggcggcatgctggtgccggcgctgatctactggttcctcaaccgtgacaacccgcccgccctcaatggctgggcgattcccaccgccaccgacatcgccttcgccctcggggtgctggccttgctgggcaagcgggtgccgacctcgctgaaactgttcctgatgaccctggcgatcatcgatgacctgggagcgatcgtgatcatcgcgatcttctactccggcacgctgtcgaccctgtcgctgatgctggctggcgcctgcatcgccgccctggtagcgatgaaccggatgggcgtggtcaagctcggaccctacatgatcatcggcctgatcctctgggtctgcgtgctcaagagcggggtccacgcgaccctggccggcgtgaccctggccttctgcatacccttgcgcacccgcaacgccgaaccctcgccgctcaaggcgctggaacacgccctgcatccctgggtgtcgttcggcatcctgccactgttcgccttcgccaatgccgggctgtcgctgagcggcgtgaccctcgagagcttcacccaccatgttcccatggggatcgcggtcggcctgctgctgggcaagaccatcggcgtcttcggcctgacctggatggcagtgaaaaccggtatcgctgccttgccgtccggggccaactggggccaggtgctcggcgtggcaattctgtgtggtatcggcttcaccatgagcctgttcgtcggctccctggccttcgagcccggcagcagcgaatacgccggtatggaccgcatgggcatcctgaccggttcactgtttgcggccctgatcggttacgccgtcaccgccgctgccagccgcagaaacaacaccctggcgtcctga

SEQ ID NO: 124 - protein, 395 aa, Pseudomonas fluorescens Pf-5
MPLRSTFTRFFAMEAASGLLLIAAAILALIINNSPLSWLYNGLLETPVVAQVGALKIAKPLLLWINDGLMALFFLLIGLEVKREVLEGQLAKPSQIVLPGAAAIGGMLVPALIYWFLNRDNPPALNGWAIPTATDIAFALGVLALLGKRVPTSLKLFLMTLAIIDDLGAIVIIAIFYSGTLSTLSLMLAGACIAALVAMNRMGVVKLGPYMIIGLILWVCVLKSGVHATLAGVTLAFCIPLRTRNAEPSPLKALEHALHPWVSFGILPLFAFANAGLSLSGVTLESFTHHVPMGIAVGLLLGKTIGVFGLTWMAVKTGIAALPSGANWGQVLGVAILCGIGFTMSLFVGSLAFEPGSSEYAGMDRMGILTGSLFAALIGYAVTAAASRRNNTLAS

SEQ ID NO: 125 - DNA, 1203 bp, Psychrobacter arcticus 273-4
  CDS (1)..(1203): transl_table=11
atggcaatacataaaatcagagcgttttttaatctcgaggcgtcgggcggtattgtcttagcgctggcagctatcgcagccatgattattgctaatacttctctaaatacttggtacgaatcctttattcacgcacctgttgctattcaaattggcagcttttcaatcgctaaagatgcgcatcattggattaatgatggcttgatggcggtattcttctttttagtgggtcttgagcttaagcgtgaagtgttaattggcgagctgtccaatgtaaagcaaattatcttgccagcaggggcagcacttggcggtatggttatgccagccattgtctatctgttttttaactataatgagcctgaattttggcgaggttgggcgattcctacagcgactgatattgcctttgcccttggtattttgagcctacttggcaatcgcgtacccaactcattaaaagtattcttagtctctattgctatttttgatgatattggcgcgatcatcattattgctttattttataccaatgacttatcactcggttcactcgctatcgcaggcttatgtctgccgttcttatatatgctcaatcgtcgtaatgtgaccagtatcaccccctatttgctaattggcgttatcatgtggattgcggtactcaaatccggtatccatgcaacgttagcaggggtcgtattggcgctatttattcctttatttgaccgcactgaccctgagcactccccgcttgaagagcttgagcacgatctacaaaacacggtttcctatggcattttacccctatttgcttttgccaatgcaggcatttcgctcaagggcgcagggtttggtgagctgtttcattctgtgccgcttggtattgccgctggactgttcatcggtaaacaagtaggcgtcatgctgatgtgctggttaatctttaagctgggtatttctaccatgccaaaaggcatgaattttaagcaaatttatggcgcagcattgctatgcggtgtcggctttaccatgagtttgtttatcggtgggcttgcatttgccggtgagactccattatttgatgagcgtttaggtatcattatgggttcaatcgtctctggtatcgccggttacatgatgttaaaaactaccttaaaagatgaggttaatgtgacatctgtagacttaacacgtcattcttaa

SEQ ID NO: 126 - protein, 400 aa, Psychrobacter arcticus 273-4
MAIHKIRAFFNLEASGGIVLALAAIAAMIIANTSLNTWYESFIHAPVAIQIGSFSIAKDAHHWINDGLMAVFFFLVGLELKREVLIGELSNVKQIILPAGAALGGMVMPAIVYLFFNYNEPEFWRGWAIPTATDIAFALGILSLLGNRVPNSLKVFLVSIAIFDDIGAIIIIALFYTNDLSLGSLAIAGLCLPFLYMLNRRNVTSITPYLLIGVIMWIAVLKSGIHATLAGVVLALFIPLFDRTDPEHSPLEELEHDLQNTVSYGILPLFAFANAGISLKGAGFGELFHSVPLGIAAGLFIGKQVGVMLMCWLIFKLGISTMPKGMNFKQIYGAALLCGVGFTMSLFIGGLAFAGETPLFDERLGIIMGSIVSGIAGYMMLKTTLKDEVNVTSVDLTRHS

SEQ ID NO: 127 - DNA, 1107 bp, Candidatus Pelagibacter ubique HTCC1062
  CDS (1)..(1107): transl_table=11
ttgttaattgcagcaattattgctctggtaataagcaattctagtttaagtaatttatattttgatacattaaaccaatacctatttataggtattaatgatttcggtttaaaactttcggtacatcactggattaatgacttgttaatggcaattttctttttcttcgtaacactagaaataaaacgagaatttattcaaggtgagctttctaatttaaaaaaagcattgctgccaattataggagctgttgggggaatggtggtccctgctctagtctatgtttttataaaccttggtaattctgaaacattgaatggttgggcaattccatctgctacagacatagcgttttctttgggaattttgtccttacttggttcaagagttccaatttctttaaaagtttttttaacggctcttgctataatcgatgatcttggtgcaatattaattatagcttttttctactcaggtgacttaagcataagttatttaagtttaatcttaatttcatatattttactacttactttaaataaatttggtgttaaaaagtttattccctatttaataattggtgccttcatgtggtttttcacatataagtctggaattcacgcaacaatagcaggtgttcttttagcttcaaccatacctcacagaattaaagaaaaagatttctctttattaattaaattagaacatgcaatcagtccatatgttgcttttataataatgcctatatttgcatttgctaatgctggcgtatctttagaggggctatcattaacttcattattagaacctgttccattaggtattcttttagggttatttgttggtaaacaagttggggttatggttgtttctttcattgctgttaaatttggtgtagctcaaatgccagataaatctagctggttaagcttatacggagtttcaattttaactggggttggttttactatgagtttgtttgttggaaacttagcttttgccgaaaatattcagtatattgatggagtaaaaattggtgttcttgctggatctttactgtctactgtatttggatattttatattattgtatgcctctaaaaaataa

SEQ ID NO: 128 - protein, 368 aa, Candidatus Pelagibacter ubique HTCC1062
MLIAAIIALVISNSSLSNLYFDTLNQYLFIGINDFGLKLSVHHWINDLLMAIFFFFVTLEIKREFIQGELSNLKKALLPIIGAVGGMVVPALVYVFINLGNSETLNGWAIPSATDIAFSLGILSLLGSRVPISLKVFLTALAIIDDLGAILIIAFFYSGDLSISYLSLILISYILLLTLNKFGVKKFIPYLIIGAFMWFFTYKSGIHATIAGVLLASTIPHRIKEKDFSLLIKLEHAISPYVAFIIMPIFAFANAGVSLEGLSLTSLLEPVPLGILLGLFVGKQVGVMVVSFIAVKFGVAQMPDKSSWLSLYGVSILTGVGFTMSLFVGNLAFAENIQYIDGVKIGVLAGSLLSTVFGYFILLYASKK

SEQ ID NO: 129 - DNA, 1176 bp, Pseudomonas syringae pv. phaseolicola 1448A
  CDS (1)..(1176): transl_table=11
atgactcaagtttccaaccgggaaacgcccagaggcgttgccgtcctcagccgtttcctcgcctccgaatcagcaggcggcatcgtcttgatggcggcggcgctggccgcccttatcgtcgccaactcttctctctcagcgagctacttctcgattctgcacagcgtctggctgggcctgtcggtggagctgtggatcaacgacgggctgatggccatcttttttctgatggtcggcctggagatcaagcgcgaagtgctggccggcggcctggcaacctggggacaacgcgccctgcccggctttgcagcggcgggcggcatgctggtgcctgcgctgatctacatcgcgattaactggggcaacccgcaaaccctcagcggctgggcgattccagcggccaccgacatcgccttcgccctcggcgtgctgtcgctgctgggcaatcgggtgccgacctcgctgaaagtctttctggccgcgctggcgattctcgatgacttgggtgctgtaaccatcatcgcgtttttctacagctcggggcttaacctgccgatgctggccgccgcattcgcgaccctcgccgtactgatcgcgctgaatcgcctgaacgtccgccgcctgctgccctatttgctgctcggcgcactgctatggttcttcgtcctgcaatcgggcgtacacgccacgctggccggcgtggcgctggcgctgtgcatcccgatgggcaagcccgaggaggaagcacgctcgccgctgctgtttcttgaagaaaaaatgcattactgggtggcgttcgctgtggtgccgatcttcggctttgccaatgcgggtgtatcgctttccggcatcaccctggcaaacctgatcgacccggtgcctatgggtgtcgcattgggcctgttcgtcggcaagcagatcggagtgttccttgccgcagtgctggcgattcgtgccgggctggcgacattgccggaaaacagcaattgggtgcagttatacggcgtcgctattctgtgcggcatcggttttaccatgagcctgttcatcggcaacctggcgtttcctggttcgcagcacctgatcgatgaagtaaaagtcggcgtgctgatcggctcgggcctcgcggcaattgccggtattttgctgctgcgcacccgtttcagccggcactga

SEQ ID NO: 130 - protein, 391 aa, Pseudomonas syringae pv. phaseolicola 1448A
MTQVSNRETPRGVAVLSRFLASESAGGIVLMAAALAALIVANSSLSASYFSILHSVWLGLSVELWINDGLMAIFFLMVGLEIKREVLAGGLATWGQRALPGFAAAGGMLVPALIYIAINWGNPQTLSGWAIPAATDIAFALGVLSLLGNRVPTSLKVFLAALAILDDLGAVTIIAFFYSSGLNLPMLAAAFATLAVLIALNRLNVRRLLPYLLLGALLWFFVLQSGVHATLAGVALALCIPMGKPEEEARSPLLFLEEKMHYWVAFAVVPIFGFANAGVSLSGITLANLIDPVPMGVALGLFVGKQIGVFLAAVLAIRAGLATLPENSNWVQLYGVAILCGIGFTMSLFIGNLAFPGSQHLIDEVKVGVLIGSGLAAIAGILLLRTRFSRH

SEQ ID NO: 131 - DNA, 1179 bp, Pseudomonas syringae pv. phaseolicola 1448A
  CDS (1)..(1179): transl_table=11
atgcacaaccccaccccccgtaccgaatccccgagcgcgctggcgttcatcaagcgctttttcgccgctgaggccgctggcggtctgatcctgatggcggctgcgcttgcagccctgatcgtcgccaactcgccgctggccgacagctactttgcagcgctgcataccgtgctcgccgggatgtcggtagagcactggatcaacgatggcctgatggcaatcttcttcatgctggtgggcctggagatcaagcgcgaaatgctggccggccagctggcgtcctggagccagcgcgccttgccgggcttcgcggcgctgggcggcatggtggttccggcgttgatctacgtggcattcaattggggccagccagacaccattggcggctgggccattccggcagcgaccgacatcgcattcgccctgggcgtgctgtcattgctgggcaagcgtgtgccgttgtcgctgaagatattcctgtcggcactggcaattctcgatgacctcggcgctgtgctgatcatcgcgctgttctacaccagcgatctgtccattcccatgctgctggctgcacttggctccatcgccgtgctcgtcgcgctgaaccgcttgagcgttaaaaagctgctgccttacctgattgtcggcgcgctgttgtggttcttcatgctccagtccggtattcacgccaccttggcgggcgtagcgctggcactgtgcattccgctcggcaagcccgatgaagaagccagctcgccgctgctgcatctggaagaaaaactgcacccgtgggtcgcctttgccgtcgtaccggtctttggattcgccaatgccggcgtttcactgtcaggcatcacagtcgacaaactgctggacccggtgccgttgggcgtcgcgctggggctgctgatcggcaaacaggtcggcatcttcgccctcgctgcactggccatccgcgccggcctggcccgcttgccggacggcagcaactggggccagctttacggtgttgcggcgctgtgcggtattggcttcaccatgagcctgttcatcggcgcactggccttcccgggcgcaccggagctggtggatgaggtcaaggtgggcgtactgatcgggtcggtgttatcggcgttgcttggggttgtggtgttgcgcaggtttggagcgagggggtga

SEQ ID NO: 132 - protein, 392 aa, Pseudomonas syringae pv. phaseolicola 1448A
MHNPTPRTESPSALAFIKRFFAAEAAGGLILMAAALAALIVANSPLADSYFAALHTVLAGMSVEHWINDGLMAIFFMLVGLEIKREMLAGQLASWSQRALPGFAALGGMVVPALIYVAFNWGQPDTIGGWAIPAATDIAFALGVLSLLGKRVPLSLKIFLSALAILDDLGAVLIIALFYTSDLSIPMLLAALGSIAVLVALNRLSVKKLLPYLIVGALLWFFMLQSGIHATLAGVALALCIPLGKPDEEASSPLLHLEEKLHPWVAFAVVPVFGFANAGVSLSGITVDKLLDPVPLGVALGLLIGKQVGIFALAALAIRAGLARLPDGSNWGQLYGVAALCGIGFTMSLFIGALAFPGAPELVDEVKVGVLIGSVLSALLGVVVLRRFGARG

SEQ ID NO: 133 - DNA, 1170 bp, Dechloromonas aromatica RCB
  CDS (1)..(1170): transl_table=11
atggccgatactcagactaaactttctaaaaccttcagcaatttcttcgcatcagagaaaaccagcggcattttgttgattctctgcacaatcctgtcgcttagcattgccaattcgcttgcaggtcctgcttatcagggcttctggcatgccattgttgctggtttaagcattgagcactgggttaacgatgcgctgatggctgtgttcttcctgtttgtcggcttggaactggagcgcgaactgtacaacggcgagctttcaaatttcaggaatgccttgctgccaatctttgccgcaatcggcggcattggggtgccagcattgatacattacacactgaacgttggcacgccgactcaagccggaactggtattccgatggcaactgatattgcctttgcgctcggcgtgctggcgctgttggggagtcgggttcccgcatcgctgaaggtgttcttgactgcgctcgcagtgatggacgacttgggtgcgatcatcgtgatcgccatgttctatacccagcagttttccttggtctatctgctaagtgcgctggcggtgttcggcctactgctggtgctcaatcgaatattccgggtgatgtcgctgcttccctacctgcttggcggcgcgttgatgtggtttttgatgctcaagtccggtgttcatgcaacgattgccggcgtactgcttgcgtttgccattcctttttccgccaaagccgatgatgaaaaatccccttctcatcgactagagcacttcctgcacaagccggtggcgttcatcattttgccgatttttgccttggccaataccgggatcgtgattggctctgaatggcagcatgaactgctaacccccaatagtttgggcatcatcggtggcttggtatttgggaaaccgcttgggattgccttgttgagcttcgttaccgtggcgatcggggtttgtcggcttccggacgatctgaagtggactcacatcgttggcgccggcatcttgggaggtattggttttacgatgtccattttcatcacgaatcttgcatttaccaacaatgcgagcattatcaacgcgtcaaaaatggctatcttgatggcatctgttgctgcgggggggctcggctttctttggctgagtttttttcagcaaaacgataaccaatga

SEQ ID NO: 134 - protein, 389 aa, Dechloromonas aromatica RCB
MADTQTKLSKTFSNFFASEKTSGILLILCTILSLSIANSLAGPAYQGFWHAIVAGLSIEHWVNDALMAVFFLFVGLELERELYNGELSNFRNALLPIFAAIGGIGVPALIHYTLNVGTPTQAGTGIPMATDIAFALGVLALLGSRVPASLKVFLTALAVMDDLGAIIVIAMFYTQQFSLVYLLSALAVFGLLLVLNRIFRVMSLLPYLLGGALMWFLMLKSGVHATIAGVLLAFAIPFSAKADDEKSPSHRLEHFLHKPVAFIILPIFALANTGIVIGSEWQHELLTPNSLGIIGGLVFGKPLGIALLSFVTVAIGVCRLPDDLKWTHIVGAGILGGIGFTMSIFITNLAFTNNASIINASKMAILMASVAAGGLGFLWLSFFQQNDNQ

SEQ ID NO: 135 - DNA, 1245 bp, Thermobifida fusca YX
  CDS (1)..(1245): transl_table=11
atgcccacgcgtccggcccgcagcgggctgcactcgcttgctcaactgctccgctccgacgtggtgggcggctttctcctcatcggaggcgcgcttaccgcgctgatctgggccaattccccgttcgggcacgtctatgaggccctgcggagcttctccttcggaccggaagcactccacctgcacctcaccgtcgaagcgtgggttgccgacggtctgctcgccatcttcttcttcgtcgtcggcaacgagctcaaacaagagttcgtccacggagagctgcgcaacccccgccgggcgatgctccctatcgtcgctgccgtgtgcgggatggcggttcctgccctgatctacgcggccttcaacgcgggtgatccggcccgcctccccgggtggggaatcccgatggccaccgacatcgccttcgcggtcgcgatcctggcggtggtcggccgccacctgccctccccgctccgcacattcctgctcaccttggccatcgtggacgacctcggtgcaatcatcgtcatcgcggtcttctacaccgcttccctctccttcctgcccctgatcggtgcggggatgctgctcgcggtcttcggctacctgcagcgcgggcggggcgtggcggcccgcctcaactccgcggccctgcccaactgggtggtctaccttccgctcgccggcgtgatctgggccctcgtccacgccagcggagtgcacgccacgatcgccggggtcgccatggggctgctcatgcgcacggtgccgctcgccggagaaaaagagtcccccagccaccgtctcgcccaccttctcggcccgtggtcgtccgggctggtgcttccggtgttcgcggtgatgtccgcaggcgtcgtttttgcgggcgggctcggcgcggtactcgacgacacggccgcgctcggcatcatcgccggtctcgtcgtcgggaaaacagtgggtatcgccggcggctcctgggtgaccaccaaactcactgccgcggaactgagcccggcgctgcgttggatcgacatcaccggcatggccctgctggcggggatcgggttcaccgtctccctgctgattaccgacctgtctttccccgactatccggaggcgctggtgcacgcgaaagccggggtgctgttggcctcgctgctggccaccgtgctgggggccgtggtgctggccgtgcgcaacgcccactaccggaagctgcgccaggcggtttccccgcaatga

SEQ ID NO: 136 - protein, 414 aa, Thermobifida fusca YX
MPTRPARSGLHSLAQLLRSDVVGGFLLIGGALTALIWANSPFGHVYEALRSFSFGPEALHLHLTVEAWVADGLLAIFFFVVGNELKQEFVHGELRNPRRAMLPIVAAVCGMAVPALIYAAFNAGDPARLPGWGIPMATDIAFAVAILAVVGRHLPSPLRTFLLTLAIVDDLGAIIVIAVFYTASLSFLPLIGAGMLLAVFGYLQRGRGVAARLNSAALPNWVVYLPLAGVIWALVHASGVHATIAGVAMGLLMRTVPLAGEKESPSHRLAHLLGPWSSGLVLPVFAVMSAGVVFAGGLGAVLDDTAALGIIAGLVVGKTVGIAGGSWVTTKLTAAELSPALRWIDITGMALLAGIGFTVSLLITDLSFPDYPEALVHAKAGVLLASLLATVLGAVVLAVRNAHYRKLRQAVSPQ

SEQ ID NO: 137 - DNA, 1368 bp, Nitrobacter winogradskyi Nb-255
  CDS (1)..(1368): transl_table=11
atggaccgacagacctctccccgtgacctgccgcgggcccagttcctcgccgagcgggcccttacgacgctggagcgcttcctgcatgtcgaggccgtcagcggcatcgtgctgctggtcgcggctgctgttgcactgatctgggccaactcccctttcgcccaaagctatcacgacctgtggcatctgccgctttcgatcgggctcggcactttcgtctatgcgcagtccctgcatttctgggtcaacgatgcgctgatgacagtgttcttcctggtcgtcggcatggaaatccggcgcgagatccatgaaggggcactgagcaaactcgaccaggcgatcctgccggtggcggcagccgccggaggggtcatcgttcccgcactgatctaccttgtgctgaacaccgacatggtgcgcgcgcacggctgggcggtgccgacggcgaccgacatcgctttcgcggtgggcgtgctcgccctgctgggccgctcgatccccggcaacttgcgcgtctttctgctcgcactcgcgatcatcgacgacgtcgttgctgttttgatcatagccttcttctactctggcgggctcgatcccagcggttttgcgattgccgccctcggcgtcgtgatggtggtggggcttcagcggatcggtgtcggctcggcctatgcctacgtccttcccggcgccgtgatctgggttggcctgctggtgaccggggcccacccgactctcgccggcgtcgtactcggattgatgacgccggtgatgtccattccgatgcgcgagcagcctatagacgtgttgtcccgtatttccgaggagctgcgaagccacgacgccgtgtcgacgaaagatgcgcgtcgtctggctcacccccggcggcagttgcgcctcgccaatcgggagatgctgccgccagtggtgcgtgtacagacagcgttgcatccctgggtcgcctacggcgtcatgcctctctttgcgctggcgaatgcgggcgtgagtgtcggtggcgtcaatctgttcgcaggagaagcgcatctcgccatgctcggcgtcgggcttgctctcgttgtaggcaagccgctcggcgtagtcggcgcgacatggttcatggtgcggatgggctggtgccggttgccgccgggcgtgtcatggggcggcattttgttgatcggtctgctagccggtatcggctttaccatgtccattttcatcgccattcttgcttttgccgatgagaatctgctggccgcggcaaagctcggcgtgctgctaggctcttcggtggccgcgctgctcgggcttggctggggcgcattgtacgtccgcagactcagagcgcggacgggcgctcacgattga

SEQ ID NO: 138 - protein, 455 aa, Nitrobacter winogradskyi Nb-255
MDRQTSPRDLPRAQFLAERALTTLERFLHVEAVSGIVLLVAAAVALIWANSPFAQSYHDLWHLPLSIGLGTFVYAQSLHFWVNDALMTVFFLVVGMEIRREIHEGALSKLDQAILPVAAAAGGVIVPALIYLVLNTDMVRAHGWAVPTATDIAFAVGVLALLGRSIPGNLRVFLLALAIIDDVVAVLIIAFFYSGGLDPSGFAIAALGVVMVVGLQRIGVGSAYAYVLPGAVIWVGLLVTGAHPTLAGVVLGLMTPVMSIPMREQPIDVLSRISEELRSHDAVSTKDARRLAHPRRQLRLANREMLPPVVRVQTALHPWVAYGVMPLFALANAGVSVGGVNLFAGEAHLAMLGVGLALVVGKPLGVVGATWFMVRMGWCRLPPGVSWGGILLIGLLAGIGFTMSIFIAILAFADENLLAAAKLGVLLGSSVAALLGLGWGALYVRRLRARTGAHD

SEQ ID NO: 139 - DNA, 1188 bp, Pseudomonas fluorescens PfO-1
  CDS (1)..(1188): transl_table=11
ttgcctctgcgtagcactttcacgcgtttctttcagttggaagctgccagcggtctgttactgatcgccgcggccatcctggctctaatcatcaacaactcgccgctgtcgtggttgtacaacggcctgctcgacaccccggtggtggcgcagatcggcgcgttgaaaatcgccaaacccctgctgctgtggatcaacgacggcctgatggcgctgttcttcctgctgatcggcctggaagtgaagcgcgaagtgctcgacggtcagctgtcgaaaccatcgcagatcgtcctgcccggtgcggccgcaattggcggcatgctggtgccggcgctgatctactggttcctcaaccgtgacaacccggcagccctcgacggctgggcgattccgaccgccaccgacatcgccttcgcccttggcgtactggccttgctcggcaagcgcgtgccggtatcgctgaagctgtttctcatgaccctggcgatcatcgatgacctcggcgccatcgtgatcatcgcgatcttctattccggcgaactctcgaccctgtcgctgggccttgcggcggcgtgcattgcggcgctggtagcgatgaaccggctcggggtggtcaagctcgggccatacatgatcattggtctgatcctctgggtatgcgtgctcaagagcggtgtccacgcgacgctggccggcgtaaccctggcgttctgcatcccgctgcgcacgaaaaacgccgaaccttcgccgctgctgaccctcgaacacgcgctgcacccgtgggtcgcttacggcattctgccgctgtttgccttcgccaacgcaggtctgtcgctgagcggcgtgactgtcgagagcttcacccaccacgtgccgatgggcatcgccgtcggcctgctgctgggcaagaccctcggcgtgttcggcctgacctggctcgccgtcaagaccggcatcgccgccctgccccaaggtgccaattggggccaggtgctgggcgtggcgatcctctgcgggatcggcttcaccatgagcctgtttgtcggctccctggcattcgtgccgggtgccagtgaatacgccgggatggaccggatgggcattctcaccgggtcggtgtttgcggcattgatcggttatgcggtgacggcggctgcgagtagaaagaacaccgcgctgccttcctga

SEQ ID NO: 140 - protein, 395 aa, Pseudomonas fluorescens PfO-1
MPLRSTFTRFFQLEAASGLLLIAAAILALIINNSPLSWLYNGLLDTPVVAQIGALKIAKPLLLWINDGLMALFFLLIGLEVKREVLDGQLSKPSQIVLPGAAAIGGMLVPALIYWFLNRDNPAALDGWAIPTATDIAFALGVLALLGKRVPVSLKLFLMTLAIIDDLGAIVIIAIFYSGELSTLSLGLAAACIAALVAMNRLGVVKLGPYMIIGLILWVCVLKSGVHATLAGVTLAFCIPLRTKNAEPSPLLTLEHALHPWVAYGILPLFAFANAGLSLSGVTVESFTHHVPMGIAVGLLLGKTLGVFGLTWLAVKTGIAALPQGANWGQVLGVAILCGIGFTMSLFVGSLAFVPGASEYAGMDRMGILTGSVFAALIGYAVTAAASRKNTALPS

SEQ ID NO: 141 - DNA, 1191 bp, Pelobacter carbinolicus DSM 2380
  CDS (1)..(1191): transl_table=11
atgactgtccagactatccgtgattttttaaaactcgaatcggccagtggcctgctgctgatcggtgccatgctgctggccgtgctatgcgccaacacgccgctttcctggctttacgacggttttctgcaaacccggttcgagatccatttcggagcgttgagccttgccaaacccctgctgctatggatcaacgacggcctgatggccatcttttttctgctggtcggacttgaggtcaaacgcgagatactcgagggggagttgtccagcctgccgcagatagcattgcccggaatcgccgccgtcggcggcatgttggtcccagcgctgatctataccggcatcaactggtccgcgcccgccaccctgcagggctgggccatcccggcagccaccgacatcgcctttgccctgggggtgatcgccctgctcggcaagaacgtaccgggccctctcaagctttttctgctcaccctggccattctggatgacctgggagcgattgtcattatcgcacttttttataccgccgatctgtccgtcttatcgctggtgctggcgatgatagcggtggccggcctgtttatcctgaatcgtaccggcgtaacgcacattgcggcctacgtccttctcggggtatttctgtggatctgcgtacttaaatccggagttcacgctaccctcgcgggggtagttctggccttcgccatccccttgcgcacaaaggatcaggacggccattctctgctgcgccatcttgaacataccctgcacccctgggttgcctacggcatcctgccgatttttgcctttgccaatgccggcgtatccctcgccggaatatcatttacggatgttttctcccctctgcccctgggcatagccgccggactcttcgtcggcaaacagttcggtatcgttgtcttctcctggatcggcgtcaaactgagaatggcccgcctgccgcagggcgtcagctggggcgaatttcacggcatggcggtattgtgcggcatcggctttaccatgagtctgtttatcgcaaccctggcgttggacggcagtcaggaaacggcggatgccgctcgtctaggagtcctgctaggctctttgatgtcggcgctcagcggctattacctgctgaaaagggctgttcgaaaacgcgcactcagagccgaggcaccctga

SEQ ID NO: 142 - protein, 396 aa, Pelobacter carbinolicus DSM 2380
MTVQTIRDFLKLESASGLLLIGAMLLAVLCANTPLSWLYDGFLQTRFEIHFGALSLAKPLLLWINDGLMAIFFLLVGLEVKREILEGELSSLPQIALPGIAAVGGMLVPALIYTGINWSAPATLQGWAIPAATDIAFALGVIALLGKNVPGPLKLFLLTLAILDDLGAIVIIALFYTADLSVLSLVLAMIAVAGLFILNRTGVTHIAAYVLLGVFLWICVLKSGVHATLAGVVLAFAIPLRTKDQDGHSLLRHLEHTLHPWVAYGILPIFAFANAGVSLAGISFTDVFSPLPLGIAAGLFVGKQFGIVVFSWIGVKLRMARLPQGVSWGEFHGMAVLCGIGFTMSLFIATLALDGSQETADAARLGVLLGSLMSALSGYYLLKRAVRKRALRAEAP

SEQ ID NO: 143 - DNA, 1317 bp, Pelobacter carbinolicus DSM 2380
  CDS (1)..(1317): transl_table=11
atgccttttcgaatcgcttttctgaagcagccgttcgaggactttttcaaacaccaggcgtccggcggtatcgtcttgctcggggccacggttttagctctggtcctggccaattccccctggagcggtcagtatttccatttctgggaaatcaagctgaccatcggatttgatcatttcggtctgacccagacgttacaccattggatcaacgatggcttgatggccgtgttttttttcctggtcggtctggaactcaaacgagaattcatggacggcgaactggccagtttccgccaggctatgctgcccattgcggcggcgtttggcggtatgctggtgcctgccctgatttttcatttcatcaacccgatggtacctgaagccaagggctgggggatccccatggcgacggatatcgcttttgccctgggggttctggcgctgctccggggcaagatttccaggtcgcttgccatctttttaacggccctggctattgttgacgatctcggcgcggtgctggtgatcgccctgttttatagcggcgaattggccgttggaaaattgcttgtggccctggtgttgctgctgattctgatcgccggcaaccgcctgggggtgcagtccctcaatttttacggtttgctcggattctgtctgtgggtggtgttgttgaaatccgggttgcatgcgtccattgccggggtgttgatagggatggtcattcctgcgaggccgcgcctttgccacgaggagttcgtggatcagacggaaaaatacatggcacgttataaggaaatcggagaagttcccgggccttttcatcatgaggaacggctcggcgcgctgctcgcgctcgagcacatttgccatgacgccatgagttccttgcagcgcatggagcacgagttgcaccactgggtgattttcggcgtcataccgatcttcgcccttgcaaacgccggtctggtgctgcaactgggaaatctggttaccgcggtgacccatccggtcaccctcggggtggccctgggattgctgctgggcaagccccttggcattctgtttttttcatggatttcggttcgtgtcggactctgtgctctgccacggggaacctcctggatggatgtttttggggtcggcatccttggtggcatcgggtttaccatgtcgttatttatcagtaatctggcgtttatgaatatcgtcatgtccaataacgccaagcttggcatttttatcgcgtccatgctggccggtgcggcaggtttcactgttctttcgcgtgcttctgcccgcaaggcccattga

SEQ ID NO: 144 - protein, 438 aa, Pelobacter carbinolicus DSM 2380
MPFRIAFLKQPFEDFFKHQASGGIVLLGATVLALVLANSPWSGQYFHFWEIKLTIGFDHFGLTQTLHHWINDGLMAVFFFLVGLELKREFMDGELASFRQAMLPIAAAFGGMLVPALIFHFINPMVPEAKGWGIPMATDIAFALGVLALLRGKISRSLAIFLTALAIVDDLGAVLVIALFYSGELAVGKLLVALVLLLILIAGNRLGVQSLNFYGLLGFCLWVVLLKSGLHASIAGVLIGMVIPARPRLCHEEFVDQTEKYMARYKEIGEVPGPFHHEERLGALLALEHICHDAMSSLQRMEHELHHWVIFGVIPIFALANAGLVLQLGNLVTAVTHPVTLGVALGLLLGKPLGILFFSWISVRVGLCALPRGTSWMDVFGVGILGGIGFTMSLFISNLAFMNIVMSNNAKLGIFIASMLAGAAGFTVLSRASARKAH

SEQ ID NO: 145 - DNA, 1353 bp, Desulfovibrio desulfuricans G20
  CDS (1)..(1353): transl_table=11
atgcaacaccacgacatacccggggccgccccccagcccatcgacaaactgctggcgcctttcaggcgtttctttgccatcgaggcatccagcggcattctgctgatggccgccaccgtgctggcgctggtatgggcaaactcaggcttttctgcatcgtaccatgcgctgtggagcaataaagtaaccgtgggcttcggcgactacgccttgtccaaagctcttatcctgtggatcaacgacggtctgatggccatatttttctttgtggtcggactggagataaagcgcgaaattctggcgggtgaactggcatcgcccaggcaggcagcgctgcctattgccgcggccataggcggcatgctggttcccgcaggcatttatctggcgcttaacggcggtaccgctgccgccagcggctggggcgtgcccatggccaccgacattgcttttgcccttggtattctttcgcttctgggtgaccgtgtaccgcttagcctcaaagtgtttcttacggcagtggccattgtggatgatctgggtgccattctggtcatcgcatttttttatactgcaaacctgtcgttcagctttctcatgctggggtttgcggcgtttgcggtcatgctgctgctcaactggctgggcgtgcgcagggtaaccccgtacctgcttgtggggctggtgctgtggtttgccctgctgaaatccggcgtgcatgccaccatagccggcgtgctgggtgccatggccataccggcccgctccgcactggcaccggctgttctgcgcggtactgcccgtcaggcgctttccgtgtttgaaaacgcccttcagggcgatacgcctgtgcttgccagtcaggataaatcgcatgccatacatcatgtggaaatgctgaccgaaaaggcgggcacacctttgcagcggcttgagcatgccctgcatccgtgggtggcatggttcatcatgcctgtctttgctcttgccaacgcaggtgtcaccgtcagcgccgaaatggtgagcatgctgtttgaaccgctttccctcggcatattcttcggcctgctgctgggcaagcagggcggcgtcacgctggcggtgtggctgctggtaaagaccggtatcgccaagctgccgaagggtgtcggtctggggatgtactacggtatcggctggcttgccggtatcggcttcaccatggccattttcatcgccacactggcgtttgaagaccctgcacatattgaggccgccaagatgagtattctttgtgcctcgtttgtggccggtttcggcgggtatatgctgatgcgtgtgctgctgcgcggtcgcgagcctgaaaaggcttag

SEQ ID NO: 146 - protein, 450 aa, Desulfovibrio desulfuricans G20
MQHHDIPGAAPQPIDKLLAPFRRFFAIEASSGILLMAATVLALVWANSGFSASYHALWSNKVTVGFGDYALSKALILWINDGLMAIFFFVVGLEIKREILAGELASPRQAALPIAAAIGGMLVPAGIYLALNGGTAAASGWGVPMATDIAFALGILSLLGDRVPLSLKVFLTAVAIVDDLGAILVIAFFYTANLSFSFLMLGFAAFAVMLLLNWLGVRRVTPYLLVGLVLWFALLKSGVHATIAGVLGAMAIPARSALAPAVLRGTARQALSVFENALQGDTPVLASQDKSHAIHHVEMLTEKAGTPLQRLEHALHPWVAWFIMPVFALANAGVTVSAEMVSMLFEPLSLGIFFGLLLGKQGGVTLAVWLLVKTGIAKLPKGVGLGMYYGIGWLAGIGFTMAIFIATLAFEDPAHIEAAKMSILCASFVAGFGGYMLMRVLLRGREPEKA

SEQ ID NO: 147 - DNA, 1335 bp, Thiomicrospira denitrificans ATCC 33889
  CDS (1)..(1335): transl_table=11
atgaaactatatgcaccttggcagagagcttttgagaaaatagctacaccttttgagcagttccttcacgctcaaacaacgactggacttatgttaatgcttatgacagtagtagcgcttcttcttgcaaactcaccactctccgatgaatatctacacatatttcatacaaatatagatatttttgttggaaattatggcttctcaaagagtattcatcactggataaatgatggacttatggctatctttttctttattatcgggcttgagataaaaagaaatattttagtaggagagttatcaaatataaaagttgcaatgctaccaatactcgcagctatcggagggatggcacttcctgcactcatctactacgctataaactatggcgatataggggaggctggatggggaatcccaatggctacagatattgcatttgcaattagcgctttggttcttcttggaagaagagtctcagcatcacttgtaacatttttagtagctcttgctatcgttgatgaccttggcgctgttgttgtaatcgctcttttttacacacaagagattaacatgctgcctcttctttttgcttttatatcttttttggttttagtatcatttaatcgttttggcatacatgcaatactcccttactttgtagttgggtttatcatgtggctatttatgttggaatcaggcatacacgcaacagtggctggagttatagctgctatggcaattccatcaagacctaaatataccccaatggatttcacaaaatcagtaaaatcgagattggatgagtatgacaactaccccattgaagataactacatgttacatgaacagcaaaaagcaatcctacaaaatgtaaaagacaaaatagatgctataagctctccatcggctagacttgaacactcgcttcatcttccagtgagtttagtagttatccctctttttgcacttgcaaatgctggggtttcaataaatttttcatctgcctatgatactctgcttcaaccaatctctttgggagttatggctggtcttgtttttggaaaagtttttggaatagctggtatctcttatcttgctataaaacttgggattgcaaagcttcctgagggcagcacaatgagtcaagtttttggtgtcgcttttcttggcggtataggctttacgatgtctatatttatcgcagagcttgcatttgctggaaatagtgagctagtatttcaagcaaaaataggcattttagcagcatctctatttgctggaatctttggttttatctggcttagatttatcgcaaaaagtgcaaactaa

SEQ ID NO: 148 - protein, 444 aa, Thiomicrospira denitrificans ATCC 33889
MKLYAPWQRAFEKIATPFEQFLHAQTTTGLMLMLMTVVALLLANSPLSDEYLHIFHTNIDIFVGNYGFSKSIHHWINDGLMAIFFFIIGLEIKRNILVGELSNIKVAMLPILAAIGGMALPALIYYAINYGDIGEAGWGIPMATDIAFAISALVLLGRRVSASLVTFLVALAIVDDLGAVVVIALFYTQEINMLPLLFAFISFLVLVSFNRFGIHAILPYFVVGFIMWLFMLESGIHATVAGVIAAMAIPSRPKYTPMDFTKSVKSRLDEYDNYPIEDNYMLHEQQKAILQNVKDKIDAISSPSARLEHSLHLPVSLVVIPLFALANAGVSINFSSAYDTLLQPISLGVMAGLVFGKVFGIAGISYLAIKLGIAKLPEGSTMSQVFGVAFLGGIGFTMSIFIAELAFAGNSELVFQAKIGILAASLFAGIFGFIWLRFIAKSAN

SEQ ID NO: 149 - DNA, 1419 bp, Bifidobacterium longum DJO10A
  CDS (1)..(1419)
atggccacgaccgccggcgcgaagaagggactttggtccaccatcaggcgaatcgccgcctcagaccgtatttccggactcatcatgctcggcttcgcgctcaccggcctggtgctcgcgaatctgcccgccaccgcgcatgcgttcgagaccgtagcggaaacgcatctgttcatcccctacaccaatctcgacctgcctattggccactgggcccaggatggtctgcttaccatcttcttcctgaccgtgggcctcgaactgaagcaggaactcaccaccggctcgcttgccaatccgaaagcggccgccgtgccgatgctgtgcgcggtgggcggcatgatcgccccgcccatcctgttcctggccgtcacggcattgttctctcagatcgggcctggtgaacccggcacgctgattctgaccaccaccggcagcagcatcccgttctcggagatgtcgcacggctgggcagtgcccaccgccacggatatcgcgttctcgctggccgtgctcgccctgttcgccaaggccctgcccggttcgatccgcgcgttcctgatgacgcttgccaccgtcgacgacctgctggccattattctgatcgccgtattcttctcctcgattaacgcctggtattggttcatcggcatcgccgtatgcgccgccatctgggcatacctcgtacgactgaaaaaagtgccgtggatcgcggttggcatcgtcggtatcctcgcttggatcatgatgttcgaggcaggcgtgcaccccacactggccggcgtgctggttggcctgctgaccccctctcgtgaaatgcacggcgaactctcgccgcgtgccgaacgctatgccaacaagctccagccattctccgcactgctggccctgcccatcttcgccttgttcgccaccggcgtacacttcgagtcgatgagcccgctattgttggcctcgccgctggtcatcgcactgattgtggctttggtggtcggcaaacctctgggtatcatcaccaccgcatggctgtccacgcatgtgggcgggctcaagatggccaaggggctgcgtgtgcgcgacatgattcccgctgccgtcgcctgcggcattggcttcactgtgtccttcctcatcgcttcgctggcgtacaagaacgcggaactttccgctgaggcgcgcttcggcgtgctggtggcctccctgatcgccgccgcgatttccggtgtgctgctgagccgtcagtccaagcgattcgagaagaccgcagccgcagcagcggctgatgcggaggatgacgaatcgattgatggtgatggcatcgggcagccaagccacaccacagagcccaccacgcccacggaacaccccggcaccctcgccgacggcaccgccagtgtggaaatcgacttccgccactga

SEQ ID NO: 150 - protein, 472 aa, Bifidobacterium longum DJO10A
MATTAGAKKGLWSTIRRIAASDRISGLIMLGFALTGLVLANLPATAHAFETVAETHLFIPYTNLDLPIGHWAQDGLLTIFFLTVGLELKQELTTGSLANPKAAAVPMLCAVGGMIAPPILFLAVTALFSQIGPGEPGTLILTTTGSSIPFSEMSHGWAVPTATDIAFSLAVLALFAKALPGSIRAFLMTLATVDDLLAIILIAVFFSSINAWYWFIGIAVCAAIWAYLVRLKKVPWIAVGIVGILAWIMMFEAGVHPTLAGVLVGLLTPSREMHGELSPRAERYANKLQPFSALLALPIFALFATGVHFESMSPLLLASPLVIALIVALVVGKPLGIITTAWLSTHVGGLKMAKGLRVRDMIPAAVACGIGFTVSFLIASLAYKNAELSAEARFGVLVASLIAAAISGVLLSRQSKRFEKTAAAAAADAEDDESIDGDGIGQPSHTTEPTTPTEHPGTLADGTASVEIDFRH

SEQ ID NO: 151 - DNA, 1185 bp, Actinobacillus pleuropneumoniae serovar 1 str. 4074
  CDS (1)..(1185)
atgttaaaacaaattcagaaatttctgaaattagaagcggcgagtggtatcttgctattggtatcggcactacttgcgatgatttttgccaatactgatttgaatcagttatattttagttttctacaaacggaagtagcgattaaattcggtgcttttagtattgataagccgttattaatgtgggtaaacgacggctttatggcggtcttttttatcttagtcggtatggaagtaaaaagagagctgtttgagggctcgctttcaagctatcaaaaagcgatcttccctgccgttgccgcgctgggggggatggttgtccctgctttggtttattggtttattaaccaaaatcatccggaatatcaatcaggttgggcgattccgatggcaaccgacattgcctttgcattaggaattgtcgccttactcagtaaacaggtgccgccggcactcaaagtatttttacttgcattggcgattattgacgacttaggggcgattatcgtgattgccttattcttctcgcatgagatgagtatgcaagctttaactattgcaagtatcgcgattgttattttagtggcaatgaatcgttataaagtaaccggattaatcaactacgccattatcggtactattctttgggcttcggttttaaaatccggagtacacgcaaccttagcgggtgtgattatcggtttctgtattccgttgcgcggtaaaaacggcgaagcgccgttacatcatttggaacatgcgcttgccccgtggtgttcgtttgcgattttaccgttattcgctttctcgaatgccggcgtatcgctggaaggtatgagcttggataaattagcctctccgttaccattaggggtggcattaggtttaattatcggtaaaccggtcggtgttttcttatttagctatgtagccgtattgttaggtatagcaaaagtacctgaaggtatcaatttaaaacaaattttcgcgattgcggtactttgcggtatcgggtttactatgtcgatgtttattgccggacttgcattcggagaggaagaggcgagtgaaaatatgcttgccttagctcgtttaggtattctcatgggtacatttgtttcggcgataatcggttatttcttattgaaaatcacgacgaagccaagcctaatgaaagcggcgtaa

SEQ ID NO: 152 - protein, 394 aa, Actinobacillus pleuropneumoniae serovar 1 str. 4074
MLKQIQKFLKLEAASGILLLVSALLAMIFANTDLNQLYFSFLQTEVAIKFGAFSIDKPLLMWVNDGFMAVFFILVGMEVKRELFEGSLSSYQKAIFPAVAALGGMVVPALVYWFINQNHPEYQSGWAIPMATDIAFALGIVALLSKQVPPALKVFLLALAIIDDLGAIIVIALFFSHEMSMQALTIASIAIVILVAMNRYKVTGLINYAIIGTILWASVLKSGVHATLAGVIIGFCIPLRGKNGEAPLHHLEHALAPWCSFAILPLFAFSNAGVSLEGMSLDKLASPLPLGVALGLIIGKPVGVFLFSYVAVLLGIAKVPEGINLKQIFAIAVLCGIGFTMSMFIAGLAFGEEEASENMLALARLGILMGTFVSAIIGYFLLKITTKPSLMKAA

SEQ ID NO: 153 - DNA, 1080 bp, Magnetospirillum magnetotacticum MS-1
  CDS (1)..(1080)
atgattgctgcgggcttggccttgggtgtcgccaattcaccgcagtcagaagtctatttcgcgtcgcttcaggccagttatctgggtctcagcattctgcattggatcaatgacgggctgatggcggtgttctttcttctggtcgggctggagatcaagcgcgaggtgctggtgggtcagttgtcaacctggccgcagcgcgctctgcccggtgttggggccttgggaggaatggcggcaccagccctggtctatctggccttcaacggggcttccccgctggcgatccgcggctgggccatacccaccgccaccgatatcgcctttgcgctgggcgttctcgcgctgctgggatcaagggttccggcctcactgaaagtttttctgaccgccctggccatcatggatgatctgggggctgttctgatcatcgctttgttctatacggcgcaactgtcttggcttgctttggggctagcggcggtactgctgggcgggctggtgttcctgaaccgtaccggtgtgcgtgttttgtggccctatttgctcctgggggcggggctgtgggtcgccatgctgcaatcgggcatccatgccaccatcgccggtgttgtgcttgccatgaccattcccatgggagaaggggaaggggcgcccttgctgaggttggaacatggcctggccaaatgggttggttatggcgttgttccgatcttcggctttgccaatgccggcgtttcctttagcgggctcgacccatccgtgatttttggcggcgttcctgtgggcatttctctggggttgttcctcggcaagcaattcggcgttttcgccgcaatctggtgcgccatccggttcaagcttgccgtttgtcccgatggcgccagtttgtcccagctttacggaatcgctgtgctgtgcggcatcggcttcaccatgagcctgttcattggcgcccttgcttttgcaggacattccgacatgaccaatgccgtgaaaatcggtgttttggccggatccgggctttccgccatcctgggctccgccatccttttaagatgcacacgagtgtcgtcataa

SEQ ID NO: 154 - protein, 359 aa, Magnetospirillum magnetotacticum MS-1
MIAAGLALGVANSPQSEVYFASLQASYLGLSILHWINDGLMAVFFLLVGLEIKREVLVGQLSTWPQRALPGVGALGGMAAPALVYLAFNGASPLAIRGWAIPTATDIAFALGVLALLGSRVPASLKVFLTALAIMDDLGAVLIIALFYTAQLSWLALGLAAVLLGGLVFLNRTGVRVLWPYLLLGAGLWVAMLQSGIHATIAGVVLAMTIPMGEGEGAPLLRLEHGLAKWVGYGVVPIFGFANAGVSFSGLDPSVIFGGVPVGISLGLFLGKQFGVFAAIWCAIRFKLAVCPDGASLSQLYGIAVLCGIGFTMSLFIGALAFAGHSDMTNAVKIGVLAGSGLSAILGSAILLRCTRVSS

SEQ ID NO: 155 - DNA, 1152 bp, Pseudomonas fluorescens PfO-1
  CDS (1)..(1152)
ttggaagctgccagcggtctgttactgatcgccgcggccatcctggctctaatcatcaacaactcgccgctgtcgtggttgtacaacggcctgctcgacaccccggtggtggcgcagatcggcgcgttgaaaatcgccaaacccctgctgctgtggatcaacgacggcctgatggcgctgttcttcctgctgatcggcctggaagtgaagcgcgaagtgctcgacggtcagctgtcgaaaccatcgcagatcgtcctgcccggtgcggccgcaattggcggcatgctggtgccggcgctgatctactggttcctcaaccgtgacaacccggcagccctcgacggctgggcgattccgaccgccaccgacatcgccttcgcccttggcgtactggccttgctcggcaagcgcgtgccggtatcgctgaagctgtttctcatgaccctggcgatcatcgatgacctcggcgccatcgtgatcatcgcgatcttctattccggcgaactctcgaccctgtcgctgggccttgcggcggcgtgcattgcggcgctggtagcgatgaaccggctcggggtggtcaagctcgggccatacatgatcattggtctgatcctctgggtatgcgtgctcaagagcggtgtccacgcgacgctggccggcgtaaccctggcgttctgcatcccgctgcgcacgaaaaacgccgaaccttcgccgctgctgaccctcgaacacgcgctgcacccgtgggtcgcttacggcattctgccgctgtttgccttcgccaacgcaggtctgtcgctgagcggcgtgactgtcgagagcttcacccaccacgtgccgatgggcatcgccgtcggcctgctgctgggcaagaccctcggcgtgttcggcctgacctggctcgccgtcaagaccggcatcgccgccctgccccaaggtgccaattggggccaggtgctgggcgtggcgatcctctgcgggatcggcttcaccatgagcctgtttgtcggctccctggcattcgtgccgggtgccagtgaatacgccgggatggaccggatgggcattctcaccgggtcggtgtttgcggcattgatcggttatgcggtgacggcggctgcgagtagaaagaacaccgcgctgccttcctga

SEQ ID NO: 156 - protein, 383 aa, Pseudomonas fluorescens PfO-1
MEAASGLLLIAAAILALIINNSPLSWLYNGLLDTPVVAQIGALKIAKPLLLWINDGLMALFFLLIGLEVKREVLDGQLSKPSQIVLPGAAAIGGMLVPALIYWFLNRDNPAALDGWAIPTATDIAFALGVLALLGKRVPVSLKLFLMTLAIIDDLGAIVIIAIFYSGELSTLSLGLAAACIAALVAMNRLGVVKLGPYMIIGLILWVCVLKSGVHATLAGVTLAFCIPLRTKNAEPSPLLTLEHALHPWVAYGILPLFAFANAGLSLSGVTVESFTHHVPMGIAVGLLLGKTLGVFGLTWLAVKTGIAALPQGANWGQVLGVAILCGIGFTMSLFVGSLAFVPGASEYAGMDRMGILTGSVFAALIGYAVTAAASRKNTALPS

SEQ ID NO: 157 - DNA, 1200 bp, Rhodospirillum rubrum
  CDS (1)..(1200)
atgcctttgcaagccatcgtttcctttctgcgtcttgatatcgccgccggggttatcctggtcggcgcggcggtccttgccctgatcgcggccaattcgccggcggcggcgctctatgagcaggtctttcaaacgcccttcgtcatcggctatggcccctggctgctggaaaagcccctgctgctgtggatcaacgacggcttgatggcggtctttttcctgctggtcgggctggagatcaaacgcgaggtgagggggggcgaattatcgaccccgcgtctggccgccctgccggccgtcgccgccgtgggcggcatggtggtgcccgccctgatctatgccagcctgacctggggcgatgccttcgccctgcgcggctgggccattccggcggccaccgacatcgccttcgcccttggcatcctgacgctgctcggtccacgggtgccgatctcgctcaagatcttcctgaccgccctggcgatcatcgacgacctcggcgctattttgatcatcgcgttcttctatacggcaagcctgtcgccgctcgccctgctgctggctgccgcatgcctcgccttgttaatcggccttaatctgtcgggtcagcgccgcctgtggccctatctgctgatcggggtcgtgctgtgggtctgcgtgctgaaatcgggcgtccatgccaccctggctggcgtcgttctcgccctgaccattcccttgggcgcgacggacgatgaaagcgccagcgccgacaagccgttggagcgcttggaacacggcctgcacccctgggtcacctatgccatcttgcccctcttcgccttcgccaatgccggggtgtcgctggccggcctccccccttcggccctgctcgccccggtgccccttggcatcgtgctcgggctgtttcttggcaaacaaatcggcgtcttcgggttttcctggctggcgatccgcagcggccttgccccgatgccccagggggcgcgctggcgcgatctgtatggcgtggccctgatcaccggggtcggcttcaccatgagcctgttcatcggcaccctggccttcgagaccagcgatccgctggccgccgattttggcaccgaggtgcgtttgggcgtgctgagcgggtccctgctctcgggcgtcatcggctatctggtgctgcgcttgagcaggcgaaacccggccacagaatag

SEQ ID NO: 158 - protein, 399 aa, Rhodospirillum rubrum
MPLQAIVSFLRLDIAAGVILVGAAVLALIAANSPAAALYEQVFQTPFVIGYGPWLLEKPLLLWINDGLMAVFFLLVGLEIKREVRGGELSTPRLAALPAVAAVGGMVVPALIYASLTWGDAFALRGWAIPAATDIAFALGILTLLGPRVPISLKIFLTALAIIDDLGAILIIAFFYTASLSPLALLLAAACLALLIGLNLSGQRRLWPYLLIGVVLWVCVLKSGVHATLAGVVLALTIPLGATDDESASADKPLERLEHGLHPWVTYAILPLFAFANAGVSLAGLPPSALLAPVPLGIVLGLFLGKQIGVFGFSWLAIRSGLAPMPQGARWRDLYGVALITGVGFTMSLFIGTLAFETSDPLAADFGTEVRLGVLSGSLLSGVIGYLVLRLSRRNPATE

SEQ ID NO: 159 - DNA, 1149 bp, Cytophaga hutchinsonii
  CDS (1)..(1149)
atgtataagaacttcctcgaaaatgaaaaagcaggaggagttgtactgatcattgcaaccatcgtatcattacttgtagcaaattcttcgataggccacagttatattggtttctgggagatgttcgttggcggacataccatagaacattatgtgaacgatggtttaatgacgatcttcttcttacttattggcctggaattagaacgggaagtgtacgcaggtgaactatccaattttaaaaaagcattacttccgattatcgctgcattaggaggaatgattgtacctgcctgtattcacatgttttttaatacaggcacaccgtttcaatcgggttcaggaattccgatggcaacggacatcgcatttgccgtaggcattctttccttactgggtaacaaggtgccgctttcattaaaggtatttcttacggcgctggcagttattgatgacctgggtgcaatatttacaattgctattttttactctagaggtattgacgttatgtatttagccggcgctgcaggtatttgggccgttctatttattttaaaccgccgtaatgtaaatattctatggccttatttactgggcggcatagtcatgtggtatttcatgttgcactcaggcgtacatgcaacaatcacaggtgtgatcttagcctttgtaattccgtttggtaaaggcgatccggattccatctctataaagctgcagcattggttacataaaccggtggcatttattattctgcccatctttgctttagccaatacatgtattattattgacagtgattggtcagcatcgctgatgagtacaaacagcatcggtattttcctgggtcttgttgttggtaagccgcttggtattacactgttctgtgctatagctgtgtggctgggaatctgttccattccgaatgatcttaaatggatgcaggttataggtgttgcatgtctgggcggcataggttttaccatgtccatctttataaccctgctggcgtttgatgatcatgcggttatttccggttcaaagattgccattatgctgtcatcggtaacagcagcccttatcggactactgtggctaaaaatgacccttaaagaacctctttccaacgaattgacagaagagatctaa

SEQ ID NO: 160 - protein, 382 aa, Cytophaga hutchinsonii
MYKNFLENEKAGGVVLIIATIVSLLVANSSIGHSYIGFWEMFVGGHTIEHYVNDGLMTIFFLLIGLELEREVYAGELSNFKKALLPIIAALGGMIVPACIHMFFNTGTPFQSGSGIPMATDIAFAVGILSLLGNKVPLSLKVFLTALAVIDDLGAIFTIAIFYSRGIDVMYLAGAAGIWAVLFILNRRNVNILWPYLLGGIVMWYFMLHSGVHATITGVILAFVIPFGKGDPDSISIKLQHWLHKPVAFIILPIFALANTCIIIDSDWSASLMSTNSIGIFLGLVVGKPLGITLFCAIAVWLGICSIPNDLKWMQVIGVACLGGIGFTMSIFITLLAFDDHAVISGSKIAIMLSSVTAALIGLLWLKMTLKEPLSNELTEEI

SEQ ID NO: 161 - DNA, 1260 bp, Microbulbifer degradans 2-40
  CDS (1)..(1260)
atgatggctgcgctaatagcattagcactggcaaacagcccgcttgctcaccattacctgcatgcattgcatgtacccctaggtttaaaccttggtgattggcgtatagagaaaagcctgcaccactgggttaacgacggcttaatggcattatttttctttgttgttggcctggagctaaaacgtgagatgctcgttggggagctggctgaaatccgcaaagcggtattgcccatagttgcggcgattggcggcatggttatacccgccatatgttatatgtcgttaaaccttaacgacgaaacttttcgcggctggggtatacccatggcgacggacattgcttttgcccttggcgtgattgcacttttggctagccgtgtgcctaaagcgctcatcacattcttagtggcactggccattgtagacgacttgggtgcagtggtagttattgccgttttttacacgcaagatcttgcatggagctttctaatcgccggcgcactactaacttgcttgctcatattttttaacatgattggtattcgtaaacccagcgtgtactttttcgttggcctaatcctgtggtttgtgttcttaaagtcgggcgtacacgccaccctagccggtgtaattaccgcatttactattccggcaaaaccaaaattcaatacacttacttttagcaatcgtgtgcaagatatactttacaagtttagaaaaggctgtgaagaagatgaaagtatactaaggaatgaacacttaagcggcttagttcaaaccctagaaaacggtgtagttggtgtacaaacgccattacaacgcctagagcactcttttcacaagccggttgcattttttattctacccgtattcgcaatatttaatgcgggcgtaaccatcgactttggcaatgcctttcaactatttaatcacccaataaccctaggtgtggtatttggcctgctgttcggtaaatttgtaggtattactggcgcttcgtggctagccatacgctttggcctttgctcactgccaaacgatacaagtatgaaacacattattggcgcatctatgctgggcagtatcggctttactatgtctatctttattgctgagctcgcctttgtatcgcaacccgaaatgatcattcaggcaaaactgggtattttactttcatcgctagtagcaggcgttgctggctatttatggctgcataaactaggcggcgaaaaatcacgtataggatcgagtttgtga

SEQ ID NO: 162 - protein, 419 aa, Microbulbifer degradans 2-40
MMAALIALALANSPLAHHYLHALHVPLGLNLGDWRIEKSLHHWVNDGLMALFFFVVGLELKREMLVGELAEIRKAVLPIVAAIGGMVIPAICYMSLNLNDETFRGWGIPMATDIAFALGVIALLASRVPKALITFLVALAIVDDLGAVVVIAVFYTQDLAWSFLIAGALLTCLLIFFNMIGIRKPSVYFFVGLILWFVFLKSGVHATLAGVITAFTIPAKPKFNTLTFSNRVQDILYKFRKGCEEDESILRNEHLSGLVQTLENGVVGVQTPLQRLEHSFHKPVAFFILPVFAIFNAGVTIDFGNAFQLFNHPITLGVVFGLLFGKFVGITGASWLAIRFGLCSLPNDTSMKHIIGASMLGSIGFTMSIFIAELAFVSQPEMIIQAKLGILLSSLVAGVAGYLWLHKLGGEKSRIGSSL

SEQ ID NO: 163 - DNA, 1185 bp, Microbulbifer degradans 2-40
  CDS (1)..(1185)
atggaggtaaatcccttgggaaaagtatttcgtgcaatggctcaacaagaaaccgctgggggcgttttactcatagctgcctctatactggccttaatatttgccaactcttacttaagcggcttttataacggcgtactaaatctacccttggttgtcgctataggcgcattcgaaatttcaaaaccactgttgttatgggttaacgacgggttaatggcactattcttcttaatggtaggcctggaagttaaacgcgaggtgctcgaagggcatctttctcagccaagccaagtggtgctgcccggcttagcggcattggcaggcgtggcattcccagctataatttatgcaagctttaactggcaagaccctacagcactaaggggttgggctattccctccgcgacggatatcgcgtttgccctaggcgtttttagtcttttcgggcgtcatctacctgtatcgcttaagctctttttgttatcggttgctatatttgatgatattgcagctattgtgattattgctttgttctattctcacgagctttctacgctatcgctcttagttgcaggcattggcatagtaatgctgtttgtgttgaaccgcttaaaaatacgacatgtttcaccttttatgtttgttggcctagtagtgtgggccgcggttttaaaatcgggtgtgcacgccacgctggcgggcttcgttattgcctggtttatcccgcttaaacataaaaatatacatgatgagcccatgttgctgtcgctagagcatgctttgcagccttgggtagcctattttatcttgccattctttgcttttgtgaatgcgggtgtgcacctaggtggcataggtttagatacgttaacagcccctgtgacgttgggcataattgttggcttattcgtgggtaaacagctgggtatatttagtgtatgttggttaagtattaaattgagaatagctaagctgcccgaaggcgcgacctggcgagagctatacggcgtgtgtttgctggcgggtattggttttaccatgagcttatttataggtagccttgcttttgagggtgccaatagtgaaatggttgcaagtgttaaattaggcgtgctgtttggttctctgttgtctgctatatgtggtgcgctgattctaaccaactcaaggaaaataaaatga

SEQ ID NO: 164 - protein, 394 aa, Microbulbifer degradans 2-40
MEVNPLGKVFRAMAQQETAGGVLLIAASILALIFANSYLSGFYNGVLNLPLVVAIGAFEISKPLLLWVNDGLMALFFLMVGLEVKREVLEGHLSQPSQVVLPGLAALAGVAFPAIIYASFNWQDPTALRGWAIPSATDIAFALGVFSLFGRHLPVSLKLFLLSVAIFDDIAAIVIIALFYSHELSTLSLLVAGIGIVMLFVLNRLKIRHVSPFMFVGLVVWAAVLKSGVHATLAGFVIAWFIPLKHKNIHDEPMLLSLEHALQPWVAYFILPFFAFVNAGVHLGGIGLDTLTAPVTLGIIVGLFVGKQLGIFSVCWLSIKLRIAKLPEGATWRELYGVCLLAGIGFTMSLFIGSLAFEGANSEMVASVKLGVLFGSLLSAICGALILTNSRKIK

SEQ ID NO: 165 - DNA, 1149 bp, Campylobacter coli RM2228
  CDS (1)..(1149): transl_table=11
atgcaagctgtaaagaaaataattttaagtgaaacttttccaggcattttgctcatattttttactctcttggctttactttttaaaaattcttccttaagcgttatttatacagatttttttcatgctaattttactataggatttgatcattttcagattgctaaatctttggatttatggataaatgatggtttgattgctatttttttcctttgtataggacttgaattaaaatatgaaattttacgcggacaacttaaaaatataagatcggtttctttacctatatttggagctttgggaggtatgattgtccctgctttgattttttctgctattaattattctcatgaatttgctatgaaaggatgggctatcccaacagctacagatatagcatttgcagtaggtattttaatgcttttaggaaatagaattccttctagtcttaagctgtttttactttctttagctatttttgatgatttgggtgctattgttattattgctttgttttatacagatcagctttcagctttagcaattattatttgtttgttttgtatatttgctctgcttttgttaaattattatcacatcacccatctttctttgtacgtgttggtaggtgttgtgttgtggatagctatgcttaaaagtggagtgcatgcaactttagcgggtgtaatcatagctttatttatccctcttgatactaaaaataaaaaaccctatcttcatgaagtacataaggatttaaacccttgggtggtttattttattttgcctttatttgcttttgcaaatgcgggtattgatttaagagatatgcatcttggttcagtattttctcctgtaagtcttgggattattttaggactatttttaggaaaacaactaggggtttttggattttgttatttggctataaaattaaagcttgcaaaattacctgaaaatattaaatatggaaaattttatggtatatgtattttaacaggcatcggttttacgatgagcttgtttattgatggtttggcttataaaaatagtgatatttttgaatatgcggataaacttgctattttagtagctagttttttaagtgccattgttggttttatttatcttaagattattaaatga

SEQ ID NO: 166 - protein, 382 aa, Campylobacter coli RM2228
MQAVKKIILSETFPGILLIFFTLLALLFKNSSLSVIYTDFFHANFTIGFDHFQIAKSLDLWINDGLIAIFFLCIGLELKYEILRGQLKNIRSVSLPIFGALGGMIVPALIFSAINYSHEFAMKGWAIPTATDIAFAVGILMLLGNRIPSSLKLFLLSLAIFDDLGAIVIIALFYTDQLSALAIIICLFCIFALLLLNYYHITHLSLYVLVGVVLWIAMLKSGVHATLAGVIIALFIPLDTKNKKPYLHEVHKDLNPWVVYFILPLFAFANAGIDLRDMHLGSVFSPVSLGIILGLFLGKQLGVFGFCYLAIKLKLAKLPENIKYGKFYGICILTGIGFTMSLFIDGLAYKNSDIFEYADKLAILVASFLSAIVGFIYLKIIK

SEQ ID NO: 167 - DNA, 1155 bp, Campylobacter lari RM2100
  CDS (1)..(1155): transl_table=11
atgaaattaagaaatttccaaaactttttatcacttgaaattttaggaggattgttgcttttattagcaacaatctttgccttgctacttaaaaatagtccttatggacaacactatatggattttttaagtgtggaaatgggtgtaaaagtgggtgcttgggaactttttaagccttctttattatggattaatgatggtcttattgcaatctttttctttgccataggacttgaattaaaaaaagaatttgttcaaggagagtttaaaactcttagtaatattaccctacccttaatggctgctataggcggtatagttgtacctgctttgatattttgtgctatcaattttaatgatgcttatgttttaaaaggttgggctataccaacggcaactgatactgcatttgccctagttatacttgcaatgctaaaacaacgcataccaagttctttgaaaatatttttagtatctttagcgatttttgatgatgtaggagctattttaatcattgctattttttacacaggggaactttcaactttagcctttattgttgccttttgctgcattgtgggtttgtttttacttaatcgcttgagcaatgaaagaaaatcattttattatatacttggagcattactttggcttagtgtgctaaaaagtggagtacatgcaactttagcaggtatcatcacagctttatttatacctgtatatacaaaaaacaatcacgctttattagaagaaatcgagcatggtttaaaattttggatagcttttataatactaccactttttgcttttgcaaacgcaggggttgacctttcaaaaattgaagcacatatgctatttagtggtgtgagcgtagggattttcttaggcttgtttattggaaaacaactaggtgtatttggctttgcttatatggcaattaaacttaaacttgcaaagctgccaaaagatgctaattttaaacaactctacggagtttgtatactcacaggtataggttttactatgagcttttttatagatgctcttgcttatgaggtaagtgatatatttaattttgtggataattttgctattttgctagcttccctagcttcaggtgtatttggttatttttacctgcgttttataaaataa

SEQ ID NO: 168 - protein, 384 aa, Campylobacter lari RM2100
MKLRNFQNFLSLEILGGLLLLLATIFALLLKNSPYGQHYMDFLSVEMGVKVGAWELFKPSLLWINDGLIAIFFFAIGLELKKEFVQGEFKTLSNITLPLMAAIGGIVVPALIFCAINFNDAYVLKGWAIPTATDTAFALVILAMLKQRIPSSLKIFLVSLAIFDDVGAILIIAIFYTGELSTLAFIVAFCCIVGLFLLNRLSNERKSFYYILGALLWLSVLKSGVHATLAGIITALFIPVYTKNNHALLEEIEHGLKFWIAFIILPLFAFANAGVDLSKIEAHMLFSGVSVGIFLGLFIGKQLGVFGFAYMAIKLKLAKLPKDANFKQLYGVCILTGIGFTMSFFIDALAYEVSDIFNFVDNFAILLASLASGVFGYFYLRFIK

SEQ ID NO: 169 - DNA, 1161 bp, Campylobacter lari RM2100
  CDS (1)..(1161): transl_table=11
atgcaaaaacttcaaacctttgttaaaagtgaaacttttcctggtgttttgctaatattttttaccgtacttgcactaattttacagaatagttctttaacggatcaatataccaattttttaaatattccttttggctttcaagcaggaagtttagaaattttcaaaccattgcttttatggattaatgatggccttattgcaatctttttctttgccataggacttgaattaaaatatgaagtaacaagaggacaactcaatagcataaaagctatgtcattacctgtatttgctgcacttggtggtatggtagtacctgctttgatttttgcattttttaactataaagacccttttgctttgcaaggttgggctataccaacggctactgatgtggcttttgcggttggcattttaatgcttttaggcaaaagagtacctacttctttaaaattatttttactctctttagcaatttttgatgatttgggcgcgattattgtgattgctttattttatacaagcgaactttcagtttttgctatgattgctgctttagtgtgtattctagcgctttatttgttaaatcatttccatgttaccaaaaaatctttttatatcatcatagctatagtattttggataagtatgctaaaaagcggggtgcatgcaactttagcaggtgtgattactgctttatttataccacttcaaacaaaaagtggtgagtcttttttaaaagaaatagaacatgacttagcgccttgggtgagttatttcatcttgcctatttttgcttttgcaaatgcgggagttgatttaaaagacatggatccaagctttatgttttcttcagttagcttaggtattatcttaggattatttttaggaaaacaaattggagtatttttattttcatatattagtataaaactgggcctagcaaaacttccacaaaatgttaatttcaaacaactttatggggtttgtatactcacaggtataggttttactatgagcttttttatagatggcctagcttatcaaaatagtgatatttttgcatattcagacaaacttgcaattttaatagcttcattattaagcgctatagttggatatgcctacttaaaacttatttatagttttaaaaaatga

SEQ ID NO: 170 - protein, 386 aa, Campylobacter lari RM2100
MQKLQTFVKSETFPGVLLIFFTVLALILQNSSLTDQYTNFLNIPFGFQAGSLEIFKPLLLWINDGLIAIFFFAIGLELKYEVTRGQLNSIKAMSLPVFAALGGMVVPALIFAFFNYKDPFALQGWAIPTATDVAFAVGILMLLGKRVPTSLKLFLLSLAIFDDLGAIIVIALFYTSELSVFAMIAALVCILALYLLNHFHVTKKSFYIIIAIVFWISMLKSGVHATLAGVITALFIPLQTKSGESFLKEIEHDLAPWVSYFILPIFAFANAGVDLKDMDPSFMFSSVSLGIILGLFLGKQIGVFLFSYISIKLGLAKLPQNVNFKQLYGVCILTGIGFTMSFFIDGLAYQNSDIFAYSDKLAILIASLLSAIVGYAYLKLIYSFKK

SEQ ID NO: 171 - DNA, 1164 bp, Campylobacter upsaliensis RM3195
  CDS (1)..(1164): transl_table=11
atgactttgtttgagcgacttaagaattttgtttataatgaggcttttggtggtgttttactcattatttgcacgatttttgctttacttgtgcaaaatagcttcttaagtgatcattatagagaattgcttaatttaaatatgggctttatcgcaggggaatttagacttgaaaagccttttttactttgggttaatgatggcttgatttccatttttttctttgtcataggcttagagcttaaaaaagaatttatgcaaggagttttcaaagaggtaagaagcattattttgccatttgctgcggcagtgggtgggattattgtgcccgctagtatttttgccttagttaatgtcggcgatgcttatacgcttaagggctgggctatcccaacagctacggatacggcttttgctttagctattttgatgatgtgtgggaaacacatcccaagttcgcttaaaattttcttactttctttggcgatttttgatgatgtgggggcgattttaattattgctattttttacacctctaagctttctattgttgcttttattgtggcaagttgtgtaattttggttttattgaccttaaatttattgggtattacacgcaaatctttttattttatttgtgctttgattttgtgggtgagtgttttaaaaagcggtgtgcatgcaaccttagctgggttgattgctgcattttttatcccactttttacaaaagagggtaagccttttttaaaagaaattgatgaaagtttgaaattttggcttgtttttgtcatactgcctttatttgcctttgcaaacgcaggtgtaaatttagctaatatcgacttaaaatccatattttccggtgctagtgtggggattttcttaggactttttgtcggtaagcaagtgggcgtttttgccttttcttaccttgcgattaaaagtggtttggcgcgtttgccagagggagcgaattttaaacaactttatggagtttgcatactcacaggcataggctttacgatgagtttatttatagacggcttggcttatgaggtgagtgatattttcaattacgcggataatctttccatcttagtcgcctctttttgctccgggattttgggctttgtttatttgaaattttttgcgagggcttga

SEQ ID NO: 172 - protein, 387 aa, Campylobacter upsaliensis RM3195
MTLFERLKNFVYNEAFGGVLLIICTIFALLVQNSFLSDHYRELLNLNMGFIAGEFRLEKPFLLWVNDGLISIFFFVIGLELKKEFMQGVFKEVRSIILPFAAAVGGIIVPASIFALVNVGDAYTLKGWAIPTATDTAFALAILMMCGKHIPSSLKIFLLSLAIFDDVGAILIIAIFYTSKLSIVAFIVASCVILVLLTLNLLGITRKSFYFICALILWVSVLKSGVHATLAGLIAAFFIPLFTKEGKPFLKEIDESLKFWLVFVILPLFAFANAGVNLANIDLKSIFSGASVGIFLGLFVGKQVGVFAFSYLAIKSGLARLPEGANFKQLYGVCILTGIGFTMSLFIDGLAYEVSDIFNYADNLSILVASFCSGILGFVYLKFFARA

SEQ ID NO: 173 - DNA, 1149 bp, Campylobacter upsaliensis RM3195
  CDS (1)..(1149): transl_table=11
ttgcaaaggattaaaaaagtagttttaagtgagacttttcccggaattttattgattttctttaccttttttgcacttttgtgtaaaaattcagctttgagcgtaatttatacggattttttccacgcgaattttactgtgggctttgataattttcaaatttcaaaatccttagctctttggattaatgacggcttaattgccattttctttctttgcataggacttgagcttaaatatgaggttttaagaggacagcttaaaaatgttagggctgtttctttgcctatttttggtgcgcttggaggtatgatagttcctgcacttatctttgcttttattaattttcacgatgcttttgcgatgaagggctgggctatcccaactgcgacagatattgcctttgcggtaggaattttaatgcttttaggaaataaaattccggctagtcttaagcttttcttactttctttggctatttttgatgatttgggtgcgattattatcattgctttattttacacagatcagctttctactttagcgatgttaatttgtttgatgtgtatttttgctttatttgctcttaattattttcacattacgcatttaccgctttatgttttagtcggtgtgattctttggatcgctatgcttaagagtggtgtgcatgcgactttggcgggggtaattatagccttatttatccctttgaatactaaggacaaacgaccatatttacataatgtgttagagagtttaaatccttgggttgtttattttattttgcctttatttgcttttgcaaatgcaggcattgatttaagagatatgcaccttgcagccttattttctcctgtgagtcttggtattattctaggactttttgtcggtaagcaagtgggtgtgtttttattttcttacttggcgattaaattaaaacttgcaaaacttcctgaaaatgtccgctattctcaattttatggcatttgcatacttacaggcattggttttacgatgagtttatttatcgattctttggcgtataaaaatagtgatattttcgagcatactgataaacttgcgattttagtagctagttttttaagcgctattgtgggttatatttacttaaagattgttaaatga

SEQ ID NO: 174 - protein, 382 aa, Campylobacter upsaliensis RM3195
MQRIKKVVLSETFPGILLIFFTFFALLCKNSALSVIYTDFFHANFTVGFDNFQISKSLALWINDGLIAIFFLCIGLELKYEVLRGQLKNVRAVSLPIFGALGGMIVPALIFAFINFHDAFAMKGWAIPTATDIAFAVGILMLLGNKIPASLKLFLLSLAIFDDLGAIIIIALFYTDQLSTLAMLICLMCIFALFALNYFHITHLPLYVLVGVILWIAMLKSGVHATLAGVIIALFIPLNTKDKRPYLHNVLESLNPWVVYFILPLFAFANAGIDLRDMHLAALFSPVSLGIILGLFVGKQVGVFLFSYLAIKLKLAKLPENVRYSQFYGICILTGIGFTMSLFIDSLAYKNSDIFEHTDKLAILVASFLSAIVGYIYLKIVK

SEQ ID NO: 175 - DNA, 1209 bp, Erythrobacter litoralis HTCC2594
  CDS (1)..(1209): transl_table=11
atgttttacaccgccgctacggccctgcgcgacttcttgaaacaggagagcgccgggggcatcgtgttgatgtttgcggctgtgctggcgttgatcttcgccaatactgcgctggccgatacctacttctcggtgctggcgaccgagatcgcggtgacagtcggcggcggcggcatcgagaagcctgcgctgttgtggatcaacgatggtctgatggcggtctttttctttctcgtcggactggaagtgaagcgcgaagtgctgacgggccagctgtcgagctggaagcaggcctcgttgccgctgatcgcggcgttcggcggcatcgtgctgcccgcgctggtgttctacggtatcaattcgggcactccggaaaatctctccggctgggcgatcccggcggcgaccgatatcgccttcgcgctgggcatactggcgcttctcggcaagcgcgtgccggtcgcgctcaaggcgctgttgctcgccatcgcggtgatcgacgacatcgccgccatcgccatcatcgcgatcttttacacgccgggtgtcgagctcgcgatgttgggggctgcggcaatcacgctattgatcctgagcgccttcgggcgggccaaggccggctccagcatcccctatatcgtgcttgggatcgtgctgtggtacttcgtcctcaagtcgggcgtccatgccaccttggccggtgtcgcgctggcgatgacggtcccgctgatcgatcgcaagggcaaccacatgctcgaacatatggagcatgcgctgcacagctgggtcgccttcctggtcgtgccgatcttcgcgctcgccaacgccggggtctcgttcgaaggcgtggaactgtccgccctgttcgcaccgttgccgcttggcatcgcgctcggcctaatcgtcggcaagcaggtcggtatcttcggctttgcctggctcgcggtcaaaacgggcttcgcgcagctaccgtccagcgtcggctggttacaggtctggggcctgtcgctggtcgccggtatcggcttcaccatgagcctgttcatcggcaacctcgccttcgccgatccggcgcagatcaatgccgtcaagatcggcgtgctgtcgggctcgctcatcgccgcgctggtcggtatcgcgatcctcgtcctcggcgcgaaggcgcctgccgcgaagtcggctgacgagcgggtgcaagctccggcatga

SEQ ID NO: 176 - protein, 402 aa, Erythrobacter litoralis HTCC2594
MFYTAATALRDFLKQESAGGIVLMFAAVLALIFANTALADTYFSVLATEIAVTVGGGGIEKPALLWINDGLMAVFFFLVGLEVKREVLTGQLSSWKQASLPLIAAFGGIVLPALVFYGINSGTPENLSGWAIPAATDIAFALGILALLGKRVPVALKALLLAIAVIDDIAAIAIIAIFYTPGVELAMLGAAAITLLILSAFGRAKAGSSIPYIVLGIVLWYFVLKSGVHATLAGVALAMTVPLIDRKGNHMLEHMEHALHSWVAFLVVPIFALANAGVSFEGVELSALFAPLPLGIALGLIVGKQVGIFGFAWLAVKTGFAQLPSSVGWLQVWGLSLVAGIGFTMSLFIGNLAFADPAQINAVKIGVLSGSLIAALVGIAILVLGAKAPAAKSADERVQAPA

SEQ ID NO: 177 - DNA, 1218 bp, Erythrobacter litoralis HTCC2594
  CDS (1)..(1218): transl_table=11
atggttgacccgatccgcagccccctgtcccgcgcctttgcacccgtccgcgccctgtttgtcagcgatgcctctgccggcattctgctgatactcgtggcagcggcggccatgatcgtcgccaattcgccgctggcgggcgcttacgaagaaatgttctacggcgatctggcatggaccccgatcgccaagctcgacgatctgcacctgtggatcaacgacggcctgatggcgattttcttcttcgtcgtcggcctggaagtgaaacgcgagcttatttgcggacagctatccagtcccgagcaacgcacgctgccggtgctcgcggcgatcgcagggatggccgtacctgcgattgtatatgtcggcgttgtcggcacggacagcgcgctggtgcgcggctgggcgatcccggccgccaccgacattgccttcgccatgggggtgctcggcctgctcggcagtcgtgtgccagcctcgctgcggttgttcctgctgactgtcgccatcgtcgacgatatcggtgcggtgctcgtaatcgccgccttctacaccgcgaacctcaaggtcatgtggctcgtcatcgcgctgggcatcttcggcgtcatggtcggcatgaacaagttcggggtcgaccggatctggccctatatcctcgtcgcgctggtgctttgggtggcggtgctgttctcgggcgttcatgcgaccatcgccggcgtgatggcggcacttaccatcccgatgcgccgcaaggacggacactcgcttctggagaagctcgagcatggcctcgcgccgtggagcgcctatcttgtggtgccgatcttcggtttcgccaatgccggtgtgaacctcagcggcatgggtctggacgctgtcctggccccactgccgctggccatcgcagcaggcctggtggtgggcaaacagcttggcattttcggcatcatcgtggctgccgtgaaactcggcattgccaaagcaccggccaacgccaactggatcgagatctggggtgtcagcatcctgaccgggatcggcttcaccatgtcgctcttcatcagcgggctcgcctttaccgacagccgcctgctgatcgacgaggccaagatcggcattctcggcggctcgctgatctcggcgatcctcggctacaccatcctgcgcctgacgacgacgcatcccgaagagcgaccgccccagacagtcaccccctga

SEQ ID NO: 178 - protein, 405 aa, Erythrobacter litoralis HTCC2594
MVDPIRSPLSRAFAPVRALFVSDASAGILLILVAAAAMIVANSPLAGAYEEMFYGDLAWTPIAKLDDLHLWINDGLMAIFFFVVGLEVKRELICGQLSSPEQRTLPVLAAIAGMAVPAIVYVGVVGTDSALVRGWAIPAATDIAFAMGVLGLLGSRVPASLRLFLLTVAIVDDIGAVLVIAAFYTANLKVMWLVIALGIFGVMVGMNKFGVDRIWPYILVALVLWVAVLFSGVHATIAGVMAALTIPMRRKDGHSLLEKLEHGLAPWSAYLVVPIFGFANAGVNLSGMGLDAVLAPLPLAIAAGLVVGKQLGIFGIIVAAVKLGIAKAPANANWIEIWGVSILTGIGFTMSLFISGLAFTDSRLLIDEAKIGILGGSLISAILGYTILRLTTTHPEERPPQTVTP

SEQ ID NO: 179 - DNA, 1266 bp, Deinococcus geothermalis DSM 11300
  CDS (1)..(1266): transl_table=11
gtgaccatacgccgacctggaggagcctgtctgttcgggctcctccttgccgtttctcccaccccgtttcccaggaggaccaccttgacccccattcgcacactgctcacccccttcggcgaattcttcaaaggccaggccagcagcggcctcgtgctgattctggcagccgtcctcgccttcgcttgggcgaacagcccgtggcgggagagctatttcaccctgcgcgagttgccgctgaccctctccctggggtcctggacgctgagccacggcctgtactggtgggtcaacgacctgctgatggccctgttcttcctgctggttggactcgagattaagcgcgaactgcgggtgggtgaactccgccacccccggcaggccagcctggccctcttcgcggcgctgggggggatgctgctccccgccggactgtacacgctggtgaacgcgggcgggccgggtgcggcgggctggggcgtgcccatggcgaccgacatcgccttcgcgctcggcgtgctcgccctgctgggagaccgcgtctcccccggcctgaaggtgctcctcgcagcgcttgccatcttggacgacctcggcgctgtgctggtgatcgccctgttctacacctcggggctgaacctgctcgccttggggctgatgggcgcggtctgggcgctgggcctgggactgaacgccgccggggtccggcacctggggccctacgccgtcctgggcgcggcgctctggctcaccaccctcgcgtcggggctgcaccccacggttgccggagtgttgcttgccctgaccatcccgctgggccggagagctgagcaggaggacgcggagcccagcccactgcaccgcctggagcacggcctgcacccctggtcggccttcctgatcctgccactgttcgccctgttcaacgcgggggtcagcgtcgcgggaggcagcctggaccgggtcaccctgggggttgtgctggggctgatcatcggcaaaccgcttggagtggtggcctttgcgtggctggccgtgcagctgagggcagcgtccctccccgaggacgtcacctggccggggatgttggggctggggctgctcgcggggatcgggttcacgatggcactgttcatcggggggctggcctttcccgagggagcgcttctgaacgccgcgaaactcggcatcctcacggcctcagtcctcgcggccctggcagccatcaccgtactgacgcgcgcctttccccgccaaccacgctga

SEQ ID NO: 180 - protein, 421 aa, Deinococcus geothermalis DSM 11300
MTIRRPGGACLFGLLLAVSPTPFPRRTTLTPIRTLLTPFGEFFKGQASSGLVLILAAVLAFAWANSPWRESYFTLRELPLTLSLGSWTLSHGLYWWVNDLLMALFFLLVGLEIKRELRVGELRHPRQASLALFAALGGMLLPAGLYTLVNAGGPGAAGWGVPMATDIAFALGVLALLGDRVSPGLKVLLAALAILDDLGAVLVIALFYTSGLNLLALGLMGAVWALGLGLNAAGVRHLGPYAVLGAALWLTTLASGLHPTVAGVLLALTIPLGRRAEQEDAEPSPLHRLEHGLHPWSAFLILPLFALFNAGVSVAGGSLDRVTLGVVLGLIIGKPLGVVAFAWLAVQLRAASLPEDVTWPGMLGLGLLAGIGFTMALFIGGLAFPEGALLNAAKLGILTASVLAALAAITVLTRAFPRQPR

SEQ ID NO: 181 - DNA, 1293 bp, Deinococcus geothermalis DSM 11300
  CDS (1)..(1293): transl_table=11
atggccgcatcccactcccccttcacccgcttcgtccacggtgagtcctttgcgggcctgctgctggtgggcaccgccctgatcgcctttatctgggccaattccccgtggcgtgagacttactttgccgcccagcacacccacctcgctctctcgttgggggacgcccgcctggatctctcactggagcactgggtcaacgacggcctgatggccgtgtttttcctgctggttggtctggagatcaagcgcgaactcctgatcggcgagctgtcctcccgccgccgggtcgccctcgccgtgaccgctgccctcggggggatgctcgttcccgccgcgttgtatacggcgctgaacgtgggtggacccggcctgtcgggatggggcgtgccgatgtcgaccgacatcgcctttgcgctgggggtgctggccctgctcggttcccgggtgcccctgggcctcaaggtcttcctcaccgcgctcgccattgtggacgacctgggcgccgtgctcgttattgcgctgttctacacctcgggcctgaacctgaccttcctgacgctggcagccctcacctggggcgcggcgctgtacgccgggtggcgcggggccttcagcctgaagctgtatggcgtgctgggcgtcttgctgtggttcttcgtgctgaagtccggcctgcacgccaccatcgcgggggtcctgctggccttcgcggtgcccatccgcaggcccgacccggctgactacctggcctcgctggcggaagccgcgaagccggggcgaggggaagtggtgggcgcgcgcttgcgcgacctcgaagacctgctggaacgtgcccagagtcccttgcaccgcctggagcacgccctgcaccccttcgtgaccttcttggtgttgccagtgttcgcgctgaccaatgccggggtgccggtggccgccggaggcttcgggagcgtctcccttggagtgctgctgggcctactgctcggcaaaccactgggggtggtgggcggggcgtggctcgccgtgcggatgggtatggcctcgttgccccgccgggtgaactgggggcacatggttgggtcggggctgctggctgggatcggcttcaccatgagcctattcgtctcgaacctggccttcgacgactcggtgctgctcacccaggcgaagctaggggtgctgctggcctcggtgctggccgcgctgctgggcgcgggttggctgctgctcggcatccggggccaggcgccatccgggcgggatgacgtgcaggtggacctgccccgctga

SEQ ID NO: 182 - protein, 430 aa, Deinococcus geothermalis DSM 11300
MAASHSPFTRFVHGESFAGLLLVGTALIAFIWANSPWRETYFAAQHTHLALSLGDARLDLSLEHWVNDGLMAVFFLLVGLEIKRELLIGELSSRRRVALAVTAALGGMLVPAALYTALNVGGPGLSGWGVPMSTDIAFALGVLALLGSRVPLGLKVFLTALAIVDDLGAVLVIALFYTSGLNLTFLTLAALTWGAALYAGWRGAFSLKLYGVLGVLLWFFVLKSGLHATIAGVLLAFAVPIRRPDPADYLASLAEAAKPGRGEVVGARLRDLEDLLERAQSPLHRLEHALHPFVTFLVLPVFALTNAGVPVAAGGFGSVSLGVLLGLLLGKPLGVVGGAWLAVRMGMASLPRRVNWGHMVGSGLLAGIGFTMSLFVSNLAFDDSVLLTQAKLGVLLASVLAALLGAGWLLLGIRGQAPSGRDDVQVDLPR

SEQ ID NO: 183 - DNA, 1935 bp, Anaeromyxobacter dehalogenans 2CP-C
  CDS (1)..(1935): transl_table=11
ttgaatcgcgcggatgcccgacgcgcccgccccgccccggaaggccgcccgatgagcgggcccggacccctgccggtgcggctcgatccgccggtggacccggcgcgggaccacgtgctcggcgagcccggcgcggacctgacgctggtcgagtacggcagctacgcgtgcccgcactgccacgtcgcccacgaggtggtggccgagctgcgcgaccgcctgggggaccgcctccggtacgtgttccgccagcgccccatccgcgccgaggcggcccggccggcggccgagctggccgaggcggccgggctcgacggtgaacgcttctggcacgcgcacgacctgctcatgcggcgggggccgtcgttcgccgccggcgagctggacgcgatcgcgcgcgagctggggctgccgccgcgcgagcgcggcgccggcccatgggagggcgcggcggcgcgcgtgcgcgaggacgtggagagcgcgcgccggagcggcgtccacctcaccccgacgttcttcatcaacggccgccgctacgagggcccctgggacgcggccgcgctctcggaggcgctgctcggctccctggggcaccgcctgcacgcggcgacgctcgacttcgcgcgctgggcgccgtccaccggcctgctgctggtagtcgccaccgccatcgcggtggcgatcgcgaactcgtcggcgggcgccgcgttcaccgccgcctggcaggcgccgctcgggctctcgctgggcggccgcgggttcgcgctgccgctggtgcagtgggtgaacgacggcctgctcacgctgttcttcctggtggtgggcctcgagatcaagcgcgagctgaccgtgggccggctggcgagctggcgcgccgccgcgctccccatggcggcggccatcggcgggatggtcgcgcccgccgcgctgtacctgctcgtgatccccgccggcccgctcgcgggcgggtggggcacgaccatctcgaccgacaccgccttcgcggtggcgatcctggtgctgctcggcgaccgcgtgccggtggacctgcgggtgttcctcaccgcggcggtgatcgtggacgacctggtcgcgatcgcggtggtggcgctgttctactccggcgcgatctcgctgccgtggctgctcgcggcggcagcggtgaccgcgctgctcgccgggctgaaccgcgcggcgatctcggcggcgccgccgtacgtcgcgctgggcgcgctgctgtgggcctgcctccacgcggcggggctgcaccccacgctggccggggtgatcctggcggtggtgacgccgacccggccgccgcccgacctccgcgcgctcaccggccaggcgcaggcggtgctggaggcggagctgcgccgggcgcgcgagggcgtgctgcgccacggcccctccgagccggcgctgcgcgcgctcgacgccatccacgaccgaatcgagtcgcccgcgagcaagctgctgcggaccctggacccctgggcgagctacgcggtgctgccggtgttcgcgctcgcgaacgccggcgtggcctgggtgccgggcgcgctggacgggcgcgggcggctggtggcggccatcgtgctcggcctggtggccgggaagccgctcggcatgttcctggcggcgcggctggcggtgcgcgccgggctggcggtgaagccggcggcctacgcgtggcggcagctcgccggcgccggggcgctcgccggcatcggcttcaccatgtcgctcttcatcgccggacaggcgttcccggacccggccgacttccgcgcggcgaagatcgcgatcttcgccgcgtcgctgctcgccggcgtcctcggcgcgctggtgctctggccgcggcgctcgcccgcggcggaggcggaggcactcccggcgcccgaggggtccgaggtggacgcggcgggcacgtag

SEQ ID NO: 184 - protein, 644 aa, Anaeromyxobacter dehalogenans 2CP-C
MNRADARRARPAPEGRPMSGPGPLPVRLDPPVDPARDHVLGEPGADLTLVEYGSYACPHCHVAHEVVAELRDRLGDRLRYVFRQRPIRAEAARPAAELAEAAGLDGERFWHAHDLLMRRGPSFAAGELDAIARELGLPPRERGAGPWEGAAARVREDVESARRSGVHLTPTFFINGRRYEGPWDAAALSEALLGSLGHRLHAATLDFARWAPSTGLLLVVATAIAVAIANSSAGAAFTAAWQAPLGLSLGGRGFALPLVQWVNDGLLTLFFLVVGLEIKRELTVGRLASWRAAALPMAAAIGGMVAPAALYLLVIPAGPLAGGWGTTISTDTAFAVAILVLLGDRVPVDLRVFLTAAVIVDDLVAIAVVALFYSGAISLPWLLAAAAVTALLAGLNRAAISAAPPYVALGALLWACLHAAGLHPTLAGVILAVVTPTRPPPDLRALTGQAQAVLEAELRRAREGVLRHGPSEPALRALDAIHDRIESPASKLLRTLDPWASYAVLPVFALANAGVAWVPGALDGRGRLVAAIVLGLVAGKPLGMFLAARLAVRAGLAVKPAAYAWRQLAGAGALAGIGFTMSLFIAGQAFPDPADFRAAKIAIFAASLLAGVLGALVLWPRRSPAAEAEALPAPEGSEVDAAGT

SEQ ID NO: 185 - DNA, 1386 bp, Arthrobacter sp. FB24
  CDS (1)..(1386): transl_table=11
atgattttgtcgactcaacgtttaggacgcttcatgagccccgcacccacgcccgcccccgacgccaaaccacgcaccgtccttggctacggcagttacgccgaatcgctgcgcatcggtgagatcctgcgcaaggaaacagtcggcggcgccctcctggtggccgctgccgtcatcgccctgatctgggcaaactcgccggtctccgacagctacttcgccttgcgggactacaaaatcggctacgaaccctggcatctcgagctgagcctgggcgcctgggcagccgacggactgctggccatcttcttcttcctggttggcctcgaactgaagcgtgagttcgtggcaggcgacctccgccagctcaacaaatcgatcgtgcccgtggcggccgcggccggcggcgtgcttgttcccgcgttgatctacgccgccgtgaacatctacagcccggaaaccctgcgcggctgggccatccccaccgcaacggacatcgcgttcgccgtcgcggtgctggccatcatcggctcgcacctgcccagcgccctgcgcatcttcctgctcaccctggcggtggtggacgacctcatcgccatcagcatcatcgcgttcttctactccagcgacatccaggcggccccgctgctgctcgccctcatcccgcttgccctgtacgccttcctggcccagaggtaccgccgcttcttcggtgcccacttcatggctgcctgggccatcctgctgccgctcggcatcgtcacctgggcactggtgcacgcctccggcatccacgccacggtggccggtgtcctgctcggattcgccgtgccggtccttcggtccaaggccagcgggggtcccgaagcaggccccggcctcgcggagatcttcgaacaccggttccgtcccatttccgccggcgtggccgttcccatcttcgccttcttctccgccggtgtggccgtaggcggctgggaaggcctgggttccgccctggctgaccccgtggccatcggcatcatcatggcgctcgtcctcggcaagccgatcggcatcatgggcaccacctggatcctcaccaaagccaccagggcgcggctggacggatccttcaagtggatcgatgtttttggcgtctcgctgctggccggaatcggcttcaccgtgtccctgctcgtcgcggaactcagcttcggccacggcagcctgcacgatgaccacgccaaggtgggcatcctggccgcatcgctgctcgccgcaatcctggccaccgtggtgctgcgggccaggaaccgccagtaccgccgcgcggaggaactcgagaaggtcgactcggaccaggacggcatccccgacgtctaccagcacgaaagccgtggctga

SEQ ID NO: 186 - protein, 461 aa, Arthrobacter sp. FB24
MILSTQRLGRFMSPAPTPAPDAKPRTVLGYGSYAESLRIGEILRKETVGGALLVAAAVIALIWANSPVSDSYFALRDYKIGYEPWHLELSLGAWAADGLLAIFFFLVGLELKREFVAGDLRQLNKSIVPVAAAAGGVLVPALIYAAVNIYSPETLRGWAIPTATDIAFAVAVLAIIGSHLPSALRIFLLTLAVVDDLIAISIIAFFYSSDIQAAPLLLALIPLALYAFLAQRYRRFFGAHFMAAWAILLPLGIVTWALVHASGIHATVAGVLLGFAVPVLRSKASGGPEAGPGLAEIFEHRFRPISAGVAVPIFAFFSAGVAVGGWEGLGSALADPVAIGIIMALVLGKPIGIMGTTWILTKATRARLDGSFKWIDVFGVSLLAGIGFTVSLLVAELSFGHGSLHDDHAKVGILAASLLAAILATVVLRARNRQYRRAEELEKVDSDQDGIPDVYQHESRG

SEQ ID NO: 187 - DNA, 1341 bp, Azotobacter vinelandii AvOP
  CDS (1)..(1341): transl_table=11
atgcccgaagccccgcaggaaggctccgattttgcccgtctgccccatgagtccgtgcaccggctgaccaaaccgctggcctggttcctacgcatcgaggccgtcgctgccgccgttctgctgttcttcacgatcgctgccgtggggcttgccaattcgccctgggccgaggcctttctgggcgtatgggaaaccccgctgggactccgggttggctcgcaggagtttgttcgctccataaaagactggatcagtgacgggctgatgacgctattcttcttcctcgtcgccgtggagctcaagcgggaactggtcctgggcgagttgcgtcatccgcgcatggccgccttgtcggtctcggcggctctggggggcatggcggtaccggcggcgctgtacctgctcctgcagtcggggcaggccggcgaggcgggctggggcgcggtcatggccaccgataccgccttcgtgatcggctgcctggcgctgttgagatcccgcatcccgcaaagcctgcggatattcatgctatcgctggcgatcgtcgacgatattggcgccatcctggtggtcgccatcggctatggccaccacctggcgtggagtgcgctggttgccgcggccgtgggactcgtggtggtccgcctgatggctcacgtcggcatccgcagcatgccgctctacatcctggccggcatttccatctggttcgccgtcgaccgctccggaatccatgcgaccatcaccggtgttgttcttgggctgatgacgcccacgggccgatgggtcagcgacgagcggctgtaccgcattctcgatcgggtcgtcgcccatccggccggcaataataatgaagggagcggggcgacccaagaccggcagtccttgcgcctggcggaaaccgcggcgcgcgaaaccctggcgccggccgaacggatccagatcgccctgcatccgtggatcgcctattgtgtcatgccgctcttcgccttcgccaacgccggggtgccgctctccatgggcgatctcggcgatgccgtcaccgttgcggtgttcgtcagcttcgccctcggcaagcccgtcggcatcctggccttcacctggttggcgctgcgtctgggcgcggtgaagcccccggaactcgactggaagctgctggtcggtggcggcatcctcgccgggatcggctttaccatggcgctgttcatcagcaatctggcgttcgacaagagcctgatcaaccaggccaaactgggcatcttcctcgcctcgctcttttccgccgccgcaggcctcacgctcctgttctgggtgactcgccagaaaagtcgcgccctgtaa

SEQ ID NO: 188 - protein, 446 aa, Azotobacter vinelandii AvOP
MPEAPQEGSDFARLPHESVHRLTKPLAWFLRIEAVAAAVLLFFTIAAVGLANSPWAEAFLGVWETPLGLRVGSQEFVRSIKDWISDGLMTLFFFLVAVELKRELVLGELRHPRMAALSVSAALGGMAVPAALYLLLQSGQAGEAGWGAVMATDTAFVIGCLALLRSRIPQSLRIFMLSLAIVDDIGAILVVAIGYGHHLAWSALVAAAVGLVVVRLMAHVGIRSMPLYILAGISIWFAVDRSGIHATITGVVLGLMTPTGRWVSDERLYRILDRVVAHPAGNNNEGSGATQDRQSLRLAETAARETLAPAERIQIALHPWIAYCVMPLFAFANAGVPLSMGDLGDAVTVAVFVSFALGKPVGILAFTWLALRLGAVKPPELDWKLLVGGGILAGIGFTMALFISNLAFDKSLINQAKLGIFLASLFSAAAGLTLLFWVTRQKSRAL

SEQ ID NO: 189 - DNA, 1518 bp, Azotobacter vinelandii AvOP
  CDS (1)..(1518): transl_table=11
atgggcggcgtcccgcgggagaggtttgcggcggaatcgggttcacatttcggcttcgtttgtgtagggtcgctggcgggtgtcgggtccgcgggtgcggccggacaggtttcttgtgtcggtcgggccgccgcacagccgaatgcgagcgacctcatgaatcgagaccattcccgaggggcgttgccgtccgcgcagcgcctggccgacagagctttcgacgccctcgagcgtttcctccacatagaagcggtcagcggcatcgtcctgctgatttccgccgccacggcgctgatctgggccaactcgccggccgcagcgagctatgcgcatctgtggcatacgccgctcaccttcggaatcggcgagcatgtcgtctcgcattccctgcacttctggatcaacgacgcgttgatgacggtgtttttcctggtcgtcggcatggagatccgcagggaaatccatgccggagccctggcgagtctcggccaggccgccctgcccatggtggcggccctgggcggcgtggcgatgccggcgcttgtgtacctctccgtcaacggcggcgaaggtcttcgccagggctgggcggtaccgacggcgaccgacatcgccttcgccgtgggggtgctggccttgctgggcaaatcgattcccggttccgtgcgggtctttctgctggccctggcgatcatcgacgacatcgctgcggtactgatcatcgcgctgttcttttcgggcgggctcgatccggcgggcttcctgatcgcgggagtcggaatagcgctggtactgggcttccagcagatcggcatcggctcggcctatgcctacgtcatccccggcgccctggtgtggttcggtctgctgtggagcggggcgcatccgacgctggcgggcgtgattctcggcttgatgacgccggtcttcccggcgcgcagcgtcgagagccccatcgaaacggcgacatgcgccatcaaggacttcgtcgagcgagtgcagcatggctcggaggatgcgcaccgcctgatgcagccggtgaagcggctccgccacgcgcagcgcgaactgctgccgcccgtcgtccgtgtgcagatggcgctgcatccgtgggtcgcctatgcggtcatgccgctgttcgcgctcgccaacgccggcgtgaacctcgatggcgtcgatccgggaaatggcggctcgtcgagcgtggtgctcggcgtttcgctggccctgatcgtcggcaagccgctgggcatcatgctcagcagctggatactggtccgcctgggctggtgccgtctcccggaaggcatgaactggtcgtggatgtggctgatcggctgtctggccggtatcggcttcaccatgtcgatcttcatcgccacgctcgccttcgacgatgccagcctgctgagcgccgcgaagctgggggtgcttctcgcctcggggctggccggagcgatcggcctcgttctcggacgtatcctggtcttgcgcgcaagggccgccgacagccgctga

SEQ ID NO: 190 - protein, 505 aa, Azotobacter vinelandii AvOP
MGGVPRERFAAESGSHFGFVCVGSLAGVGSAGAAGQVSCVGRAAAQPNASDLMNRDHSRGALPSAQRLADRAFDALERFLHIEAVSGIVLLISAATALIWANSPAAASYAHLWHTPLTFGIGEHVVSHSLHFWINDALMTVFFLVVGMEIRREIHAGALASLGQAALPMVAALGGVAMPALVYLSVNGGEGLRQGWAVPTATDIAFAVGVLALLGKSIPGSVRVFLLALAIIDDIAAVLIIALFFSGGLDPAGFLIAGVGIALVLGFQQIGIGSAYAYVIPGALVWFGLLWSGAHPTLAGVILGLMTPVFPARSVESPIETATCAIKDFVERVQHGSEDAHRLMQPVKRLRHAQRELLPPVVRVQMALHPWVAYAVMPLFALANAGVNLDGVDPGNGGSSSVVLGVSLALIVGKPLGIMLSSWILVRLGWCRLPEGMNWSWMWLIGCLAGIGFTMSIFIATLAFDDASLLSAAKLGVLLASGLAGAIGLVLGRILVLRARAADSR

SEQ ID NO: 191 - DNA, 1329 bp, Frankia sp. CcI3
  CDS (1)..(1329): transl_table=11
gtgggccaagttccgtctcgccggttcagcctgttcgaccgcaggtcgtggcccgaggctcgccggatcgccgagatcctacgcagggaggccatcggtggcgggctgctgctcgccgcgacggtcctggccttgggctgggcgaactcgccgtggtcagagtcgtaccagtcgatgctgtcctaccagctcggcccgtcctgggcgcacctggacctcaccctggctcagtgggccgccgacggcctgctagcgatcttcttcttcgttgccgggctggaactcaaacgcgagttcatcgccggagacctccgcgaccctcggcgggccgctgtcccggtcctggccgcctgcgggggtgtcgccgttccggccgtgctgtacgcgctggtcaacgtcggcggtgacgcctcagcgggctgggcgatcccgaccgccaccgacatcgccttcgcgctggcggtgctggcggtcattggccggcacctgccgtccggtctgcggaccttcctgctcaccctcgcggtcgtcgatgacctgctcgccatcgtcatcatcgccgtcgtctacacccgccacctgtcgatcctcccgttgctgggcgcgctggtgccgctggcgttgttcactctgctggtccagcgccgggtgcgctcgtggtggctcctcctgcccttggccgccgcgacctggacactggtccacgcctccggcgtgcacgccaccgtggctggcgtgctgctggggtttgccgtgccggtgctccgcggtacccgtgccggcggcccggaggcgggaccggggctggccgagcacttcgagcaccgctggcggcccctgtcggccggggtggcggtgccgatcttcgcgttcttctccgccggagtcaccgtcgatggcctgagcggactgagcgcggcgctgagcgaccgggcggccctcggtgtcgtgctcggtctcgtcgtcggcaagcctctggggatcatggccgctaccttcctggtagcacgcttcactcgcgccaccctcgacgacgggttgacctggaccgacgttctcgggctcgcggtcttggccggtatcggattcaccgtctccctgctcatcggcgaactggccttcgggagcggcagcgcacgtgacgaccatgtcaagatcgctgtcctgacgggttctctgctcgccgccctgctcgccgccgtcgtgctacgtctgcgcaatcgcgtctaccgccggctccaggaagcagagaccgccgaccgcgaccacgacggcatccccgacgtctaccaagacctgcaccggtcctccccacgcccgtgggggtga

SEQ ID NO: 192 - protein, 442 aa, Frankia sp. CcI3
MGQVPSRRFSLFDRRSWPEARRIAEILRREAIGGGLLLAATVLALGWANSPWSESYQSMLSYQLGPSWAHLDLTLAQWAADGLLAIFFFVAGLELKREFIAGDLRDPRRAAVPVLAACGGVAVPAVLYALVNVGGDASAGWAIPTATDIAFALAVLAVIGRHLPSGLRTFLLTLAVVDDLLAIVIIAVVYTRHLSILPLLGALVPLALFTLLVQRRVRSWWLLLPLAAATWTLVHASGVHATVAGVLLGFAVPVLRGTRAGGPEAGPGLAEHFEHRWRPLSAGVAVPIFAFFSAGVTVDGLSGLSAALSDRAALGVVLGLVVGKPLGIMAATFLVARFTRATLDDGLTWTDVLGLAVLAGIGFTVSLLIGELAFGSGSARDDHVKIAVLTGSLLAALLAAVVLRLRNRVYRRLQEAETADRDHDGIPDVYQDLHRSSPRPWG

SEQ ID NO: 193 - DNA, 1263 bp, Jannaschia sp. CCS1
  CDS (1)..(1263): transl_table=11
atgtatcgggtctggaatttcattaccggatattcactgcttttgatcggaggcgcgatcatcgcgttgatctgggcgaatatcgatatcaacagctaccatcatttcacggaagtcgtgatctgggccgacgcgcctatcgggcacctgcacgacgacggccatggccatgtggttcgcgacctgacgctccattacctcgtgaacgatctgcttatggccttgttcttcgccatcgccgcaaaggaggtttgggaggccgtgatcctgaagaacggctccctgcgcggtaagaaggcggcaacgccgttggtggccacgttgggcggcatggtcggcccaatctcgatctatctcggcatcgcttatttcctgggctccaccactttcgatgcggtggccaacggatgggcgatccccacggccacggatattgccttctcctaccttgtgggacgtctggtgtttggcgcgggccatcccgccgtgcggttcctgttgctgttggccattgccgacgacgctgcgggcctgctgatcctggcgattttctacccatcgggcgaattggccccggcctggctgcttctgtcgttcggggccgctttgggcgtctacgtgctggccaattggctgccgcggcgcctggatcgcggtgatcaactgcgccgtcggtcgtcctggatgcgacagaaactgtccttctggccctatgcgctggccggttgcgccagttggtacggcttcatgcaatcgggcctgcacccggcgcttggccttttgcccatcgtgctgacaatcccccatgcggaccgggctttcggcatcttttccgccgcagaagtgcatttgcatgacctgctcaacacaatggaacacgcgctgaaatacccggtagagatcatcctgggcctctttggcctgatgaacgcgggcgttgcgttttcggccatgggagaggcgacctggttggttctggcgggccttctgatcggcaagcctgtgggtattttcctgttcggatggctggcggcgaaaccgcttggcttgggcctgccccaaggcatgcgaatgattgatcttgtggtcattggctgcgtggctgcgattggcttcaccgtctcgctctttgtggcatccgtcgcgttcgagcccgggcccgttcaggatgcggccaagatgggagcgttgttctcgttcggagcggcggcggtctcgatcattgttggcaagctgacacaggtgcagaagcaagagatctag

SEQ ID NO: 194 - protein, 420 aa, Jannaschia sp. CCS1
MYRVWNFITGYSLLLIGGAIIALIWANIDINSYHHFTEVVIWADAPIGHLHDDGHGHVVRDLTLHYLVNDLLMALFFAIAAKEVWEAVILKNGSLRGKKAATPLVATLGGMVGPISIYLGIAYFLGSTTFDAVANGWAIPTATDIAFSYLVGRLVFGAGHPAVRFLLLLAIADDAAGLLILAIFYPSGELAPAWLLLSFGAALGVYVLANWLPRRLDRGDQLRRRSSWMRQKLSFWPYALAGCASWYGFMQSGLHPALGLLPIVLTIPHADRAFGIFSAAEVHLHDLLNTMEHALKYPVEIILGLFGLMNAGVAFSAMGEATWLVLAGLLIGKPVGIFLFGWLAAKPLGLGLPQGMRMIDLVVIGCVAAIGFTVSLFVASVAFEPGPVQDAAKMGALFSFGAAAVSIIVGKLTQVQKQEI

SEQ ID NO: 195 - DNA, 1170 bp, Desulfitobacterium hafniense DCB-2
  CDS (1)..(1170): transl_table=11
gtgagtacgcagaaaaagaccatcaattttttgcaggagttttcgattccattaattctaggtgtccttatcgcacttgtttgggctaatttagcgccggaaaactaccatcattttgtccacaatgaaattatcggccatatatctcttcatttctttgtcaacgatatctttatggtgttcttttttgccatggcagcgatagaaattactcaaagcctgctgcccggaggaagcttaaatccccttaaaagggcgatcaatcctctgatggccacccttggcggagttctgggcccagcccttgtctttcttggtttaaatgccctgatcgggagtcctgagtttgccagaggctggggtatccctacagccaccgatattgctttagcctggctggtggcaagggtagtgtttggagctcagcatgctgcggtctctttcttgctgcttctggctattgtcgatgatggcatcggtctgatgattattgccttcttctaccctgatcccgccaacccggtggcacccctctggttattgctcactgtggcgggtatgctggttgcttatctgctcagacgcaaaaatgttcagagctactggccttatatcatcttggggggaattctgagctgggccggcctttatctggcccatattcacccggctttggccctggtgtttatcgttcccttcctgccccatcctccccgggaggaattcggcttattcgaagatgatccccaggatcactccactctgaaaacatttgagcacgaatggaaaatattcgtggacttcggcctgcttttatttggattaaccaatgcgggggtggaattctcagaaatcaacactctcacctggctggttctcattgctctcgtcggcggaaaaaccatcggcatattcctcatgggttctttggctacagtcatcggctttcccttccccaaaggcatggggtataaagagctcctggtggccggcgtgatagcggctatgggacttaccgttgccctattcgtctcgggtgtagcctttattgatccgggtctgcagggagcagcaaagatgggagcactgttcagtgcagttgcggcggtcattgctttcgccttgggtaaagtgctcggaatcaagaaagtcaaagacactcaggcttaa

SEQ ID NO: 196 - protein, 389 aa, Desulfitobacterium hafniense DCB-2
MSTQKKTINFLQEFSIPLILGVLIALVWANLAPENYHHFVHNEIIGHISLHFFVNDIFMVFFFAMAAIEITQSLLPGGSLNPLKRAINPLMATLGGVLGPALVFLGLNALIGSPEFARGWGIPTATDIALAWLVARVVFGAQHAAVSFLLLLAIVDDGIGLMIIAFFYPDPANPVAPLWLLLTVAGMLVAYLLRRKNVQSYWPYIILGGILSWAGLYLAHIHPALALVFIVPFLPHPPREEFGLFEDDPQDHSTLKTFEHEWKIFVDFGLLLFGLTNAGVEFSEINTLTWLVLIALVGGKTIGIFLMGSLATVIGFPFPKGMGYKELLVAGVIAAMGLTVALFVSGVAFIDPGLQGAAKMGALFSAVAAVIAFALGKVLGIKKVKDTQA

SEQ ID NO: 197 - DNA, 1341 bp, Frankia sp. EAN1pec
  CDS (1)..(1341): transl_table=11
atgccgagcgttcccccagcccccacgcccggccctgcctcgggctccggctcgtcggtgtcccggccgcggctgctggcccggccgacctggccgcaggcacggtacgtcgccgggatcctgcgcagtgagacggtcggcggcctgctgttgctcgcgggcgccgtggtggcgctggtctgggcgaactcaccgtggcgggacgcctatgccaccgtcgtccacaccggcgtgggccccgcgtccctgcgcctgcatctggacctggagcactgggccgccgacgggctgcttgcgatcttcttcttcgtggtgggcctcgagctcaaacgcgagttcgtcctcggcgatctgagatcaccgagccgcgcggcgctgcccatcgtggccgccctcggcgggatgctcgtgcccgcgctcatctacacgctggtcaacggcctggccgtggacggctcccccgagggctgggcggtgccgacggccaccgacatcgccttcgcggtcgcggtgctggcgatcatcacgacgcatctgccggcggcgctgcggtcgttcctgctgacgctggcggtggtcgacgacctgctcgcgatcgtgatcatcgccgtgttcttcaccgaccggctcagccccgcgccgctggcgggctccctcgcggtcatcgcggtgttcgcgttgctggtgaaccgcggcgtcacccgctggtggctgctcatcccgctcgcgctcgttgcctgggccctcatgcacgcctcgggggtgcacgcgaccatcgccggggtactgctggggttcgccgtgccggcccgccctcgctccggcgagcacgccgggatgtccgagcggttcgaacacgcctggcgtcctgtctcggcgggcgtcgcggttccgttgttcgcgttgatggccgccggggtctcgctcgcgggcggcggcgtcagcgccgcgctggccgatccggccggcctgggtgtggcgatgggcctgctgctgggcaagccaatcggggtgatgggtgccaccggcctgctcgcccggttaacccgggccgaactggaccccgacctgtcctggtgggacgtcgccggcgtcgccgtgctcgccggagtcgggttcactgtctccctgctcatcggcgagctggccttcggcgccggcacagcggagaacgatcacgtcaaggccgccatcctgatcggctcgctggcctcggcactgctcgcctcgatcgtgctgcgggcgcgtaaccgggtgtatcgccggatcgaggagcgggagaccgtcgacctcgacgccgacggcatccccgacgtcttccaggaaccgaccgtcggctga

SEQ ID NO: 198 - protein, 446 aa, Frankia sp. EAN1pec
MPSVPPAPTPGPASGSGSSVSRPRLLARPTWPQARYVAGILRSETVGGLLLLAGAVVALVWANSPWRDAYATVVHTGVGPASLRLHLDLEHWAADGLLAIFFFVVGLELKREFVLGDLRSPSRAALPIVAALGGMLVPALIYTLVNGLAVDGSPEGWAVPTATDIAFAVAVLAIITTHLPAALRSFLLTLAVVDDLLAIVIIAVFFTDRLSPAPLAGSLAVIAVFALLVNRGVTRWWLLIPLALVAWALMHASGVHATIAGVLLGFAVPARPRSGEHAGMSERFEHAWRPVSAGVAVPLFALMAAGVSLAGGGVSAALADPAGLGVAMGLLLGKPIGVMGATGLLARLTRAELDPDLSWWDVAGVAVLAGVGFTVSLLIGELAFGAGTAENDHVKAAILIGSLASALLASIVLRARNRVYRRIEERETVDLDADGIPDVFQEPTVG

SEQ ID NO: 199 - DNA, 1398 bp, Frankia sp. EAN1pec
  CDS (1)..(1398): transl_table=11
atgaccgttccgaccaggccggggccggagctacgggtccggctgccccaggtcgcgccgtccgtccgcgagttcctcgcgacggaggcgggtggcgccgtcctgctcgtcatcgccgcggcggcggcgctgatctgggcgaacagccccgtcgcggacagttaccacgacctctgggagaccaccgccaccctcggggtgggggacgcggcgctgtcgatgaccctgcaccactgggtcaacgacggcgcgatggcgatcttcttcgcggtcgtcgggctggagatcaaccgcgagttcaccaccggggagctgcgtgaccgccggacggtcgccgtgcccgcgctcgccgcggtcggcggtctcacactgccggcgctgatctacttcctgttcaactcctccgggcccgccgcagccggctggggcatcccgatgtcgaccgacaccgccttcgtcgtcggcattctcgccctgttcgggccgcgctgccccgaccggttgcggctgttcctgctgacgctggccatcgtcgacgacatcggcgcgatctccgtcgtggcgatcttctacaccgaccaggtggacgcggtctggctcggcgccgcggccgccgtcctggtcgtgatcggggtcatgcgctggatgggtgtctggcggctgccgccgtacgtggtggccgcgctcgttctctgggtggcgatctactcgtcgggggtgcacgggacgctcgccggtgtgatcatcgggctggtcctgccgtccgcgccgccgcgccgcgagcagatcgacgaggtgccgatctacgtccgggcgctgcgggaggactccacggcctctcgggccgcactggctgtctccgcggccaagtccaccgtctccaccagcgaacggctgcagtacaccctgcacccgctcagcgcgtacctgatcgtgccgatcttcggcctggccaacgcgggcgtgcacctcgacagccacaccctcgcggacgcgtccacctccccggtcacgatcggggtcgcggtcgcgctcctggtcggcaacgggatcgggatcacggcgacctcgctggtcgccatgcgcaccgggctcggcgcgctgcccggcggtgtccgctacggccacctggtgggcgcggccgtcctcgccggaatcgggttcaccatctcgctgttcgtcaccgagctggcgttcaccgacgaggccctcgccgagcaggccaagatcgggattctggtcggctccttcgccgccgcggtgctgggcacgttcgtgctgcgctatgtcggggaacgctggtcgttgtgctcgccgggctccgacgaggcgatcccggcgctaccgccgcgcccatggcactcgccgacgccggccgtcatcccggtcatccgctga

SEQ ID NO: 200 - protein, 465 aa, Frankia sp. EAN1pec
MTVPTRPGPELRVRLPQVAPSVREFLATEAGGAVLLVIAAAAALIWANSPVADSYHDLWETTATLGVGDAALSMTLHHWVNDGAMAIFFAVVGLEINREFTTGELRDRRTVAVPALAAVGGLTLPALIYFLFNSSGPAAAGWGIPMSTDTAFVVGILALFGPRCPDRLRLFLLTLAIVDDIGAISVVAIFYTDQVDAVWLGAAAAVLVVIGVMRWMGVWRLPPYVVAALVLWVAIYSSGVHGTLAGVIIGLVLPSAPPRREQIDEVPIYVRALREDSTASRAALAVSAAKSTVSTSERLQYTLHPLSAYLIVPIFGLANAGVHLDSHTLADASTSPVTIGVAVALLVGNGIGITATSLVAMRTGLGALPGGVRYGHLVGAAVLAGIGFTISLFVTELAFTDEALAEQAKIGILVGSFAAAVLGTFVLRYVGERWSLCSPGSDEAIPALPPRPWHSPTPAVIPVIR

SEQ ID NO: 201 - DNA, 1275 bp, Sphingopyxis alaskensis RB2256
  CDS (1)..(1275): transl_table=11
atggcccgcagttttccgcccccttccgccttacgcgatttcctcgaaagcgagagcgcaggcgggatcctgcttattttcgcagccattttggcaatgattgttgccaattcaccgctggcgacgctgtatcacgacctgatccatgccgtgacgggaccggttctgaccgacaagctcggcccgatgacggtgcatctttggatcaacgacgggctgatggcggtgtttttcctgctcgtcgggctggagatcaagcgcgagttcgtcgatggacggctggcgagctgggatcgccgacgcctgcccttcatcgccgccgccgccggcatggcggtgcccgccgcgctttatatgtttttcgtcggcgacgagcccggtctggcgcagggctgggcgattcccgcagcgaccgacatcgcctttgcgatgggcgtgctcgcgctgctcggcaggcgcgcgccgacctcgctcaagctattcctcgtcactgtcgcgatcgtcgatgacatgggcgcggtcgcgatcatcgcgcttttctataccgccaagatcaacctgctcgcgctcggcgccgcggcggcgatccttggcatcatgttcgcgtgcaaccgtggcggcgtgaagaacctgctcgtctatatggcgctcttcctgctgctctggtatgcgatgctgctgtcgggcgtccatgcgacgatcgccggcgtgctcgcagcaatggccatccctttcgagcgcacgccgggcgcgcccgacagtcagacctcgccgctgcaccggctcgaacatgcgctgcacccgacggttgcctttgccatcgtgccgctgttcggcttcgccaatgcgggcgtcgatgtgcgtgcgctggggctcgaccagctctttgcgcccctgccgctcggcatcgccgcgggattgttcctcggcaagcagatcggcattttcggcagcgtctggctggcggtcaaactcggcatcgcggggagactgcgcggcgcgacctggctccaggtctatgccgtctccatgctgtgcgggatcggtttcacgatgagcctgttcatcggcagcctcgcctttcccggcaacgcgctgctgatcgaggaggcgaagatcggtatcctgatgggatcgctcgcatcggcgctcgtcggctttgccgtgctgcgcctcgccccgctccatcccgaacataatgccgtcgaatcggcatcgaaaggcgaaattgccgtcgacggcgacgtgcgcgacacgtccgaagcggcccgctag

SEQ ID NO: 202 - protein, 424 aa, Sphingopyxis alaskensis RB2256
MARSFPPPSALRDFLESESAGGILLIFAAILAMIVANSPLATLYHDLIHAVTGPVLTDKLGPMTVHLWINDGLMAVFFLLVGLEIKREFVDGRLASWDRRRLPFIAAAAGMAVPAALYMFFVGDEPGLAQGWAIPAATDIAFAMGVLALLGRRAPTSLKLFLVTVAIVDDMGAVAIIALFYTAKINLLALGAAAAILGIMFACNRGGVKNLLVYMALFLLLWYAMLLSGVHATIAGVLAAMAIPFERTPGAPDSQTSPLHRLEHALHPTVAFAIVPLFGFANAGVDVRALGLDQLFAPLPLGIAAGLFLGKQIGIFGSVWLAVKLGIAGRLRGATWLQVYAVSMLCGIGFTMSLFIGSLAFPGNALLIEEAKIGILMGSLASALVGFAVLRLAPLHPEHNAVESASKGEIAVDGDVRDTSEAAR

SEQ ID NO: 203 - DNA, 1170 bp, Shewanella baltica OS155
  CDS (1)..(1170): transl_table=11
atggaaaaagcaattagaaattttctgagccaagaatcggctggcggtatcctattattggttgctgttgccttagctatgctgatggccaattcccctttatctggactttatcaaggctttttaggcactgacgtacaagttaaaattggcgagctcgatattcataagccgttaattctgtggatcaacgatggcctgatggccgtattctttttgcttattggtttagaagttaaacgtgagttactcgaaggcgccttatcgagtgtcgctcaagcctctctgcctacctttgcggccattggcggcatgttagtccctgctggggtgtacttgctgtttaactatggcgatccggtcacacaagcgggctgggcgattcctgccgcgacggatattgcgtttgctttaggtattatggcgctgcttgggagccgcgttcccgtttcactgaaagtcttcttacttgctttagcgattatcgatgacttaggcgtcatagtaattatcgcgctgttctacagcaccgacctatcaaccatcagtttagtgattgccagtttagcgattgcgggcttggttggattaaaccgcaaaggtgtcacctcacttttaccctatagcatcttaggattaatcctttgggtcgccgtacttaagtctggagtgcatgcgactctggctggcgtcatcatcgctttctgcattccattacgggcaaaggatggcagctcaccttcagaaggcttagagcatagtttgcacccttggagcaccttcttcattctgcctgtgttcgctttcgccaatgcgggtgtttatgtcggcaatatgaatttggagacgttaatttctccggtacctgtcggtattgcactgggcctgatgttaggcaagcccattggtgtgatggtgtttagctatattgcggtgaaacttaaattggctcagttacccgatggcgtaggttggaagcaaattgccccagtcgcggccatgtgcggtattggttttactatgtctatgtttattgcgtcgttagcctttgaacatgcagaccctatgtacggtgacttagcacgcctaggaaccttaatcggttcgattatggcggcgttagtcgggtatttctggttatcaaaagtgttaccgaataaaggagtataa

SEQ ID NO: 204 - protein, 389 aa, Shewanella baltica OS155
MEKAIRNFLSQESAGGILLLVAVALAMLMANSPLSGLYQGFLGTDVQVKIGELDIHKPLILWINDGLMAVFFLLIGLEVKRELLEGALSSVAQASLPTFAAIGGMLVPAGVYLLFNYGDPVTQAGWAIPAATDIAFALGIMALLGSRVPVSLKVFLLALAIIDDLGVIVIIALFYSTDLSTISLVIASLAIAGLVGLNRKGVTSLLPYSILGLILWVAVLKSGVHATLAGVIIAFCIPLRAKDGSSPSEGLEHSLHPWSTFFILPVFAFANAGVYVGNMNLETLISPVPVGIALGLMLGKPIGVMVFSYIAVKLKLAQLPDGVGWKQIAPVAAMCGIGFTMSMFIASLAFEHADPMYGDLARLGTLIGSIMAALVGYFWLSKVLPNKGV

SEQ ID NO: 205 - DNA, 1176 bp, Shewanella amazonensis SB2B
  CDS (1)..(1176): transl_table=11
atggaaaaagctattcgtaattttttgagccaggagtctgccggtggcattttgctgctggtggctgttgcactggccatgttgctcgccaactcaccgctttccggcttgtatcaagggtttctcaataccgaaatgcaggttcgttttggggcgctggacatcaacaaacctctgctgctgtggattaacgacggcctgatggctctgttcttcctgctgattggtttggaagttaaacgtgagttgctggaaggggccttgtcgagcccatccaaagcatccctgcctacctttgccgccatcggcggtatgttggttcctgcagccatctacttgtttttcaattttgacgatcctgttaccaaggtcggctgggccattcccgctgccacggatattgcctttgccctgggtattatggcgcttctgggtaaccgggtgccggtggcgctgaaagtattcctgctggcgctcgccatcatcgatgacctgggtgtgattgtgattatcgcgctcttctacagcaccgacttatctatgctgagcctggtgattgcggcgattgctgttactgggttggtggcacttaatcgtaagggcgttacgtccctcgcgccttatggggtactcggcatcatattgtggatagccgtgctcaagtccggcgtgcacgccaccctcgccggtgtggtcattgccttctgtattccgctcagggctaaagacggcagttcaccttctgagcaccttgagcacagcctgcacccctggagtaacttcctcattctaccggtgtttgcctttgccaatgccggggtgccgctgggcaacgttggatttgacagcatactgtcgcccgtaccggttggtattgccctgggtctgctgctgggtaaacccataggtgtgctgctgttcagttatgcagcggtgaagctgcgactggccgagctgcccaaggggattggctggcaccagatagcgccggtggccgtcatgtgtggtatcggtttcaccatgtcgatgtttattgcttctctggcctttgagcatggcggagaactctatggcgatttggcccgtattggcatcttgctgggttcactgtttgctgcggtaattggctatttttggttgtccaaagtgttgcctaaagcaggagaaagaatatga

SEQ ID NO: 206 - protein, 391 aa, Shewanella amazonensis SB2B
MEKAIRNFLSQESAGGILLLVAVALAMLLANSPLSGLYQGFLNTEMQVRFGALDINKPLLLWINDGLMALFFLLIGLEVKRELLEGALSSPSKASLPTFAAIGGMLVPAAIYLFFNFDDPVTKVGWAIPAATDIAFALGIMALLGNRVPVALKVFLLALAIIDDLGVIVIIALFYSTDLSMLSLVIAAIAVTGLVALNRKGVTSLAPYGVLGIILWIAVLKSGVHATLAGVVIAFCIPLRAKDGSSPSEHLEHSLHPWSNFLILPVFAFANAGVPLGNVGFDSILSPVPVGIALGLLLGKPIGVLLFSYAAVKLRLAELPKGIGWHQIAPVAVMCGIGFTMSMFIASLAFEHGGELYGDLARIGILLGSLFAAVIGYFWLSKVLPKAGERI

SEQ ID NO: 207 - DNA, 1443 bp, Prosthecochloris aestuarii DSM 271
  CDS (1)..(1443): transl_table=11
atgcgactgagaacggacaatgataccgatgatcatcacgccccgaagactatcacccccgggagtggtcattgtaacgactggcaaacggacattccttttatgacgactgatcatcaggcaaatgcagaaataacccggctgccgaaggaattccttgatcggcttgccaaaccctttacgcacttcctgcacatcgaagctgccggcggagcgattcttctcctgttcacggttgctgcactggttctttcgaactcaccgtgggctcacatgtttgaacaagcatggaaaaccaaaatagggcttcaacttgattcgctggagtatgcacgttctctgcgagagtggatcaacgatggtttgatgacgctttttttctttcttgtcgcgttagagctcaagcgagagttggttctcggcgagttgaacaaaccgcgcatggcgatgctgtcaatttctgccgctctgggagggatgatctttccagcggcaatctatctgactctgcaatcaggacaacccggtgagcatggctggggcaccgtcatggctaccgacacggcatttgttatcggctgcatggctcttctgggatcgcgcattcctcaaagcttacgggtgtttatgctctcattggcgatcgttgacgatatcggctccattctggtcgtcgctatcggatacagcagcaacatttcatggggagcgttggctgttgcggctcttggcgtcgtaatcgtgcgtgcgatagcaatgctgggcttccgcagttttccaccctacatcctgatcggcgggatgatctggcttgctattgatacgtccggaatacatgcaaccatcaccggagtaatactcgggttaatgacacctgcgaggcgctgggtcagtgccgatcgtttatacgccatattggaccaggtcgttgcgcatccacatggcggcgcccggggcagcgcagacacaaaggatcggcagaccttgcaggtagccgaaattgccgcacgcgaaacgctctctcctgtcgaacgccttgagattgcgctccacccatggatcggcttttgtatcatgccgctgtttgcatttgccaacgccggtttaccactatcgttgagcgatctcggcaactcggtcagcatcgcggtttttgcaggtttcgtactcggcaaacctcttggcattctgtccttcagctggctggcagtgcgcacgcacatcgccatgcgtccaccggaactcagttggagactgatcgctggcggcagccttctcggcggaatcggcttcaccatggcgctgtttattgccaatatagcgttcgacaacagtgtgatcaccagcgccaaacttgggatcttcctcgcatccatcttttccgcaaccgcaggtctctcaatgttgagatggttccctgcatccggcaaacccgctcaataa

SEQ ID NO: 208 - protein, 480 aa, Prosthecochloris aestuarii DSM 271
MRLRTDNDTDDHHAPKTITPGSGHCNDWQTDIPFMTTDHQANAEITRLPKEFLDRLAKPFTHFLHIEAAGGAILLLFTVAALVLSNSPWAHMFEQAWKTKIGLQLDSLEYARSLREWINDGLMTLFFFLVALELKRELVLGELNKPRMAMLSISAALGGMIFPAAIYLTLQSGQPGEHGWGTVMATDTAFVIGCMALLGSRIPQSLRVFMLSLAIVDDIGSILVVAIGYSSNISWGALAVAALGVVIVRAIAMLGFRSFPPYILIGGMIWLAIDTSGIHATITGVILGLMTPARRWVSADRLYAILDQVVAHPHGGARGSADTKDRQTLQVAEIAARETLSPVERLEIALHPWIGFCIMPLFAFANAGLPLSLSDLGNSVSIAVFAGFVLGKPLGILSFSWLAVRTHIAMRPPELSWRLIAGGSLLGGIGFTMALFIANIAFDNSVITSAKLGIFLASIFSATAGLSMLRWFPASGKPAQ

SEQ ID NO: 209 - DNA, 1194 bp, Magnetococcus sp. MC-1
  CDS (1)..(1194): transl_table=11
atgaatgctaaaattagaaaaatgctacacaatccggcggcaagtggaattttgatctttcttgcggctgttgcagcgatggctgtagaaaacagtgcatggaacactcactacaacgcctttctcgatattccagtctcggtacagtttgccgatttaaccattgccaagcccctgctgctttggatcaatgatggtttaatggcggttttttttcttttggtcggtttggaacttaaacgtgagtttcttgaaggagagctgtcacaaccctccaacgtcatcttaccggtggtcggtgccgtaggcggcatcgctctgccagctgcaatctacacattaatcaatcaaggcaaccctgcggcgttggatggctgggccataccaacagccacggacatcgccttcgcgttgggtatcctggccttattgggtaagcgtgtacctgcatctctgaaactgttcctgttaaccttagccattatcgatgatttggctgccatcctaatcatcgcctttttttataccagcgagctctcccccgcttccctaatgattgcaggcagcgcgatcggtacgcttatccttatgaatcgcctaggtgttacgggaatttctggctacatggtagtgggcatcgtgctgtggattgctgtgctgaagtctggtgtgcacgccacattggccggggttgtgctgggttttgtcattccgcttaagggggaagaaccaggggagctttcccccctgcatcaactggaagacgatcttcaccacgtggtagggttgggtattctgcccctgtttgcttttgccaatgcgggggtttctctgcaagggcttacgccctccatcctgctggaccctgttcccctgggcattgcactgggcctgttcttaggcaaacaaatcggcgtgttcggttttgtttggctgagcattaagagtggtttggccaaattaccagagggtttcacctggaagcaactctatggtgtcgcgctactgtgtggggttggttttaccatgagtctatttatcagttccttggcttttgaacatggtagctccgccctcgtgtcgggcgctcccgatatgggaagcgctcgtttgggcattctcactggctctatcctttccggcattttcggatacatcctcttgcgtttttccttaccaaaacctccgcaatag

SEQ ID NO: 210 - protein, 397 aa, Magnetococcus sp. MC-1
MNAKIRKMLHNPAASGILIFLAAVAAMAVENSAWNTHYNAFLDIPVSVQFADLTIAKPLLLWINDGLMAVFFLLVGLELKREFLEGELSQPSNVILPVVGAVGGIALPAAIYTLINQGNPAALDGWAIPTATDIAFALGILALLGKRVPASLKLFLLTLAIIDDLAAILIIAFFYTSELSPASLMIAGSAIGTLILMNRLGVTGISGYMVVGIVLWIAVLKSGVHATLAGVVLGFVIPLKGEEPGELSPLHQLEDDLHHVVGLGILPLFAFANAGVSLQGLTPSILLDPVPLGIALGLFLGKQIGVFGFVWLSIKSGLAKLPEGFTWKQLYGVALLCGVGFTMSLFISSLAFEHGSSALVSGAPDMGSARLGILTGSILSGIFGYILLRFSLPKPPQ

SEQ ID NO: 211 - DNA, 1842 bp, Kineococcus radiotolerans SRS30216
  CDS (1)..(1842): transl_table=11
gtgcgcccggagcggagccaggaaacccggcacccgcgggagccgcccctccgacgtccgtgggcgggcgggcggaccggttctcgcagctccgcccgtccgcgtcggcgtcgctgcgctccaccgcagcgctgctcctcctcgggtgggtcctgcacgggttggggatcgcctggaccacgctgctccacaccgtcgcggtcctggctctgctcaccggcacggccgtgctgctgttctggatgcacaccagcgccggacgcggtccgcaggggccacctgcggaccggtcctgaaccgggtgttccgcctcccgccgcccctgggcggccaccccggtgcgggcgtccgcgggaaggggatccaccggttcccggcgcggggggacgctggtgccggtactgtgtcccacggtgtgccgggaagtctggtcggcgaagtcttcagcgatccgtgaagtcctcgaccagggagcagacaccggtgacgtcccccaccccgcacgaccccaccccgcccacgcccccgcgcgggagcaccccgttgttcagccgcgggtcgtggctggaaacccggcgcatcaccgacgtgctgcgcaaggagaccatcggcggcgccctgctcctgctcggcaccgtcgtcgccctggtgtgggccaactccccctggtccagctcctacgcgggtctgcgcgacaccgtgatcgccccctccctcctgcaccccctgcacctggacctcaccctggggcagtgggccgcggacgggctgctggcgatcttcttcttcatcgccggtctcgagctcaagcgcgagttcgtcgccggtgacctgcgcgacccccgccgggccctggtccccgtcgccgccgccgtcggcggcatggccgtccccgccgtggtgtacgtcctcgtcgcccgctccgccggggacggcgccctgaacggctgggcgatccccaccgccaccgacatcgccttcgccgtcgcggtcctggccgtgatcagcacccacctgcccaccgcgctgcgcaccttcctgctcaccctcgcggtcgtggacgacctgctggccatcaccatcatcgcgatcttctacaccgacaccctcgccgtcctgccgctgctgggtgccctggccgtcatcgccgtcttcgggctgctggtgcagaagcggatccgttcctggtggctgctgatcccgctggccgtggtggcgtgggcgctgatgcacgcctccggcatccacgccaccgtcgccggggtcctgctcggcttcaccgtccccgtcctccgctcccgggccgcgggcgggcccgaagccggaccgggcatggccgagcacttcgaacacgtctggcgaccgctctcggccggcttcgccgtgcccgtcttcgcgttcttctccgccggtgtcaccgtcggcggcctcagcgggctggtcgactccctgcaggaccgggtcgcgctgggcatcgtcgcgggtctggtggtcggcaaggcggccggcatcctcggcgccaccgccgccgtctcgcgcttcacccgcgcccgcctggaccccagcctgtcctggtgggacgtgctgggcgcatccctgctgggcgggatcgggttcaccgtctccctgctcatcggggaactcgccttcggggcgggcagcgtgcgcgacgagcacgtcaaggtcggtgtcctcaccgggtccctgctcgccgccgccctggccgcggtcgtcctccgggcccgcaaccgcgtctaccggcgcctgcacgaggccgagcgggtcgacgaggacgccgacggcgtccccgacgtctaccaggccccccgcctgaacggctga

SEQ ID NO: 212 - protein, 613 aa, Kineococcus radiotolerans SRS30216
MRPERSQETRHPREPPLRRPWAGGRTGSRSSARPRRRRCAPPQRCSSSGGSCTGWGSPGPRCSTPSRSWLCSPARPCCCSGCTPAPDAVRRGHLRTGPEPGVPPPAAPGRPPRCGRPREGDPPVPGAGGRWCRYCVPRCAGKSGRRSLQRSVKSSTREQTPVTSPTPHDPTPPTPPRGSTPLFSRGSWLETRRITDVLRKETIGGALLLLGTVVALVWANSPWSSSYAGLRDTVIAPSLLHPLHLDLTLGQWAADGLLAIFFFIAGLELKREFVAGDLRDPRRALVPVAAAVGGMAVPAVVYVLVARSAGDGALNGWAIPTATDIAFAVAVLAVISTHLPTALRTFLLTLAVVDDLLAITIIAIFYTDTLAVLPLLGALAVIAVFGLLVQKRIRSWWLLIPLAVVAWALMHASGIHATVAGVLLGFTVPVLRSRAAGGPEAGPGMAEHFEHVWRPLSAGFAVPVFAFFSAGVTVGGLSGLVDSLQDRVALGIVAGLVVGKAAGILGATAAVSRFTRARLDPSLSWWDVLGASLLGGIGFTVSLLIGELAFGAGSVRDEHVKVGVLTGSLLAAALAAVVLRARNRVYRRLHEAERVDEDADGVPDVYQAPRLNG

SEQ ID NO: 213 - DNA, 1305 bp, Kineococcus radiotolerans SRS30216
  CDS (1)..(1305): transl_table=11
gtgccctccgccccccagcgccccctcttctcccgcggttcctggcccgaggcccgccgcctcgccgacgtcctgcgccaggagacgaccggcgggctgctgctgctggtcttcaccgtcatcgcgctggtgtgggcgaacgtggccgggaacagctacgaggaggtgcggcagttccacctcgggccggccgcgctgcacctggacctctcgatcgagcactgggccgccgacggcctgctcgcgatcttcttcttcgtcaccggcctggagctgaagaaggagttcgtcgccggggacctgcgcagcccccgcgccgcggcgctgcccatcgccgcggccgtgggcgggatggccgtcccggccctgctgttcgtcctcgtcaacgtcctgcaccccgactccccggagggcgccctcgtcggctgggccacccccaccgccaccgacatcgccttcgcgctggggatcctcgccgtcgtcgggtcccacctgccgtcggcgctgcggacgttcctgctgaccctcgccgtcgtcgacgacctcctcggcatcaccgtcatcgcgatcttctacaccgagcaggtccactggaccccgctgctgctggccctgctgaccctcgccgcgttcaccgtcgccgtgcagcgccgggtccggtcctggtggctgctcgtcccgctggccctggcgacgtgggccctcgtgcacgcctccggcatccacgccaccgtcgccggggtgctgctcggcctggtggttcccgtgctgcgcagcgaggagcacggcggaccggaggcgggccccgggctctcggagcacttcgagcaccgctggcgcccgctgtcgacgggcttcgccgtccccgtcttcgcgctgttctccgccggcgtcgcgatcggcggcgtgtccgggttcaccgccgcggtgcaggaccccgtcgcgctcggcgtcatcgccggtctcgtcctcggcaagccgatcggcatcgtcggcaccacctggctgctggcgaagctgacgagggccgagctggacgagaacctgcgctgggtcgacgtcctcggcatggcgatgctcgccgggatggggttcaccgtgtcgctgctcatcggctccctcgccttcggcgagggcaccgcggcgggcgagcacgtcaccctcggcgtcctcgtgggttccctgctctccgcggtcctcgccgcggtcgtgctctcgcgccgcaaccgcgtctaccgccggatcgaggccgaggagcgcgtcgacgccgacgggaacggcgtccccgacgtctacgagcgctga

SEQ ID NO: 214 - protein, 434 aa, Kineococcus radiotolerans SRS30216
MPSAPQRPLFSRGSWPEARRLADVLRQETTGGLLLLVFTVIALVWANVAGNSYEEVRQFHLGPAALHLDLSIEHWAADGLLAIFFFVTGLELKKEFVAGDLRSPRAAALPIAAAVGGMAVPALLFVLVNVLHPDSPEGALVGWATPTATDIAFALGILAVVGSHLPSALRTFLLTLAVVDDLLGITVIAIFYTEQVHWTPLLLALLTLAAFTVAVQRRVRSWWLLVPLALATWALVHASGIHATVAGVLLGLVVPVLRSEEHGGPEAGPGLSEHFEHRWRPLSTGFAVPVFALFSAGVAIGGVSGFTAAVQDPVALGVIAGLVLGKPIGIVGTTWLLAKLTRAELDENLRWVDVLGMAMLAGMGFTVSLLIGSLAFGEGTAAGEHVTLGVLVGSLLSAVLAAVVLSRRNRVYRRIEAEERVDADGNGVPDVYER

SEQ ID NO: 215 - DNA, 1227 bp, Nitrobacter hamburgensis X14
  CDS (1)..(1227): transl_table=11
atgcgggttcgattcggtcaatatccaaattgcggaaagcgaatggttttggaaccagggcggcttcgcccttactcaattcttcgatcctttctcgacagtgaggcctccgctgggctgacactgatgttcgtcgccgcattggcgttgctgctcgccaattcgccgttcgcgcccgtctacttcgatgtgctgcaccgtcaagtgctgggcctgacggtgctgcactggatcaacgatgcgttgatggcggtattcttcctgctcgtcgggctcgagatcaagcgcgagttcttggacgggcaactcgcgacctggtcgcggcgcgcgttgccaggtatcgcagccctcggcggcatggtcgtaccagcggtgattttcatcgcagttaatgggggcgagccagccaatctcagaggatgggccattccgtcggcgacagacatcgccttcgcactcggcgtgctctcactgcttggcccccgcgtccctgtgtctcttaagatttttctgaccgcgcttgccatcctggacgacctaggtgctgtcttaatcatcgcgctcttctataccgccgagcttactccgctgatgctaattctcgcagccgcgacgttgttgggtctcgcggccctcaatcggttcggtgtgaagcccctcgcaccctatctggtcctcggggtggtgctctggttctttgtgctgcagtcggggatccacgcaacgctcgcaggtgttgcactggcgctcgccatccccttgcaagcttccacaggcggcggtccaacatcacctctacatcggctcgagcacgcactcaatccgtgggtggcgttcctcatcgtgccggtattcggcttcgccaatgccggcgtctcattcgccgggctcggtctctcggcactgctcgatccggtgccactcggcgttgcactgggccttttcttcggcaagcaggtaggcgttttcggcttcgcatggctggcgatctggctgaaaattgccgacatgccacgttacgcctcttgggcacatctttatggagtggcagtgctctgcgggattggcttcaccatgagcctcttcattgggctcctcgcttatccggagtcggccgttctccaggacgagacaaaaatcggcgtgctgctgggttcgacgctcgccggcctcataggttggctgatcttgcgcgtcaccaaggcaggcttccccgagcgaacctag

SEQ ID NO: 216 - protein, 408 aa, Nitrobacter hamburgensis X14
MRVRFGQYPNCGKRMVLEPGRLRPYSILRSFLDSEASAGLTLMFVAALALLLANSPFAPVYFDVLHRQVLGLTVLHWINDALMAVFFLLVGLEIKREFLDGQLATWSRRALPGIAALGGMVVPAVIFIAVNGGEPANLRGWAIPSATDIAFALGVLSLLGPRVPVSLKIFLTALAILDDLGAVLIIALFYTAELTPLMLILAAATLLGLAALNRFGVKPLAPYLVLGVVLWFFVLQSGIHATLAGVALALAIPLQASTGGGPTSPLHRLEHALNPWVAFLIVPVFGFANAGVSFAGLGLSALLDPVPLGVALGLFFGKQVGVFGFAWLAIWLKIADMPRYASWAHLYGVAVLCGIGFTMSLFIGLLAYPESAVLQDETKIGVLLGSTLAGLIGWLILRVTKAGFPERT

SEQ ID NO: 217 - DNA, 1353 bp, Shewanella denitrificans OS-217
  CDS (1)..(1353): transl_table=11
atgcagagcaataagatgactaaagagactaaaaatgtgttgcagcgagggctggagaatatccatcaccctgtttctaattttatacgtgcccaaacaacgtcgagtttgtttctgctgtttgcgaccattatcgccctctggtgggccaactctgattatgcgcaaagctatcaagcattaatccacactcagctgggattctttataggcgattttgagttgaaggcctcccttaagcacatcatcaatgatgggttaatggtgatatttttcttcttgctcgggcttgaaataaaacgagaagtgattgccggtgagctagctcaagcgaaaaatcggcgtatgctaattatttgcgctatgggtggaatggtgtgcccagcgctgatttactctgggtttaattggtcactcgattcgcagattggttggggcattcccatggccacagacacagcatttgcattgggtgtccttaccatggtgagaaaacacattccttcgagcctagtggcgtttattgtcggcctcgccatcgttgacgatgttggcgctatattggttatcgcgatattttacactcaggaaatctctctcatgcacctattaagtgcatgcgcgctcattggctttttaggcgtggctaattatgcaggggttcgccaaccactgttctattttatcattggcgtcgcagcttggtgggccatgctcaaatctggggttcatcccacagttgctggagttaccatagccttgactatcccagcacaacctaagttggcgtcaggcaaatggttagaaaaagctaaatcaataatcagtgcaattcagaataaatcaaaaaacatggatgtactcggcaacaagggccatcatgaacaagtgctgaaggtgcgggactttgcagagcgagccagcacgcctttgcgccgttgggaagatgcactggacttgcctgtggtgctgtttatcttacctttatttgcgcttgccaatgcgggtgtcgtcatcaatttaagctcatttatcgagagcgtgcagcatcccgtgggcttagggattatttcaggcctcatcttggggaaattaatcgggatatcaggcgcttgctggtttgcacttaaatttaatattggctgcttacccgataaagttgatttgaatcatgtgattggcgcatcactcatcgcgggaattggttttaccatgtcgaccttcatcgccacgttagggtttggcgatcaagataccgcattgcatgttgctaaaacctcgattctgctagcctcagtcttgactgctattcttggcctactttaccttcgatttgtgtcaacaaaagcctag

SEQ ID NO: 218 - protein, 450 aa, Shewanella denitrificans OS-217
MQSNKMTKETKNVLQRGLENIHHPVSNFIRAQTTSSLFLLFATIIALWWANSDYAQSYQALIHTQLGFFIGDFELKASLKHIINDGLMVIFFFLLGLEIKREVIAGELAQAKNRRMLIICAMGGMVCPALIYSGFNWSLDSQIGWGIPMATDTAFALGVLTMVRKHIPSSLVAFIVGLAIVDDVGAILVIAIFYTQEISLMHLLSACALIGFLGVANYAGVRQPLFYFIIGVAAWWAMLKSGVHPTVAGVTIALTIPAQPKLASGKWLEKAKSIISAIQNKSKNMDVLGNKGHHEQVLKVRDFAERASTPLRRWEDALDLPVVLFILPLFALANAGVVINLSSFIESVQHPVGLGIISGLILGKLIGISGACWFALKFNIGCLPDKVDLNHVIGASLIAGIGFTMSTFIATLGFGDQDTALHVAKTSILLASVLTAILGLLYLRFVSTKA

SEQ ID NO: 219 - DNA, 1197 bp, Shewanella denitrificans OS-217
  CDS (1)..(1197): transl_table=11
atggtacaaaaaatcaaagcgtttcttagccaagaatccagtggcggcatattacttatgctggcagtggcgatggcgatgctcctcgctaactctcctttagccggcctatatcaaggctttctcgatacgcctgtgcaagttagatttggccaactggacattaataaacccttattgctgtgggtgaatgatggcttgatggcgctattttttttactgattggcttagaagttaaacgcgaattagtcgaaggggcattatccagtgtgtctaaggcatccttacccacctttgcggccattggcggcatggtgtttcctgccttagtgtatcttggatttaactttggcaatgaagccacccaaaatggttgggccataccggcggccacagacatcgcctttgccttaggggtattagccttattaggtaatcgggttcccgtggcccttaaagtctttttgttggcgcttgccatcatagatgacataggcgtaatcgtgattatcgccctattttatagctcagatctatccatcaccagcctagttatcgccgcaattgccattggctccatggttattttaaaccttaaaggtgtgcgtaccctgacgccttatgccttgctaggtttactgctatggattgccgtgcttaagtctggggtccatgcaaccttagctggcgttgtcattgccttctgtattccattaaaggtgaaacctggtgaagagtcaccctcgcgctatctagaacatagcctgcatccttggagcacattcatgatattgcccctgtttgccttcgctaatgctgggctttctttatcgggcatgagtctggcgtcattggcagagcctgccgctttaggtgtgatgctgggactcttgctgggtaaacccctaggtgtgctgctgtttagttatgccgcagtcaaacttaagtgggcaagtttgccgcaaggggttaactggcagcaaatatcagccgtcgccgtactctgtggggtgggttttaccatgtcgatatttatctcttcgctggcatttgaacattcggcggtggatgttggaaattatgccagactgggcaccttagtgggctctatgttatcagccagtatcgcctatttttggttaactaaagtgttaaatgacgataaaggagaaacagatgaaaacaagaatagttag

SEQ ID NO: 220 - protein, 398 aa, Shewanella denitrificans OS-217
MVQKIKAFLSQESSGGILLMLAVAMAMLLANSPLAGLYQGFLDTPVQVRFGQLDINKPLLLWVNDGLMALFFLLIGLEVKRELVEGALSSVSKASLPTFAAIGGMVFPALVYLGFNFGNEATQNGWAIPAATDIAFALGVLALLGNRVPVALKVFLLALAIIDDIGVIVIIALFYSSDLSITSLVIAAIAIGSMVILNLKGVRTLTPYALLGLLLWIAVLKSGVHATLAGVVIAFCIPLKVKPGEESPSRYLEHSLHPWSTFMILPLFAFANAGLSLSGMSLASLAEPAALGVMLGLLLGKPLGVLLFSYAAVKLKWASLPQGVNWQQISAVAVLCGVGFTMSIFISSLAFEHSAVDVGNYARLGTLVGSMLSASIAYFWLTKVLNDDKGETDENKNS

SEQ ID NO: 221 - DNA, 1185 bp, Shewanella frigidimarina NCIMB 400
  CDS (1)..(1185): transl_table=11
atggaacgagcaattaagaacttcttaagccaagaatctgcaggtggcattttattaatggtcgcagtagctttggcgatgattttagcaaattccccgttagctggagtatatcaaggttttttagccacagaagtacagctacgtgtgggcgatttagatatcgataagccgttattactgtggattaatgatgggctaatggcgttattctttttattaattggtttggaagtgaagcgcgaattacttgaaggggccttatcaagtgtggccaaagcttcattacccagtattgctgctattggcggcatggtgtttccggcgttgttttacttagcatttaactacgcaacccccgaaactcaagtcggatgggctattcctgccgctacagacatcgcttttgctttaggtattatggcattgctcggtaatcgtgtacctgtggcattgaaggtgtttttattagccttagcgattattgatgatttgggcgttattgtcattattgccttgttttatagtactgatttatccatgacaagcttggtcattgcagcggtatcgattgtgcttatggttgcattgaacaaaaaaggggtcagttcaattttaccttacggtttacttggttttattttatgggtcgccgtattgaagtctggtgtacacgcgacattggcaggtgtaattattgcattttgtattcctttacgtgcaaaggatggtacttcaccatcggaacatttagagcataagttgcacccctggagcacctttatgatcctgcccgtgttcgcttttgctaatgctggtttgtcattaacgaatatgactttagattcatttgctgaacccattaccttaggcattattatgggtctgttgctcggtaagccgattggggtgctgttattcagttatttagccgtgaagcttaagttagcagaactaccaccagggattggttggagacacattattcctgttgcagtgatgtgtggtatcggatttactatgtcagtgtttattgcttcgttagcgtttgaacattcacctgcggcatatggtgattatgcaagacttggtattttaacaggatcgttattagcagcactaattggttatttttggttagccaaagtactgcctgaaacaggagaaaaacatgaaactcactaa

SEQ ID NO: 222 - protein, 394 aa, Shewanella frigidimarina NCIMB 400
MERAIKNFLSQESAGGILLMVAVALAMILANSPLAGVYQGFLATEVQLRVGDLDIDKPLLLWINDGLMALFFLLIGLEVKRELLEGALSSVAKASLPSIAAIGGMVFPALFYLAFNYATPETQVGWAIPAATDIAFALGIMALLGNRVPVALKVFLLALAIIDDLGVIVIIALFYSTDLSMTSLVIAAVSIVLMVALNKKGVSSILPYGLLGFILWVAVLKSGVHATLAGVIIAFCIPLRAKDGTSPSEHLEHKLHPWSTFMILPVFAFANAGLSLTNMTLDSFAEPITLGIIMGLLLGKPIGVLLFSYLAVKLKLAELPPGIGWRHIIPVAVMCGIGFTMSVFIASLAFEHSPAAYGDYARLGILTGSLLAALIGYFWLAKVLPETGEKHETH

SEQ ID NO: 223 - DNA, 1203 bp, Psychrobacter cryohalolentis K5
  CDS (1)..(1203): transl_table=11
atggcaatacataaaatcagagcgttttttaatctcgaggcttcgggcggtatcgtcctagcgctggcagctatcgcagcaatgattattgctaatacttctctaaatacgtggtacgaatcctttattcacgcacctgtcgctattcaaattggcagcttctcaatcgctaaagatgcgcatcattggattaatgatggcttgatggcagtgttcttctttttagtgggacttgagcttaagcgtgaagtgttaatcggcgagctgtccaatgtaaagcaaattatcttgccagcaggagcggctcttggcggcatgatcatgccagccatcgtctatctgttttttaactataatgaacctgagttttggcgaggttgggcgattcctgccgcaaccgatatcgcctttgctcttggtattttgagtttacttggtaatcgcgtacccaattcattaaaagtattcttagtctcgattgctatctttgatgatatcggcgcgattattatcatcgctttattttataccaatgatttatcacttggttcactggctatcgcgggcttatgtctgccgtttttatatctgcttaatcgccgtaacgttactagcataactccttatttgctaattggcgttatcatgtgggttgccgtactcaaatccggtatccatgcaacgttagctggggttgtattggcgctatttattcctttatttgatcgcactgaccctgagcattccccgcttgaagagcttgaacacgacctacaaaacacagtttcttacggtatcctgccattatttgcttttgccaatgcgggcatttcgcttaagggcgcagggtttggtgagctgtttcattctgtaccgcttggtattgccgctggactgttcatcggtaaacaagtaggcgtcatgctgatgtgctggttaatttttaaattgggcatttctactatgccaaaaggcatgaactttaagcaaatctacggcgcagcattgttatgtggtgtaggctttaccatgagtttgtttatcggtgggcttgcatttgccggtgagacaccattatttgatgagcgtttgggtatcattatgggttcaatcgtctctggtatcgcaggttatatgatgctcaaagccactttaaaagatgaggttaatgtaacctctgtagacttaacgcgtcattcttaa

SEQ ID NO: 224 - protein, 400 aa, Psychrobacter cryohalolentis K5
MAIHKIRAFFNLEASGGIVLALAAIAAMIIANTSLNTWYESFIHAPVAIQIGSFSIAKDAHHWINDGLMAVFFFLVGLELKREVLIGELSNVKQIILPAGAALGGMIMPAIVYLFFNYNEPEFWRGWAIPAATDIAFALGILSLLGNRVPNSLKVFLVSIAIFDDIGAIIIIALFYTNDLSLGSLAIAGLCLPFLYLLNRRNVTSITPYLLIGVIMWVAVLKSGIHATLAGVVLALFIPLFDRTDPEHSPLEELEHDLQNTVSYGILPLFAFANAGISLKGAGFGELFHSVPLGIAAGLFIGKQVGVMLMCWLIFKLGISTMPKGMNFKQIYGAALLCGVGFTMSLFIGGLAFAGETPLFDERLGIIMGSIVSGIAGYMMLKATLKDEVNVTSVDLTRHS

SEQ ID NO: 225 - DNA, 1638 bp, Nocardioides sp. JS614
  CDS (1)..(1638): transl_table=11
gtgagcccgggaggagtcgcggtgcggatcggctcgcgagcccgacgcgccctgcgcaccgaggccggcagtgccgggctgctgctgacggcggtcctcgtcgccctggcctgggccaactcgccatggtcggggtcctacctgtcgctgtggtcgacccccgcctcgttctcggtcggcgactggcggctgtcgatgcccctcggccagtgggtgaacgacgggctgatggccctgttcttcttcatgatcggcctggaggtccgccgggagttctccatcggcgcgctcaccacgccgcgccgggccgccatcccggtgatcgccgccgtcggcggcctggtggtccccgccgccctgtacgtcctgctcgcacccggcgacgcgcagggcgcgtggggtgtcgtgatcggcaccgacaccgccgtgatgctgggcgcactggccatcgtggggccgcggatggcgacccagctgcgcctcttcctcctgaccctcaccgtcatcgacgacatcgtcgccgtcggcgtcatcggcgtcttctacagcgactccctcgacgccgtcggcctggtgctcgtcgcggtcttcgccaccgtggtcgggctgctgagccggtacggcgtctggcgggccgcgccgtacctcctggccggcctggggctgtggctcgcgacgctgcagtccggcctgcacgcctccatcgccgggatgctcggcggactgctggtggccgcccaccgcccgcgacactcggccgtcacgcgcgcagcggaccacttccgggccttcagggactcgccgaacgtcgacgtcggcaggtccgcgcaccgggagctggtgcgcgccgtgtcggtcaacgaacgcatgcagcggcgcctgcacccctggggcaacctcgtggtcgtgccgctgttcgtgctcgccaacgcgggtgtggacctccgcggcggcgtgctggccgacgcgctcacgtcgcggctcacctgggccgtgaccctcgccctcgtcgtcggcaagctcgtcggcatcctggccgccacctgggcgggggttcgcagccgtctcggcagcctcccgtccggcgtcgacctcggacacgtggcgggcggtgcggcgctgtcgggcatcgggttcacggtgtccctcctggtcgccggcctcgccttccccgaccgggccagccacgaccgcgcggtcgtcggcatcctcctggcggccgtgatcgcgaccgccgccggctgggccgtcttccgcgccaccgccgcccggcggcaccggacggcgctcccgtcagagtcgctcgatgatcgtgacgttggcctggccgccgccctcgcacatggtctgcagcccgtagcggccaccggtgcgctccagttcgccgaggagcgtcgtcatcaggcgcgccccggtggcgccgatcggatggcccagggcgatcgcgccgccgttgacgttgacccgctggtggggggccccggtctccttcatccaggccagcaccacgggcgcgaaggcctcgttgcactcgaacaggtcgatgtcctcgatcgccaggccgctgcgctccagcgcgtgcctggtcgcccggatcgggccggtgagcatccagaccgggtcgtccccgcgcactga

SEQ ID NO: 226 - protein, 545 aa, Nocardioides sp. JS614
MSPGGVAVRIGSRARRALRTEAGSAGLLLTAVLVALAWANSPWSGSYLSLWSTPASFSVGDWRLSMPLGQWVNDGLMALFFFMIGLEVRREFSIGALTTPRRAAIPVIAAVGGLVVPAALYVLLAPGDAQGAWGVVIGTDTAVMLGALAIVGPRMATQLRLFLLTLTVIDDIVAVGVIGVFYSDSLDAVGLVLVAVFATVVGLLSRYGVWRAAPYLLAGLGLWLATLQSGLHASIAGMLGGLLVAAHRPRHSAVTRAADHFRAFRDSPNVDVGRSAHRELVRAVSVNERMQRRLHPWGNLVVVPLFVLANAGVDLRGGVLADALTSRLTWAVTLALVVGKLVGILAATWAGVRSRLGSLPSGVDLGHVAGGAALSGIGFTVSLLVAGLAFPDRASHDRAVVGILLAAVIATAAGWAVFRATAARRHRTALPSESLDDRDVGLAAALAHGLQPVAATGALQFAEERRHQARPGGADRMAQGDRAAVDVDPLVGGPGLLHPGQHHGREGLVALEQVDVLDRQAAALQRVPGRPDRAGEHPDRVVPAH

SEQ ID NO: 227 - DNA, 1305 bp, Nocardioides sp. JS614
  CDS (1)..(1305): transl_table=11
gtgaccggccgccgcccgacccgcccccgcctgttctcgcgagggtcgttcctcgagagctcccgggtcgccgacatcctccgcgcggagaccaccggcggcctgctgctgatcgccgccgccacggtggcgatcgtgtgggcgaacaccccctggtcggcgtcgtacgccgacctccgcgacctgcgggtcggtccgcaggcgtggcacctcgacctcaccctgggcgcctgggcggccgacggcctgctggcgatcttcttcttcgtggccggcctggagctcaagcgggagttcgtggccggcgacctccgggacccgcgccgggcggcgctgcccgtggtcgccgccatgggcgggatggcggtgcccgcgctcgtctacgtgctgtggaacctcggcggggacggggcgctgcagggctgggcgatccccacggcgaccgacatcgcgttcgccgtcgccatcctcgcggtgatcagcacccacctgcccacgggcctgcggacgttcctgctgaccctggcggtcgtcgacgacctgttggccatcacgatcatcgcgctcttctacaccgacgagctgcacctgggctacctcgcggccgccgccgtccccctcctggtcttcgcgctgctggtgcagcgacggatccaccgcggctggctgctgatccccctggccgccaccgcctgggtcctggtgcacgagtcgggcgtgcacgcgaccgtcgccggggtgctgctcggcttcgccgtcccggtgctgcgctcggacggccaggaggggcccgggctcgccgagcacctcgagcacctggtccggccgctctcggccggcctcgccgtacccgtgttcgcgttcttcgccgccggggtcaccgtcggggggttcgacgggctcgtggacgcgctctccgacccggtcgcgctcggcgtcgtcaccggcctggtcgtcggcaagaccgtcgggatcgccggctccacgtggttgctcgcgaccttcacccgcgccgacctcgacgaccagctgagctgggtcgacgtggtcggcctggcgatgctcgccggcatcggcttcaccgtctcgctgctgatcggcgagctcgcgttcggcagcggcaccccccgggacgatcacgtgaaggtgggcgtgctcgtcggctcgctggccgccacggccctcgcgacaggggtgctgcggatgcgcaaccgcgcctaccggcggctggtcgagatcgaggagcaggacgccgacgcggacggggtccccgacgtctaccagcgcgacgccgacgaggggtga

SEQ ID NO: 228 - protein, 434 aa, Nocardioides sp. JS614
MTGRRPTRPRLFSRGSFLESSRVADILRAETTGGLLLIAAATVAIVWANTPWSASYADLRDLRVGPQAWHLDLTLGAWAADGLLAIFFFVAGLELKREFVAGDLRDPRRAALPVVAAMGGMAVPALVYVLWNLGGDGALQGWAIPTATDIAFAVAILAVISTHLPTGLRTFLLTLAVVDDLLAITIIALFYTDELHLGYLAAAAVPLLVFALLVQRRIHRGWLLIPLAATAWVLVHESGVHATVAGVLLGFAVPVLRSDGQEGPGLAEHLEHLVRPLSAGLAVPVFAFFAAGVTVGGFDGLVDALSDPVALGVVTGLVVGKTVGIAGSTWLLATFTRADLDDQLSWVDVVGLAMLAGIGFTVSLLIGELAFGSGTPRDDHVKVGVLVGSLAATALATGVLRMRNRAYRRLVEIEEQDADADGVPDVYQRDADEG

SEQ ID NO: 229 - DNA, 1851 bp, Nocardioides sp. JS614
  CDS (1)..(1851): transl_table=11
atgcgcgccgaaggccgcgggcagacgcgggcccggcgccggtccctggccgcacagctctcggtccccgtacgtcgctacctgaacaccgaggccggcagcgcgggcctcctgctcggcgccacggccctggccctcctctgggcgaactcgcggtggtccggcagctacgagtcgctgtggagcgcgcaggcggccgtctccgtgtcccgctgggacctgtcgatggacctcgggcactgggtcaacgacggcctgatggcgctgttcttcttcgtgatcggcctggaggtccgccgcgagttctccgtcggcgagctcaccgatccgcgccgcgcggcgatccccgtgctcgcggcgctgggcggcctggccgtcccggcgctgctctacgtcgcgatcgcccctgggtcggccgcgcacggttggggtgtggtcatcggcaccgacacggcgttcctgctgggtgccctggccgtggtcggcccgaccttcgcgacccagctgcggatcttcctgctcaccgtcaccgtgatcgacgacatcgtcgcggtcagtgtgatcggcctgttctacagcgactccctcgaccccgccgcgatcggcgtgatggcggtgttcctcgtgctgatggccgcgctgagccggctcggcgtgtggcgcgcggccccctatgtgctcgccgtcctcgggctgtggatcgcgacggtccagtcgggcctgcacgcctcgatcgcggggatgctcggcgggctgctcgtcgccgcccactcccccacccgcgaggccgtcgagggcgccgcgaggcggttccgggcgttccggcagtcccccgacgtccaggtcggcaggtccgcccgccttgggctggcccaggcggtgtcggtcaacgaacggctgcaggccgcactgcacccgtggaccagctacctcgtcgtaccgctcttcgccctcgcgaacgccggcgtcgacctgcgtgacggcgtcctgggcgacgccctggcctcccgcctcacgtgggccgtggtggtggcgctggtcctgggcaagctggccggcatcggactggcctcggtggcgggcgtccgtgccggtctcggtcggctcccgcgcggcgtccggctcggccacgtcttcggcggcggcgcgctgtcggggatcggcttcactgtcgcgctgctgatcgccgggctcgccttcgagtccgaccagcgcgaccgggcgaccgtcgggatcctgatcgcggcggtgctggcgaccggtctcggctgggcggtcttccacgccgccgccgtgctccggggccagaccgacgccgacctgccgaggttcctcgatccgcccgtcgacgcccggcacgaccacgtccgcggccgggaggacgcgccgctgacgctggtcgagtacggcgacttcgagtgcccgttctgcgctcgggccacgggcgtgaccacggagctccgggagcgcttcggtgacgacctgcgctacgtgttccgccacctcccgctggtcgacgtgcacccgcacgccgagctggccgcccgagccgccgtggccgcggaccaccagggtcgcttctgggagctgcacgacctgctgttcgagcaccagggcgagctggaggtcgaggacctcgcggggtacgccgccgacctcggcctcgacgtcgaggcgttcctgcgcgacctggaggaggacgacacggccgaccgggtccggagggacgtggcgagtgcggaggcaagcggcgcccgcgggacgccgaccttcttcgtcggcggggtgcggcacaccggaccgcacgacgccgagaccctggcccgggcgctcgaggagtcgcgcacgtga

SEQ ID NO: 230 - protein, 616 aa, Nocardioides sp. JS614
MRAEGRGQTRARRRSLAAQLSVPVRRYLNTEAGSAGLLLGATALALLWANSRWSGSYESLWSAQAAVSVSRWDLSMDLGHWVNDGLMALFFFVIGLEVRREFSVGELTDPRRAAIPVLAALGGLAVPALLYVAIAPGSAAHGWGVVIGTDTAFLLGALAVVGPTFATQLRIFLLTVTVIDDIVAVSVIGLFYSDSLDPAAIGVMAVFLVLMAALSRLGVWRAAPYVLAVLGLWIATVQSGLHASIAGMLGGLLVAAHSPTREAVEGAARRFRAFRQSPDVQVGRSARLGLAQAVSVNERLQAALHPWTSYLVVPLFALANAGVDLRDGVLGDALASRLTWAVVVALVLGKLAGIGLASVAGVRAGLGRLPRGVRLGHVFGGGALSGIGFTVALLIAGLAFESDQRDRATVGILIAAVLATGLGWAVFHAAAVLRGQTDADLPRFLDPPVDARHDHVRGREDAPLTLVEYGDFECPFCARATGVTTELRERFGDDLRYVFRHLPLVDVHPHAELAARAAVAADHQGRFWELHDLLFEHQGELEVEDLAGYAADLGLDVEAFLRDLEEDDTADRVRRDVASAEASGARGTPTFFVGGVRHTGPHDAETLARALEESRT

SEQ ID NO: 231 - DNA, 1371 bp, Syntrophobacter fumaroxidans MPOB
  CDS (1)..(1371): transl_table=11
atggataaaaagaagcgaaagaacgaatacgccctggagcgccttttcgggcgcattctgagcccgtttgaagccttcctcaaacggacgaccgcgggaggcatcgttctgatgggaaccaccgtgctgacgttgatcgcggcaaactcggcatggggcgacgcctttctgcgcttctgggaacagcgggttcgctttggaatcggttccctgcaactcgaaatgagcctgcatgacctgatcaatgacggcctcatgagccttttcttcctggtggtcggtctcgaactgaagcgggaaatgaaggtcggggagctttcatcgtggcgggacgcggctctacccgtattcgccgcggccggaggcatggtcgtgccggcgctcgtctatttcgccgtcaatccccacggaaccgccgcggcgggctgggggattcccatggcgacggacatcgccttcgcggtaggcatactcgtgctgctttcctggcgcattccacccggcctgatcatctttctgaccgccctggccatcgccgacgacctgggcgccgttctcgtgatcgccctcttctacacccacgagatcagcctgggcgccatcggcttcgcctccgccgtcctttttctgctgctcctcctgaaccgcggcggaatcaggcacgctattccatacggcgttctgggcgtgctgctttggatggccctgcatcattccggggttcattccaccctcgccggcgttctgctcgccttcaccatcccggcacgaccggcgcgtgcacccgcggaattcgaacaacgcctggtcgagcttcaaaacgcctttcatgccgaagccgccgcacccgattttgtcgatcagccgttgagcaacccgcgcatggcgaccattgccgagaccctggagagaaattcgcgtgccgttcagtctccgctccaacgcatggaacacaggctcggcccctgggtcacgttcatagtcatcccgcttttcgctctgaacaatgtgggcatcgacttcgagaaaatcgcgctgctgcaagggctttgcgaaccggtgaccatgggagtctgcctggggcttgttttcgggaagttcacgggcatatccgttttcagctggatcgccgtgagactcggcatcgggcggcttccttccgaggtccggtggcgtcacctgctcggagtggcctggctcggcggcatcggattcaccatgtcccttttcatcagccaactcgcattcgacgaccggctcctgcaggaacaggccaagttgggaatcctcaccgcttcgctgctttcggcgatgatcggaatgacctggttatacttcggcggaaccagggcgcggccgaatccggaatga

SEQ ID NO: 232 - protein, 456 aa, Syntrophobacter fumaroxidans MPOB
MDKKKRKNEYALERLFGRILSPFEAFLKRTTAGGIVLMGTTVLTLIAANSAWGDAFLRFWEQRVRFGIGSLQLEMSLHDLINDGLMSLFFLVVGLELKREMKVGELSSWRDAALPVFAAAGGMVVPALVYFAVNPHGTAAAGWGIPMATDIAFAVGILVLLSWRIPPGLIIFLTALAIADDLGAVLVIALFYTHEISLGAIGFASAVLFLLLLLNRGGIRHAIPYGVLGVLLWMALHHSGVHSTLAGVLLAFTIPARPARAPAEFEQRLVELQNAFHAEAAAPDFVDQPLSNPRMATIAETLERNSRAVQSPLQRMEHRLGPWVTFIVIPLFALNNVGIDFEKIALLQGLCEPVTMGVCLGLVFGKFTGISVFSWIAVRLGIGRLPSEVRWRHLLGVAWLGGIGFTMSLFISQLAFDDRLLQEQAKLGILTASLLSAMIGMTWLYFGGTRARPNPE

SEQ ID NO: 233 - DNA, 1149 bp, Pelobacter propionicus DSM 2379
  CDS (1)..(1149): transl_table=11
atgaaaaaacatctcaacctgttgcgggaattctccgtgccgcttgtggccggcgttgtcgtcgcgctcttctgggccaatctggatcctgccgggtaccgcgccttcgactccacaccgttctgggggtccctgtcgttccattttatctccaatgagctgttcatgaccctgtttttcggcattgccgccgtggagatcacccagagctgcatgcccggcggtgacctgaatccgatctcccgggcggtcaaccctctgttcggcaccctggggggggtgctggggccggtgctggtctacctggggctgaacgccctggtggggctgcctgaactgcgcaacggctgggggattcccaccgccacggacatcgctctggcctggctggcggcgcgtatggtcttcggccccggccatccggccgtctcctatctgctgctgttggcggtggccgacgacgccatcggcctggccatcatcgcgctgttctaccccgatccgaatcacccggtggtcgcggcctggctgctgctgaccctcttgggcatgctggttgcctgggggttgggcagacggcgcgtgcgcagctactggccctacatcctgctgggagggagcctgagctggatcgggctgcaccaggcccacctgcacccggccctggccctggtcttcatcattccttttctgcctcaccgcctgcgggagagcaggcacctcttcgacgacgacccgggcgatcgttcgcccctggcgcagttcgagcatgagtggaaggtggtggtggactttggtctgtttctgttcggcctggccaacgccggagtggaattctccagcatcggcacggtcacctggctggtgctggtctccctgctcgtcggcaagaccgtcggcatcttcggcttcggcctgctggcggagcggctcggcttcagaaggccgcggggcatgaagaggcgtgacctgctggtggcgggggttgttgccggaaccggcttcaccgtggcgctgtttgtctccggatccgccttttccgatccggtgatccaggctgccgccaagatgggagccatgttcagtctggcggcggcactgatcggcatgctgctgggccagctgctgcgcatacgaaaggtgcattga

SEQ ID NO: 234 - protein, 382 aa, Pelobacter propionicus DSM 2379
MKKHLNLLREFSVPLVAGVVVALFWANLDPAGYRAFDSTPFWGSLSFHFISNELFMTLFFGIAAVEITQSCMPGGDLNPISRAVNPLFGTLGGVLGPVLVYLGLNALVGLPELRNGWGIPTATDIALAWLAARMVFGPGHPAVSYLLLLAVADDAIGLAIIALFYPDPNHPVVAAWLLLTLLGMLVAWGLGRRRVRSYWPYILLGGSLSWIGLHQAHLHPALALVFIIPFLPHRLRESRHLFDDDPGDRSPLAQFEHEWKVVVDFGLFLFGLANAGVEFSSIGTVTWLVLVSLLVGKTVGIFGFGLLAERLGFRRPRGMKRRDLLVAGVVAGTGFTVALFVSGSAFSDPVIQAAAKMGAMFSLAAALIGMLLGQLLRIRKVH

SEQ ID NO: 235 - DNA, 1269 bp, Rhodoferax ferrireducens DSM 15236
  CDS (1)..(1269): transl_table=11
atgaagcggagttgcgcaattggtgacaatgagtacaagtttacccctctcaaatggccgctggcccagtcggcaacaccttcacccatgctcaaagttattgcccgccgcatcgatcagttcatcaattcacagtcggccggtggcgtgctgctggctctgtctgcattggttgcgctggtgatcagcaattcaccctggcgctcttattaccagcagttcttgcagattcccggctcggtgaagatgggtgcagactggctgctgctatcaaagccgatgctgatctggatcaatgatttgtggatggcggtgttcttcttcctggtcggcctggagatcaagcgcgagttgctcaacggtgaattggcttcgctcaagcaggcgatgctgccggccgttgccgcgctgggcggcatggcggtgccagcgctgatttatgccgccatcaactggggcgagccggtgggcttgcgcggttgggggatccccatggccaccgacattgcgtttgccttggggcttttggtgctcctgggtagccgcgtgccgacctccctcaaggtgtttttgacggcggtcgccatcattgatgacctgggcgccattttggtgattgcatttttttacacggataacctgtcgcccaccatgctgctggcagctggacttggcgcgctggtgctgctggggctgaatcgggcccgggtgatggcggtcgggccgtatgtggtggtcgggctggtgatttgggtttgcgtgctcaagtcgggtattcatgccacgctggcgggtgtgatcacggcgctggcgattccgctggcagatggcaagggcggctcaccactggaacgagctgagcacgccctgcagccatgggtggcattcctggtgttgccggtgtttgcctttgccaatgcgggtgtgtcattgcaaggggtgacgctggctactttgacccaaacggtgccgctgggcattgcgtttggcttgctgattggtaaacccatcggcgtttttggtgcgtcctggttgttgatccgcttgaccgatgcgcagttgcccgatcaatgtcgctggagtcagttttttggggtctgcgtattgtgtggggtgggctttaccatgagcctgttcattggttcgctggcgtttgaaggggctgatgcggcgtatgaagtccaggtcaaaatcggcgtcctgctggggtcattgctcagtggagcggccggtgtcgcgctgctgttggcaagccgcaaagcagtctga

SEQ ID NO: 236 - protein, 422 aa, Rhodoferax ferrireducens DSM 15236
MKRSCAIGDNEYKFTPLKWPLAQSATPSPMLKVIARRIDQFINSQSAGGVLLALSALVALVISNSPWRSYYQQFLQIPGSVKMGADWLLLSKPMLIWINDLWMAVFFFLVGLEIKRELLNGELASLKQAMLPAVAALGGMAVPALIYAAINWGEPVGLRGWGIPMATDIAFALGLLVLLGSRVPTSLKVFLTAVAIIDDLGAILVIAFFYTDNLSPTMLLAAGLGALVLLGLNRARVMAVGPYVVVGLVIWVCVLKSGIHATLAGVITALAIPLADGKGGSPLERAEHALQPWVAFLVLPVFAFANAGVSLQGVTLATLTQTVPLGIAFGLLIGKPIGVFGASWLLIRLTDAQLPDQCRWSQFFGVCVLCGVGFTMSLFIGSLAFEGADAAYEVQVKIGVLLGSLLSGAAGVALLLASRKAV

SEQ ID NO: 237 - DNA, 1092 bp, Escherichia coli F11
  CDS (1)..(1092)
atgattatggccaacagcggtgcaaccagtggatggtatcacgactttcttgagacgccggttcagctccgggttgggacacttgagatcaacaagaacatgctgctatggatcaatgacgctctgatggcggtatttttcctgttggttggtctggaagttaaacgcgagctgatgcaaggttcgctggccagtctgcgccaggcggcatttcctgttattgccgcaatcggcgggatgattgtcccggcattgctctatctggcttttaactatgccgatccgattacccgcgaaggctgggcaatcccggcggcgactgacattgcctttgcacttggtgtgttggcgctgttgggaagtcgtgttccgttagcgctgaagatctttttgatggctctggctattatcgacgatcttggggccatcattatcatcgcattgttctacactaatgacttatcgatggcctctcttggcgtcgcggctgtagcaattgcggtactcgcggtattgaatctgtgtggtgtacgccgcacgggcgtttatattctggttggcgtggtgctgtggacagcggtgttgaaatcgggggttcacgcaaccctggctggcgtcattgtcggcttctttattcctttgaaagagaagcatgggcgctctccggctaaacgtctggagcatgttttgcatccatgggtggcgtatctgattttgccgctgtttgcatttgctaatgctggcgtttcactgcaaggtgtcacgctggaaggtttgacctccattctgccattagggatcatcgctggtttgctgattggcaagccactgggtattagtctgttctgctggttggcgctgcgtttgaaattggcacatctgccagagggaacgacttaccagcaaattatggcggttggtatcctgtgcggtatcggttttactatgtctatctttattgccagcctggcatttggtagcgtagatccagaactgattaactgggcaaaattaggtatccttgtcggttcaatttcttcggcggtaattggatatagctggttacgcgttcgtttacgtccatcagtttga

SEQ ID NO: 238 - protein, 363 aa, Escherichia coli F11
MIMANSGATSGWYHDFLETPVQLRVGTLEINKNMLLWINDALMAVFFLLVGLEVKRELMQGSLASLRQAAFPVIAAIGGMIVPALLYLAFNYADPITREGWAIPAATDIAFALGVLALLGSRVPLALKIFLMALAIIDDLGAIIIIALFYTNDLSMASLGVAAVAIAVLAVLNLCGVRRTGVYILVGVVLWTAVLKSGVHATLAGVIVGFFIPLKEKHGRSPAKRLEHVLHPWVAYLILPLFAFANAGVSLQGVTLEGLTSILPLGIIAGLLIGKPLGISLFCWLALRLKLAHLPEGTTYQQIMAVGILCGIGFTMSIFIASLAFGSVDPELINWAKLGILVGSISSAVIGYSWLRVRLRPSV

SEQ ID NO: 239 - DNA, 1170 bp, Actinobacillus succinogenes 130Z
  CDS (1)..(1170): transl_table=11
ttgcgctttttacgacgtttttttcaattagaatcctctagcggaattttattattgatttttgccatgttagcaatgtctttagcgaattcttcgttaaagtcacattattttaattttctggatattcctatagtaatgcagttcggtacattcgccatcgataaaagtttgctgcattgggtaaatgacggcttaatggctattttcttcgtattggtcggaatggaagtcaaacgggaaatgttggaaggcgcgttggccagctatagacaggcggttttccccgcgttggccgcagtcggcggtatggtggtaccggcattgatttatgttttgattacccgttcttatgccgaactgagtaacggttgggcaattcctatggctacggatattgcttttgcgttaggtgtggtggcattgcttggggcgcgagttcctttaccgttgaaagtgtttttattggcgctggcgattatagacgacttgggtgccattgtcgttattgcattatttttctccgaacagcttagtgtgcctgcattgacgattgctgctttttctattttcggattattggttttaaaccgtatgaaggtaggtcacttgtgcggatatttattatttggcggtattttatgggcttcggtactgaaatccggcgtacatgcaacattggcgggcgttattatcggatttagtattccgttaaaagatcgccggggaaaccgtctgttgcatgctttcgaacatactttagccccgtggtgttcttttcttattttaccgttatttgcttttgctaatgcgggcgtttccctcggcagtatcaatgtcgcctctgttttttctccgttaccgatggggattgcgctgggtttgttattaggcaaaccgttaggcgtgttcggtttttgctttttggcggtgaaactacgattggcgaaattaccggaaggcgtggatttcaaacagattctggcggtagcggtattgtgcggcatcggttttacgatgtctatgttcctgtccagcctggcgttcggcggagagagtacaagtacaatcaatacgctttcccgcttaggcattttattgggttccggtctttccgccgtgatcggctatttgctattaagagcctttactaaaccggcagaaaattaa

SEQ ID NO: 240 - protein, 389 aa, Actinobacillus succinogenes 130Z
MRFLRRFFQLESSSGILLLIFAMLAMSLANSSLKSHYFNFLDIPIVMQFGTFAIDKSLLHWVNDGLMAIFFVLVGMEVKREMLEGALASYRQAVFPALAAVGGMVVPALIYVLITRSYAELSNGWAIPMATDIAFALGVVALLGARVPLPLKVFLLALAIIDDLGAIVVIALFFSEQLSVPALTIAAFSIFGLLVLNRMKVGHLCGYLLFGGILWASVLKSGVHATLAGVIIGFSIPLKDRRGNRLLHAFEHTLAPWCSFLILPLFAFANAGVSLGSINVASVFSPLPMGIALGLLLGKPLGVFGFCFLAVKLRLAKLPEGVDFKQILAVAVLCGIGFTMSMFLSSLAFGGESTSTINTLSRLGILLGSGLSAVIGYLLLRAFTKPAEN

SEQ ID NO: 241 - DNA, 1152 bp, Vibrio sp. Ex25
  CDS (1)..(1152)
atgaacgatgtcattcgtgactttttcaaaatggaatcagctggtggtattcttctcgtgattgccgcggcaattgcgatgaccattgctaactcaccgctgggcgaaacttatcaatctgtactgcatacttatgtatttggtatgtcagtttctcactggattaatgacggcctaatggctgttttcttcttactcattggccttgaagttaagcgagagctacttgaaggtgcgttaaaatcaaaagaaaccgcaattttccctgcgattgcagcggttggcggtatgttagctcctgctcttatttacgtagcctttaatgccaacgatcctgaggcgatttctggttgggcaattccagcggcgacagatatcgcttttgctttaggtatcatggcgttattaggtaagcgtgtaccagtaagcctaaaagtgttcttgctagcgcttgctatcatcgatgatttgggtgtggttgttattatcgcgctattttacaccggtgacctgtcgaccatggcgttgcttgttggcttcatcatgactggtgtcctattcatgttgaatgcgaaggaagtaacaaaacttacgccatacatgatcgtcggtgcgatcttatggttcgcggtgcttaaatctggtgttcacgcaacattggcaggtgtagtgattggttttgctatcccactaaagggaaagcagggcgaacattctccacttaaacatatggagcacgcgcttcacccatacgtggcatttggtattctgcctctattcgcatttgccaatgcggggatttcgttagaaggcgtatcgatgtcaggtctgacttcaatgctgccactcggtattgctttgggtctactggttggtaagcctctaggtatctttacctttagctgggcagcggtaaaaatgggcgttgctaagttacctgaaggggttaacttcaagcatatctttgcggtatctgtgttgtgtggtattggctttacaatgtctatcttcatttcctctttagcgttcggaaatgtaagtcctgaatttgatacctatgctcgactaggcatcttaatgggttcgacgacagcagcattacttggctatgccttactgcacttttctttgcctaagaaagcgcaagcgtaa

SEQ ID NO: 242 - protein, 383 aa, Vibrio sp. Ex25
MNDVIRDFFKMESAGGILLVIAAAIAMTIANSPLGETYQSVLHTYVFGMSVSHWINDGLMAVFFLLIGLEVKRELLEGALKSKETAIFPAIAAVGGMLAPALIYVAFNANDPEAISGWAIPAATDIAFALGIMALLGKRVPVSLKVFLLALAIIDDLGVVVIIALFYTGDLSTMALLVGFIMTGVLFMLNAKEVTKLTPYMIVGAILWFAVLKSGVHATLAGVVIGFAIPLKGKQGEHSPLKHMEHALHPYVAFGILPLFAFANAGISLEGVSMSGLTSMLPLGIALGLLVGKPLGIFTFSWAAVKMGVAKLPEGVNFKHIFAVSVLCGIGFTMSIFISSLAFGNVSPEFDTYARLGILMGSTTAALLGYALLHFSLPKKAQA

SEQ ID NO: 243 - DNA, 1206 bp, Pseudoalteromonas atlantica T6c
  CDS (1)..(1206): transl_table=11
atgcagtcttatctcggcaaattaattcaacatgaagcagccggtggcgtattactggtgatagctgcagccattgccatggtccttgccaactcacctgcatatgatttttacaacgggctgctggaaattccggtcagtattcgttttggagccttcgaaatcgccaagccgctgttgctatgggttaacgacggtttaatggcgatattcttttttttagtcggcctagaagtaaaacgcgaagtgctcggcgggcagttatcatctgtttcacaaataactttgcctgctgttgccgcaatagcgggaattgtatttcctgcactcatttacgtttggttcaacattgacgatccagtcgctgtaaacggttgggctattccatctgctactgacattgcgtttgctgttggtgtattcaccatctttggcaagtttctgcctttgagcttaaagctgtttttacttagcgtcgcgatattcgatgacatcggggcaattgttattattgctttgttttactcacaagatctttcaaccacatcgttaatcgtggcgtgcgcaggctttgtagcgctatttttactcaacagatttaacgtacgtcgccaagctgcatatgtcttgataggcgtagtggtgtgggctgcagtgcttaaatctggcgttcatgcaacattagccggtttcgcgctggcgtggtttatccctcttaaacttaagaatgaagatgggcacccgatgctgccgcacctagagcataaattgcatccgtgggtaggctttgtggtgctgcctatttttgcctttgcaaacgctggggtatcgctatttggtgcaagcatatctgatttgctaaaccccattaccttaggcattgcggtggggctatttgtcggtaagcaactagggatatttggtgtgtgctggataacggttaagacaggattagccaaattacctgatgggtccacttgggtgcagttatatggcgtgagtttgctgtgcggtattggttttaccatgagtttgtttatcggcagcttagcgtttgaagagcaaggtttggcttatcaaacgagtgtgaaagcaggggtattgctagggtcgttagtctcagctgtgctgggcgctgtgttgttggccagaagtaatgcgaaatcaaaagagcgtgctgagcgagaagctgccagagacgcttaa

SEQ ID NO: 244 - protein, 401 aa, Pseudoalteromonas atlantica T6c
MQSYLGKLIQHEAAGGVLLVIAAAIAMVLANSPAYDFYNGLLEIPVSIRFGAFEIAKPLLLWVNDGLMAIFFFLVGLEVKREVLGGQLSSVSQITLPAVAAIAGIVFPALIYVWFNIDDPVAVNGWAIPSATDIAFAVGVFTIFGKFLPLSLKLFLLSVAIFDDIGAIVIIALFYSQDLSTTSLIVACAGFVALFLLNRFNVRRQAAYVLIGVVVWAAVLKSGVHATLAGFALAWFIPLKLKNEDGHPMLPHLEHKLHPWVGFVVLPIFAFANAGVSLFGASISDLLNPITLGIAVGLFVGKQLGIFGVCWITVKTGLAKLPDGSTWVQLYGVSLLCGIGFTMSLFIGSLAFEEQGLAYQTSVKAGVLLGSLVSAVLGAVLLARSNAKSKERAEREAARDA

SEQ ID NO: 245 - DNA, 1419 bp, Pseudoalteromonas atlantica T6c
  CDS (1)..(1419): transl_table=11
atgaatcagcttcaagacaaagatcgcgaactggcccccttagagcgaaagtttaatcacttcatttgctcgttcgagcagttttttaaaagccaagcgactgccagtatcactttactgctagccgctattgccgccatggtgattgcaaactcacagtggcatgaaggctacgaagagataagtcacatggcatttagtatctccttgggggattttgccattagtcattccctgcatacatgggtgaatgacggcttaatggtgttgttcttcttcttgcttggcttagagatcaaatacgaatgcttggtgggggatctaaaagattttcgtgactcaagtcttgttatcgccatggcaattggcggtatgttgctccccgctggcatttacgctggggttgcgctaaccggagtggacgaagcgttgcgtggttggggaatacccatggccactgatactgcctttgcattgggcattctggcattacttggcagtaaagcaccgcgctcggcagcggtaaccttgtcagctttagcgattgtagatgacatgggcgcagtagccgtcattggcttgttttacactgaaaacatacacctaacctccctcatgtatgcgggcctgacgttaggcggcctgttcgcgttaaatgtactcggttttcgtcggcctattttttacctcgttgggggcattctgctgtggtggtttgtgttgcaatcaggtgtacatgcaaccgcagcaggtattttggctgcgctagctgtccctacaaagccctacgcgcaaagtacttggtttgctactaatatgcgtagtgtattaaatcgttttgagaaaaatgaccgcaaggataaatccattttagagcagcaagatcagcatgaattagtagagcaagctcaagatattgccgccatgacaaccacaccaatacaacgctgggggcatgtgctaaatcggccggtcagcttgatcattctgcccatttttgcgtttattaacgcaggggtggcactacctgatgacctcagcaaaatattcgactcggtggtctttattggggttgccagcgctatggtactagggaaagtgattggcattagtgtgtttgcttggatagctgttaaaagtggcttctctcgcttgcctaatgggttagcatttggacatgttttcgcactggcatgcttagccggggtgggctttactatgtcattatttattgcatcactgggctttgctggtcatcctgaattattggcgcaagccaaattgggtatcttggccggctccgtcatagcggccataatcggtacgactttatttctaatgataaagcataaagtgcacgaagagcctaaagacgagcggcataacaaggcaggcttaccgcagactgaccaagagtag

SEQ ID NO: 246 - protein, 472 aa, Pseudoalteromonas atlantica T6c
MNQLQDKDRELAPLERKFNHFICSFEQFFKSQATASITLLLAAIAAMVIANSQWHEGYEEISHMAFSISLGDFAISHSLHTWVNDGLMVLFFFLLGLEIKYECLVGDLKDFRDSSLVIAMAIGGMLLPAGIYAGVALTGVDEALRGWGIPMATDTAFALGILALLGSKAPRSAAVTLSALAIVDDMGAVAVIGLFYTENIHLTSLMYAGLTLGGLFALNVLGFRRPIFYLVGGILLWWFVLQSGVHATAAGILAALAVPTKPYAQSTWFATNMRSVLNRFEKNDRKDKSILEQQDQHELVEQAQDIAAMTTTPIQRWGHVLNRPVSLIILPIFAFINAGVALPDDLSKIFDSVVFIGVASAMVLGKVIGISVFAWIAVKSGFSRLPNGLAFGHVFALACLAGVGFTMSLFIASLGFAGHPELLAQAKLGILAGSVIAAIIGTTLFLMIKHKVHEEPKDERHNKAGLPQTDQE

SEQ ID NO: 247 - DNA, 1176 bp, Shewanella putrefaciens CN-32
  CDS (1)..(1176): transl_table=11
atggaaaaagcaattagaaattttctaagccaagagtcagcgggcggcatcctattattggttgctgttgtctttgctatgctgatggctaattctcctttatcaggactttatcaaggttttttagggactgatgtccaagttcgcgtgggtgcgttagatattcataaacctttattactctggattaatgatggcctaatggcattattcttcctgctgattgggttagaagtgaagcgtgagttactcgaaggggcgttatcaagtgttgcccaagcatcgctgcctagttttgctgctattggtgggatgttagttcctgctggtatttatttgttatttaactatggcgacccagtgactcaagcgggatgggcaattcctgctgcaactgatattgcttttgctttggggattatggccttactcggtaatagagtccctgttgcattaaaagtttttcttttagcactcgcgattatcgatgatctgggtgttattgtgattattgccctattttatagtagtgacttatcaaccattagtttagcgattgctagtgtcgcgattcttggtcttgtggggttaaaccgtaaaggcattacagcattgacgccttacgggattttaggcctgatcctttgggttgcggtgcttaaatctggtgttcatgccactctagcgggtgtcattattgccttttgtataccactgcgtgctaaagatggaagttcaccttctgaacatcttgagcacagtttacatccatggagtaattttctcattttacccgtgtttgcttttgcgaatgcgggggttgctctaggaaatatgagtttagataccttgctctcgcctgttcctatcggtattgcattaggcttgatattaggtaagcccatcggtgtcatgttatttagctttattgcggttaagttaaagttagctcgattacccgataatgttgggtggatgcaaattgcacctgtggcggctatgtgtggtattggatttaccatgtcgatgtttattgcatccttagcttttgagcaagctgatcctatgtacggtgatttggctcgcctaggaactctaattggttcgtttattgcggcattggttggatatttctggctgtcgaaagtattacctaaaaaaggagtattactatga

SEQ ID NO: 248 - protein, 391 aa, Shewanella putrefaciens CN-32
MEKAIRNFLSQESAGGILLLVAVVFAMLMANSPLSGLYQGFLGTDVQVRVGALDIHKPLLLWINDGLMALFFLLIGLEVKRELLEGALSSVAQASLPSFAAIGGMLVPAGIYLLFNYGDPVTQAGWAIPAATDIAFALGIMALLGNRVPVALKVFLLALAIIDDLGVIVIIALFYSSDLSTISLAIASVAILGLVGLNRKGITALTPYGILGLILWVAVLKSGVHATLAGVIIAFCIPLRAKDGSSPSEHLEHSLHPWSNFLILPVFAFANAGVALGNMSLDTLLSPVPIGIALGLILGKPIGVMLFSFIAVKLKLARLPDNVGWMQIAPVAAMCGIGFTMSMFIASLAFEQADPMYGDLARLGTLIGSFIAALVGYFWLSKVLPKKGVLL

SEQ ID NO: 249 - DNA, 1167 bp, Yersinia bercovieri ATCC 43970
  CDS (1)..(1167)
atgattcgtcaatttttgcgccaagaggctgcgggcggcctgattctaatctttgccgccatcgtggccctatttatggctaatacccagcttcaagggatttatcaatcatttcttgatgtgccggtatcagtaaaaattgcgtcgctggatatcagtaagccgctattgttgtggattaacgatggcttaatggcggtattctttcttgttgttggcttggaagttaagcgcgagctgatggaaggttcattggccggccgtgataaagcggtttttccggcgattgcggccttgggcggcatgttggcacctgccctgatctatttactgtttaatggggcggatgaagtcactcgccaaggctgggcaattccggccgcaacggatatcgcctttgcccttggtgtcatggcgcttttggggaaccgcgtaccgaccagtctgaaagtgtttttactggcactggcaattattgatgatctgggtgtcatcattattattgcgctgttttatacccatgaggtttcggtgcaagccttggggatcgccgctgcggccattgcgctactgggctacatgaactggcgtggcgtcgggaaaacttctgcctatttgctggtggggttggtgctgtgggtctgcattcttaagtcaggcgtacatgcaaccttagctggagtcattgttggctttatgatcccgctacataccaaaaataagcattcaccttctgaatcgctggaacatggtttgcacccgtgggtggcttatttgattctgccactatttgcttttgccaatgcaggggtttcgctacagggggtctctctctccgggctgacatcgttactgcccttagggatcgcgagtggtctgtttattggtaagccactggggattttcatctttagttggctcgcggttaagttagggattgctaaactgcccgatgcgataaactttaagcagattttcgccgtttcagtgctctgtggtatcggctttacaatgtcgatatttattgcttcactggcgtttgaaggcgcggatcttgctctgaccacctattccaaactggggatattgctaggttcgaccgctgcagcgattgtgggttacagcttgttgcgcctggtgcttccggcgaataaaaaaagcagctaa

SEQ ID NO: 250 - protein, 388 aa, Yersinia bercovieri ATCC 43970
MIRQFLRQEAAGGLILIFAAIVALFMANTQLQGIYQSFLDVPVSVKIASLDISKPLLLWINDGLMAVFFLVVGLEVKRELMEGSLAGRDKAVFPAIAALGGMLAPALIYLLFNGADEVTRQGWAIPAATDIAFALGVMALLGNRVPTSLKVFLLALAIIDDLGVIIIIALFYTHEVSVQALGIAAAAIALLGYMNWRGVGKTSAYLLVGLVLWVCILKSGVHATLAGVIVGFMIPLHTKNKHSPSESLEHGLHPWVAYLILPLFAFANAGVSLQGVSLSGLTSLLPLGIASGLFIGKPLGIFIFSWLAVKLGIAKLPDAINFKQIFAVSVLCGIGFTMSIFIASLAFEGADLALTTYSKLGILLGSTAAAIVGYSLLRLVLPANKKSS

SEQ ID NO: 251 - DNA, 1170 bp, Yersinia mollaretii ATCC 43969
  CDS (1)..(1170)
atgattcgtcaatttttacgccaagaggcggcgggggggatgattctcatcttcgccgccatcgtggccctatttatggctaacacctcgctacaagggatttatcactcatttcttgatgtgccggtatccgtaaagatagcgtcactggatatcagcaagccactattactgtggattaacgatggtttaatggcgatattctttctcgtcgttgggctagaagttaagcgcgagctgatggaaggttcactggcaggtcgtgataaagcagttttccccgcaattgccgcattgggtggtatgttggcccctgctttgatctatttgctgtttaatggtgcggatgaagtgacccgccaaggttgggccattccggctgcaacggatatcgccttcgcattgggtgtgatggcgctattgggtcctcgggtaccgaccagcctgaaagtatttttactggcactggcgattatcgatgatttgggtgtcatcattataattgcgctgttttatacccatgaggtatcagtgcaagctttggcgatcgccgctgcggctattgcgctgctgggatacatgaactggcgtggcgtcgggaaaacctctgcttatttactggtggggttagtactgtgggtttgcattcttaagtcaggtgtacatgcgaccttagccggcgtcattgttggctttatgattccgctgcataccaaaaataaacgctcgccttcggaatcgctggaacatggtttgcatccgtgggttgcctatttgattttgccattatttgcatttgccaatgcaggcgtttcattacagggtgtctctctctctgggctgacatcgttactacctatggggattgcgagcggcctgtttattggtaaacctctgggaattttcatctttagttggctcgcggttaagttagggattgctaaactgcctgatacgataaactttaagcagattttcgctgtctcagtcctttgtggtattggctttacaatgtcgatatttatcgcttcactggcatttgaaggcgcggatcttgctctgacgacctattccaaactgggtatattgctaggttcgacctcggcagcgattgtgggttacagcttattgcgccttgtgttaccggcgaataaaacagcagctaactag

SEQ ID NO: 252 - protein, 389 aa, Yersinia mollaretii ATCC 43969
MIRQFLRQEAAGGMILIFAAIVALFMANTSLQGIYHSFLDVPVSVKIASLDISKPLLLWINDGLMAIFFLVVGLEVKRELMEGSLAGRDKAVFPAIAALGGMLAPALIYLLFNGADEVTRQGWAIPAATDIAFALGVMALLGPRVPTSLKVFLLALAIIDDLGVIIIIALFYTHEVSVQALAIAAAAIALLGYMNWRGVGKTSAYLLVGLVLWVCILKSGVHATLAGVIVGFMIPLHTKNKRSPSESLEHGLHPWVAYLILPLFAFANAGVSLQGVSLSGLTSLLPMGIASGLFIGKPLGIFIFSWLAVKLGIAKLPDTINFKQIFAVSVLCGIGFTMSIFIASLAFEGADLALTTYSKLGILLGSTSAAIVGYSLLRLVLPANKTAAN

SEQ ID NO: 253 - DNA, 1170 bp, Yersinia intermedia ATCC 29909
  CDS (1)..(1170)
atgatccgtcaatttttacgccaagaggctgctggtgggctgattctaatttttgctgccaccgtcgccttatttatggctaacagccccttatttagcatttaccaatcatttcttgatgtaccggtatcggtaaagatagcctcgctggatatcagtaagccactattactgtggattaatgacggtttaatggcgatattcttcctggttgtcgggctggaagttaaacgcgagctgatcgaaggctcgttggctggccgcgataaggcggtattcccagcgattgcagcattaggtggtatgctggcaccggctttgatttatctattatttaacggtgctgatgaggttacccgccagggttgggcaattccggcggctactgatatcgcctttgcgttaggtgtaatggccctgttaggaaaccgagttccaaccagccttaaagtctttttactggcactggccattattgatgacttgggtgtcatcatcattattgcgttgttctatacccatgcggtttcactacaagccctgacaattgctgccgcggctattgcgctactggcatacatgaactggcgtggagtagggaagacatcagcctacctactggtgggattagtattgtgggtctgcatcctcaaatcaggtgtgcatgcgaccttagccggtgtcattgtcggctttatgataccgctgcatacgaaaaataatcgttcgccgtcagaatcgctcgaacatggtttgcacccatgggttgcctacttaattctgccattgtttgcatttgccaacgcgggggtttcgttgcaaggggtttctctctctgggctgacatcattgctgccgttagggatagcaagcggcctatttatcggtaagccactggggattttcctctttagttggctagcggttaagtttggggtggctaaactacctgacgcaataaactttaagcagatttttgctgtatcagtgctctgtggtattggtttcacaatgtcgatatttattgcttcattggcatttgaaggcgcggagcaggccctgacaacgtattctaaactcggaatattgttaggttcgaccatcgccgctattgtcggttacagcttgttgcgtatggccttgccggcgaaaagaaaagcggtgaattaa

SEQ ID NO: 254 - protein, 389 aa, Yersinia intermedia ATCC 29909
MIRQFLRQEAAGGLILIFAATVALFMANSPLFSIYQSFLDVPVSVKIASLDISKPLLLWINDGLMAIFFLVVGLEVKRELIEGSLAGRDKAVFPAIAALGGMLAPALIYLLFNGADEVTRQGWAIPAATDIAFALGVMALLGNRVPTSLKVFLLALAIIDDLGVIIIIALFYTHAVSLQALTIAAAAIALLAYMNWRGVGKTSAYLLVGLVLWVCILKSGVHATLAGVIVGFMIPLHTKNNRSPSESLEHGLHPWVAYLILPLFAFANAGVSLQGVSLSGLTSLLPLGIASGLFIGKPLGIFLFSWLAVKFGVAKLPDAINFKQIFAVSVLCGIGFTMSIFIASLAFEGAEQALTTYSKLGILLGSTIAAIVGYSLLRMALPAKRKAVN

SEQ ID NO: 255 - DNA, 1176 bp, Shewanella sp. PV-4
  CDS (1)..(1176): transl_table=11
atggaaaaggcgattagaaattttctgagccaggaatcggccggtggcatcttactgatggcggccgttatcttggcgatgatcatggcgaactccccgttgtcgggcctgtatcaaggcttcctgcacacagagatgcaggtgcgcgtgggcagtctggacattgataagacgctgatccactggattaacgacggcctgatggcgttgtttttcatgttgatcggcctggaagtgaagcgtgagctgctggaaggcgctctgtcgagccgtgagcaggcatccttgccaacctttgccgctataggtggcatgatcttccctgcggcgatctacctgatctttaactatgccgaccctattactcaggtgggctgggctattcctgccgctaccgatatcgccttcgcgctgggtatcatggcgctgctgggtagccgagtgccggtggcgcttaaggtgttcctgctggcgctggccatcatagatgaccttggtgtagtggtgatcatcgccatgttctatagcacagatctctctgccatcagcttagtcgttgccgcgttggcgatagtgatcttggtggggctaaatcgtaagggcgtgaccgcgctggctccttatggggtggtgggtctgatcctctggatagctgtgctcaaatctggggtacacgctaccctggccggtgtgatcatcgcattctgtattccgctgcgggccaaagatggtagctcaccgtcagagcatctggaacatagcctgcacccatggagcacctttgtcatattgcctatctttgcctttgccaatgcaggggtcgatctgtcgggcatgagccttggggatctgttatcgcctgtgcctgtgggtatcgcacttggcttactgctgggtaaaccgcttggggtactgctgtttagcttcgtggcggtcaagcttaagctggctgcattgcccgaaggcatgggctggcgtcatatcgcccccgtagccgtgatgtgtggtatcggctttaccatgtcgatgttcatctcatccctggcctttatcggcgatggcgaggcctatggtgatctggcaaggcttggcattctgaccgggtcaattatgtcggcggtgataggttatttttggttatctaaggtgcttccagagaaaggagaaaaatcatga

SEQ ID NO: 256 - protein, 391 aa, Shewanella sp. PV-4
MEKAIRNFLSQESAGGILLMAAVILAMIMANSPLSGLYQGFLHTEMQVRVGSLDIDKTLIHWINDGLMALFFMLIGLEVKRELLEGALSSREQASLPTFAAIGGMIFPAAIYLIFNYADPITQVGWAIPAATDIAFALGIMALLGSRVPVALKVFLLALAIIDDLGVVVIIAMFYSTDLSAISLVVAALAIVILVGLNRKGVTALAPYGVVGLILWIAVLKSGVHATLAGVIIAFCIPLRAKDGSSPSEHLEHSLHPWSTFVILPIFAFANAGVDLSGMSLGDLLSPVPVGIALGLLLGKPLGVLLFSFVAVKLKLAALPEGMGWRHIAPVAVMCGIGFTMSMFISSLAFIGDGEAYGDLARLGILTGSIMSAVIGYFWLSKVLPEKGEKS

SEQ ID NO: 257 - DNA, 1170 bp, Shewanella sp. ANA-3
  CDS (1)..(1170): transl_table=11
atggaaaaagcaattagaaattttctgagccaggaatcggctggcggcatcctgttattggttgctgttgtcttagccatgctcatggccaattctcctctagcgggactctatcaaggttttctcggtactgaagtacaagtgcgtgtcggcgcgctcgatctgcataagccgctgttactgtggattaacgatggcctgatggcattgtttttcttactgattggcttagaggtgaagcgtgaactgttagaaggcgccttatccagtgtcgctcaggcctcactgccaaccttcgctgcgattggtggtatgttagtgcctgctggcatctatctgctatttaactatggcgatcctgtgacccaagtgggttgggccattcctgcggctaccgatattgcgtttgcactcggcatcatggcgttgctgggtagccgcgtgccagtggcattgaaggtcttcctgctggcgctcgctatcatcgatgacttaggcgtgattgtgattattgcgctcttctacagcagcgatctgtcaaccattagcttaattattgccagcattgcgattgtcggtttagtggccttaaaccgtaaaggcgtgaccgcattagcaccctatggcgtgttgggactcgtcctgtgggtcgcggtattgaagtcaggcgtccacgcgactttggcaggtgtgattattgccttctgtattccactgcgggcaaaggatggcagttcaccctctgagcatttagagcatagcctgcacccttggagcactttccttatcctgcctgtttttgcctttgcgaatgcaggggtggccttaggtaacatgagtttggatgccctaatttccccagtacccgttgggattgcattgggactcatgttaggtaagccgattggtgtaatgttgtttagttatgtggccgtcaaactgaagttggcgcaattacccgatggaattggttggaagcagattgcgccagtggcggcaatgtgtggtattggttttactatgtcgatgtttattgcttcgcttgcatttgagcaagcagaccctatgttcggcgacttagcacgccttggcaccttgataggctcaattctagcggccttgatcgggtatttctggttatcaaaagtgttacctaaaaaaggagtataa

SEQ ID NO: 258 - protein, 389 aa, Shewanella sp. ANA-3
MEKAIRNFLSQESAGGILLLVAVVLAMLMANSPLAGLYQGFLGTEVQVRVGALDLHKPLLLWINDGLMALFFLLIGLEVKRELLEGALSSVAQASLPTFAAIGGMLVPAGIYLLFNYGDPVTQVGWAIPAATDIAFALGIMALLGSRVPVALKVFLLALAIIDDLGVIVIIALFYSSDLSTISLIIASIAIVGLVALNRKGVTALAPYGVLGLVLWVAVLKSGVHATLAGVIIAFCIPLRAKDGSSPSEHLEHSLHPWSTFLILPVFAFANAGVALGNMSLDALISPVPVGIALGLMLGKPIGVMLFSYVAVKLKLAQLPDGIGWKQIAPVAAMCGIGFTMSMFIASLAFEQADPMFGDLARLGTLIGSILAALIGYFWLSKVLPKKGV

SEQ ID NO: 259 - DNA, 1170 bp, Shewanella sp. MR-7
  CDS (1)..(1170): transl_table=11
atggaaaaagcaattagaaattttctgagccaagaatcggcaggcggcatcctattattagttgctgttgccttagccatgctgatggccaactctcctctcgcggggctctatcaaggatttctcggtactgaagtgcaagtccgtgttggtgcactcgatctgcataaaccgctgttgttgtggattaacgatggcctaatggcattgtttttcttactgattggtttagaggttaagcgtgaactgttggaaggtgctctatcgagtgtcgcacaggcttcgctgccaaccttcgcagcgattggtggcatgttagtaccagcaggcatttatctgctatttaactatggcgatcctgtgacccaagcgggctgggcgattcctgcggctaccgatatcgcttttgccttgggtatcatggcgctgctgggtagccgtgtgcctgtggcattgaaggtcttcctgttggcgttggccatcatcgatgacttaggcgtgattgtgattattgcgctcttctacagcaccgatctctcgaccattagcctgattattgccagcattgcgattgttggtttagttgccttaaaccgtaaaggcgtgaccgcattagccccctatggggtattaggactcgttctgtgggtggcggtattaaagtctggagtacacgcgactttagccggggtgattattgccttctgtattccactgcgtgcaaaagacggtagctctccttctgagcacttagagcatagcctgcacccttggagcaccttccttatcctgccagtatttgcgtttgcgaatgcgggggtggccttaggaaacatgagcctaaatacactgatctcccctgtgccagttggtattgcattgggactcatgttaggtaagccgattggtgtgatgctgtttagttacgcggccgtcaaactaagattggcgcaattgcctaatggaattggttggaagcagattgcgccagtagcggctatgtgtggtattggttttactatgtcgatgtttattgcttcgttggcatttgagcaagcagaccctatgtacggcgacttagcacgccttggcaccttgatcggctcgattattgcggccttgatcgggtatttctggttatcaaaagtgttaccaaaacaaggagtataa

SEQ ID NO: 260 - protein, 389 aa, Shewanella sp. MR-7
MEKAIRNFLSQESAGGILLLVAVALAMLMANSPLAGLYQGFLGTEVQVRVGALDLHKPLLLWINDGLMALFFLLIGLEVKRELLEGALSSVAQASLPTFAAIGGMLVPAGIYLLFNYGDPVTQAGWAIPAATDIAFALGIMALLGSRVPVALKVFLLALAIIDDLGVIVIIALFYSTDLSTISLIIASIAIVGLVALNRKGVTALAPYGVLGLVLWVAVLKSGVHATLAGVIIAFCIPLRAKDGSSPSEHLEHSLHPWSTFLILPVFAFANAGVALGNMSLNTLISPVPVGIALGLMLGKPIGVMLFSYAAVKLRLAQLPNGIGWKQIAPVAAMCGIGFTMSMFIASLAFEQADPMYGDLARLGTLIGSIIAALIGYFWLSKVLPKQGV

SEQ ID NO: 261 - DNA, 1278 bp, Novosphingobium aromaticivorans DSM 12444
  CDS (1)..(1278): transl_table=11
atgccttcgatttctcaccctccttcagctctgcgtgacttcctgcggagtgaagcagcgggtggcgtcattctgatggccgtggccgtgctggccatgattgttgcgaacagcccgctcgccgacagctatttccatctcctgcacgtgcagaccgggccagtgctcagcgagaagttggggccgatgacgcctcacctctggatcaacgatgcgctgatggcggttttcttcctgctcgtcggcctggagatcaagcgtgagttcgtcgatggtcgtctcgtgacctggcagcagcgccggttgcccttcattgctgctctgggtggcatggctgcgccagcactggtgttcctggctgtcacggcacaatcgtccggcctcacccagggctgggctatcccggccgcaaccgacattgcgtttgccatcggagtgatggccttgctgggcagccgcgttcccacggccctcaaactgttcctgaccaccgtcgcgatcgttgatgacatgggcgcagtcgtcatcatcgcacttgcctacaccgcgagcatcaaaggcatcgcgctgttggcagcggccgtcatccttggcgccatgatggcaatgaaccgggcaggcgtacgccatctggcgccgtacctcctgggcttcgtccttctttggttcgctgtgctggtctctggcgtccacgccacgattgcaggtgtcctggcagccttcaccgtgcccgtggtggcaaccccaggagcgccagattctccagattccccgttgcataggcttgagcacgcgctccatccttggtctgccttcctgatcgtgcccttgttcggctttgccaacgcaggaatctcactggagggcttcagcctcggcagcctgctggagccgctgcccctgggcatcgctgctggcctgttcattggcaagcagctcggtattttctccttgatctgggctgcagtgaaactcggcatcgcccaacgcccgcgcggatcgacctggttgcaggtctatggtctctcagtgttgtgcggcattggtttcaccatgagcctattcatcggaatgcttgccttcgcctcgtcaccagacctgatcgaggaagccaagctcggggtgataacgggctcgctgctttccggcgtgctaggttaccttgtccttcggtttgcgcccccagcggccgacgccgcccaggccgagactgaaatcgatcgcgaaattgaacaggacggcgatgtcgaggcgatcgaaggcaagctgcggcaataa

SEQ ID NO: 262 - protein, 425 aa, Novosphingobium aromaticivorans DSM 12444
MPSISHPPSALRDFLRSEAAGGVILMAVAVLAMIVANSPLADSYFHLLHVQTGPVLSEKLGPMTPHLWINDALMAVFFLLVGLEIKREFVDGRLVTWQQRRLPFIAALGGMAAPALVFLAVTAQSSGLTQGWAIPAATDIAFAIGVMALLGSRVPTALKLFLTTVAIVDDMGAVVIIALAYTASIKGIALLAAAVILGAMMAMNRAGVRHLAPYLLGFVLLWFAVLVSGVHATIAGVLAAFTVPVVATPGAPDSPDSPLHRLEHALHPWSAFLIVPLFGFANAGISLEGFSLGSLLEPLPLGIAAGLFIGKQLGIFSLIWAAVKLGIAQRPRGSTWLQVYGLSVLCGIGFTMSLFIGMLAFASSPDLIEEAKLGVITGSLLSGVLGYLVLRFAPPAADAAQAETEIDREIEQDGDVEAIEGKLRQ

SEQ ID NO: 263 - DNA, 1173 bp, Novosphingobium aromaticivorans DSM 12444
  CDS (1)..(1173): transl_table=11
atggctggaattgagggctttgcagcgattcgtggcaaactggcgcagagcgaggccgcgcccggcatcgtcctcatcgcatgcgcggcgctggcgctcctgatcgccaattcgcccctcgccgcggcgtggcatgccctgttccatcacccgcttccatggacgccggtcgccaagctcgacacgcttcacctgtggatcaacgacggcctgatggcggtgttcttcttcgtcgtcggcctcgagatcaagcgcgaagtccttgccggcgaactgtcggacgcccgccgccgcaggttgcctgtccttgccgcagtggccgggatggccgtgcccgcgctcatctatctcgcgatcacggctggccagcccgccctgcatcgcggctgggcgatcccgtctgcgaccgacatcgcctttgcgatcggcgtactggctctcgtcggccgggggctgccgccttcgctccggctgttcctgctgaccgtcgccatcgtcgacgatctcggcgcggtggtcgtgatcgcgctgttctacacctcgggcctcaagctcgcctggctcggcgcgagcgcgctgatcctcgcggcgctcgtcctggtcaaccgcatgggcgtccgcgccctcctgccctacctcgccggagccgtggcgctgtggtacacagtgctgcattccggcatccacgcgacggtcgccggcgtccttgccgcaatgactgtcccgcttgcgctcaaccgccgtcacgacagtccgctgctccggctcgagcatgccctcgtcgcaccgaacgggttcgtcatcgtgcctctgttcggccttgcgaacgccggcgtggcgcttggggcggacttcggtgaaagccccgccctccccctcgggatcgcgatgggtcttctgctgggcaagcagttcggcattctcggcagcatcctcgttgccgaacgcctgggcttcgcgcaccggcccgaaggggcaagcctgcgccatctctggggaatcgccctcctgtgcgggattggcttcacgatgagcctgttcatcgccgggctcgcgttccccgaaacgccgatgctggtcgaggaagccaagctcggcatcctcggcggctcgcttgtctccgcccttgccgggctcctggtcctgcgcggctccggccggccggtagtttga

SEQ ID NO: 264 - protein, 390 aa, Novosphingobium aromaticivorans DSM 12444
MAGIEGFAAIRGKLAQSEAAPGIVLIACAALALLIANSPLAAAWHALFHHPLPWTPVAKLDTLHLWINDGLMAVFFFVVGLEIKREVLAGELSDARRRRLPVLAAVAGMAVPALIYLAITAGQPALHRGWAIPSATDIAFAIGVLALVGRGLPPSLRLFLLTVAIVDDLGAVVVIALFYTSGLKLAWLGASALILAALVLVNRMGVRALLPYLAGAVALWYTVLHSGIHATVAGVLAAMTVPLALNRRHDSPLLRLEHALVAPNGFVIVPLFGLANAGVALGADFGESPALPLGIAMGLLLGKQFGILGSILVAERLGFAHRPEGASLRHLWGIALLCGIGFTMSLFIAGLAFPETPMLVEEAKLGILGGSLVSALAGLLVLRGSGRPVV

SEQ ID NO: 265 - DNA, 1170 bp, Shewanella sp. MR-4
  CDS (1)..(1170): transl_table=11
atggaaaaagcaattagaaattttctgagccaagaatcggctggtggcatcctattattagttgctgttgccttagccatgctgatggccaattctcctctcgcggggctctatcaaggatttctcggtactgaagtacaagtccgtgttggtgcactcgatctgcataaaccgctgttgttgtggattaacgatggcctaatggcattgtttttcttactgattggtttagaggttaagcgtgaactgttggaaggtgctctatcgagtgtcgcacaggcttcgctgccaaccttcgcagcgattggtggcatgttagtaccagcaggcatttatctgctatttaactatggcgatcctgtgacacaagcgggctgggcgattcctgcggctaccgatatcgcttttgccttgggtatcatggcgctgctgggtagccgtgtgcctgtggcattgaaggtcttcctgttggcgctcgccatcatcgatgacttaggcgtgattgtgattattgcgctcttctacagcaccgatctctcgaccattagcctgattattgccagcattgcgattgttggtttagttgccttaaaccgtaaaggcgtgaccgcattagccccctatggggtattaggactcgttctgtgggtggcggtattaaagtctggagtacacgcgactttagccggggtgattattgccttctgtattccgctgcgtgcaaaagacggaagctcaccttctgagcacttagagcatagcttgcacccttggagcacctttctgatcctgccagtatttgcgtttgcgaatgcgggggtggccttaggaaacatgagcctaaatacactgatctcccctgtgccagttggtattgcattgggactcatgttaggtaagccgattggtgtgatgctgtttagttacgcggccgtcaaactaagattggcgcaattgcctaatggaattggttggaagcagattgcgccagtagcggctatgtgtggtattggttttactatgtcgatgtttattgcttcgttggcatttgagcaagcagaccctatgtacggcgacttagcacgccttggcaccttgatcggctcgattcttgcggccttgatcgggtatttctggttatcaaaagtgttaccaaaacaaggagtataa

SEQ ID NO: 266 - protein, 389 aa, Shewanella sp. MR-4
MEKAIRNFLSQESAGGILLLVAVALAMLMANSPLAGLYQGFLGTEVQVRVGALDLHKPLLLWINDGLMALFFLLIGLEVKRELLEGALSSVAQASLPTFAAIGGMLVPAGIYLLFNYGDPVTQAGWAIPAATDIAFALGIMALLGSRVPVALKVFLLALAIIDDLGVIVIIALFYSTDLSTISLIIASIAIVGLVALNRKGVTALAPYGVLGLVLWVAVLKSGVHATLAGVIIAFCIPLRAKDGSSPSEHLEHSLHPWSTFLILPVFAFANAGVALGNMSLNTLISPVPVGIALGLMLGKPIGVMLFSYAAVKLRLAQLPNGIGWKQIAPVAAMCGIGFTMSMFIASLAFEQADPMYGDLARLGTLIGSILAALIGYFWLSKVLPKQGV

SEQ ID NO: 267 - DNA, 1152 bp, Vibrio alginolyticus
  CDS (1)..(1152): transl_table=11
atgaacgatgtcattcgtgactttttcaaaatggaatcagctggtggtattcttctcgtgattgccgcggcaattgcgatgaccattgctaactcaccgctgggcgaaacttatcaatctgtactgcatacttatgtatttggtatgtcagtttctcactggattaatgacggcctaatggctgttttcttcttactcattggccttgaagttaagcgagagctacttgaaggtgcgttaaaatcaaaagaaaccgcaattttccctgcgattgcagcggttggcggtatgttagctcctgctcttatttacgtagcctttaatgccaacgatcctgaggcgatttctggttgggcaattccagcggcgacagatatcgcttttgctttaggtatcatcgcgttattaggtaagcgtgtaccagtaagcctaaaagtgttcttgctagcgcttgctatcatcgatgatttgggtgtggttgttattatcgcgctattttacaccggtgacctgtcgaccatggcgttgcttgttggcttcatcatgactggtgtcctattcatgttgaatgcgaaggaagtaacaaaacttacgccatacatgatcgtcggtgcgatcttatggttcgcggtgcttaaatctggtgttcacgcaacattggcaggtgtagtgattggttttgctatcccactaaagggaaagcagggcgaacattctccacttaaacatatggagcacgcgcttcacccatacgtggcatttggtattctgcctctattcgcatttgccaatgcggggatttcgttagaaggcgtatcgatgtcaggtctaacttcaatgctgccactcggtattgctttgggtctactggttggtaagcctctaggtatctttacctttagctgggcagcggtaaaaatgggcgttgctaagttacctgaaggcgttaacttcaagcatatctttgcggtatctgtgttgtgtggtattggctttacaatgtctatcttcatttcctctttagcgttcggaaatgtaagtcctgaatttgatacctatgctcgactcggtatcttaatgggttcgacgacagcagcattacttggctatgccttgctgcacttttctttgcctaagaaagcgcaagcgtaa

SEQ ID NO: 268 - protein, 383 aa, Vibrio alginolyticus
MNDVIRDFFKMESAGGILLVIAAAIAMTIANSPLGETYQSVLHTYVFGMSVSHWINDGLMAVFFLLIGLEVKRELLEGALKSKETAIFPAIAAVGGMLAPALIYVAFNANDPEAISGWAIPAATDIAFALGIIALLGKRVPVSLKVFLLALAIIDDLGVVVIIALFYTGDLSTMALLVGFIMTGVLFMLNAKEVTKLTPYMIVGAILWFAVLKSGVHATLAGVVIGFAIPLKGKQGEHSPLKHMEHALHPYVAFGILPLFAFANAGISLEGVSMSGLTSMLPLGIALGLLVGKPLGIFTFSWAAVKMGVAKLPEGVNFKHIFAVSVLCGIGFTMSIFISSLAFGNVSPEFDTYARLGILMGSTTAALLGYALLHFSLPKKAQA

SEQ ID NO: 269 - DNA, 1443 bp, Streptomyces antibioticus
  CDS (1)..(1443): transl_table=11
gtggccgcgccccgcaccccgaacaccgcccgcaaggttctcggacgcctgtccctgcccgagcggaccttcgtcgcggacgcgctgcgcaccgagaccgtcggcggtgtcctgcttctcgtcgccacggtgacggcgctggtctgggcgaacatccccgcactgcagcacagctacgaggcggtcagccacttccacttcggcccgagcgccctcggcctgaacctgtccgtggcccactgggccgccgacggcctcctcgccgtcttcttcttcgtcgccggcatcgagctcaagcgcgagctggtcgccggggacctgcgcgaccccagggcggcggtgctgcccgtggtggccgcgctgtgcgggatggccgtaccggcgctcgtctacaccctcaccaacctcaccggacacggctccacccagggctgggcggtgcccaccgccaccgacatcgccttcgcgctcgccgtcctcgcggtcatcggcacctcgctgcccagcgccctgcgcgccttcctgctcaccctcgcggtcgtcgacgacctgttcgcgatcctgatcatcgcgatcttcttcaccgagcggatcaacttcgcggcgctcggcggggccgtcgccgggctggcggtcttctggctgctgctgcgcaagggcgtacgcggctggtacgtgtacgtgccgctggccgtcgtcgtctgggcgctgatgtacaacagcggcgtgcacgccaccatcgcgggcgtggcgatgggcctgatgctgcgctgcaccacccgtgagggtgaggagcactcgccgggcgagcacatcgagcacctggtgcggccgctgtcggccgggctcgccgtaccgctgttcgcgctgttcagcgccggggtggtggtctccggcggggcgctcggggatgtgttcaccgagccggagacgcttggggtggtgctcgggctggtcgtgggcaagacgctcggcatcttcggcagcacctggctgacggcccgcttcacccacgcggagctcagcgaggacctggaatgggccgacatcttcgcggtggcctccctcgccggaatcggcttcaccgtctcgctgctcatcggcgagctggccttcgcgggcgacacgctgctgaccgacgaggtgaaggcggccgtcctcaccggatcgctgatcgcggccctgtgtgccacggtgctgctgaagatacgcaacgcccgctatcgcgggctgtgcgaggacgaggagcgcgacgaggaccgggacggcattccggacgtctacgagcaggacgacccggcctaccacctgcggatggcggacatcttcgagcgcaaggccgccgagcaccgccgcatcgccgccgagaaggccgccgcggcgcgccacgggggtgcggaagtgccgggcggggcaggcgaggaggacggtcgtccggcatga

SEQ ID NO: 270 - protein, 480 aa, Streptomyces antibioticus
MAAPRTPNTARKVLGRLSLPERTFVADALRTETVGGVLLLVATVTALVWANIPALQHSYEAVSHFHFGPSALGLNLSVAHWAADGLLAVFFFVAGIELKRELVAGDLRDPRAAVLPVVAALCGMAVPALVYTLTNLTGHGSTQGWAVPTATDIAFALAVLAVIGTSLPSALRAFLLTLAVVDDLFAILIIAIFFTERINFAALGGAVAGLAVFWLLLRKGVRGWYVYVPLAVVVWALMYNSGVHATIAGVAMGLMLRCTTREGEEHSPGEHIEHLVRPLSAGLAVPLFALFSAGVVVSGGALGDVFTEPETLGVVLGLVVGKTLGIFGSTWLTARFTHAELSEDLEWADIFAVASLAGIGFTVSLLIGELAFAGDTLLTDEVKAAVLTGSLIAALCATVLLKIRNARYRGLCEDEERDEDRDGIPDVYEQDDPAYHLRMADIFERKAAEHRRIAAEKAAAARHGGAEVPGGAGEEDGRPA

SEQ ID NO: 271 - DNA, 1203 bp, Haemophilus influenzae
  CDS (1)..(1203): transl_table=11
gtgaattttttgctatgtatttttaaaggggtttatgtgataaaactgatccaacgtttttttaaattagaatctgctggcggtatattattgcttttttcagctgttgttgcgatgttgctggctaattcgccgttaagcaaccaatataatgattttttaaatttgcctgtaagtttacaaattggtagtttctcaattaataaaaccttaattcactggattaacgatggttttatggcggtgttttttgtattagtgggaatggaagtcaaaaaagaattatttgaaggcgcgctttctacctatcaacaagctattttccctgctattgcagctattggcggaatggttataccggctgtagtttattggtttatcgctaaacaagatccaagtttagctaatggctgggcaattccaatggcaacagacattgcttttgcactgggaattatggcgttattgagtaaacaagtgccacttccactgaaaatatttttacttgcccttgctattattgatgacctcggtgcgatagttgttattgcattatttttctcgcacggattgagtgtgcaagcactaattttttctgccgtggcaattattgtgctgatattactaaatcgtttcagagtttctgcactttgcgcttatatggtcgtaggtgcaattttatgggcttccgtattaaagtctggtgtgcatgctactttagcaggcgttattattggttttagcattccattgaaaggtaaaaaaggagaacgcccattagatgatttcgagcatattttagcctcttggtcatctttcgttattttaccacttttcgcatttgccaatgctggtgtgagttttgcaggcatagatgtgaatatgatttcgtcgccattattattggctatagcaagcggtttaattattggtaaaccagtcggtatatttggatttagttatatttctgttaaattgggattagctaaattaccggatggaattaattttaaacaaatttttgctgttgcggttttatgtggaatcggttttacgatgtcaatgttcttagcaagccttgcgtttgatgctaatgcgggggaaagtgtcaatactctttctcgtttaggtattctacttggatcaacggtttcggcaatacttgggtatttattcttaaaacaaacgacaaaactaaactaa

SEQ ID NO: 272 - protein, 400 aa, Haemophilus influenzae
MNFLLCIFKGVYVIKLIQRFFKLESAGGILLLFSAVVAMLLANSPLSNQYNDFLNLPVSLQIGSFSINKTLIHWINDGFMAVFFVLVGMEVKKELFEGALSTYQQAIFPAIAAIGGMVIPAVVYWFIAKQDPSLANGWAIPMATDIAFALGIMALLSKQVPLPLKIFLLALAIIDDLGAIVVIALFFSHGLSVQALIFSAVAIIVLILLNRFRVSALCAYMVVGAILWASVLKSGVHATLAGVIIGFSIPLKGKKGERPLDDFEHILASWSSFVILPLFAFANAGVSFAGIDVNMISSPLLLAIASGLIIGKPVGIFGFSYISVKLGLAKLPDGINFKQIFAVAVLCGIGFTMSMFLASLAFDANAGESVNTLSRLGILLGSTVSAILGYLFLKQTTKLN

SEQ ID NO: 273 - DNA, 26 bp, Artificial sequence
  primer
atgaaacatctgcatcgattctttag

SEQ ID NO: 274 - DNA, 25 bp, Artificial sequence
  primer
ttaaactgatggacgcaaacgaacg

SEQ ID NO: 275 - protein, 476 aa, Artificial sequence
  consensus sequence
  Variant (2)..(3): Xaa in position 2 to 3 is any amino acid
  Variant (5)..(10): Xaa in position 5 to 10 is any amino acid
  Variant (12)..(14): Xaa in position 12 to 14 is any amino acid
  Variant (17)..(37): Xaa in position 17 to 37 is any amino acid
  Variant (38)..(55): Xaa in position 38 to 55 is any or no amino acid
  Variant (57)..(57): Xaa in position 57 is any amino acid
  Variant (60)..(60): Xaa in position 60 is any amino acid
  Variant (63)..(64): Xaa in position 63 to 64 is any amino acid
  Variant (67)..(69): Xaa in position 67 to 69 is any amino acid
  Variant (73)..(73): Xaa in position 73 is any amino acid
  Variant (77)..(79): Xaa in position 77 to 79 is any amino acid
  Variant (81)..(81): Xaa in position 81 is any amino acid
  Variant (82)..(82): Xaa in position 82 is any or no amino acid
  Variant (84)..(91): Xaa in position 84 to 91 is any amino acid
  Variant (93)..(94): Xaa in position 93 to 94 is any amino acid
  Variant (97)..(97): Xaa in position 97 is any amino acid
  Variant (100)..(102): Xaa in position 100 to 102 is any amino acid
  Variant (104)..(110): Xaa in position 104 to 110 is any amino acid
  Variant (112)..(124): Xaa in position 112 to 124 is any amino acid
  Variant (125)..(141): Xaa in position 125 to 141 is any or no amino acid
  Variant (144)..(144): Xaa in position 144 is any amino acid
  Variant (147)..(147): Xaa in position 147 is any amino acid
  Variant (155)..(155): Xaa in position 155 is any amino acid
  Variant (157)..(161): Xaa in position 157 to 161 is any amino acid
  Variant (163)..(164): Xaa in position 163 to 164 is any amino acid
  Variant (165)..(165): Xaa in position 165 is any or no amino acid
  Variant (167)..(168): Xaa in position 167 to 168 is any amino acid
  Variant (170)..(171): Xaa in position 170 to 171 is any amino acid
  Variant (174)..(175): Xaa in position 174 to 175 is any amino acid
  Variant (178)..(179): Xaa in position 178 to 179 is any amino acid
  Variant (182)..(187): Xaa in position 182 to 187 is any amino acid
  Variant (190)..(190): Xaa in position 190 is any amino acid
  Variant (193)..(200): Xaa in position 193 to 200 is any amino acid
  Variant (201)..(203): Xaa in position 201 to 203 is any or no amino acid
  Variant (205)..(227): Xaa in position 205 to 227 is any amino acid
  Variant (228)..(246): Xaa in position 228 to 246 is any or no amino acid
  Variant (248)..(250): Xaa in position 248 to 250 is any amino acid
  Variant (252)..(254): Xaa in position 252 to 254 is any amino acid
  Variant (255)..(255): Xaa in position 255 is any or no amino acid
  Variant (257)..(261): Xaa in position 257 to 261 is any amino acid
  Variant (264)..(264): Xaa in position 264 is any amino acid
  Variant (268)..(268): Xaa in position 268 is any amino acid
  Variant (272)..(277): Xaa in position 272 to 277 is any amino acid
  Variant (279)..(285): Xaa in position 279 to 285 is any amino acid
  Variant (286)..(339): Xaa in position 286 to 339 is any or no amino acid
  Variant (341)..(342): Xaa in position 341 to 342 is any amino acid
  Variant (344)..(352): Xaa in position 344 to 352 is any amino acid
  Variant (354)..(354): Xaa in position 354 is any amino acid
  Variant (357)..(358): Xaa in position 357 to 358 is any amino acid
  Variant (362)..(372): Xaa in position 362 to 372 is any amino acid
  Variant (373)..(380): Xaa in position 373 to 380 is any or no amino acid
  Variant (382)..(384): Xaa in position 382 to 384 is any amino acid
  Variant (387)..(388): Xaa in position 387 to 388 is any amino acid
  Variant (391)..(392): Xaa in position 391 to 392 is any amino acid
  Variant (394)..(408): Xaa in position 394 to 408 is any amino acid
  Variant (409)..(409): Xaa in position 409 is any or no amino acid
  Variant (411)..(420): Xaa in position 411 to 420 is any amino acid
  Variant (421)..(423): Xaa in position 421 to 423 is any or no amino acid
  Variant (425)..(425): Xaa in position 425 is any amino acid
  Variant (431)..(431): Xaa in position 431 is any amino acid
  Variant (433)..(433): Xaa in position 433 is any amino acid
  Variant (436)..(437): Xaa in position 436 to 437 is any amino acid
  Variant (441)..(452): Xaa in position 441 to 452 is any amino acid
  Variant (453)..(461): Xaa in position 453 to 461 is any or no amino acid
  Variant (463)..(464): Xaa in position 463 to 464 is any amino acid
  Variant (466)..(471): Xaa in position 466 to 471 is any amino acid
  Variant (473)..(475): Xaa in position 473 to 475 is any amino acid
GXXLXXXXXXAXXXANXXXXXXXXXXXXXXXXXXXXXXXXXXXXXXXXXXXXXXXWXNDXLMXXFFXXXGLEXKREXXXGXXLXXXXXXXXPXXAAXGGXXXPXXXXXXXAXXXXXXXXXXXXXXXXXXXXXXXXXXXXXXGWXIPXATDIAFAXGXXXXXGXXXPXXLXXFLXXLAXXDDXXXXXXIAXFYXXXXXXXXXXXLXXXXXXXXXXXXXXXXXXXXXXXXXXXXXXXXXXXXXXXXXXYXXXGXXXXWXXXXXSGXHATXAGVXXXXXXPXXXXXXXXXXXXXXXXXXXXXXXXXXXXXXXXXXXXXXXXXXXXXXXXXXXXXXXXXXXXXEXXLXXXXXXXXXPXFAXXNAGXXXXXXXXXXXXXXXXXXXGXXXGLXXGKXXGXXXXXXXXXXXXXXXXPXXXXXXXXXXXXXLXGIGFTXSXFIXXLAFXXXXXXXXXXXXXXXXXXXXXLXXSXXXXXXGXXXL

SEQ ID NO: 276 - DNA, 723 bp, Escherichia coli K12
  CDS (1)..(723): transl_table=11
atgggacacaagcccttataccggcagattgccgatcgcattcgtgaacaaattgcgcgtggcgagcttaaacctggcgatgcgttacccactgaatcagcgctacaaacagagtttggcgtcagccgggttacggtgcgtcaggctttgcgccagctagtcgagcagcagatcctcgaaagcattcagggcagcgggacttacgtcaaagaagagcgggtcaattacgatatttttcagttaaccagttttgatgaaaaactgtcggaccgtcacgtcgatacacacagtgaagttctgatattcgaagtgattccggctgacgattttcttcagcaacagctacaaatcaccccgcaggatcgtgtgtggcatgtgaagcgcgtgcgctatcgcaagcaaaagccaatggcgctggaagaaacctggatgccgcttgcgttgttcccggatctcacctggcaggtcatggaaaattcgaaatatcactttatcgaagaagtgaagaaaatggttatcgatcgtagcgaacaggaaatcattcctctgatgccaaccgaagagatgagccgtctgcttaatatcagccagacaaagccgattcttgaaaaagtatcgcgtggatatttagttgatggtcgggtgtttgaatatagccgcaacgcttttaataccgatgactataaatttaccctgatagcgcagcgaaaatcatcgcgataa

SEQ ID NO: 277 - protein, 240 aa, Escherichia coli K12
MGHKPLYRQIADRIREQIARGELKPGDALPTESALQTEFGVSRVTVRQALRQLVEQQILESIQGSGTYVKEERVNYDIFQLTSFDEKLSDRHVDTHSEVLIFEVIPADDFLQQQLQITPQDRVWHVKRVRYRKQKPMALEETWMPLALFPDLTWQVMENSKYHFIEEVKKMVIDRSEQEIIPLMPTEEMSRLLNISQTKPILEKVSRGYLVDGRVFEYSRNAFNTDDYKFTLIAQRKSSR

SEQ ID NO: 278 - DNA, 783 bp, Mesorhizobium loti MAFF303099
  CDS (1)..(783): transl_table=11
atgaatgacgccgccgaccagatctttgccacgctgaagcagtccgcgcaaagcggcgcgccgctctatctgcagctgcgcaaaagcatcgaggacgccgtcaatcgcggcctgatcggcccgggcgacgcgctgccttccgaacgcgacatcgccaccaaggccgacatttcgcgcgtcaccgtgcgcaaggcggtgcaggatctggtcaagggcggcatcctcgtgcagcgccacggctccggcactttcgtggcgccgcgcatggagcgcgtcgagcaatcgctgtcgcggctgacctcgtttaccgaagacatggcgcggcgcggcatggcggtgcgttcggcatggctggaccgcggcctctacgcgccctcgcccgacgagatgatggtgcttggcctgtcgtcgagcgaactggtggcgcgcgtggcgcgtctgcgcatcgccaacgacacgccactggcgatcgaacgcgcctcgctgtcggccagcgtgctgcccgacccggccgggatcggctcctcgctctatgccgcgctggaattgaccggaaaccggccggtgcgggcggtgcagcgcatctcggccgccaatctcggcgacagcgatgcgcgcctgctcgaagtgccgccgggtatcgccggcctgcatatcgaacgcatctcctatctggcgagcggcaaggtgatcgaattcacccgctccatctaccggggcgacgcctatgatttcgtcgccgaactgcggctgacagggccgagcgaagagggccgaccatga

SEQ ID NO: 279 - protein, 260 aa, Mesorhizobium loti MAFF303099
MNDAADQIFATLKQSAQSGAPLYLQLRKSIEDAVNRGLIGPGDALPSERDIATKADISRVTVRKAVQDLVKGGILVQRHGSGTFVAPRMERVEQSLSRLTSFTEDMARRGMAVRSAWLDRGLYAPSPDEMMVLGLSSSELVARVARLRIANDTPLAIERASLSASVLPDPAGIGSSLYAALELTGNRPVRAVQRISAANLGDSDARLLEVPPGIAGLHIERISYLASGKVIEFTRSIYRGDAYDFVAELRLTGPSEEGRP

SEQ ID NO: 280 - DNA, 723 bp, Bacillus halodurans C-125
  CDS (1)..(723): transl_table=11
gtgattaataaaaactctcctttaccgatttattatcagattgaagaacaaattaagcagcaaatcgaatcaggggtgctcaaacccggggatatgctcaaatccgagcgggagtatgcggagtattatgatgtcagtagaatgacggtaaggcaagcgattaacaaccttgtgaatcaaggatacatatataagaaaaaaggtagcggtacttatgttcaagagaaaaaaattgagcaggcgttaaacgggctgacgagttttacagaagatatgagaaaaagaggaatggagcctagcagtcgcttgctcaaatttgaactgattccagcaacggcaaaaatcgcaaaggaattaaacttgaaagagaacacgcccgttacagagattaaacgaatccgttatggtgatggggtaccaattgccattgaacgcaacctgttgcctgcgaacttagtgaagggattaaatgaggaaatcataaaccaatccttatatcaatacattgaggaagagttgaatttgcggatcgccgatgccctacaagtgattgaagcctcgactgctagcaaaacagaagccgatctattagagattcaaaaaggtagcccgattttgttaattgagcgtaaaacgtttttagccgatgggactgtattagagctagtgaaatccgcttaccgagccgatcggtataaatttatgattacgatgcaacgataa

SEQ ID NO: 281 - protein, 240 aa, Bacillus halodurans C-125
MINKNSPLPIYYQIEEQIKQQIESGVLKPGDMLKSEREYAEYYDVSRMTVRQAINNLVNQGYIYKKKGSGTYVQEKKIEQALNGLTSFTEDMRKRGMEPSSRLLKFELIPATAKIAKELNLKENTPVTEIKRIRYGDGVPIAIERNLLPANLVKGLNEEIINQSLYQYIEEELNLRIADALQVIEASTASKTEADLLEIQKGSPILLIERKTFLADGTVLELVKSAYRADRYKFMITMQR

SEQ ID NO: 282 - DNA, 714 bp, Bacillus halodurans C-125
  CDS (1)..(714): transl_table=11
ttgcttaataaatacgatacgatttatcaacagttagcgaaagaaattgatgatggcaaacgtttgccgggagagaaactcccttccgaacatgaattaacggagctgtttgccacgtcacgagaaacgattcgcaaagcgcttaaactattatcggaacacggatatattcaaaaaattcgcgggaaaggctcgattgtccttgatcggtctacgtttgactttcctgtctcggggcttgttagctttaaagaattggcccataaactaggggatgatgtcatcacaacagtccattctttacagaaaatctcagccaatgattttttacaaaaacagttgggctgtgatgctgaggaaccgctctgggctgtagtgagagcacggaaaataagcggagaatcaatcattttagataaagattattttctcgaggaatatgttccaaatttaacaaaagaaatctgccaggattccatttatgaatatgtggagaaaactctcggtttgacgattagttttgcgaaaaaggaaatgtttgtcactgaggcaacagaggaagacaaacagtatcttgatttgcaaaattatgatttagtggtcgtcgtccgtaactatgtctatttggacaatgccgtcttgttcgagtatacagagtccaggcaccggcccgacaaatttcgttttgttgattttgcccgaaggaatcgttaa

SEQ ID NO: 283 - protein, 237 aa, Bacillus halodurans C-125
MLNKYDTIYQQLAKEIDDGKRLPGEKLPSEHELTELFATSRETIRKALKLLSEHGYIQKIRGKGSIVLDRSTFDFPVSGLVSFKELAHKLGDDVITTVHSLQKISANDFLQKQLGCDAEEPLWAVVRARKISGESIILDKDYFLEEYVPNLTKEICQDSIYEYVEKTLGLTISFAKKEMFVTEATEEDKQYLDLQNYDLVVVVRNYVYLDNAVLFEYTESRHRPDKFRFVDFARRNR

SEQ ID NO: 284 - DNA, 747 bp, Bacillus halodurans C-125
  CDS (1)..(747): transl_table=11
gtgaataaaaaaaacattgatcaatctctacactcctatgttaaaaatgagttagttaacgccatacaacaaggggtttatccagttaaatctcaattgccgacagaggctgaactatgccaaatgtacgacgttagtcgaacaacgattcgaaatgcattacaacaactcgtaatcgatggctatgtagagagaattcaaggaaaaggaaccttcgtcgcaagccgcagagtaaagcaaacgttatctgcaaccgaaggaaattatagtgaacagctacgcctgcaagggaaaaaaccgaaaatacaagtaattgatttaactgttgttccatctgatgagcttttgtcggctatgctggaaattgacgaaaatgaacctgtccaccgccttgaacgtattcgttatgcagacgacgcccctctacaatatgaaatttcttatttgccttggcgcaaaacgacttggttaacgaaagaaggctgtgaacactctctctatcaattgctgcaaagtcatcctgatctatcattagcaaagacgaaagagcatttgcatatcgtcctcgctgatgaagaagtcgctgaaaagctatcaatctctattggagatccttgtattcaaattgaaacccatgcgtacttagcggacgatacaaagatcgagtattccattgcttattttcacggtgaaaaggcgagctttacgatcgaacgaaactaccaaaaaccgactcagacgtcataa

SEQ ID NO: 285 - protein, 248 aa, Bacillus halodurans C-125
MNKKNIDQSLHSYVKNELVNAIQQGVYPVKSQLPTEAELCQMYDVSRTTIRNALQQLVIDGYVERIQGKGTFVASRRVKQTLSATEGNYSEQLRLQGKKPKIQVIDLTVVPSDELLSAMLEIDENEPVHRLERIRYADDAPLQYEISYLPWRKTTWLTKEGCEHSLYQLLQSHPDLSLAKTKEHLHIVLADEEVAEKLSISIGDPCIQIETHAYLADDTKIEYSIAYFHGEKASFTIERNYQKPTQTS

SEQ ID NO: 286 - DNA, 714 bp, Bacillus halodurans C-125
  CDS (1)..(714): transl_table=11
ttgaatgttaaaaaaagacctttatataaacagcttaaacaggaattaattcaaaaaattgaaagaggagagttaaaaccaggtgatgtattacctcctgaaagagaacttgcaaagatatttaatatgagtcgtatgacggttagacaagcgatttctgaacttgttaatgaatacgttcttattaggcgacatggtagtggaacatatgtggctgaacataaaattccacaagggaaaaaattaaaaagctttagtgaggagatgcgtttaagaggaatgttgcctgggtctaaactttgtgagaaaaaaattgttttaagcccttcagcgaacatggcggctgaactaaaatcagagggaaagctattcatgttaaaacgtttacggttagcagatctcgagcctatggcgatagagacaagtttgcttccgattaatagattccctagccttgaaaatagaaattttgaaaatgagtcactctatgaaatattagaggaagaatacaatattaaaatgacaaaggctcaacaaaaaattgaagtgagaatgccgacacctcaggaatcagaattacttgatataaattacacgataccagtttttcattttaaacaggtaacttttgatcaaaatgatactatttttgaggttgcccattcagtttataggggggaccgatatgaaatagagacggaaatctatcgctga

SEQ ID NO: 287 - protein, 237 aa, Bacillus halodurans C-125
MNVKKRPLYKQLKQELIQKIERGELKPGDVLPPERELAKIFNMSRMTVRQAISELVNEYVLIRRHGSGTYVAEHKIPQGKKLKSFSEEMRLRGMLPGSKLCEKKIVLSPSANMAAELKSEGKLFMLKRLRLADLEPMAIETSLLPINRFPSLENRNFENESLYEILEEEYNIKMTKAQQKIEVRMPTPQESELLDINYTIPVFHFKQVTFDQNDTIFEVAHSVYRGDRYEIETEIYR

SEQ ID NO: 288 - DNA, 786 bp, Bacillus halodurans C-125
  CDS (1)..(786): transl_table=11
atggtcgaccctgaccatctttttttacggatcaatcaaagtcttttgcaaaaggtgggtggggatgcgatgaaaaagtacgaggccatttcaatggaaataaaaaagagaataaaagaaaacgactatcctgtagatcaaccgataccagatgaaatctccctttcaaaagagtttggctgtagccggatgacgatgaaaagagcgctggacattttggttatggaagggcttctttatcgaaagcgagggcatgggacgtttattgttcaatcggccatccatacgagccgtgtcaatgtactgaccaatgaagttaaagggttgtccaatttgttaaaggataaacaggtaacgagtaaagtaatccaatttaatgtggagtttccagcggaagaagtggcagcccatttagccattgaccaaaaaacgccagtctatcatattatccgcttacggctcgtcgacggtgagccttatgtgatagagaaaacgtacatgccgaccccgctcattccagggattaatgatgaggtgttgcacggctcgatctattcttatctgattgacaagttagggttaacgatagccggatctcaccggaaaattcgtgcctgtaaagcagaggcgttagagatagaacatttgcattgtgaagcggatgatccgattttggaagtggaacatgtaggtttcttaaataatggtgtgccgttcgaatattccttttctcgtcatcggtacgataaatttgaggtgacgaccatcaatatgaaacggtcctag

SEQ ID NO: 289 - protein, 261 aa, Bacillus halodurans C-125
MVDPDHLFLRINQSLLQKVGGDAMKKYEAISMEIKKRIKENDYPVDQPIPDEISLSKEFGCSRMTMKRALDILVMEGLLYRKRGHGTFIVQSAIHTSRVNVLTNEVKGLSNLLKDKQVTSKVIQFNVEFPAEEVAAHLAIDQKTPVYHIIRLRLVDGEPYVIEKTYMPTPLIPGINDEVLHGSIYSYLIDKLGLTIAGSHRKIRACKAEALEIEHLHCEADDPILEVEHVGFLNNGVPFEYSFSRHRYDKFEVTTINMKRS

SEQ ID NO: 290 - DNA, 750 bp, Pseudomonas aeruginosa PAO1
  CDS (1)..(750): transl_table=11
atgggcaaactgctcccgctttctcccgtgccgctgtacagccagctcaaggagctgctgcgcgggcgcatcctcgacggcgtctacccgccgctcagccgcatgccctcggagaacgagctgggcaaggccttcgacgtcagccgcatcaccgtgcgccaggcgctcggcgacctgcagaaggaagggctgatcttcaagatccacggcaagggcaccttcgtcgcccggccgaaggcgttccagaacgtcagcaccctgcaaggcctgggcgagtccatgacgcagatgggctacgaggtcatcaaccgcctgcacggcctgcgctacgtgccggccggcgcgcgggtggccgagcgcctgcgggtggaagagggcagccctgtgtgcgagatcaagcgggtgcggctggtcaaccgcgagccggtttcgctggaagtcacctacctgccgcaggcgctcggcgagcgcctggagaaggccgacctggtgacccgcgacatcttcctgatcctcgagaacgattgcggcattcccctcggccatgccgacctggccatcgacgcggtgctcgccgatgccgacctgacccgcgccctggcggtcgaggagggcgcgccgatcatgcgtatcgagcgcctgacccatgccgccgacggcgcgccgctggacttcgaatacctctactaccgcggcgacgctttccagtatcgcctgcgcatcgatcggcagaagggagagcgggcatga

SEQ ID NO: 291 - protein, 249 aa, Pseudomonas aeruginosa PAO1
MGKLLPLSPVPLYSQLKELLRGRILDGVYPPLSRMPSENELGKAFDVSRITVRQALGDLQKEGLIFKIHGKGTFVARPKAFQNVSTLQGLGESMTQMGYEVINRLHGLRYVPAGARVAERLRVEEGSPVCEIKRVRLVNREPVSLEVTYLPQALGERLEKADLVTRDIFLILENDCGIPLGHADLAIDAVLADADLTRALAVEEGAPIMRIERLTHAADGAPLDFEYLYYRGDAFQYRLRIDRQKGERA

SEQ ID NO: 292 - DNA, 744 bp, Pseudomonas aeruginosa PAO1
  CDS (1)..(744): transl_table=11
atgaagacagcccacgacctgctcctggccctgcgtcccgacgaggcgcaacccacccccctctatctgcaactggcgcgcaatctcgagagcgcgatccatgccggccagtggaaagcggaggaagcgctgccctccgaacgcaacctcagcgaaaccctgaacatttcccgcgtcaccgcgcgcaaggccctcgaagtactcttcgagcagggcctgatccgccgcaaccagggctccggcaccttcattacgccgcgtctcgaacaaccgttgtcgcgtctctccagcttcagcgagatgctccgcctgaaaggcttcacccccggctccacctggctggagcgcggcatcgccctgcccacccacgacgaactgatccgcctcggcctctcgccgaccgagaaggtcacgcgcatgaagcgcctgcgcaaggccgacggcacagtgatggcgatcgagaacagcaccctgccggcgcgcctgctgccggacccgacagcggtcggcgattccctctacgaatacctggacggcatcggtcgcccagtggtccgcgccctccagcacgtgcgcgcgatcaactcgtccgcgtccgatgccgcgctggtcggcatcgcgccgggcaccgcgatgctgctgatgacccggatcggctacctcgaggacaacaccccgatcgagctgaccgacacctactgccgcaacgactactacgacttcgtcgccgaactgcgacgctga

SEQ ID NO: 293 - protein, 247 aa, Pseudomonas aeruginosa PAO1
MKTAHDLLLALRPDEAQPTPLYLQLARNLESAIHAGQWKAEEALPSERNLSETLNISRVTARKALEVLFEQGLIRRNQGSGTFITPRLEQPLSRLSSFSEMLRLKGFTPGSTWLERGIALPTHDELIRLGLSPTEKVTRMKRLRKADGTVMAIENSTLPARLLPDPTAVGDSLYEYLDGIGRPVVRALQHVRAINSSASDAALVGIAPGTAMLLMTRIGYLEDNTPIELTDTYCRNDYYDFVAELRR

SEQ ID NO: 294 - DNA, 708 bp, Lactococcus lactis subsp. lactis Il1403
  CDS (1)..(708): transl_table=11
atggcaagaaaatcagtaccgaattatgtaaaaatacatgatgccttaaaagatgaagttgaaaaaggcatctggaaaattggacaacgtcttccaagcgaacgtgatttggccgagcgttttactgtcagtcgaatgacagcaagacaagcggtaacagctttggttgatgaaggaattcttgaccgtcgtgtgggttctggaacttatgttgctagccgacgtgttcgcgaaaaaatgcgtggaacaacttcctttacagaaattatcagctcacaaggtaaagttccttcaacagaagttttgagttatattagaacggcgccaaatgaggttgaatgtgaaaaactaaatatcaccaaaaaggattccatcatccgaatggagcggattcgttatgcggataatgttccaatttgttatgaagtggcaagcattcctttcaaattggtcaaatcttttgataaaaaagaaattactagtaacttctttaaaactttagaaagtcacggacatgtgattggtcgtagtgaacagattgtttcagctaaaagagtcagtacagaggtttcagagtatttaaaaacaagagttggagctgctattcttggtttaactcaggtttcttatttaacagatggtacagcttttgaatatgtcttatctcaatatgttggtgaccgttttgaattttatttggaaagataa

SEQ ID NO: 295 - protein, 235 aa, Lactococcus lactis subsp. lactis Il1403
MARKSVPNYVKIHDALKDEVEKGIWKIGQRLPSERDLAERFTVSRMTARQAVTALVDEGILDRRVGSGTYVASRRVREKMRGTTSFTEIISSQGKVPSTEVLSYIRTAPNEVECEKLNITKKDSIIRMERIRYADNVPICYEVASIPFKLVKSFDKKEITSNFFKTLESHGHVIGRSEQIVSAKRVSTEVSEYLKTRVGAAILGLTQVSYLTDGTAFEYVLSQYVGDRFEFYLER

SEQ ID NO: 296 - DNA, 840 bp, Deinococcus radiodurans R1
  CDS (1)..(840): transl_table=11
ttgtggtccaataacaagaccttttcagaattggtccgcaagtggtacggttgcgccgtgtcctcgcctgcccctttgccgcccgagccgcccgcgtggtgggtcgcgctcgaccctgccgacgcggcccccgcctacgtgcagctcgcgcaggggctgcggcggcgcatcgagagtggcgagctgagcgcgggcaccgccctgcccgccgaacgcgaactcgcggcgcggctcggcgtgtcgcgggtcacgctgcggcaagggctggggctgctcgaagccgagggactgctgaggcggcggcgcggcagcggcaccttcgtagcgggcacgccgcacacctcgcgccagcttgggctgctgagttccttttccgacgaggtgcgcgcccagggcggggtgccgggtgcccgcgtcctgagcttcacgcagggccgccccacgccccaggaagcgctgagtctgggcctgaccgccgccgagcaggtctaccgcctgcgccggcttcgcacctcggacggcgacccgctggcggtggaagacagcacgctgcccgccgccctgattggcccgctgacggcgcaggacgtgaccgacgccagcctgtacgggctgctgggccagcggcacctcgccccggcgcgcgccattcggcacctgcgggcgcaaaacgcctcggcggaactcgcgcacctcctcggcgtgccgctcggcgccgcgctgctcaccaccgagcgggtgtcgtggctcgcctccggacgcccggtggagtacgcccgcgcctgctaccggggcgaccgctacgacttcgtgatggacctgcgcggagaggaccactga

SEQ ID NO: 297 - protein, 279 aa, Deinococcus radiodurans R1
MWSNNKTFSELVRKWYGCAVSSPAPLPPEPPAWWVALDPADAAPAYVQLAQGLRRRIESGELSAGTALPAERELAARLGVSRVTLRQGLGLLEAEGLLRRRRGSGTFVAGTPHTSRQLGLLSSFSDEVRAQGGVPGARVLSFTQGRPTPQEALSLGLTAAEQVYRLRRLRTSDGDPLAVEDSTLPAALIGPLTAQDVTDASLYGLLGQRHLAPARAIRHLRAQNASAELAHLLGVPLGAALLTTERVSWLASGRPVEYARACYRGDRYDFVMDLRGEDH

SEQ ID NO: 298 - DNA, 798 bp, Escherichia coli O157:H7 EDL933
  CDS (1)..(798): transl_table=11
gtgctgttacttgccggaaaacgaccctataatccgtgtaattcattctttatttcagggtcgattatgtcagctacggaccgctactctcatcaactcctctacgctaccgtccgccagcggctgctggatgatatcgcgcagggggtttaccaggccgggcaacagatccctaccgaaaatgagctttgtacacaatataacgtcagccgcattaccattcgcaaagccatcagcgacttagtggcagacggcgtactgatccgctggcagggcaaaggcacctttgtacaaagccagaaggtcgaaaacgccctgctgaccgtcagtggttttaccgattttggcgtctcacaaggcaaggcgacgaaagagaaagtgatcgagcaagaacggatcagcgccgcgccgttttgcgaaaagctcaatatccccggtaacagcgaagtgttccatctttgccgggtgatgtatctcgataaagagccgctatttattgatagttcgtggatcccgctgtcgcgttatcctgactttgatgagatttacgtcgaaggaagctccacctatcagttatttcaggagcgttttgacacgcgagtggtcagcgacaaaaagaccatcgatatctttgccgccacccgcccgcaggcaaaatggctgaaatgcgaactgggcgaaccgttgtttcgcatcagcaaaatcgcctttgatcagaatgacaaaccggtgcacgtctccgaactcttctgccgcgccaaccgcatcaccttaacaattgataataaaagacattaa

SEQ ID NO: 299 - protein, 265 aa, Escherichia coli O157:H7 EDL933
MLLLAGKRPYNPCNSFFISGSIMSATDRYSHQLLYATVRQRLLDDIAQGVYQAGQQIPTENELCTQYNVSRITIRKAISDLVADGVLIRWQGKGTFVQSQKVENALLTVSGFTDFGVSQGKATKEKVIEQERISAAPFCEKLNIPGNSEVFHLCRVMYLDKEPLFIDSSWIPLSRYPDFDEIYVEGSSTYQLFQERFDTRVVSDKKTIDIFAATRPQAKWLKCELGEPLFRISKIAFDQNDKPVHVSELFCRANRITLTIDNKRH

SEQ ID NO: 300 - DNA, 756 bp, Escherichia coli O157:H7 EDL933
  CDS (1)..(756): transl_table=11
gtgcgcgccatgaaatcattaagtaagtcgtcacaaataccgctctatcaacaagtggtggagtggataagagaaagtatttataccggagatctggtggaagacgatcgcattccttcggaataccagattatggatatgctggacgtgagtcggggaaccgttaaaaaagcggtcgcccaactggtaaaagaaggcgtgttaatacaggtccagggtaagggaacatttgtcaaaaaagagaacgtggcatatccgttaggtgaaggattattgtcattcgcggaatcgctggaaagccagaaaatacattttaccactgaagttattacgtcacggattgaatcggctaatcgttatgtggcagagaaattaagaataacgcccggtcaggatattctttaccttgaacgcttacgctcaattggtgatgaaaaagcgatgctgatagagaaccgtatcaatattgagctatgccccggtattgctgaaatcgattttaatcaacacaatttatttccaacaatagaaagtttgtcgcaaagaaaaattcgttactcggaaagtcgctatgccgcgcgattaattggtaatgaacgtggtcattttttagatatcagtgaagacgcacccgttttgcatctggagcagttagtctttttctcccgaggattacccattgagtttggcaacgtctggttaaaaggaaataaatattatcttggcaccgtactgcaacggcgggaagtgagttaa

SEQ ID NO: 301 - protein, 251 aa, Escherichia coli O157:H7 EDL933
MRAMKSLSKSSQIPLYQQVVEWIRESIYTGDLVEDDRIPSEYQIMDMLDVSRGTVKKAVAQLVKEGVLIQVQGKGTFVKKENVAYPLGEGLLSFAESLESQKIHFTTEVITSRIESANRYVAEKLRITPGQDILYLERLRSIGDEKAMLIENRINIELCPGIAEIDFNQHNLFPTIESLSQRKIRYSESRYAARLIGNERGHFLDISEDAPVLHLEQLVFFSRGLPIEFGNVWLKGNKYYLGTVLQRREVS

SEQ ID NO: 302 - DNA, 747 bp, Escherichia coli O157:H7
  CDS (1)..(747): transl_table=11
atgaaatcattaagtaagtcgtcacaaataccgctctatcaacaagtggtggagtggataagagaaagtatttataccggagatctggtggaagacgatcgcattccttcggaataccagattatggatatgctggacgtgagtcggggaaccgttaaaaaagcggtcgcccaactggtaaaagaaggcgtgttaatacaggtccagggtaagggaacatttgtcaaaaaagagaacgtggcatatccgttaggtgaaggattattgtcattcgcggaatcgctggaaagccagaaaatacattttaccactgaagttattacgtcacggattgaatcggctaatcgttatgtggcagagaaattaagaataacgcccggtcaggatattctttaccttgaacgcttacgctcaattggtgatgaaaaagcgatgctgatagagaaccgtatcaatattgagctatgccccggtattgctgaaatcgattttaatcaacacaatttatttccaacaatagaaagtttgtcgcaaagaaaaattcgttactcggaaagtcgctatgccgcgcgattaattggtaatgaacgtggtcattttttagatatcagtgaagacgcacccgttttgcatctggagcagttagtctttttctcccgaggattacccattgagtttggcaacgtctggttaaaaggaaataaatattatcttggcaccgtactgcaacggcgggaagtgagttaa

SEQ ID NO: 303 - protein, 248 aa, Escherichia coli O157:H7
MKSLSKSSQIPLYQQVVEWIRESIYTGDLVEDDRIPSEYQIMDMLDVSRGTVKKAVAQLVKEGVLIQVQGKGTFVKKENVAYPLGEGLLSFAESLESQKIHFTTEVITSRIESANRYVAEKLRITPGQDILYLERLRSIGDEKAMLIENRINIELCPGIAEIDFNQHNLFPTIESLSQRKIRYSESRYAARLIGNERGHFLDISEDAPVLHLEQLVFFSRGLPIEFGNVWLKGNKYYLGTVLQRREVS

SEQ ID NO: 304 - DNA, 717 bp, Escherichia coli O157:H7
  CDS (1)..(717): transl_table=11
atgatctacaaaagcattgcggagcggttaagaattcgacttaattccgcggatttcacgctaaacagccttcttcccggtgaaaaaaaactggcggaagagtttgcggtatcgcggatgaccatccgtaaagcgattgacctgctggtagcgtgggggctggtggtccgccgccacggcagcggcacttacctggtgcgcaaagatgtgctgcatcaaaccgccagcctgaccgggctggtggaggtgttaaaacggcagggaaaaacagtcaccagccaggtgctgatttttgaaatcatgcctgcgcctccggcaattgccagccagttgcggattcaaatcaacgagcagatctacttctcccgtcgcgttcgttttgtggaagggaaaccgctgatgctggaagacagctatatgccggtaaaactgttccgtaacctttcgctgcaacatctggaagggtcgaagtttgaatatattgaacaagagtgcgggattttgattggcggtaattatgaaagcctgacgccggtgctcgccgatagactgctggcgcggcaaatgaaggtagcggaacacacgccactgctgcggatcacctcgttgtcatatagcgagagcggggagtttttgaattattcagtgatgttcagaaatgccagcgaataccaggtggagtaccatttacggcgactccacccggacaagagttaa

SEQ ID NO: 305 - protein, 238 aa, Escherichia coli O157:H7
MIYKSIAERLRIRLNSADFTLNSLLPGEKKLAEEFAVSRMTIRKAIDLLVAWGLVVRRHGSGTYLVRKDVLHQTASLTGLVEVLKRQGKTVTSQVLIFEIMPAPPAIASQLRIQINEQIYFSRRVRFVEGKPLMLEDSYMPVKLFRNLSLQHLEGSKFEYIEQECGILIGGNYESLTPVLADRLLARQMKVAEHTPLLRITSLSYSESGEFLNYSVMFRNASEYQVEYHLRRLHPDKS

SEQ ID NO: 306 - DNA, 708 bp, Streptococcus pneumoniae TIGR4
  CDS (1)..(708): transl_table=11
gtgaaaaatatgctacctgcttatataaaaatccatgatcagataaaaaaggatattgacgagtaccgttgggctattggtgagaggcttcccagtgaaagagatttagctgagcagtttgcggtcagtcgcatgaccctccgccaagccgtatctctattagtcgaagaaggcgtcttagagcgccgtgtaggaagcggcacctttgtttccagtactcgagtacaagaaaagatgcgagggacaaccagttttactgaaattgtcaaatcccaaggtaaagttccctctagccagctcatttcctacaaaaaaaccattcccaatgagcaagaagttgccaagctaggaatttttccaacggacaatattatccgaatggagcgggtccgctatgccgaccaagttcccctagtttatgaagttgcttctattcctgaaaaattcattaaggactttaaaaaagaagaaatcaccagtcatttcttccaaaccttgcaaaaacatggctatcgtatcggcaaatctcaacagaccatctatgctcgccttgctaaagaaaagattgcccactatttggaagttgaaaaaggacatgctattcttggattgacccaggtttcctacctagaagatggtactgcttttgaatacgtaaaaagtcaatatgtaggcgaacgctttgaattttatcttgaaaataattag

SEQ ID NO: 307 - protein, 235 aa, Streptococcus pneumoniae TIGR4
MKNMLPAYIKIHDQIKKDIDEYRWAIGERLPSERDLAEQFAVSRMTLRQAVSLLVEEGVLERRVGSGTFVSSTRVQEKMRGTTSFTEIVKSQGKVPSSQLISYKKTIPNEQEVAKLGIFPTDNIIRMERVRYADQVPLVYEVASIPEKFIKDFKKEEITSHFFQTLQKHGYRIGKSQQTIYARLAKEKIAHYLEVEKGHAILGLTQVSYLEDGTAFEYVKSQYVGERFEFYLENN

SEQ ID NO: 308 - DNA, 711 bp, Streptococcus pneumoniae TIGR4
  CDS (1)..(711): transl_table=11
atgaagaaataccaacaattatttaagcaaatccaagaaaccattcaaaacgagacttacgctgtcggagatttccttcctagcgagcacgaccttatggagcaatatcaagtgagtcgtgataccgtccgaaaggccctgtctctcctccaagaggaaggattgatcaaaaagataagagggcaaggttctcaagtcgtcaaagaagaaaccgtcaatttccctgtatccaacctaaccagctaccaagaactagttaaagaacttggactgcgctctaaaaccaacgtggtcagtctggacaagattattattgataaaaaatcctcactgataaccggtttcccagagtttcggatggtttggaaggtggtccgccagcgtgtggtggatgatctggtatccgttctggatacggactatctggatatggaactcatcccaaatctcactcgccaaattgctgagcagtctatctattcttatatagaaaatggcctcaaactccttattgattatgctcagaaggaaatcaccattgaccactcaagcgaccgagacaagattctcatggacattggcaaagacccttatgtcgtttcgattaaatcaaaagtctatctccaagacggacgccaatttcagtttaccgaaagtcgccataagttagagaaatttagatttgtagattttgcaaaacgcaagaaataa

SEQ ID NO: 309 - protein, 236 aa, Streptococcus pneumoniae TIGR4
MKKYQQLFKQIQETIQNETYAVGDFLPSEHDLMEQYQVSRDTVRKALSLLQEEGLIKKIRGQGSQVVKEETVNFPVSNLTSYQELVKELGLRSKTNVVSLDKIIIDKKSSLITGFPEFRMVWKVVRQRVVDDLVSVLDTDYLDMELIPNLTRQIAEQSIYSYIENGLKLLIDYAQKEITIDHSSDRDKILMDIGKDPYVVSIKSKVYLQDGRQFQFTESRHKLEKFRFVDFAKRKK

SEQ ID NO: 310 - DNA, 729 bp, Streptococcus pneumoniae TIGR4
  CDS (1)..(729): transl_table=11
atgagtacaaaatatttatttatttacaatgagattcgtgaaaagattctttgtaataaatataccatgaacgaacaattgcctgatgaaatgacattagctaaacagtttgcctgtagtcgaatgacgatcaaaaaagctttagacttgttagtttctgagggcttaatttttagaaaacgtgggcagggaacctttgttctctctcgtggcagctcaaaaagaaaattaatcgttccagaaagagatatccggggactgacaaaaatatctgaagatgctcattctacaattgactcgaggattattcacttcaaattagaatttgcaaatgaatttttagcagaaaaactacaggtcgctttgcagagtccagtttataatatttaccgcctgcgtattattgacggtaaaccttatgttctggaacaaacttatatgagtaccgatgttattccaggtattactgaagatattttacaaaaatcgatttacaattacattgaaggaaagttaggattgcatattgccagtgctacaaaaatcttacgagcttcttctagttcagaaaatgagcaacattacttgcagctccttccaacggaaccggtatttgaagtagaacaagtggcttatttggataacggaactccgtttgagtactcgattagtcgtcatcgctatgatttatttgaatttaattcttttgcattacgacattcctcctag

SEQ ID NO: 311 - protein, 242 aa, Streptococcus pneumoniae TIGR4
MSTKYLFIYNEIREKILCNKYTMNEQLPDEMTLAKQFACSRMTIKKALDLLVSEGLIFRKRGQGTFVLSRGSSKRKLIVPERDIRGLTKISEDAHSTIDSRIIHFKLEFANEFLAEKLQVALQSPVYNIYRLRIIDGKPYVLEQTYMSTDVIPGITEDILQKSIYNYIEGKLGLHIASATKILRASSSSENEQHYLQLLPTEPVFEVEQVAYLDNGTPFEYSISRHRYDLFEFNSFALRHSS

SEQ ID NO: 312 - DNA, 732 bp, Clostridium acetobutylicum ATCC 824
  CDS (1)..(732): transl_table=11
ttgaagatagtatcaaaatcaagtcctcttcctcttcattatcagctcaagatgattttacaggaaatgatcgaaaatgaagaattgcttcctggagatactattcctactgaaagagaactttgtgaaatccagaaaataagtagaatgactgtaaataaagcaattctatcattagtgtctgaaggtattctctatagggagcaaggtaagggaacctttgtagccaaaaaaaaggagaaacaacaactgacaaagctaaagagttttactgaagaaatgagggaaaagggcctaaacataagtacaaaaatactatcctttgaaataaaaactgccacaaaacatataagcaccttattggaacttccacataagaaaatgaaagttatagaaataatacgtcttagattaacagataatgatccctctgcaatagaaactgttgtacttcccttgtatttatttagtgatatgacaaaagaagttattgatgggaaatctctatacaatacctttagagagaaatatggctatgagcctacaaaggcaaaacaaactattgaacctatcatgctaacagactatgaggcaaaattcttaaatcaagtaggtaattccttagcccttctttttcgaagactcacctatagaaaggatggagttcctattgaatacacaaaatcaatatatagaagtgaaaaatataaatatgaagtaatattaacttag

SEQ ID NO: 313 - protein, 243 aa, Clostridium acetobutylicum ATCC 824
MKIVSKSSPLPLHYQLKMILQEMIENEELLPGDTIPTERELCEIQKISRMTVNKAILSLVSEGILYREQGKGTFVAKKKEKQQLTKLKSFTEEMREKGLNISTKILSFEIKTATKHISTLLELPHKKMKVIEIIRLRLTDNDPSAIETVVLPLYLFSDMTKEVIDGKSLYNTFREKYGYEPTKAKQTIEPIMLTDYEAKFLNQVGNSLALLFRRLTYRKDGVPIEYTKSIYRSEKYKYEVILT

SEQ ID NO: 314 - DNA, 708 bp, Streptococcus pneumoniae R6
  CDS (1)..(708): transl_table=11
gtgaaaaatatgctacctgcttatatgaaaatccatgatcagataaaaaaggatattgacgagcaccgttgggctattggtgagaggcttcccagtgaaagagatttagctgagcagtttgcggtcagtcgcatgaccctccgccaagccgtatctctattagtcgaagaaggcgtcttagagcgccgtgtaggaagcggcacctttgtttccagtactcgagtacaagaaaagatgcgagggacaaccagttttactgaaattgtcaaatcccaaggtaaagttccctctagccagctcatttcctacaaaaaaaccattcccaatgagcaagaagttgccaagctaggaatttttccaacggacaatattatccgaatggagcgggtccgctatgccgaccaagttcccctagtttatgaagttgcttctattcctgaaaaattcattaaggactttaaaaaagaagaaatcaccagtcatttcttccaaaccttgcaaaaacatggctatcgtatcggtaaatcccaacagaccatctatgctcgccttgctaaagaaaagattgcccactatttggaagttgaaaaaggacatgctattcttggattgacccagatttcctacctagaagatggtactgcttttgaatacgtaaaaagtcaatatgtaggcgaacgctttgaattttatcttgaaaataattag

SEQ ID NO: 315 - protein, 235 aa, Streptococcus pneumoniae R6
MKNMLPAYMKIHDQIKKDIDEHRWAIGERLPSERDLAEQFAVSRMTLRQAVSLLVEEGVLERRVGSGTFVSSTRVQEKMRGTTSFTEIVKSQGKVPSSQLISYKKTIPNEQEVAKLGIFPTDNIIRMERVRYADQVPLVYEVASIPEKFIKDFKKEEITSHFFQTLQKHGYRIGKSQQTIYARLAKEKIAHYLEVEKGHAILGLTQISYLEDGTAFEYVKSQYVGERFEFYLENN

SEQ ID NO: 316 - DNA, 765 bp, Sinorhizobium meliloti 1021
  CDS (1)..(765): transl_table=11
atgaaccagcagctcgccgccattctgccgctcgaaaccctgcagtccgggggcgccggtccgctctatctgaagctcaggcaatcgctcgaggaggcgatcctgtcgggcaagctcaatcacggagatgcgctgccgccggagcgggatctcgcggattacgccaatgtcagccgcgtcaccgtccgcaaagccgtcgacgatctcgtgcgtgacgggctcctcgtgcgccgccacggttccggcaccttcgtcgtccgcccggtttcgcgcgtcgagcagtcgctctcgcgcctgacctccttcaccgaggacatggcccggcgcggactcaacacgcgtgcggaatggctggagcgcggtctcttccatccctcgcccgacgagatgatgaccctcgggcttgcggccgacgcgcttgtggcgcgactcgggcggctccgcattgccgacgacatgccgcttgcgatcgagcgcgcctgcgtttcggcggaattcgtccccgacccgctcgccgtcacctcctcgctctattcagagctcgagaagaagcaggctcggccggtgcgcgcggtgcagcggatctccgcctgcaatatcaaggaaccggacgcggccatgctcggcgtcgccgtcggcgccgccggtctttcgatcgagcgcgtctcctatcttgcctccggacgcgtggtcgaattcacccggtcgctctaccgcggcgatgcctatgatttcgttgcggagctgacgatcccggaaaactga

SEQ ID NO: 317 - protein, 254 aa, Sinorhizobium meliloti 1021
MNQQLAAILPLETLQSGGAGPLYLKLRQSLEEAILSGKLNHGDALPPERDLADYANVSRVTVRKAVDDLVRDGLLVRRHGSGTFVVRPVSRVEQSLSRLTSFTEDMARRGLNTRAEWLERGLFHPSPDEMMTLGLAADALVARLGRLRIADDMPLAIERACVSAEFVPDPLAVTSSLYSELEKKQARPVRAVQRISACNIKEPDAAMLGVAVGAAGLSIERVSYLASGRVVEFTRSLYRGDAYDFVAELTIPEN

SEQ ID NO: 318 - DNA, 708 bp, Bacillus subtilis subsp. subtilis str. 168
  CDS (1)..(708): transl_table=11
atgacagctttatattctgttatcaagtttaaaatcattgagttaattaaatcgggcaaatatcaggcgaatgatcagctgccgacggagagtgagttttgcgaacaatatgatgtcagcagaacaactgtgagactggctctgcagcagctagagcttgagggatatattaaaagaattcaaggaaaagggacatttgtatcggcggccaaaatacaaacgccgattccgcataagattacgagctttgcagaacaaatgagaggacttcgttctgaatcaaaagtgcttgagcttgtggtgattcctgccgatcattccatcgccgagcttttgaaaatgaaagagaatgaacctgtcaacaagcttgtcagagtcagatacgccgagggggaacctttgcagtatcatacctcatatattccctggaaggcggcaccggggctggcgcaggaggaatgcaccggctcgctgtttgaattgttaaggacaaaatacaatattgaaatcagcaggggcacggaatcgatcgaaccgattttaacggatgaaacgatcagcggacacttattaaccaatgtcggagcgcctgcgtttttatcagaatcccttacctatgataaaaatgaagaagtggtggaatatgcgcaaattattacacggggagaccgaacgaaattcaccgtagaacagtcatatcattcataa

SEQ ID NO: 319 - protein, 235 aa, Bacillus subtilis subsp. subtilis str. 168
MTALYSVIKFKIIELIKSGKYQANDQLPTESEFCEQYDVSRTTVRLALQQLELEGYIKRIQGKGTFVSAAKIQTPIPHKITSFAEQMRGLRSESKVLELVVIPADHSIAELLKMKENEPVNKLVRVRYAEGEPLQYHTSYIPWKAAPGLAQEECTGSLFELLRTKYNIEISRGTESIEPILTDETISGHLLTNVGAPAFLSESLTYDKNEEVVEYAQIITRGDRTKFTVEQSYHS

SEQ ID NO: 320 - DNA, 714 bp, Bacillus subtilis subsp. subtilis str. 168
  CDS (1)..(714): transl_table=11
atgaataaatacgaaatcattgcaaatgaaatgagaaatagaattaaaaataacgtatatccgatcgatcagcccattcctgatgaagtatctcttgcaaaagaatttaactcaagccgcatgacgatgaagagagccttggataatttagttgccgagggtctgctgtttagaaaacgaggccatggcacgtttattattcaatctgcaatacaggatgaccatgtccatgtagtcagcaatgagattctcggattgaccaacttgctgaaagataaaaaaatcaaaagcaaggtcattcagtttgaagtgcaatttcccactgaggaagtggccgcccatttgtctattgatcagaaaacaccggtttattatgtcgttcggctgcgaattgtagaaggtgaaccctatgtattagaaaaaacatatatgccgactcatttaataccgggcattaatgacgatgtccttcatgattcgatctacaatcatattacaaatgtgctgcagctcaaaatcgccggaacgcatcggaaaatcagagcctgcaaatctgatcatattgaccagcagcatctgggctgtaaacaggatgatccaattcttgaagtggaacatgtgggcttcttagataccgggattccatttgaatattccttttcacgtcatcggcatgacaagtttgttgtgacttctgtaaacatacggcgctga

SEQ ID NO: 321 - protein, 237 aa, Bacillus subtilis subsp. subtilis str. 168
MNKYEIIANEMRNRIKNNVYPIDQPIPDEVSLAKEFNSSRMTMKRALDNLVAEGLLFRKRGHGTFIIQSAIQDDHVHVVSNEILGLTNLLKDKKIKSKVIQFEVQFPTEEVAAHLSIDQKTPVYYVVRLRIVEGEPYVLEKTYMPTHLIPGINDDVLHDSIYNHITNVLQLKIAGTHRKIRACKSDHIDQQHLGCKQDDPILEVEHVGFLDTGIPFEYSFSRHRHDKFVVTSVNIRR

SEQ ID NO: 322 - DNA, 732 bp, Bacillus subtilis subsp. subtilis str. 168
  CDS (1)..(732): transl_table=11
atgaatatcaataaacaatcgcctattccgatttactatcagattatggagcaattaaaaacccaaattaagaacggagagctgcagccggatatgcctcttccttctgagcgcgaatatgccgaacaattcgggatcagccggatgacagttcgccaggcgctttctaatttagttaatgaaggcttgctctatcgcctgaaagggcggggcacctttgtcagcaagccaaaaatggaacaagcacttcaagggctgacaagctttaccgaggatatgaaaagccgcgggatgacaccgggcagcaggctcattgattatcagcttattgattcaactgaggagctcgcggctatattaggctgcgggcacccctcctctatccataaaatcactcgggtgcggctggcaaatgatattccgatggcgattgagtcctcacatattccgtttgagcttgcgggtgaattgaacgaatcgcattttcagtcgtcgatctatgatcatattgaaaggtacaacagcataccgatttcccgtgcaaaacaggagcttgagccaagcgctgccaccacggaagaagcgaatattcttggtattcaaaagggagcgcctgtcctattaattaaacgaacaacatatctgcagaacggaactgcttttgagcatgcaaaatccgtatacagaggcgaccgttatacatttgtccactatatggatcgtctttcataa

SEQ ID NO: 323 - protein, 243 aa, Bacillus subtilis subsp. subtilis str. 168
MNINKQSPIPIYYQIMEQLKTQIKNGELQPDMPLPSEREYAEQFGISRMTVRQALSNLVNEGLLYRLKGRGTFVSKPKMEQALQGLTSFTEDMKSRGMTPGSRLIDYQLIDSTEELAAILGCGHPSSIHKITRVRLANDIPMAIESSHIPFELAGELNESHFQSSIYDHIERYNSIPISRAKQELEPSAATTEEANILGIQKGAPVLLIKRTTYLQNGTAFEHAKSVYRGDRYTFVHYMDRLS

SEQ ID NO: 324 - DNA, 798 bp, Escherichia coli K12
  CDS (1)..(798): transl_table=11
gtgctgttacttgccggaaaacgaccctataatccgagtaattcattctttatttcagggtcgattatgtcagctacggaccgctactctcatcaactcctctacgctaccgtccgccagcgactgctggatgatatcgcgcagggggtttaccaggccgggcaacagatccctaccgaaaacgagctttgtacacaatataacgtcagccgcattaccattcgcaaagccatcagcgacttagtggcagacggcgtactgatccgctggcagggaaaaggcacctttgtacaaagccagaaagttgaaaacgccctgcttactgtcagtggttttaccgattttggcgtctcacaaggcaaggcgacgaaagagaaagtgatcgaacaggaacgggtcagcgccgcgccgttttgcgaaaagctgaacatccccggaaacagcgaagtgttccatctctgccgggtgatgtatctcgataaagagccgctgtttattgatagttcatggatcccgctgtcgcgttatcctgactttgatgagatttacgtcgaaggaagctccacctatcagttatttcaggagcgttttgacacgcgagtggtcagcgacaaaaagaccatcgatatctttgccgccacccgcccgcaggcaaaatggctgaaatgcgaactgggcgaaccgttgtttcgcatcagcaaaatcgcctttgatcagaatgacaaaccggtgcacgtctccgaactcttctgccgcgccaatcgcatcaccttaactattgataataaaagacattaa

SEQ ID NO: 325 - protein, 265 aa, Escherichia coli K12
MLLLAGKRPYNPSNSFFISGSIMSATDRYSHQLLYATVRQRLLDDIAQGVYQAGQQIPTENELCTQYNVSRITIRKAISDLVADGVLIRWQGKGTFVQSQKVENALLTVSGFTDFGVSQGKATKEKVIEQERVSAAPFCEKLNIPGNSEVFHLCRVMYLDKEPLFIDSSWIPLSRYPDFDEIYVEGSSTYQLFQERFDTRVVSDKKTIDIFAATRPQAKWLKCELGEPLFRISKIAFDQNDKPVHVSELFCRANRITLTIDNKRH

SEQ ID NO: 326 - DNA, 744 bp, Caulobacter crescentus CB15
  CDS (1)..(744): transl_table=11
atgacgtttgcggaacgaatcggccgtctcgacgccacgggcgatcacgccccgctgtaccggcagctgcagcgcgcgctgcgcgaagccatccagaagaaggtgctggctccggacgacgcccttcccgccgagcgggacatggcggacgaattcaacatctcgcgcatcaccgttcgcaaggcgctggacggcctggtcagcgagggcctgctgacgcgccgccaaggcgccgggacctttgtcgccgcgcgggtcgagaagagcttctccaagctgtcctcgttcaccgaggacatgatctctcgcggccgcgtcccgcgcagcgagtggatcagccgcagcgagggccaggtgacccccgaggagtcgctgaccctgggcctgtcgcccggaaccccggtctatcggttcgcacggatccgctatgcggacggcgcgccgatggcggtggaatacacaacgatcgcggccttcgccctgccctccaccgaagtggtcggcacatcgctctatgaagcgctggagacgaccggtcaccgcccggtgcgcgcgctccagcggctgcgcgcggtgctgttccaggccgagcaggcggacctgctgggcgtgcccgtcaaggacgccggcctgctgatcgagcggcgaggcttcctgaaggacgggcgggccgtcgaggtcacgcaatcctactaccgcggcgacgcctacgacttcgtcgccgaactgaattccctgtcctga

SEQ ID NO: 327 - protein, 247 aa, Caulobacter crescentus CB15
MTFAERIGRLDATGDHAPLYRQLQRALREAIQKKVLAPDDALPAERDMADEFNISRITVRKALDGLVSEGLLTRRQGAGTFVAARVEKSFSKLSSFTEDMISRGRVPRSEWISRSEGQVTPEESLTLGLSPGTPVYRFARIRYADGAPMAVEYTTIAAFALPSTEVVGTSLYEALETTGHRPVRALQRLRAVLFQAEQADLLGVPVKDAGLLIERRGFLKDGRAVEVTQSYYRGDAYDFVAELNSLS

SEQ ID NO: 328 - DNA, 906 bp, Caulobacter crescentus CB15
  CDS (1)..(906): transl_table=11
ttggcaaggacaccctttcatggcccgcgaatttgctgctataacggcatatgttcgcgaggcttcgaggtcagccgtcttgatctaccgatggtcgattggtctcacattggcatcccgcgaagccacctttcggaagcccccgaacgcaggagtcggcgcgacgtgtctctttccaagcgcataggcttcgcccacggcgcggtgcccgctcctctgtacctgcaactgcagcgcgcgctgcgcgaggcgatcgaagtcaaggtgctggcgcccgacgacgcccttccgccggaacgcgacatggccgaggacttcgccgtgtcgcggatcacggtccgcaaggcgctggagggcctggtcagcgaaggcctgctgacccgtcgccagggcgcgggcactttcgtggccgcccgggtcgagaagaacttttcgaagctgacctgcttcaccgaggacatgcgctcacgcggccgtgcgcccgccagcgagtggatcacccgcgccgagggcgcggtgaccccggaagaggccttgatgctgggcgtctcgcccaacacgccggtctatcgctttcaccgcattcgcatcgccgacggcgcgccgatggcggtcgagtatacgaccatcgccggcttcgccctgccctcggccgacgccgtcaaggactccctctacgaggccatggccgcgacgggccatcgaccaacccgcgccctgcagcgcctgcgcggggtgctgatctcgcgagagcacgcctcgctgctgggcgtgaagccgaaggacgccgggctgctggtcgagcgacgcggctacctgcgggacgggcgggccgtcgaaatctcgcattcctactatcgaggcgacgcctacgatttcgtcgccgaactgaacgacgcaacctga

SEQ ID NO: 329 - protein, 301 aa, Caulobacter crescentus CB15
MARTPFHGPRICCYNGICSRGFEVSRLDLPMVDWSHIGIPRSHLSEAPERRSRRDVSLSKRIGFAHGAVPAPLYLQLQRALREAIEVKVLAPDDALPPERDMAEDFAVSRITVRKALEGLVSEGLLTRRQGAGTFVAARVEKNFSKLTCFTEDMRSRGRAPASEWITRAEGAVTPEEALMLGVSPNTPVYRFHRIRIADGAPMAVEYTTIAGFALPSADAVKDSLYEAMAATGHRPTRALQRLRGVLISREHASLLGVKPKDAGLLVERRGYLRDGRAVEISHSYYRGDAYDFVAELNDAT

SEQ ID NO: 330 - DNA, 720 bp, Salmonella typhimurium LT2
  CDS (1)..(720): transl_table=11
atgatcgagcaacccgacagtaaaagcgccaaaccgctttataagcagcttgaagccgccttaaaagaggctattgcgcgtggagagtataaaccaggccagcagatcccgacggaaaatgaactgagcgtgcgctggcaggtgagcagggtcacggtccgtaaggcgctggatgcgctgacgcgtgaaaatttgctgacccgtgtctccggcaaaggcacctttgtctctggtgagaaatttcagcgcagcatgaccggcatcatgagtttcagcgagttatgccagtcccagggacgtcgcccggggtcacgcaccatcaaatccgtttttgaatcggtagacgatgagacaaaagcgttactgaatatgaacgatggcgaaaaagcggtcgtcattgaacgtatccgctatgccgacgatgtggcggtatcgctggaaaccgtacatcttcccccacgttttgcgtttttgctggacgaagatcttaataatcactctttgtatgaatgcttacgcgagaaataccatttatggtttacccactcccgtaagatgatcgaactggtttatgccagctttgaagtcgcccattatcttggcgtcaacgagggttatccgctgatcctgataaaaagtgaaatgattgataacaaaggagaactctcctgcgtttcgcaacagttgattgtcggcgataaaatacggtttaccgtatga

SEQ ID NO: 331 - protein, 239 aa, Salmonella typhimurium LT2
MIEQPDSKSAKPLYKQLEAALKEAIARGEYKPGQQIPTENELSVRWQVSRVTVRKALDALTRENLLTRVSGKGTFVSGEKFQRSMTGIMSFSELCQSQGRRPGSRTIKSVFESVDDETKALLNMNDGEKAVVIERIRYADDVAVSLETVHLPPRFAFLLDEDLNNHSLYECLREKYHLWFTHSRKMIELVYASFEVAHYLGVNEGYPLILIKSEMIDNKGELSCVSQQLIVGDKIRFTV

SEQ ID NO: 332 - DNA, 714 bp, Listeria monocytogenes EGD-e
  CDS (1)..(714): transl_table=11
atgtcgggaatggctaaatacatggaaatatacatagatatccgtgataaaatcaaccaaaacaaatacgaaattaacgagaaattgcctgacggggatagtctggcacgcgtttatgattgcagcaaacttactgtcaaaaaagcgctggatatgctcgtgcaagaaggtatggttattagacgacgcggcgctggtactttcgtgaaatctcattctactaacggcggagaattcgcactaggcccaatgtccggactcgtaaatacatttggaaaagacaacattaaatccaaagttattttattttccattgaaaaaccatcgaaagaagtcgcagaaaaattagagatgcaggatgattatatttaccgaattattcggatgagagaagttggccataaagcctattccatcgaacatacttatatgccacttgcgattattccgggtttagagccgcgtcatttagaggactcaatttataattacattcgggatgacttgaaacttaagatgcaaagtgcgcatgtttgggtacgtggagataaatctaatcaagaggatagtaagctcctcgatttagaagaacctacttttatgatggaaattgagaaattggcgcatttggaagatggtcgagtgtttgaatattcgattacgcgccatacgtatgaatcgtttgtgtttgaaacggtttttgtgcagaattaa

SEQ ID NO: 333 - protein, 237 aa, Listeria monocytogenes EGD-e
MSGMAKYMEIYIDIRDKINQNKYEINEKLPDGDSLARVYDCSKLTVKKALDMLVQEGMVIRRRGAGTFVKSHSTNGGEFALGPMSGLVNTFGKDNIKSKVILFSIEKPSKEVAEKLEMQDDYIYRIIRMREVGHKAYSIEHTYMPLAIIPGLEPRHLEDSIYNYIRDDLKLKMQSAHVWVRGDKSNQEDSKLLDLEEPTFMMEIEKLAHLEDGRVFEYSITRHTYESFVFETVFVQN

SEQ ID NO: 334 - DNA, 729 bp, Listeria monocytogenes EGD-e
  CDS (1)..(729): transl_table=11
gtggctcagaaccagacaaaatatagctttattgctgaagaaatccgcaaaagaattatgaatcacgcctatccgctaaatcaacctattcctgatgagataactttggcgaaagagtttgattgtagtcgaatgacaatgaaaaaagcgcttgaagtacttgtacttgaaggcttactataccggaaacgtggacatggtactttcattatcaaatcggcgctggacgcggaccgcttgcagattcataaccaagaggtaaacggcttcactaaacttttgaatggtaagaaagttattagtaaagtaatcgagtttaaagtcatttttccaaccgaagaaattgcagagcgccttcatatcgaaatggaaacgccaatctatgatattcttcgtgttcggctagtgaaagatgaaccatatgtattagaacacacgtatatgccggttggggttatcccaggcatcaatcagcaaattttggaaggatcgatttattcgtatattcaagatgatttgaacctaaaaatcgctagttcgtacaaacaaattcgcgcggataaagcgacgctgcttgatcagcaatatctcgactgcgcttctgatgacccagttgttgaagtagaacaaaccgtgtatttaaacaatggtctcgcgtttgaattttccagatcgcgccaccgttatgataaattcgtttttactaccgtgaatatcgctagacgataa

SEQ ID NO: 335 - protein, 242 aa, Listeria monocytogenes EGD-e
MAQNQTKYSFIAEEIRKRIMNHAYPLNQPIPDEITLAKEFDCSRMTMKKALEVLVLEGLLYRKRGHGTFIIKSALDADRLQIHNQEVNGFTKLLNGKKVISKVIEFKVIFPTEEIAERLHIEMETPIYDILRVRLVKDEPYVLEHTYMPVGVIPGINQQILEGSIYSYIQDDLNLKIASSYKQIRADKATLLDQQYLDCASDDPVVEVEQTVYLNNGLAFEFSRSRHRYDKFVFTTVNIARR

SEQ ID NO: 336 - DNA, 714 bp, Listeria monocytogenes EGD-e
  CDS (1)..(714): transl_table=11
ttggttaagtatgaattgattgcagcagatatccgcgaaaaaataaacaacggtacttacccaccagaatccattcttcctgatcaagtgagcttatgtaaagcctatgattgtagcagaatgactataaaaaaagcctttgacgttttagcgcttgaaggacttgtttacagacaacggggtgcaggaacttttgtcatgaaaaatgccttagctaataagcaagacgcgagtttgcgggattatgatggtttgacaaaaatgatgggagacaaccgaatctcgagtaaaattattgcattcgatattgccttcccagatgaaaaaacacaagaacaacttttaataaaagcagatcaaccggtttacaaattgattcgtttacggctcttggacggcgcaccatatgtattagagcatacaactatgccggcagatttagttcctggtttaacaagagaaattttacatcattcgatttatgcatacttacaagactcactgggactcgtgctaagcggtgcctttcggaaaattaatgccgataagccatctgaatatgatcaagaatatttagcgtgcggggaacacgacccagtgttagaagtggagcaagtagtgtatttaaaagatggtagaccagtggaatattctaggtcaagacatcgctatgatacaagaagttttattatggttgaccaccgagaaaagtaa

SEQ ID NO: 337 - protein, 237 aa, Listeria monocytogenes EGD-e
MVKYELIAADIREKINNGTYPPESILPDQVSLCKAYDCSRMTIKKAFDVLALEGLVYRQRGAGTFVMKNALANKQDASLRDYDGLTKMMGDNRISSKIIAFDIAFPDEKTQEQLLIKADQPVYKLIRLRLLDGAPYVLEHTTMPADLVPGLTREILHHSIYAYLQDSLGLVLSGAFRKINADKPSEYDQEYLACGEHDPVLEVEQVVYLKDGRPVEYSRSRHRYDTRSFIMVDHREK

SEQ ID NO: 338 - DNA, 723 bp, Listeria monocytogenes EGD-e
  CDS (1)..(723): transl_table=11
atgatcgataaacaatcaggaataccgatttacattcagattcaaagtgaaattaaaaagaaaatggaagatggtgtctggaaagttggcacttctattccagctgaacgtcagcttgcagaaatgttccacgtcagccgaatgacggtaagacaagccattcaaggcctcgttgatgataacattttgcaaaggcgtgttggtgccgggacttttattgcggaaaagaaactaaccgaacgacttgaagcggttacgagttttacgaatttgatgttacaagaggggaaagttccttcgacgcgaatcgtatcgtacggtattcgtccggcaagtacgcaagaacaagaggcgttgcaactaccagaaaacagcaatgtaatgaaaattgagcggattcgttatggcgaccgcgttccaattctttatgaagttgcggccattccagaaaaaattgcttcactgcttacaaaggaagacattatggattccctttataaagcgattgaattaaaacttggtcaaccaattggagaagcggaacaaatcatggaagcttctttagtatcagaaaaaattgcgccatatcttgatgtgaaactcggatcaccggttatgaaacttaggcaaattacaacgttagaagacggtcgaccatttgaatttacgcgttcccagtatgtaggtagtagatttcaatttgtagctaggattaaacaataa

SEQ ID NO: 339 - protein, 240 aa, Listeria monocytogenes EGD-e
MIDKQSGIPIYIQIQSEIKKKMEDGVWKVGTSIPAERQLAEMFHVSRMTVRQAIQGLVDDNILQRRVGAGTFIAEKKLTERLEAVTSFTNLMLQEGKVPSTRIVSYGIRPASTQEQEALQLPENSNVMKIERIRYGDRVPILYEVAAIPEKIASLLTKEDIMDSLYKAIELKLGQPIGEAEQIMEASLVSEKIAPYLDVKLGSPVMKLRQITTLEDGRPFEFTRSQYVGSRFQFVARIKQ

SEQ ID NO: 340 - DNA, 735 bp, Listeria monocytogenes EGD-e
  CDS (1)..(735): transl_table=11
atggttagaaaattaaataagatgaatgatgcgtcgccactttatgcacaaatagcggatgacttacgggaaaaaatccaatcaggaatttggaaaaccggagataaaattccaccagagctggatttatgtgagttatacaacgttagtagaattaccgttcggaaagcaattgatgaactcgttcgtgagaatctactttatagagagcgtgcgaaaggtacttttgtacgtgactgggaagaagcagaggatgagcattttactttggtgcgcagttttacgaatgagatgaaagaacttggtaaaaaagcggctacgctacatgcagaagtagaagtgatcaatgctgataaaaaaattgcgttgcagttggggcttgcagttggggataaggttttacaagttaagcggctacgaggcacgaaagacttggcgtttgctctttttatcagtgcgattccttatcgacaagcgtattcccttcaagcagaagattattacggttctttttatgaatatttgaaaggatttgggattgtcgttaatcaagaaaaggaatatattgaagctatgctaccaaatcgtgaagttcaggaagctttagcaatcgataagcaggaaccaattttaaaaagagtacggatgacgaaacaaaaagaaagtgattttagagaatacagtgaatgcttttatgtaggaaagcattatcgatattatattgattttgaataa

SEQ ID NO: 341 - protein, 244 aa, Listeria monocytogenes EGD-e
MVRKLNKMNDASPLYAQIADDLREKIQSGIWKTGDKIPPELDLCELYNVSRITVRKAIDELVRENLLYRERAKGTFVRDWEEAEDEHFTLVRSFTNEMKELGKKAATLHAEVEVINADKKIALQLGLAVGDKVLQVKRLRGTKDLAFALFISAIPYRQAYSLQAEDYYGSFYEYLKGFGIVVNQEKEYIEAMLPNREVQEALAIDKQEPILKRVRMTKQKESDFREYSECFYVGKHYRYYIDFE

SEQ ID NO: 342 - DNA, 714 bp, Listeria innocua Clip11262
  CDS (1)..(714): transl_table=11
atgtcgggaatggctaaatacatggaaatatacatagatatccgtgataaaatcaatcaaaataaatacgaaataaatgagaaacttcctgatggcgatagtatggctcgcacgtatgattgcagcaagctcactgtcaaaaaagcactggatatgcttgtacaagaaggcatgattattagacgccgcggtgctggtactttcgtgaaatctcattctactaacggcggtgaattcgcgctagggccaatgtctggacttgtaaatacatttggaaaagacaacattaaatcgaaagtcattttattttccattgaaaaaccatcgaaagaagtcgcagaaaaattagagatgcaggatgactatatttaccgaatcatccggatgagagaagttggtcataaagcctattcgattgaacatacttatatgccacttgcgattattccaggacttgagccgcaccatttagaagattcgatttataattatattcgtgatgatttaaaactcaagatgcagagtgcccatgtttgggtgcgcggggataaatcaaatcaagaggatagtaagctcctcgatttagaagaacctacttttatgatggaaattgagaaattagcgcatttggaagatggccgagtgtttgaatattcgattacgcgccatacgtatgaatcgtttgtgtttgaaacggtttttgtgcagaattaa

SEQ ID NO: 343 - protein, 237 aa, Listeria innocua Clip11262
MSGMAKYMEIYIDIRDKINQNKYEINEKLPDGDSMARTYDCSKLTVKKALDMLVQEGMIIRRRGAGTFVKSHSTNGGEFALGPMSGLVNTFGKDNIKSKVILFSIEKPSKEVAEKLEMQDDYIYRIIRMREVGHKAYSIEHTYMPLAIIPGLEPHHLEDSIYNYIRDDLKLKMQSAHVWVRGDKSNQEDSKLLDLEEPTFMMEIEKLAHLEDGRVFEYSITRHTYESFVFETVFVQN

SEQ ID NO: 344 - DNA, 729 bp, Listeria innocua Clip11262
  CDS (1)..(729): transl_table=11
gtggctcagaaccagacaaaatatagctttattgctgaagaaatccgcaaaagaattatgaatcacgcctatccgcttaatcaacctattcctgatgagataactttggcgaaagagtttgattgtagtcgaatgacaatgaaaaaggcgcttgaagtacttgtacttgaaggcttactatatcgtaaacgcgggcatggtactttcattatcaaatcggcgctggacgcggaccgtttgcagattcataaccaagaagtaaatggtttcactaaacttttagacggaaaaaaggtcattagcaaagtaattgagtttaaagtcatctttccaacagaagaaattgcggaacgtcttcatatcgaaatggaaacgccaatctatgatattcttcgtgttcggctagtgaaagatgaaccgtatgtgctagaacatacgtatatgccggttggggttatcccaggcattaaccagcaaattttagaaggttcgatttactcatatattcaagacgatttgaacctaaaaattgctagttcgtacaaacaaattcgcgcggataaagcgacactgcttgatcagcaatatctcgactgcgcttctgatgaccccgttgtcgaagtagaacaaaccgtttatttaaacaacggtctcgcgtttgagttttccagatcgcgtcaccgttatgataaattcgtgtttactaccgttaatattgctagacgttga

SEQ ID NO: 345 - protein, 242 aa, Listeria innocua Clip11262
MAQNQTKYSFIAEEIRKRIMNHAYPLNQPIPDEITLAKEFDCSRMTMKKALEVLVLEGLLYRKRGHGTFIIKSALDADRLQIHNQEVNGFTKLLDGKKVISKVIEFKVIFPTEEIAERLHIEMETPIYDILRVRLVKDEPYVLEHTYMPVGVIPGINQQILEGSIYSYIQDDLNLKIASSYKQIRADKATLLDQQYLDCASDDPVVEVEQTVYLNNGLAFEFSRSRHRYDKFVFTTVNIARR

SEQ ID NO: 346 - DNA, 714 bp, Listeria innocua Clip11262
  CDS (1)..(714): transl_table=11
ttggttaagtatgaactgattgccgcagaaatccgtgaaaaaataaacaacggtacttatccaccagaatccattcttcctgatcaagtgagcttatctagagcttatgattgtagcagaatgacaataaaaaaagcctttgacgtacttgcgcttgaaggacttgtttacagacaacgtggtgcaggaacttttgtgatgaaaaatgccttagctaataaacaagatgcgagtttgcgagattatgacggtctaacaaaaatgatgggagacaatcgaatccgaagtaaaatcattgcattcgatattgctttcccagatgaaaaaacgcaagaacaactcttgattaaagcagaccaaccagtgtataaattgattcgtttgcgcctgttagatggtgagccgtatgtattagagcatacaaccatgccagcagatttagttccaggtttaacgagagagattttgcatcattctatttatgcatacttacaagacacactagggctcgttttaagtggtgcatttcgaaaaattaatgccgataagccatctgaatatgaccaagaatatttagcgtgcggagaacatgatccagttttagaagtggagcaagtagtgtatttaaaagacggtagaccagtcgaatattcccgttcaagacatcgctatgatacgagaagtttcattatggttgatcaccgagaaaagtaa

SEQ ID NO: 347 - protein, 237 aa, Listeria innocua Clip11262
MVKYELIAAEIREKINNGTYPPESILPDQVSLSRAYDCSRMTIKKAFDVLALEGLVYRQRGAGTFVMKNALANKQDASLRDYDGLTKMMGDNRIRSKIIAFDIAFPDEKTQEQLLIKADQPVYKLIRLRLLDGEPYVLEHTTMPADLVPGLTREILHHSIYAYLQDTLGLVLSGAFRKINADKPSEYDQEYLACGEHDPVLEVEQVVYLKDGRPVEYSRSRHRYDTRSFIMVDHREK

SEQ ID NO: 348 - DNA, 723 bp, Listeria innocua Clip11262
  CDS (1)..(723): transl_table=11
atgatcgataaacaatcaggaataccgatttacattcagattcaaagtgaaattaaaaagaaaatggaagatggtgtctggaaagttggcacttctattccagctgaacgtcaacttgctgaaatgtttcacgttagtcgaatgacagtaagacaagccattcaaggactagtcgatgataatattttgcaaagacgcgttggcgctgggacttttattgcggaaaagaaattaaccgaacgactagaagctgtcacaagttttacgaatttgatgttgcaagaagggaaagttccttcaacgcgtatcgtatcgtatggcattcgtccggcaagtacgcaagaacaagaagcgttacaactaccagaaaacagcaatgtaatgaaaattgaacggattcgttacggcgaccgtgtaccaattctttatgaagttgccgccattccagaaaaaattgcttcactgcttacaaaggaagacattatggattccctttataaagcgattgaattaaaacttggtcaaaaaatcggagaagcagaacaaacgatggaagcttctttagtatcagaaaaaattgcgccatatcttgatgtgaaactcggatcaccggttatgaaacttcggcagattacaactttagaagatggtcgaccatttgaatttacacgttctcaatatgtaggtagtagatttcaatttgtagctaggattaaacaataa

SEQ ID NO: 349 - protein, 240 aa, Listeria innocua Clip11262
MIDKQSGIPIYIQIQSEIKKKMEDGVWKVGTSIPAERQLAEMFHVSRMTVRQAIQGLVDDNILQRRVGAGTFIAEKKLTERLEAVTSFTNLMLQEGKVPSTRIVSYGIRPASTQEQEALQLPENSNVMKIERIRYGDRVPILYEVAAIPEKIASLLTKEDIMDSLYKAIELKLGQKIGEAEQTMEASLVSEKIAPYLDVKLGSPVMKLRQITTLEDGRPFEFTRSQYVGSRFQFVARIKQ

SEQ ID NO: 350 - DNA, 741 bp, Nostoc sp. PCC 7120
  CDS (1)..(741): transl_table=11
atgaacgaaataatgccaatttatgcccagattgctgacaaactacgacaaaagattcatcaagggatttatcaactaggggaacaactaccaacggaaaccaagttagcagaacagtttgcagtcaatcgccataccctcagacaagcgatcgctctcctgaaaactgaaggattgttacgagttgaccgaggacgggggacttttgtcgcagccaaaaccatccgctatgctattggtaagcgtgtgcgttataaccaaaccctgaaagcgcaagggttacaagcaaggtttcaactgctacgggttttagaagtacctgctgatgatgctgttgcgaaaggattagagatttcttttggtgagccagtagcgttaattgaacgtttaggtttagcagatgaagaacccattagtgtgggtagtggatattttcccctcaagcgattccctgattttttagaaccggaaaatatcaagattttgcaagaacagcaatcaatttctcagtttttacagcaggtatatggatgtgatcatatccgccgtagtacctgcgtttcggctcgtctagtccaacctcaagatgcaaaatggctacaaataccactcaatcaacccatcttgttagcagaatcagtcaacgttgatcaagcaggtaatgtgattgaatatggcgtaactcgactgcgaggcgatcgtatggagttattttttgaaaataatttatttgatgattga

SEQ ID NO: 351 - protein, 246 aa, Nostoc sp. PCC 7120
MNEIMPIYAQIADKLRQKIHQGIYQLGEQLPTETKLAEQFAVNRHTLRQAIALLKTEGLLRVDRGRGTFVAAKTIRYAIGKRVRYNQTLKAQGLQARFQLLRVLEVPADDAVAKGLEISFGEPVALIERLGLADEEPISVGSGYFPLKRFPDFLEPENIKILQEQQSISQFLQQVYGCDHIRRSTCVSARLVQPQDAKWLQIPLNQPILLAESVNVDQAGNVIEYGVTRLRGDRMELFFENNLFDD

SEQ ID NO: 352 - DNA, 723 bp, Ralstonia solanacearum GMI1000
  CDS (1)..(723): transl_table=11
atgcccgccgacctccgcctgccccgctatcagcaattgcgcgacgacctggccgcgcaggtcgcccggcagcagtggcgcccgggcgacgccatccccaccgaggccgagctggccaagctctacaacgtggcggtcggcaccgtgcgcaaggcgatcgacgtgctcgtcgccgaggggctgctggagcgcttccaggggcgcggcaccttcgtgcgccgggccagcttcgccagttcgctgttccgcttcttccgcttccagaacgagcgcggcgagcggcgcatccccgagagccgcatcctcaagcgcgacgtgctcgacgcaccgtccgcgccggccgccggactgcagatcgagaccggtgccccggtcatccgcctgacgcgcctgcggctgctcgatgccgcaccgctgctggccgaagagatctggctgccatacgaccgcttcgaaccgctggccacgctggagcccggtgccttcggcgacctgctgtacccgctctacgaaaagcagtgcggccagatcgtcgccagcgccgaagagacgctcaccgccgaggccgtcaatgcgacctacgcacgcctgctgcgcatcaagccgggcgatccggtgatggtgatcgagcgcatcgcgcgaggctacgaccgcgtgccgctggagtggcggcgctcgcgcggcgcggcggcgcatttccggtaccacgtcgacatccggtag

SEQ ID NO: 353 - protein, 240 aa, Ralstonia solanacearum GMI1000
MPADLRLPRYQQLRDDLAAQVARQQWRPGDAIPTEAELAKLYNVAVGTVRKAIDVLVAEGLLERFQGRGTFVRRASFASSLFRFFRFQNERGERRIPESRILKRDVLDAPSAPAAGLQIETGAPVIRLTRLRLLDAAPLLAEEIWLPYDRFEPLATLEPGAFGDLLYPLYEKQCGQIVASAEETLTAEAVNATYARLLRIKPGDPVMVIERIARGYDRVPLEWRRSRGAAAHFRYHVDIR

SEQ ID NO: 354 - DNA, 753 bp, Agrobacterium tumefaciens str. C58
  CDS (1)..(753): transl_table=11
atgaacggggcagcgcttaatctggaggacctgcaatcaggcggcggtccgctgtacctgaaattgcgccagacgatcgaagacgccatcaatggcggccgcctgaagcatggcgacgccctgccgccggaacgcgacattgctgaaagcgcctgcgtcagccgcgtcacggtgcgcaaggcggtggatgatctcgtccgcgacggccttctcgttcgccggcatggttcgggcacctttgtcgtcaagcccatcacccgcatgcaacagccgctgaccaagctcacctcctttaccgaggacatgcgccggcgcggcatgacggcaagcacccaatggctggacaggggtcttttccaccccaccggcgatgagatgatgacactcggcctttcccagtccgccatggtggcacggctcacgcgcctgcgtcttgccaatgaccagccgatcgcgctggaagtcaccagcctgccgggggatattttgcccgatccgcaactcgtcgaaaattcgctttatctggagcttgaaaagagcggcattcgccccgtgcgcgccattcagcgcatctcggcccgcaatctcacggatgaggaaacccttctgcttggggtcccgccgggctcggcagcgctttccgttcagcgcatggcctatctcgaaagcgggcgcctcatggaaatatccctcgcgctttaccgcagtgatgcctacgaccttgtcgccgaactgacgatgggtccagagtaa

SEQ ID NO: 355 - protein, 250 aa, Agrobacterium tumefaciens str. C58
MNGAALNLEDLQSGGGPLYLKLRQTIEDAINGGRLKHGDALPPERDIAESACVSRVTVRKAVDDLVRDGLLVRRHGSGTFVVKPITRMQQPLTKLTSFTEDMRRRGMTASTQWLDRGLFHPTGDEMMTLGLSQSAMVARLTRLRLANDQPIALEVTSLPGDILPDPQLVENSLYLELEKSGIRPVRAIQRISARNLTDEETLLLGVPPGSAALSVQRMAYLESGRLMEISLALYRSDAYDLVAELTMGPE

SEQ ID NO: 356 - DNA, 768 bp, Brucella melitensis 16M
  CDS (1)..(768): transl_table=11
atgaatagaaccactttgatcaatgccattgaagggcgcgggttgcgcgatccgcagcttgcggggccgctctatcgcagcctcgcgcggattctgggcgaactgatcgaggaagggcagcttgcgcccgcagtggggcttccgccggaacgcgaccttgcggagcaattgggcatcggccgcatcaccgtgcgcaaggcctataaggaacttctgacccagggctttgtggaatcgcggcgcggcagcggcaccttcgttgctgaacggccagtgcgcatcagccagcatttgtggcggctcacttccttctcgcaggatatgatttcgcgcggtaaggaacccggcgcgcgcgtggtgacgaacaggatcgacaagccttcgccggatgaggctttccggctcggcatcggtgtggatgccagtgtcgtgcggcttgatcgcctgcgacttgccgatggtgttcctatggccttcgagcgcgcggtggtgccgcgccattatctcgatcaggaccgtgtggacgaaacatcgctttacgaagcactggcgcggcgcggccacaagccggtgcgcgccttgcagcgcctcaccgccgttacgctcgaccccggcactgcccatttgctgggtgtgcaccacggcgcgccggccctgctcatcgaacgtgtctcgcatctcgaagacgatcggatcgttgaatatacccgctcgcattatcgtgctgacgcttatgactttgttgcggaattgaaaattggagaatga

SEQ ID NO: 357 - protein, 255 aa, Brucella melitensis 16M
MNRTTLINAIEGRGLRDPQLAGPLYRSLARILGELIEEGQLAPAVGLPPERDLAEQLGIGRITVRKAYKELLTQGFVESRRGSGTFVAERPVRISQHLWRLTSFSQDMISRGKEPGARVVTNRIDKPSPDEAFRLGIGVDASVVRLDRLRLADGVPMAFERAVVPRHYLDQDRVDETSLYEALARRGHKPVRALQRLTAVTLDPGTAHLLGVHHGAPALLIERVSHLEDDRIVEYTRSHYRADAYDFVAELKIGE

SEQ ID NO: 358 - DNA, 780 bp, Brucella melitensis 16M
  CDS (1)..(780): transl_table=11
atgcggatgagcggaaatttcggcgctttcctgcccaagaacctgcagggctctgcgccctcctccggggcggggccgctttacgtgcaactgcgtcagtcactcgaagcggcaatccgtgccgggcaactggccgatggtgaggcattgccgccggaacgcgacattgccgaatataccaatatcagccgcgtgaccgtgcgcaaggccgtggacgacctcgtaaaggcggggcttctggtgcgccgtcacggctcaggcacgtttgtcgtacgccccggcgagcgtgtgcagcaatcactctccatgctgacctcatttacggaagatatggcccggcgcggcattgccacgcaatcgcgctggctggagcgcgggctttattatccctcgccggaagaaatgatgaagcttggtttgtcatcggaaacgcgggtggcgcggttggggcgcctgcgcatggtgggcgacatgccgcttgccatcgaaagggcaagcctttccagtgaattcctgcccgatcccgatgccgtgcaaggctcactttatgcggagctgggccgcacaggttttcgtccggtgcgtgcggtacagcgtattgcggcctgcaatatcaagacgtcggatgctcgcattcttggcgtgcaggaaggcgatgcgggcctttctatcgagcgtctttcctatctggcttcgggccgcgtggtggaatttaccaagtcgctctatcgcggcgatgcctatgatttcgttgcagagctgacaattccgcaatcctga

SEQ ID NO: 359 - protein, 259 aa, Brucella melitensis 16M
MRMSGNFGAFLPKNLQGSAPSSGAGPLYVQLRQSLEAAIRAGQLADGEALPPERDIAEYTNISRVTVRKAVDDLVKAGLLVRRHGSGTFVVRPGERVQQSLSMLTSFTEDMARRGIATQSRWLERGLYYPSPEEMMKLGLSSETRVARLGRLRMVGDMPLAIERASLSSEFLPDPDAVQGSLYAELGRTGFRPVRAVQRIAACNIKTSDARILGVQEGDAGLSIERLSYLASGRVVEFTKSLYRGDAYDFVAELTIPQS

SEQ ID NO: 360 - DNA, 708 bp, Clostridium perfringens str. 13
  CDS (1)..(708): transl_table=11
atgtctagtaagtatttaaaaatatataatgatattgttgggaaaatagatagtggaatttttgaagcgaatactaaattaccttcagagtcacaacttatggatgaatataatgtatctagagatactgtaagaaaatccttgaatttattagagcaaaatggatatattgaaaagtctaaaggtaagggatcttttgtacttgatatgaataaatttgattttcctgtgtcaggtataaagagttttaaagagattgaaaatagcttaggaaaagagtgcgaaactatattagaggaattaacattaaaaagtcctagtgatagccttatgaaaaaactagaggtttctcctaataaatatgtttggagtgtagtaagagttagaaatatagatggtgaaaagataattttagataaggactatttaaattcagagtttgttccaagacttacagaagaaatatgcaaggattctttatataaatatatagagggagaattaggattaaaaatagcctatgctgaaaaagaaataacagtacaaactgctactgaggaagatcaaagacttttagatttaagaggatatgatatggtagctgtggttaaaagctatacatatttagaaggaagaaaattatttcaatatacagagtcaagacatagaccagataaatttaagtttgtagattttgcaagaagatag

SEQ ID NO: 361 - protein, 235 aa, Clostridium perfringens str. 13
MSSKYLKIYNDIVGKIDSGIFEANTKLPSESQLMDEYNVSRDTVRKSLNLLEQNGYIEKSKGKGSFVLDMNKFDFPVSGIKSFKEIENSLGKECETILEELTLKSPSDSLMKKLEVSPNKYVWSVVRVRNIDGEKIILDKDYLNSEFVPRLTEEICKDSLYKYIEGELGLKIAYAEKEITVQTATEEDQRLLDLRGYDMVAVVKSYTYLEGRKLFQYTESRHRPDKFKFVDFARR

SEQ ID NO: 362 - DNA, 723 bp, Clostridium perfringens str. 13
  CDS (1)..(723): transl_table=11
atgatagataaaaatagtcctatacctgtgtattaccaattaaaagagatgataaaagaaaagatagcagatggcacttggcaagtaggacagtgtatagcaagcgaaagagagttaacagaggcttatggagtaagtcgaatgactgtcagacaggctttaggagaactagtacaagaaggtcttcttgttagagaaaaaggaaaaggaaccttcgtatgtgaacctaaagtaaagcaagaagatatgatgagtttctcagaaattataaaaaaagcaggaagaagtttaataactaaagttatagattttgaagttattaatacccctgaagaattagcagatacttttgatgtagaaaaaatatataaaataaatagattaagattagttgatggtgaagctgttgctaatgaggttgtttatattccttgtgaatattgtggctttgtaactagagatgatttagaggggtccttatttaagttattagaagaaaagggacatattatagaaagtacagaatcatctttagcagctgtaataatggatgatgagctaaaagctttatttaatgtgaataaacaagtacctcttttaaaaagtcataacacagctttaaattcagaaggcgaaataatttacgttgaagatgcaatttataggtcagacaaatatatattagaaattaatatttctaaaagagaggggaaattgaaatga

SEQ ID NO: 363 - protein, 240 aa, Clostridium perfringens str. 13
MIDKNSPIPVYYQLKEMIKEKIADGTWQVGQCIASERELTEAYGVSRMTVRQALGELVQEGLLVREKGKGTFVCEPKVKQEDMMSFSEIIKKAGRSLITKVIDFEVINTPEELADTFDVEKIYKINRLRLVDGEAVANEVVYIPCEYCGFVTRDDLEGSLFKLLEEKGHIIESTESSLAAVIMDDELKALFNVNKQVPLLKSHNTALNSEGEIIYVEDAIYRSDKYILEINISKREGKLK

SEQ ID NO: 364 - DNA, 726 bp, Clostridium perfringens str. 13
  CDS (1)..(726): transl_table=11
atgtttaagagaagcaggggcatagccctgtatcatcaattagaaacagagctaattgatcttataaatagcggagaacttaaggaaaatgataagttaccatctgaaagagaattatgtgagcaatataatgttagtagaacaacagctaggcaagctattggagaattagaaagaaaagagtatgtatataaggtccatggaaagggaacttttatatctcctaaagtgtataaacaacaattattaaaattttatagttttactgaagaaatgaaaaagcttgggaaaaatccatcttcaaaaatattatcctttgatttaataagagctgacaataagatttctgaaaaattaaaagtggaagaaaactcactggtatataagatagtaagactaagaatagcagatgaagttccaatgatggtagagtgtacttatttacctgaatatagatttattgatttgaaagaaaagatgcttaaagaaaagcctatgtatgatatatttagagaagtctataatgttagtctaactaaggctaaggaaagttttaaaccaatattaatttcaaagagtgattcaaaattattaaatgtggaagatggtacagctgcaatgagaattgaaagagttacctttgaaaatgaaagagttatagagtatacagtaagtgtttcaagaggagataaatttgaatatactgtagttttagaagaagattaa

SEQ ID NO: 365 - protein, 241 aa, Clostridium perfringens str. 13
MFKRSRGIALYHQLETELIDLINSGELKENDKLPSERELCEQYNVSRTTARQAIGELERKEYVYKVHGKGTFISPKVYKQQLLKFYSFTEEMKKLGKNPSSKILSFDLIRADNKISEKLKVEENSLVYKIVRLRIADEVPMMVECTYLPEYRFIDLKEKMLKEKPMYDIFREVYNVSLTKAKESFKPILISKSDSKLLNVEDGTAAMRIERVTFENERVIEYTVSVSRGDKFEYTVVLEED

SEQ ID NO: 366 - DNA, 762 bp, Corynebacterium glutamicum ATCC 13032
  CDS (1)..(762): transl_table=11
atgaccaccgaagctcccatttggccagccgaactcttcgaagacctcgaccgcaacggaccaatccccctctacttccaagtagcccaacgcctcgaagacggcatccgcagcggagtcctcccacccggagcacgcctagaaaacgagatctccgtggcgaaacacctcaacgtatcccgccccaccgtccgacgcgccatccaagaagtcgtagacaaaggcctcttagttcgccgccgcggtgttggcacccaggtcgtccaaagccacgtcacccgcccagtcgaactgaccagtttcttcaacgacctcaaaaacgccaacctggaccccaaaacccgagtcctcgagcaccgcctccttgcagcaagttccgccatcgcagaaaaactcggagtttccgcaggtgacgaagtcctcctcatccgccgcctccgctccaccggagacatccccgtagcgatcctggaaaactacctccccccagcgttcaacgacgtctccctcgacgaactagaaaagggtggactctacgatgcgctgcgcagccgaggtgttgtcttaaaaatcgccaaccagaaaatcggtgcgcgccgagcagtcggtgaagaaagcaccctcctcgacatcgaagacggcggaccacttctcaccgtcgaacgcgttgcattggataattccggccaagtaatcgagttgggaagccactgctaccgcccagatatgtacaactttgaaaccactctggtggccaggtaa

SEQ ID NO: 367 - protein, 253 aa, Corynebacterium glutamicum ATCC 13032
MTTEAPIWPAELFEDLDRNGPIPLYFQVAQRLEDGIRSGVLPPGARLENEISVAKHLNVSRPTVRRAIQEVVDKGLLVRRRGVGTQVVQSHVTRPVELTSFFNDLKNANLDPKTRVLEHRLLAASSAIAEKLGVSAGDEVLLIRRLRSTGDIPVAILENYLPPAFNDVSLDELEKGGLYDALRSRGVVLKIANQKIGARRAVGEESTLLDIEDGGPLLTVERVALDNSGQVIELGSHCYRPDMYNFETTLVAR

SEQ ID NO: 368 - DNA, 801 bp, Corynebacterium glutamicum ATCC 13032
  CDS (1)..(801): transl_table=11
atgcctgaccaaccgctcaaccaggacggattccctaccgcatccaaaggggtggaacccgacaacctccccgaccgcgttctcgtggacggccttaaaccaaagcatcagcagcttcgtgaaattttggaggaaatctgcaccacccagcttcagcctggggacatgctgcctggtgagcgcatcctggaagaaaagtatggcgtcagccgaattacggttcgtcgggcgattggtgatctggtcgcgtccggcaggttgaagcgagctcgcggcaaaggtaccttcgtggcccactcgccgttgatttcccgcctgcatttggcctcgttttccgcagagatggccgcccagaagctatcggctaccagcaggattttgagttcttcccgcggtcccgccccagatgatattgctgatttctttggtaccgatcgcgcggcccagcacatcacgttgcgccgcctgcgccttggaaatggtcgaccctatgccattgacaacggctggtacaactccgaattcgcacctgacctgctggaaaatgatgtgtacaactccgtgtactccatcctggaccgcgtctatggcgtccccgtcacccaggccgagcaaacggtcaccgccgtagcagccgacgaagacaccgcacggcttctcgacgtcacccccggcgccccactccttcgtatccttcgacagtcactttctggcgataagcccgtggaatggtgcgtttccttgtaccgaaccgaccgatattctttaaaaacattggttacacgctccgaagatctctga

SEQ ID NO: 369 - protein, 266 aa, Corynebacterium glutamicum ATCC 13032
MPDQPLNQDGFPTASKGVEPDNLPDRVLVDGLKPKHQQLREILEEICTTQLQPGDMLPGERILEEKYGVSRITVRRAIGDLVASGRLKRARGKGTFVAHSPLISRLHLASFSAEMAAQKLSATSRILSSSRGPAPDDIADFFGTDRAAQHITLRRLRLGNGRPYAIDNGWYNSEFAPDLLENDVYNSVYSILDRVYGVPVTQAEQTVTAVAADEDTARLLDVTPGAPLLRILRQSLSGDKPVEWCVSLYRTDRYSLKTLVTRSEDL

SEQ ID NO: 370 - DNA, 765 bp, Streptomyces coelicolor A3(2)
  CDS (1)..(765): transl_table=11
atgagcaccgacgtcagcagtgcggagaacgagggtggggcgaccgtccgtaccgcgcgcgtgcccaagtactaccgtctgaagaagcatctgctcgacatgacccggacccagacgccgggcacaccggtcccgccggagcgcaccctggccgccgagttcgacacctcgcgcacgacggtgcgccaggccctgcaggagctggtggtcgagggccgcctggagcgcatccagggcaagggcaccttcgtcgccaagcccaaggtgtcgcaggcgctgcaactcacctcgtacaccgaggacatgcgggcccagggcctcgaaccgacctctcagctgctggacatcggctacatcaccgccgacgaccggctcgccgggctgctggacatcacggccggcggccgggtgctgcgcatcgagcggctgcgcatggccaacggcgagccgatggccatcgagaccacccacctcagcgcgaagcgcttccccgccctgcgccgctccctggtgaagtacacgtccctctacaccgcgctcgccgaggtgtacgacgtccatctcgccgaggccgaggagaccatcgagacctccctggccaccccgcgcgaggccggtctgctcggcaccgacgtcggcctgcccatgctgatgctctcccggcactcccaggaccgcaccggccagccggtggagtgggtccgctcggtgtaccggggcgaccgctacaagttcgtggcccgcctcaagcggccccaggactag

SEQ ID NO: 371 - protein, 254 aa, Streptomyces coelicolor A3(2)
MSTDVSSAENEGGATVRTARVPKYYRLKKHLLDMTRTQTPGTPVPPERTLAAEFDTSRTTVRQALQELVVEGRLERIQGKGTFVAKPKVSQALQLTSYTEDMRAQGLEPTSQLLDIGYITADDRLAGLLDITAGGRVLRIERLRMANGEPMAIETTHLSAKRFPALRRSLVKYTSLYTALAEVYDVHLAEAEETIETSLATPREAGLLGTDVGLPMLMLSRHSQDRTGQPVEWVRSVYRGDRYKFVARLKRPQD

SEQ ID NO: 372 - DNA, 768 bp, Xanthomonas axonopodis pv. citri str. 306
  CDS (1)..(768): transl_table=11
gtggtcaaaccgaaaaccaacgccaggacggacgacgatcccaggatggacgcgctggcactggacgcgtccgcgccgaccccgctgtatctgcaactggccgccaagcttaccgacgccatccgtggcgggcagtggaaggccggcgaggcgctgccggccgagcgccagctgtgcgagcggctgcagatctcgcgggtgaccctgcgccaggcggtggatgtgctggtcgaacaaggcctggtctcgcgccggcagggcgccggcaccttcgtcaccacgcagatccagcatcagctcagcggcctgaccagtttcagcgagacgctgcgcatcaagggctatgagccgggcacgcgctggctggagcggcggctgcgcccggcgcatggcgaagagatcctgcgcctgggcctgtcgccggatgccgcggtggcctcgctgacgcggctgcgcagtgccgacgaccgggtcatggcctacgagcacgcggtgttgccgcaacgcatcgtcgccgacccgcagcagatcggcgattcgctctacagctatctggatgcgcagggcacgccggtggtgcgtgccctgcagtacttccgcgccatcaatctgcccgcgcggctggccgaacacctgcgcatgaagaccggcgaggcgattttgcatgtggtgcgcgtgggctatgcccgcgatggcagcgcgatcgaattgaccgacacctattgccacaacgacttctacgatttcgtcgccgaactgcgccgctga

SEQ ID NO: 373 - protein, 255 aa, Xanthomonas axonopodis pv. citri str. 306
MVKPKTNARTDDDPRMDALALDASAPTPLYLQLAAKLTDAIRGGQWKAGEALPAERQLCERLQISRVTLRQAVDVLVEQGLVSRRQGAGTFVTTQIQHQLSGLTSFSETLRIKGYEPGTRWLERRLRPAHGEEILRLGLSPDAAVASLTRLRSADDRVMAYEHAVLPQRIVADPQQIGDSLYSYLDAQGTPVVRALQYFRAINLPARLAEHLRMKTGEAILHVVRVGYARDGSAIELTDTYCHNDFYDFVAELRR

SEQ ID NO: 374 - DNA, 747 bp, Oceanobacillus iheyensis HTE831
  CDS (1)..(747): transl_table=11
atgattgataaaaattcacctataccaatttattaccaattagaagaatatataaaacatcaaattgataatcaaaagtggctgccgggagagcttcttccatctgaaagagaatttgcagaacaatatcatatcagccgtatgacagtccgccaggctataaataatttagctgctgctggccttctgtatcgtgtgaaagggaaaggaacctttattgctcaacctaaatttgaacatgacctttctggtttaacgagttttacagaagatatgatgcaacgaggcttaacgccgtctaatcaattgttatatattcaactgcataatcaaccgagtcaaattgcgcataagcttcaattacaatcagaggattcttactatgaaattaaacgaatacgctttgcagatgaagacccccttgcatttgaaattatttacaccccgaaaaaactaattggtgaactggaagaaaaatatttacaaggttctttttatcaatatgttgaacaaaaaataggaaagcacattattgttggaaatcaaacaattgaaggtgctcttgcaactaaagaacaagctaatttcttacaaattaatgtcggtgatccggtattaattatggaaagagtaagttatctagatcaaccgatagaagttcctattgaatttactcaaacgatatatcgtgcagataaatataaatttcacctcacgcttcatagagatgaacaaaccaagggctaa

SEQ ID NO: 375 - protein, 248 aa, Oceanobacillus iheyensis HTE831
MIDKNSPIPIYYQLEEYIKHQIDNQKWLPGELLPSEREFAEQYHISRMTVRQAINNLAAAGLLYRVKGKGTFIAQPKFEHDLSGLTSFTEDMMQRGLTPSNQLLYIQLHNQPSQIAHKLQLQSEDSYYEIKRIRFADEDPLAFEIIYTPKKLIGELEEKYLQGSFYQYVEQKIGKHIIVGNQTIEGALATKEQANFLQINVGDPVLIMERVSYLDQPIEVPIEFTQTIYRADKYKFHLTLHRDEQTKG

SEQ ID NO: 376 - DNA, 729 bp, Oceanobacillus iheyensis HTE831
  CDS (1)..(729): transl_table=11
atggagaaaaaccaatctttacatgcttatattaagcaggagctgttacaacgaattaagactaatcaatacaaaaaaggagaaaaaatcccacctgagttagaactttgcaaagattttaatgtaagccgtactactgttcgcacagcgttaaatcaacttacactagaaggttacttagttcgacagcaaggaagtggaacatatgtagctgatgagaaagtgaagcagacattaacgcagactgttaaacgatatagtgatcagttagctgttcaggggaaagtgtcagatattaatgtattagatatttctgttattgctgctgatgaaatgataacttccagtctgaatgtaaatataaaagacccaatacagcgaattgaacgagtacgtaaagcaaatggtcagccaacgcagtatgaaattgcgtttattccttggtccattgcatcaggaattacttacacagatgcggaaacttctttatataaatcgcttaaggaaaagtttaatgtttttatagctaaaacttatgaaaatatggaaataacttttgcagatgatcaaatttgtaaatatcttgaatgtgaacctgggcttccatgtttttacatagaaacaattgcagaagatgaagaaggaaggaaaatagaattttcaaagtcatttttccgtggtgataagactaactttacgatagaacgaacttatccagaatcaaattaa

SEQ ID NO: 377 - protein, 242 aa, Oceanobacillus iheyensis HTE831
MEKNQSLHAYIKQELLQRIKTNQYKKGEKIPPELELCKDFNVSRTTVRTALNQLTLEGYLVRQQGSGTYVADEKVKQTLTQTVKRYSDQLAVQGKVSDINVLDISVIAADEMITSSLNVNIKDPIQRIERVRKANGQPTQYEIAFIPWSIASGITYTDAETSLYKSLKEKFNVFIAKTYENMEITFADDQICKYLECEPGLPCFYIETIAEDEEGRKIEFSKSFFRGDKTNFTIERTYPESN

SEQ ID NO: 378 - DNA, 774 bp, Brucella suis 1330
  CDS (1)..(774): transl_table=11
atgagcggaaatttcggcgctttcctgcccaagaacctgcagggctctgcgccctcctccggggcggggccgctttatgtgcaactgcgtcagtcactcgaagcggcaatccgtgccgggcaactggccgatggtgaggcattgccgccggaacgcgacattgccgaatatgccaatatcagccgcgtgaccgtgcgcaaggccgtggacgacctcgtaaaggcggggcttctggtgcgccgtcacggctcaggcacgtttgtcgtacgccccggcgagcgtgtgcagcaatcactctccatgctgacctcatttacggaagatatggcccggcgcggcattgccacgcaatcgcgctggctggagcgcgggctttattatccctcgccggaagaaatgatgaagcttggtttgtcatcggaaacgcgggtggcgcggttggggcgcctgcgcatggtgggcgacatgccgcttgccatcgaaagggcaagcctttccagtgaattcctgcccgatcccgatgccgtgcaaggctcactttatgcggagctgggccgcacaggttttcgtccggtgcgtgcggtacagcgtattgcggcctgcaatatcaagacgtcggatgctcgcattcttggcgtgcaggaaggcgatgcgggcctttctatcgagcgtctttcctatctggcttcgggccgcgtggtggaatttaccaagtcgctctatcgcggcgatgcctatgatttcgttgcagagctgacaattccgcaatcctga

SEQ ID NO: 379 - protein, 257 aa, Brucella suis 1330
MSGNFGAFLPKNLQGSAPSSGAGPLYVQLRQSLEAAIRAGQLADGEALPPERDIAEYANISRVTVRKAVDDLVKAGLLVRRHGSGTFVVRPGERVQQSLSMLTSFTEDMARRGIATQSRWLERGLYYPSPEEMMKLGLSSETRVARLGRLRMVGDMPLAIERASLSSEFLPDPDAVQGSLYAELGRTGFRPVRAVQRIAACNIKTSDARILGVQEGDAGLSIERLSYLASGRVVEFTKSLYRGDAYDFVAELTIPQS

SEQ ID NO: 380 - DNA, 726 bp, Brucella suis 1330
  CDS (1)..(726): transl_table=11
ttgcgcgatccgcagcttgcggggccgctctatcgcagcctcgcgcggattctgggcgaactgatcgaggaagggcagcttgcgcccgcagtggggcttccgccggaacgcgaccttgcggagcaattgggcattggccgcatcaccgtgcgcaaggcctataaggaacttctgacccagggctttgtggaatcgcggcgcggcagcggcaccttcgttgctgaacggccagtgcgcatcagccagcatttgtggcggctcacttccttctcgcaggatatgatttcgcgcggtaaggaacccggcgcgcgcgtggtgacgaacaggatcgacaagccttcgccggatgaggctttccggctcggcatcggtgtggatgccagtgtcgtgcggcttgatcgcctgcgacttgccgatggtgttcctatggccttcgagcgcgcggtggtgccgcgccattatctcgatcaggaccgtgtggatgaaacatcgctttacgaagcactggcgcggcgcggccacaagccggtgcgcgccttgcagcgcctcaccgccgttacgctcgaccccggcactgcccatttgctgggtgtgcaccacggcgcgccggccctgctcatcgaacgtgtctcgcatctcgaagacgatcggatcgttgaatatacccgctcgcattatcgtgctgacgcttatgactttgttgcggaattgaaaattggagaatga

SEQ ID NO: 381 - protein, 241 aa, Brucella suis 1330
MRDPQLAGPLYRSLARILGELIEEGQLAPAVGLPPERDLAEQLGIGRITVRKAYKELLTQGFVESRRGSGTFVAERPVRISQHLWRLTSFSQDMISRGKEPGARVVTNRIDKPSPDEAFRLGIGVDASVVRLDRLRLADGVPMAFERAVVPRHYLDQDRVDETSLYEALARRGHKPVRALQRLTAVTLDPGTAHLLGVHHGAPALLIERVSHLEDDRIVEYTRSHYRADAYDFVAELKIGE

SEQ ID NO: 382 - DNA, 735 bp, Brucella suis 1330
  CDS (1)..(735): transl_table=11
atgaatgttgaatcggatcatgcgcccctctatgccaaggtcgaggctgctttggcagccgagattgccaaaggcatctttcctcgtggttcccggctcccgcctgaagatagcttgatcgagaggttcggtgtcagccggaccaccgttcgcaaggccattgaaaatctggtcatgcgtggcctggtcgagatccgacgcggcaaaggaaccttcgttgcggagccaaagattcggcaggaattgactgaattgagcggcttcgtggaagatatggttgccttgggtcgcaagccaaccgcaaatctgctcgacaagcgatcggttcccgcttgtgaggaagtggcagagcatcttggcgttgctgttggaacgcaggtctatcgcatcgagcgtgtgcgattggccgatggcgtcgccatgtcgttcgacgaaacctatttgcccctcgatatcggcgagaagattgccagcaacgatttggaagttgaaccgatcttttcattgcttgaaaacaagtatggcatgccacttgtcgaagcagactaccagctggaggctgttacggctgacgaccatgttgcgcaggcgctgggaattgcgccgggaagcccaatatttctgattgagcggacgacctattgcaaagggtcggagccggtggattatgaaaagctttattatcggggcgatctcatcaagttttgcacgcgattatcacgtcggacaaggtag

SEQ ID NO: 383 - protein, 244 aa, Brucella suis 1330
MNVESDHAPLYAKVEAALAAEIAKGIFPRGSRLPPEDSLIERFGVSRTTVRKAIENLVMRGLVEIRRGKGTFVAEPKIRQELTELSGFVEDMVALGRKPTANLLDKRSVPACEEVAEHLGVAVGTQVYRIERVRLADGVAMSFDETYLPLDIGEKIASNDLEVEPIFSLLENKYGMPLVEADYQLEAVTADDHVAQALGIAPGSPIFLIERTTYCKGSEPVDYEKLYYRGDLIKFCTRLSRRTR

SEQ ID NO: 384 - DNA, 798 bp, Shigella flexneri 2a str. 301
  CDS (1)..(798): transl_table=11
gtgctgttacttgccggaaaacgaccctataatccgagtaattcattctttatttcagggtcgattatgtcagctacggaccgctactctcatcaactcctctacgctaccgtccgccagcggctgctggatgatatcgcgcagggggtttaccaggccgggcaacagatccctaccgaaaacgagctttgtacacaatataacgtcagccgcattaccattcgcaaagccatcagcgacttagtggcagacggcgtactgatccgctggcagggaaaaggcacctttgtacaaagccagaaagttgaaaacgccctgcttactgtcagtggttttaccgattttggcgtctcacaaggcaagtcgacgaaagagaaagtgatcgaacaggaacgggtcagcgccgcgccgttttgcgaaaagctgaacatccccggaaacagcgaagtgttccatctctgccgggtgatgtatctcgataaagagccgctgtttattgatagttcatggatcccgctgtcgcgttatcctgactttgatgagatttacgtcgaaggaagctccacctatcagttatttcaggagcgttttgacacgcgagtggtcagcgacaaaaagaccatcgatatctttgccgccacccgcccgcaggcaaaatggctgaaatgcgaactgggcgaaccgttgtttcgcatcagcaaaatcgcctttgatcagaatgacaaaccggtgcacgtctccgaactcttctgccgcgccaatcgcatcaccttaacgattgataataaaagacattaa

SEQ ID NO: 385 - protein, 265 aa, Shigella flexneri 2a str. 301
MLLLAGKRPYNPSNSFFISGSIMSATDRYSHQLLYATVRQRLLDDIAQGVYQAGQQIPTENELCTQYNVSRITIRKAISDLVADGVLIRWQGKGTFVQSQKVENALLTVSGFTDFGVSQGKSTKEKVIEQERVSAAPFCEKLNIPGNSEVFHLCRVMYLDKEPLFIDSSWIPLSRYPDFDEIYVEGSSTYQLFQERFDTRVVSDKKTIDIFAATRPQAKWLKCELGEPLFRISKIAFDQNDKPVHVSELFCRANRITLTIDNKRH

SEQ ID NO: 386 - DNA, 675 bp, Shigella flexneri 2a str. 301
  CDS (1)..(675): transl_table=11
atgatctacaaaagcattgcggagcggttaagaattcgacttaattccgcggatttcacgctaaacagccttcttcccggtgaaaaaaagctggcggaagagtttgcggtatcgcggatgactatccgtaaagccattgacctgctggtagcgtgggggctggtggtccgccgccacggcagcggcacttacctggtgcgcaaagatgtgctgcatcaaaccgccagcctgaccggactggtggaggtgttaaaacggcagggaaaaacggtcaccagccaggtgctgatttttgaaatcatgcctgcgcctccggccattgccagccagttacggattcaaatcaacgagcagatctacttctcccgtcgcgttcgttttgtggaagggaaaccgctaatgctggaagacagctatatgccggtaaaactgttccgtaacctttcgctgcaacatctggaagggtcgaagtttgaatatattgaacaagagtgcgggattttgattggcggtaattatgaaagcctgatgccggtgctcgccgatagactgctggcgcggcaaatgaaggtagcggaacacacgccactgctgcggatcacctcgttgtcatatagcgagagcggggagtttttgaattattcagtgatgttcagaaatgccagcgaatactag

SEQ ID NO: 387 - protein, 224 aa, Shigella flexneri 2a str. 301
MIYKSIAERLRIRLNSADFTLNSLLPGEKKLAEEFAVSRMTIRKAIDLLVAWGLVVRRHGSGTYLVRKDVLHQTASLTGLVEVLKRQGKTVTSQVLIFEIMPAPPAIASQLRIQINEQIYFSRRVRFVEGKPLMLEDSYMPVKLFRNLSLQHLEGSKFEYIEQECGILIGGNYESLMPVLADRLLARQMKVAEHTPLLRITSLSYSESGEFLNYSVMFRNASEY

SEQ ID NO: 388 - DNA, 699 bp, Streptococcus mutans UA159
  CDS (1)..(699): transl_table=11
atgttaccggcttatattcgcattcatgatcaaatcaaaaaagaaatcgatgaaggtctttggaaaatcggcgatcgtcttcctagcgaacgtgatttggcagaacgatttgaagttagccgaatgacgcttcgacaggctataacactccttgttgaagaagggattttagagcgtcgagtgggaagcggtacttacatcgctagcagtcgtgttcaagaaaaaatgcgtgggacaactagttttacagaaattgtaaaatcacaaggcaaaacaccttcgaccaaattaatttcttaccggcgggttcatccaagcgaacaagaaataaaatttttagatattaaacctaaatcttatattatccgaatggagcgagttcgctatgcagatgatattcctgttgtttttgaagtgacagctattcctgaaaagattattaagagtttcaaaaaggaagctattaccaagcatttctttaaaacgttgacagatcatggttttgttatcggaaaaagtcagcaaaccatttctgccagtaatgctaatgagatgacggctgattatttggcgatctcgcgtggacatgcagtactaaccttggctcaagtttcctattttgaaaatggtatgccttttgaatatgtccgcagccaatatgtcggtgagcgttttgagttttatttagaaaataagtaa

SEQ ID NO: 389 - protein, 232 aa, Streptococcus mutans UA159
MLPAYIRIHDQIKKEIDEGLWKIGDRLPSERDLAERFEVSRMTLRQAITLLVEEGILERRVGSGTYIASSRVQEKMRGTTSFTEIVKSQGKTPSTKLISYRRVHPSEQEIKFLDIKPKSYIIRMERVRYADDIPVVFEVTAIPEKIIKSFKKEAITKHFFKTLTDHGFVIGKSQQTISASNANEMTADYLAISRGHAVLTLAQVSYFENGMPFEYVRSQYVGERFEFYLENK

SEQ ID NO: 390 - DNA, 714 bp, Streptococcus mutans UA159
  CDS (1)..(714): transl_table=11
atgaaaaaatatgaaattatttttaaaaaactagaagaagatattctcaaaggacactatcaaatgggtgactatcttccccctgaaatggaacttagccagacctatgccagcagccgagatactgttagaaaggctttacagctcttgactaaggcaggttttattaaaacagtacagggaaggggatcccaaattatcaagcgtgagcgcattaactttcctgtttctcaactaaccagctatcaagaattggttaaacaattgcagatgaatgtcaagacaaatgttattgctattgataaactgattgttgatgagaaactcaccaaactaaccggttttgaaaataaaggtcttgtctggcgcatcacaagacagcgcgtcatagacggcgttgcttccattttagatacggattatttggataaagcattgattcctcatatgaccagagaaatcgctgaacattctatctatgattatcttgaaaatcaacttaagctggacattgcctatgctcaaaagattattaccatagatcaagtatcgcaaaaagataaaattttgcttgatttggattctgaaaatcatgtcgtttcggttaaatctaaagtttatctcagtaatcagcagcaatttcaattcactgaaagccggcacaaactggaaaagttccgttttgttgactttgccagacggcatcgtgattaa

SEQ ID NO: 391 - protein, 237 aa, Streptococcus mutans UA159
MKKYEIIFKKLEEDILKGHYQMGDYLPPEMELSQTYASSRDTVRKALQLLTKAGFIKTVQGRGSQIIKRERINFPVSQLTSYQELVKQLQMNVKTNVIAIDKLIVDEKLTKLTGFENKGLVWRITRQRVIDGVASILDTDYLDKALIPHMTREIAEHSIYDYLENQLKLDIAYAQKIITIDQVSQKDKILLDLDSENHVVSVKSKVYLSNQQQFQFTESRHKLEKFRFVDFARRHRD

SEQ ID NO: 392 - DNA, 798 bp, Corynebacterium efficiens YS-314
  CDS (1)..(798): transl_table=11
atgaccagatgcgctagagttgtggatatgtctgctgctgagcgcacggaagatggcgccaccctgccccaccgggttctgactgatgggcccaaaccaaaacaccagcagctgcgtgagatcctcgaggagctgtgcaccacccagttgcaaccgggtgacatgctgcccggggaacgcgtgttggaggacacctacggtgtcagccgcatcaccgtgcgtcgtgccatcggggatctggtggcgtccggtcgcctcaaacgtgcccgtggcaagggcaccttcgtggcacatgcgccactggtctcccggttgcatctggcgtccttctcggcggagatggccgcccagaacctggtggccaccagccgcatcctgtcgtcgtcacgtggcgcggcaccggatgagatcgcggagttcttcggcaccgagcgcggcgcccagcacatcaccctgcgccggctgcgtctgggtaatggccgcccctatgccatcgaccacggatggtataacgccgtatatgcccctgacctgctagaaaatgatgtctacaactccgtctacgccatcctggaccgcgtgtacaacgtgcccgtgacccacgcggagcagacggtcaccgccgtcgcggcggacgaggacaccgccaagcttctcgacgtcccgaccggcgccccactgctgcggatcctgcggcagtccatgtcgggggagaaacccatcgaatggtgtgtctcggtgtaccggacagatcgttactccctgaaaactatggtcacccgttccgaagatctctga

SEQ ID NO: 393 - protein, 265 aa, Corynebacterium efficiens YS-314
MTRCARVVDMSAAERTEDGATLPHRVLTDGPKPKHQQLREILEELCTTQLQPGDMLPGERVLEDTYGVSRITVRRAIGDLVASGRLKRARGKGTFVAHAPLVSRLHLASFSAEMAAQNLVATSRILSSSRGAAPDEIAEFFGTERGAQHITLRRLRLGNGRPYAIDHGWYNAVYAPDLLENDVYNSVYAILDRVYNVPVTHAEQTVTAVAADEDTAKLLDVPTGAPLLRILRQSMSGEKPIEWCVSVYRTDRYSLKTMVTRSEDL

SEQ ID NO: 394 - DNA, 750 bp, Pseudomonas putida KT2440
  CDS (1)..(750): transl_table=11
atggccgaactgctccccctgtccccggtaccgctctatacccagctcaaggaactgctacgcgagcgcatcctcgacggtacttatccatcacatagccgcatgccctcggaaagcgaactgggcaaggccttcgacgtcagccgcatcaccgtgcgccaggcgctgggcgacctgcaaaaggaagggctgatcttcaagatccacggcaaaggcacgttcgttgccaagcccaaggcgttccagaacgtcagtaccttgcagggcttgggcgagtcgatgacgcagatgggttacgaagtgatcaaccgcctgcgcagctttcgccatgtgccggccaacgcattggttgccgcccggctgcaggtcgaggagggtagcttggtcaccgagatccgccgggtgcgcctgatcaaccgcgagccggtgtcgctggaactgacgtggctgcccaaggccgtcggcgaaaaactggagaaggccgatctggtcacccgtgacatcttcctgctgttggaaaacgactgcggcatcgctcttggccacgccgacctggccatcgatgcggtattggccgacagcgacctgacccaggccctggatgttgaagaaggctcgccgatcatgcgcatcgagcgcctgacccatgctgccgacggcacgccgctggacttcgaacacctttactaccgcggcgatgccttccagtaccgcctgcgcattgatcgtcagaaagggggcaaggcatga

SEQ ID NO: 395 - protein, 249 aa, Pseudomonas putida KT2440
MAELLPLSPVPLYTQLKELLRERILDGTYPSHSRMPSESELGKAFDVSRITVRQALGDLQKEGLIFKIHGKGTFVAKPKAFQNVSTLQGLGESMTQMGYEVINRLRSFRHVPANALVAARLQVEEGSLVTEIRRVRLINREPVSLELTWLPKAVGEKLEKADLVTRDIFLLLENDCGIALGHADLAIDAVLADSDLTQALDVEEGSPIMRIERLTHAADGTPLDFEHLYYRGDAFQYRLRIDRQKGGKA

SEQ ID NO: 396 - DNA, 927 bp, Pseudomonas putida KT2440
  CDS (1)..(927): transl_table=11
atggcggcgagcattgccacgtccttgttgtgcgggtttgccgagcacaagcataagccacatgcggtcctcccgacacaaggctgtttcgcctaccaaagggcgacaggcggaggattgacagcctgtcaggctcagggaatactctcgaaaaattcatatatatgtttatataacaagacgagagcgagacccatgcacccattgaccggtgatgctcgactgccccgctaccaacaactgcgcgatcacatggttgcgcaaattgccaacaaccgctggcgcccgggggaagcgatcccgaccgaggcagccttggccaccgagttcgacctgtcgatcggtaccgtgcgcaaggccgtcgatgtcctggtggccgaaggcgtgctggagcgccagcagggccgcggcaccttcattcgccgcccacagttccagtcgtcgctgttccgcttcttccgtttcgaggccgccaatggcgagcgcatagtgccggaaagccgcattctctccatcgagtcgctgccggcgccttccgcggtggccgaggcattgggcctggcaggggaggcagaagtgatccgcatcattcgcacacgtctgctcggcgcccagccggtgctggccgaagaaatctggctgccgcgccaaaccttccagccgctgctggacgtggatctgaacagcgagggcccgctgctgtacccgatctacgaagcgctgtgcggtcaggtggtcgcctacgccgaagaaaccctgaccgccgaagcggtcgacgcggtgcatggccgcttgctgcaactgccggccgacagcccggtggtcgtgatcgagcgcctggcccgcgattacgccggcaaacctctggaatggcgccgctcgcgcggccatgcgcagcacttccgctaccgcatcgacattcgttaa

SEQ ID NO: 397 - protein, 308 aa, Pseudomonas putida KT2440
MAASIATSLLCGFAEHKHKPHAVLPTQGCFAYQRATGGGLTACQAQGILSKNSYICLYNKTRARPMHPLTGDARLPRYQQLRDHMVAQIANNRWRPGEAIPTEAALATEFDLSIGTVRKAVDVLVAEGVLERQQGRGTFIRRPQFQSSLFRFFRFEAANGERIVPESRILSIESLPAPSAVAEALGLAGEAEVIRIIRTRLLGAQPVLAEEIWLPRQTFQPLLDVDLNSEGPLLYPIYEALCGQVVAYAEETLTAEAVDAVHGRLLQLPADSPVVVIERLARDYAGKPLEWRRSRGHAQHFRYRIDIR

SEQ ID NO: 398 - DNA, 699 bp, Escherichia coli CFT073
  CDS (1)..(699): transl_table=11
gtgatttttcaaaagattgcccgcttacttaaatccgagatcaatggcaattcatggcatgttggtgatttgttgccgtcagaagcggaactcgctgttcgttataatgtttcgcgtaataccctgcgtaaggcattatccctgctggaaggcgaaggaattattcacagaaagcatggttcaggaacatacattcaaaaaaagaattttgttgcacacattgatcacatgaacagtttcagtgaaattgcacataaaagcggcaaagaggcaggaagtcagattatgaaatttgaagtgcaggatgcttctcctactattgcgactgagctgaatttagtgactggtgagcaggtttattacataaagagactgcgattcattgaggataatgcagcacaattagaagaaacgtggatgtcagtggcacgttttcctgatttaaccgtatcgcatatgcaaaaatccaaattttcgtatattgagaacgaatgcgggatcaaaatcattggcacctttgaaactttctccccgacttttcctacccctgaaatcgccagtattttacggatcagcccacgggatcccatacttaaaattcagacccaggctgtggatagtaactctattccgctggattattcgttactttacagcaatattttcgagttccaggtaaagtactttttcccgcgataa

SEQ ID NO: 399 - protein, 232 aa, Escherichia coli CFT073
MIFQKIARLLKSEINGNSWHVGDLLPSEAELAVRYNVSRNTLRKALSLLEGEGIIHRKHGSGTYIQKKNFVAHIDHMNSFSEIAHKSGKEAGSQIMKFEVQDASPTIATELNLVTGEQVYYIKRLRFIEDNAAQLEETWMSVARFPDLTVSHMQKSKFSYIENECGIKIIGTFETFSPTFPTPEIASILRISPRDPILKIQTQAVDSNSIPLDYSLLYSNIFEFQVKYFFPR

SEQ ID NO: 400 - DNA, 756 bp, Escherichia coli CFT073
  CDS (1)..(756): transl_table=11
gtgcgcgccatgaaatcattaagtaagtcgtcacaaataccgctctatcaacaagtggtggagtggataagagaaagtatttataccggggatctggtggaagacgatcgcattccttcggaataccagattatggatatgctggaagtgagccggggaaccgttaaaaaagcggtcgcccaactggtaaaagaaggcgtgttgatacaggtccaggggaagggaacatttgtcaaaaaagagaacgtggcatatccgttaggtgaaggattattgtcattcgcggaatcgctggaaagccagaaaatacactttaccactgaagttattacgtcacggattgaaccggctaatcgttatgtggcagagaaattaagaataacgcccggtcaggatattctttaccttgagcgtttacgttcaattggtgatgaaaaagcgatgctgatagagaaccgtatcaatattgagctatgccccggcatcgtggaaatcgattttaatcaacacaatttatttccaacaatagaaagtttgtcgaaaagaaaaattcgttactcggaaagtcgctatgccgcgcgattaattggtaatgaacgcggtcattttttagatatcagtgaagatgcacccgttttgcatctggagcaattagtctttttctcccgagagttacccgttgagtttggcaacgtctggttaaaaggaaataaatattatctgggcaccgtgctgcaacggcgggaattgagttaa

SEQ ID NO: 401 - protein, 251 aa, Escherichia coli CFT073
MRAMKSLSKSSQIPLYQQVVEWIRESIYTGDLVEDDRIPSEYQIMDMLEVSRGTVKKAVAQLVKEGVLIQVQGKGTFVKKENVAYPLGEGLLSFAESLESQKIHFTTEVITSRIEPANRYVAEKLRITPGQDILYLERLRSIGDEKAMLIENRINIELCPGIVEIDFNQHNLFPTIESLSKRKIRYSESRYAARLIGNERGHFLDISEDAPVLHLEQLVFFSRELPVEFGNVWLKGNKYYLGTVLQRRELS

SEQ ID NO: 402 - DNA, 732 bp, Bradyrhizobium japonicum USDA 110
  CDS (1)..(732): transl_table=11
atgaattcagcgccgctcgacgaccgcctgccacgctaccagcgcctgcgcgacgacctcgccgcgcggatcaaccgcaatgaatggcggccgggcgagccgatcccgtcggaagccgagttggctgcgcattacggcgttgccatcggcaccgtgcgcaaggcgatcgaccagctcgtcgcggatgccgtgctggagcgccagcagggccgcggcaccttcgtgcgccgcgcgcgcttcaactcctcgctgttccgcttctttcgcttccagtcggagagcggcgagcggcgcgtgccgaagagccgcatcatcaggcgcaagagcgtgccggcgacatcggcggtcgcatccgcactccgcatcccggtcggcgagcccgtgatcagcctgtcgcgcctgcgcctgattgacgacgtcccgctgctcgccgaagagatctggctgcagcaatcgcgctttgcgccgatcctcgacatcgacacagccgagttcggcgacctcctgtatccgctctacgaggagcgctgcggcgaggtcgtggtctccgccgaggaaatcctgacggtcgagaccgccaacgagatgcaggcacgcctgctgcggctcgaggcgcatgcgcctctgattgtcatcgagcgtctcgcgctcgacctcgaacggcggccgatcgaatggcgccgttcgcgcgggccggccaaccgcttccgctaccacgccgagatcaggtga

SEQ ID NO: 403 - protein, 243 aa, Bradyrhizobium japonicum USDA 110
MNSAPLDDRLPRYQRLRDDLAARINRNEWRPGEPIPSEAELAAHYGVAIGTVRKAIDQLVADAVLERQQGRGTFVRRARFNSSLFRFFRFQSESGERRVPKSRIIRRKSVPATSAVASALRIPVGEPVISLSRLRLIDDVPLLAEEIWLQQSRFAPILDIDTAEFGDLLYPLYEERCGEVVVSAEEILTVETANEMQARLLRLEAHAPLIVIERLALDLERRPIEWRRSRGPANRFRYHAEIR

SEQ ID NO: 404 - DNA, 753 bp, Lactobacillus plantarum WCFS1
  CDS (1)..(753): transl_table=11
ttgacaagaccaaatgatgaaggggatgtgagtagtttggcttataagtatgaaacgattgcggatagtctgcgacaagacataaaatccggtaaatatacgccgggcgaattgatgcccgaccagaataaattagctgaaacttttgatacgacacgaattacgattcacaaggccattcaattactgattattgaagggatggtttactccaagcgtggcgcggggacctttgttcgcaaggactttggtttgactgaacggcgccaagaaacgctggtagacaagcccctgggaacaacgcaaacgaatgccggtaaaaaggtgacgagtaaggtgttggaattacaagctcgcttgcctactaagcgggaagcggaacagttgttaatcgatgagatggatccggtgtacgttattcggcggacccgctacgttgatggtaaggtgtgggcgtatgagcatacgattatgccaacgagtatcgtgacgttgacgaagcaagtcctcgaaggctcggtctacggttacttagagcaacatagtggcaagaaaatcgcgggttcacaccgtattatctcggcagcccgagtgacggctgatgacgttgccgcaatgggcgcgactctgaatgatcccgtgttggtcattaatcagattagttacatggatgatggtcaaccctttgaagtctccgaatcacatttcccatacgagacaagtacggtcgtagcggatgttcaaattcattaa

SEQ ID NO: 405 - protein, 250 aa, Lactobacillus plantarum WCFS1
MTRPNDEGDVSSLAYKYETIADSLRQDIKSGKYTPGELMPDQNKLAETFDTTRITIHKAIQLLIIEGMVYSKRGAGTFVRKDFGLTERRQETLVDKPLGTTQTNAGKKVTSKVLELQARLPTKREAEQLLIDEMDPVYVIRRTRYVDGKVWAYEHTIMPTSIVTLTKQVLEGSVYGYLEQHSGKKIAGSHRIISAARVTADDVAAMGATLNDPVLVINQISYMDDGQPFEVSESHFPYETSTVVADVQIH

SEQ ID NO: 406 - DNA, 711 bp, Lactobacillus plantarum WCFS1
  CDS (1)..(711): transl_table=11
atgagtaccatgagttcgccaatttatattcaaatccacaaccaaattaagcaggcgattgaagcaggtcggtgggccgttggtgaccggattccgtctgaacgggagctggctacacagttcgatgttagtcggatgacccttcgacaagcaatccagacattggttgacgaaggaatattagagcggcgagtcggtgccggcacgtttgtcgcgaatcagaaggtccaagaaaaaatgtccggtgtcaccagttttactgatctaatgctggcccagggtaaggtcccatcaagtaagacgatttcatatcacgtgacgagcccgtcgctatctgagagcgaaaagttggcgttaggcgccaacgaacaagttctacggatggaacgaattcgctatggtgatgatgtgccaatttgttttgaggtcgcaacagttccagaacgactcgtcaagcagttcaccaaggacgaaattacgagttcgttgtatcggacgttagaagagaaggcaagtttagtgcctggtaaggctcaacagacggtttcggcgatgtctgcttctgagcgtatcgcggaatacttgtcagtccggcgtggcgatgcgttgctacggttacggcagatttcgtatttgcaaaccggcgaaccgtttgaatacgtgcggacccagtacgttggtaaccggtttgagttttatcttgaaaaataa

SEQ ID NO: 407 - protein, 236 aa, Lactobacillus plantarum WCFS1
MSTMSSPIYIQIHNQIKQAIEAGRWAVGDRIPSERELATQFDVSRMTLRQAIQTLVDEGILERRVGAGTFVANQKVQEKMSGVTSFTDLMLAQGKVPSSKTISYHVTSPSLSESEKLALGANEQVLRMERIRYGDDVPICFEVATVPERLVKQFTKDEITSSLYRTLEEKASLVPGKAQQTVSAMSASERIAEYLSVRRGDALLRLRQISYLQTGEPFEYVRTQYVGNRFEFYLEK

SEQ ID NO: 408 - DNA, 726 bp, Lactobacillus plantarum WCFS1
  CDS (1)..(726): transl_table=11
atggctgacctagtttatcaacaagtcatcaatgatctcaataaacggatcatggcgaatgaatttgttgataagaagcttccagatgaacgtagtcttagcgaacagtatcaggtaagtcgtagctcgattaagcgcgcgcttaacgtgctagccaataagggcctgattttcaagaagcggggttcgggaacgttcattaatccattatatcttaaaaatcaatcttcgtttaagtatgaaggaactaacctaggaattacggacagtttaaatactgagggtgctaagcccagtattcaattattagactttcgcgtcattcctgcaagtcaagagttgcaacaagacttatttttaactgctgacgagtttgtttatgaaatcaaacggctgcgattactggatgaccagcctttcatgattgaaagtggctatattccaatcaagcttgtgccccagttgaaccggcaagtggtcagtggctcgatctttaattacgtgcaaaagaccttgcacgccgcagtgaccaaatcattcttatcgattgcggccgatgcgtccaatacgactgatcaagagttgttacatttgcagccaaatgaaccggtgggcctgatgagtgggattttcttcttagatgatgggacaccctttgaagtgtctaatatgcgactacattatcaatatatgaagtatacaacgtttgtgtcaacgaatagttag

SEQ ID NO: 409 - protein, 241 aa, Lactobacillus plantarum WCFS1
MADLVYQQVINDLNKRIMANEFVDKKLPDERSLSEQYQVSRSSIKRALNVLANKGLIFKKRGSGTFINPLYLKNQSSFKYEGTNLGITDSLNTEGAKPSIQLLDFRVIPASQELQQDLFLTADEFVYEIKRLRLLDDQPFMIESGYIPIKLVPQLNRQVVSGSIFNYVQKTLHAAVTKSFLSIAADASNTTDQELLHLQPNEPVGLMSGIFFLDDGTPFEVSNMRLHYQYMKYTTFVSTNS

SEQ ID NO: 410 - DNA, 726 bp, Salmonella enterica subsp. enterica serovar Typhi Ty2
  CDS (1)..(726): transl_table=11
atgtattcatcccgctcccgttctgcgcctgcgcctttttacgaaacggtgaaacaggacatctgtaaaaaaatagccggcggcgtctggcagccgcacgatcgcattccgtcggaagctgaactggtcgctcagtatggctttagccgaatgaccatcaaccgggcgctgcgtgagctgacggatgaagggtggctggtgcgtttacagggcgtggggacgtttgtcgccgaaccgaaaggccagtccgcactgtttgaagtccgcagtatcgccgaggagattgccgcccgccatcatcagcatcgttgtgaggtgctcacgctggagcgtgtgcgggcaaacgccatccaggccagcgctctcaacgtcaatgagagtgatgtcattttccattccatcatggtgcattatgaaaacgatctgccggtacaaattgaagatcgctgcgtgaatgcggatattgccgtggattacctgacgcaggattaccgtcagaccacgccgcacgcttatttgtcgcggatcgcgccgctaacggaaggggaacatattgtggaggcggtgcgcgccacggcgcaagagtgcgcgtggttaactatcaaagagcatgagccttgtctgctcattcgtcgtacaacctggtccgcgtcgcggattgtttctcacgcccgcttacttttccccgggtcgcgctaccggctacagggacgatttatctcctga

SEQ ID NO: 411 - protein, 241 aa, Salmonella enterica subsp. enterica serovar Typhi Ty2
MYSSRSRSAPAPFYETVKQDICKKIAGGVWQPHDRIPSEAELVAQYGFSRMTINRALRELTDEGWLVRLQGVGTFVAEPKGQSALFEVRSIAEEIAARHHQHRCEVLTLERVRANAIQASALNVNESDVIFHSIMVHYENDLPVQIEDRCVNADIAVDYLTQDYRQTTPHAYLSRIAPLTEGEHIVEAVRATAQECAWLTIKEHEPCLLIRRTTWSASRIVSHARLLFPGSRYRLQGRFIS

SEQ ID NO: 412 - DNA, 765 bp, Enterococcus faecalis V583
  CDS (1)..(765): transl_table=11
atgacagaaaatgcacccaaatttaagcaaatttctgcagaaattgaaaagaagattcgagacggtctgtatgtaagtgcacaaaaattaccttcagaatatgatttagctaaagaatataactgcagtcgcttgaccatccgtaaagcgattgatgatttgatccgcaaaaatattttggtaaaacgacatggtaaaggtagttatgtgatgtcgcaagcgaaaattcaaagtggtcgcgctggcttacaaggttttactgaggcagccaaagcttacgggaaaaaaagccagacagaagtcatttcctttgaagaagtagtacatcccgctgagaaaattcgggaggcgctccaagtaggcaaaaatgaggcaatttatgaactgattcgccgccgaatgttagacggcgaaccaatgacagttgaaaaaatttatttgccacaggcatacgtacaaggccatacgaagcaagacttcgagggctctcttttctgcttaatcgagaagaacgtcgagattgcttattcgcatcaagaaattgaagcaatcttagttgaagcggaaatttcagaattattgaatgttcctgtgggccaaccacttttacaagtccactctatcacctatgcgcttgatgcaactcctattttatatgatgtctctttatatcgagcagatcggtacacgtttaaaaacacactgacccgctatagcccgtctgaaaacaaccaagtggagctaggaggttcttggaacgaatga

SEQ ID NO: 413 - protein, 254 aa, Enterococcus faecalis V583
MTENAPKFKQISAEIEKKIRDGLYVSAQKLPSEYDLAKEYNCSRLTIRKAIDDLIRKNILVKRHGKGSYVMSQAKIQSGRAGLQGFTEAAKAYGKKSQTEVISFEEVVHPAEKIREALQVGKNEAIYELIRRRMLDGEPMTVEKIYLPQAYVQGHTKQDFEGSLFCLIEKNVEIAYSHQEIEAILVEAEISELLNVPVGQPLLQVHSITYALDATPILYDVSLYRADRYTFKNTLTRYSPSENNQVELGGSWNE

SEQ ID NO: 414 - DNA, 714 bp, Enterococcus faecalis V583
  CDS (1)..(714): transl_table=11
atgcggacaaatacacgttataaagaaatttatgcagctataaaacaggatattgaagcaggtgtttatccaattaaccaaaagttaccccaaggtcgtcttcttgcagaaaaatatcaggtcagcgaactaaccattacaaaagccttacatttgcttgtgcaagaaggttatgttgtcagacgacgtggctcgggcagctttgttcaagactttcaaaatcgaaccattactaaattttctccgttaaccggcacttactcaacctacgatggaaaagttgaatccgtggttttaggctttgcaacagaagtacctgagccttgggtgactgaaaaattaagtattacagaagaagagttagtctacaaaattattcgcttacggattatcgaagatgtgccctcaattattgaatacacttggatgcccgttgctttaattccgaacttgacaatgaaagaattgaaagtctccatttatcaatatatttcggaacaattgcatcaaaaaattcaaagtgcgcgggtcagcatttctgggattcgtccttctccgttggaaaaaaaatatttaaacttaaccgataatgatttcctgatgcgtgcagaacaaattgcttacctaggcaatgggcatatttttgaatactcaattgcgaatcatattcctagtgaattcacttttgaaactgtcttaattgcagaaaaatag

SEQ ID NO: 415 - protein, 237 aa, Enterococcus faecalis V583
MRTNTRYKEIYAAIKQDIEAGVYPINQKLPQGRLLAEKYQVSELTITKALHLLVQEGYVVRRRGSGSFVQDFQNRTITKFSPLTGTYSTYDGKVESVVLGFATEVPEPWVTEKLSITEEELVYKIIRLRIIEDVPSIIEYTWMPVALIPNLTMKELKVSIYQYISEQLHQKIQSARVSISGIRPSPLEKKYLNLTDNDFLMRAEQIAYLGNGHIFEYSIANHIPSEFTFETVLIAEK

SEQ ID NO: 416 - DNA, 708 bp, Enterococcus faecalis V583
  CDS (1)..(708): transl_table=11
atggttcaaaatataccaatttatattcaaattcacgataaaatcaaagaagatattgaaaaaggtgtctggagtatcggggatcgtttgccctctgagcgagaattagccttgaaatttgatgttagtcgaatgaccttacgccaagccatccagactttagcagacgaagggattttagaacgaaaaattggttcaggaacgtatgtagcacgtaagaaagttcaagaaacaatgacaggtaccactagttttacagaaattaccttgtctcaaaatcgcgttccttctagtcggacggtgtcttattttgtagcgaaacctagttctagtgagatggaaaaattacaactaggtccagaagattcaattttacgaatggaaagaattcgttttgcggatgacattccgatttgttttgaggtggcgagcattccttattcattggtctcgcaatatggcaaatctgaaatcacgaactctttttataaaacacttgaagccaaatctggccacaaaattggccattctaaccaaacaatctctgctgttcaagcatcggaacagatcgcagaatatttagagattaaacgaggcgatgcgattctgcgtgtgcgccaagtatcctattttgaaaacggactaccttttgaatatgttcgtacgcagtatgcaggaagtcgatttgagttttatttagagaagtag

SEQ ID NO: 417 - protein, 235 aa, Enterococcus faecalis V583
MVQNIPIYIQIHDKIKEDIEKGVWSIGDRLPSERELALKFDVSRMTLRQAIQTLADEGILERKIGSGTYVARKKVQETMTGTTSFTEITLSQNRVPSSRTVSYFVAKPSSSEMEKLQLGPEDSILRMERIRFADDIPICFEVASIPYSLVSQYGKSEITNSFYKTLEAKSGHKIGHSNQTISAVQASEQIAEYLEIKRGDAILRVRQVSYFENGLPFEYVRTQYAGSRFEFYLEK

SEQ ID NO: 418 - DNA, 732 bp, Enterococcus faecalis V583
  CDS (1)..(732): transl_table=11
atggaaaatgcctttaaaaacaaagctttgtatcatcaacttgttgatttgctgcaggaacgaatcgaaacatgcatgattcctcatgacaagttgccctctgaacgtgaattgactgcacaatatggagtgagtcggacgacggtccggttagcgctacaagaactagaaaatagaggttccatctatcgtcgtcatggcaaaggaacatttgtttcagatataaaaaaagaggccgctgatttagctggcgcatatagttttacagaacaaatgaaagggctgggtcgaaaaccacatacccgtatattatccttcgaaaaattggaagcggataaatttatttgtcagcatttgaatctttcgttaggagaggcagtttttaaattaagtcggttgcggattgctgataacgagccattaatggttgaagacacatacttgcctgtgaaatttttcttatcactcacggatcaattactacgtagcaaaccattatatgatctattttcggaagattttaagcaaaccgttcgtttagctgatgaagaattatacgctagcattgcgtcaaaagaagatgccaaattattgatgattccggaaggagcgccagtccttcatttagcacgccagacatataacatgaaaaatgaaattattgaatttacgttgagtgtggcgcgagcagatcaatttcattatcagatacgccatattcggaatagttag

SEQ ID NO: 419 - protein, 243 aa, Enterococcus faecalis V583
MENAFKNKALYHQLVDLLQERIETCMIPHDKLPSERELTAQYGVSRTTVRLALQELENRGSIYRRHGKGTFVSDIKKEAADLAGAYSFTEQMKGLGRKPHTRILSFEKLEADKFICQHLNLSLGEAVFKLSRLRIADNEPLMVEDTYLPVKFFLSLTDQLLRSKPLYDLFSEDFKQTVRLADEELYASIASKEDAKLLMIPEGAPVLHLARQTYNMKNEIIEFTLSVARADQFHYQIRHIRNS

SEQ ID NO: 420 - DNA, 714 bp, Enterococcus faecalis V583
  CDS (1)..(714): transl_table=11
atgaacaagtttcatgacatatttttagaattagaacaacaaattgtccaaggcgactatcagccaggcgatttattacctagtgaaaatcaattagtggaaacttacaatgtttcccgtgaaacaattcggaaagccttgaatttactgattaacgctggctacattcagaaaaaacaaggcaaaggctcgattgtgctcaactttaaaaagtttaattttcctatttcaggggtgaccagttacaaggagttacaacaaacgcaacatattgaaagtcatactcatgtggtttccttagaagaaattcctgtggagcgcaacttggctcagttgactggttggacggaaggggcccctgtgtggcgcttagttcggcaacgggagattgaaggggaagtcgatattttagatattgattacttgattaaagagattgtcccagaactgccgaagcaccgtgccgaagattcgattttcgattatctggaaaacgaccttggcttggcgattagttatgcccagaaagaaattaccgtggaaccgctcacagagatggacaagcagctgattggtgaagtcgaaggcaatcatgtcgtcgtggttcgtagtatcatgaacttggaagatacccgttgttttggctatacggaatcccgtcaccgcttaaacaaatttaagtttgtggaattcgcccgtcgccgtaaattgtaa

SEQ ID NO: 421 - protein, 237 aa, Enterococcus faecalis V583
MNKFHDIFLELEQQIVQGDYQPGDLLPSENQLVETYNVSRETIRKALNLLINAGYIQKKQGKGSIVLNFKKFNFPISGVTSYKELQQTQHIESHTHVVSLEEIPVERNLAQLTGWTEGAPVWRLVRQREIEGEVDILDIDYLIKEIVPELPKHRAEDSIFDYLENDLGLAISYAQKEITVEPLTEMDKQLIGEVEGNHVVVVRSIMNLEDTRCFGYTESRHRLNKFKFVEFARRRKL

SEQ ID NO: 422 - DNA, 765 bp, Streptomyces avermitilis MA-4680
  CDS (1)..(765): transl_table=11
atgagcaccgacgtcagcagtgcggagaacgagggcggggcacccatccgtaccgcgcgtgtgcccaagtactaccgcctgaagaagcacctgctcgacatgacggagacgctgccgcccggcacacccgtgccgcccgagcgcacgctggccgccgagttcgacacctcccgcacgaccgtccgccaggccctccaggagctggtcgtcgagggccgcctggagcgcatccagggcaagggcacgttcgtcgccaagccgaaggtctcccaggcgctgcaactcacctcgtacaccgaggacatgcgcgcccagggtctcgaaccgacctcgcagctcctggacatcggctacatcaccgcggacgacaccctcgccgggctgctcgacatcaccgcgggcggccgcgtgctgcgcatcgagcggctgcgcctggccagcggcgagccgatggccatcgagacgacccatctgtccgccaagcgcttccccgcgctgcgcaggtcgctggtcaagtacacgtcgctctacaccgcgctcgccgaggtctacgacgtccgtctcgccgaggccgaggagaccatcgagacctcgctggccaccccgcgcgaggccggactgctgggcaccgacgtcggcctgcccatgctgatgctctcgcggcactcgctggacaaggacggccggccggtggagtgggtgcggtcggtgtaccgcggggaccgctacaagttcgtggcgagactcaagcgcccccaggactga

SEQ ID NO: 423 - protein, 254 aa, Streptomyces avermitilis MA-4680
MSTDVSSAENEGGAPIRTARVPKYYRLKKHLLDMTETLPPGTPVPPERTLAAEFDTSRTTVRQALQELVVEGRLERIQGKGTFVAKPKVSQALQLTSYTEDMRAQGLEPTSQLLDIGYITADDTLAGLLDITAGGRVLRIERLRLASGEPMAIETTHLSAKRFPALRRSLVKYTSLYTALAEVYDVRLAEAEETIETSLATPREAGLLGTDVGLPMLMLSRHSLDKDGRPVEWVRSVYRGDRYKFVARLKRPQD

SEQ ID NO: 424 - DNA, 711 bp, Bacillus cereus ATCC 14579
  CDS (1)..(711): transl_table=11
atgatgagtaagtatgaacaaatttatacagaaatcagtaaatctattgataataaacaattaaaagagggatgcaaaatcccatcagaaacagaattaatgaagcagtatgaggcaagccgaggcacggtaagaaaagctgtagatttactgcaagagcgtggatatgtgcaaaaaattcatggaaaaggtgtttttgttttaaagcgaaaaaatattgaatttaattttggcggtattgtaagtttccaagaagaaaatgaacgtttaggacgtcattgtattacggaagttgtggaaatggacaaagaaaaagccacaaaagacattgcgaaattattaaatgtaaaagaaaaaacagagattgaccatattaaacgtgtacgaaatattgatggagaaaaagtaattttagatataaatcattttgtatctgagtttattccaggattaacgaaagaaattgcaactgcatcgatttataaatacatcgagaaagagcttgggctacatattagttattcgcagagggtaatagaagtacagccatgtacagaggatgacagaaagtatttagatttaaatggaacagactatgttgtcgttgtgaaaaactttacacatttgtatgatggaagtcagtttgaatatacagaatcacgccaccgtttagatatttttcacttttcggatgtggcacgcaggaagtaa

SEQ ID NO: 425 - protein, 236 aa, Bacillus cereus ATCC 14579
MMSKYEQIYTEISKSIDNKQLKEGCKIPSETELMKQYEASRGTVRKAVDLLQERGYVQKIHGKGVFVLKRKNIEFNFGGIVSFQEENERLGRHCITEVVEMDKEKATKDIAKLLNVKEKTEIDHIKRVRNIDGEKVILDINHFVSEFIPGLTKEIATASIYKYIEKELGLHISYSQRVIEVQPCTEDDRKYLDLNGTDYVVVVKNFTHLYDGSQFEYTESRHRLDIFHFSDVARRK

SEQ ID NO: 426 - DNA, 738 bp, Bacillus cereus ATCC 14579
  CDS (1)..(738): transl_table=11
ttgctgatgaacatcgacaagtattcaccatttccgatctattatcagattcaagagtgggtgaaacagctaattgaggacggcgaatggaagccgggagataaaatcccatctgagaatgaactttgtgataagttcgaagtgagtcgaatgacaatcagacaggcgattaataatttagtggaacaaggctatttatatcggaagcgtggaattggaacatttgtccaacttccgaaagtggaacaaaaattgcaaggaatgacgggattcacagaagacatgatttctcgtgggatgaacccaagtagtcaattacttagtttccgcctagttccagctactgctaaaatagcagaccggttgagaatacaggagggggaatcggtttatgaagtgaggcgtattcgcttagctgatgatgaaccgattgcttttgagacgacatatttgtcgccagctcttgtaaaagatattaacgaagagatattgcaacaatctttatatgaacatttagagaaaaaactgggctttaaacttgttagcgctactcagtcaattgaagcttccgttgcgacggaaaatgaagctgaacatctgcatattcctaaaaaggcgcctgtacttgtaatgcgtcaatggtcatattcagaaggtgagataccgctagagtacgtgaaatgtatttatcgtggagatcgttataaatttattacgaatatcgcacgtaacaaatag

SEQ ID NO: 427 - protein, 245 aa, Bacillus cereus ATCC 14579
MLMNIDKYSPFPIYYQIQEWVKQLIEDGEWKPGDKIPSENELCDKFEVSRMTIRQAINNLVEQGYLYRKRGIGTFVQLPKVEQKLQGMTGFTEDMISRGMNPSSQLLSFRLVPATAKIADRLRIQEGESVYEVRRIRLADDEPIAFETTYLSPALVKDINEEILQQSLYEHLEKKLGFKLVSATQSIEASVATENEAEHLHIPKKAPVLVMRQWSYSEGEIPLEYVKCIYRGDRYKFITNIARNK

SEQ ID NO: 428 - DNA, 711 bp, Bacillus anthracis str. Ames
  CDS (1)..(711): transl_table=11
atgatgagtaagtatgaacaaatttatacagcaatcagcaagtctattgataataaacaattaaaagagggatgcaaaatcccatcagaaactgaattaatgaaacagtatgaagcgagccgtggtactgtaagaaaagcagtggatttattacaagagcgaggatatgttcaaaaaatacacggaaaaggtgtttttgttttaaagcgtaaaaacattgaattcaactttggtggcattgtaagtttccaagaagaaaatgaacgtttagggcgccattgtattacagaagtcgtggaaatagagaaaataaaagcgacaaaagagattgcaaagctattaaatgtgaaagagaaaacagaaatagatcatattaaacgcgtacgaaatattgatggagaaaaagtaattttggatattaatcattttgtatcggaacatatccctggattaacgagtgaaattgcagcggggtccatttataaatacatagagaaagaattaggtcttcatattagttactcacagagggtaattgaggtgcagtcatgtacagaggacgatagaaagtatttagatttaaatggaacagattatgttgtcgttgtgaaaaactttacgcatttttatgatggaagtcagttcgaatatacagaatcacgtcaccgcttagatatttttcatttttcggatgtggcgcggagaaaataa

SEQ ID NO: 429 - protein, 236 aa, Bacillus anthracis str. Ames
MMSKYEQIYTAISKSIDNKQLKEGCKIPSETELMKQYEASRGTVRKAVDLLQERGYVQKIHGKGVFVLKRKNIEFNFGGIVSFQEENERLGRHCITEVVEIEKIKATKEIAKLLNVKEKTEIDHIKRVRNIDGEKVILDINHFVSEHIPGLTSEIAAGSIYKYIEKELGLHISYSQRVIEVQSCTEDDRKYLDLNGTDYVVVVKNFTHFYDGSQFEYTESRHRLDIFHFSDVARRK

SEQ ID NO: 430 - DNA, 738 bp, Bacillus anthracis str. Ames
  CDS (1)..(738): transl_table=11
atggcaagcggatccacacaagtaaaatacctcggcatttatcaaaaaatgaaacagcaaattttagacggcgaatataagattaacgaaaaaattccaagtagccccgtccttgctgaagaatttgatgtttctgtccttactataaaaaaagcgctggatctgttagttagagacggctacatcattcgccggcgcggaagtggaacagtcgttcaagattggcgtcagcaggaaaaagcacgaatgattcaaactttaacaggtacaaaagctgtttatggcagcgaggtagaaagtaaaattattgagtttacgattgtcggtgccgatgaaattattgctgaaaaattgggcatttcagtaggagattttgtatataaaatcatccgcctccgcatcattcacagtattccaacgattatggagcatacatggatgccgatttcggtcattccaggtgttgaagtttctgttttagaggaatcaatctactcccacattcaaaataaactaggccttcaagtgggaacatccgttgttagggtaaaaggaattcgcccggatgataaagaaaagcagtttatgaacttaacaaatcaagatttcctaatgagagtggaacaggtggcctacttaacggatggacgcacttttgaatactcttacgccgatcacttgccggaaacctttgaattcgaaacagttattactgcaaaaagttataaagaggcataa

SEQ ID NO: 431 - protein, 245 aa, Bacillus anthracis str. Ames
MASGSTQVKYLGIYQKMKQQILDGEYKINEKIPSSPVLAEEFDVSVLTIKKALDLLVRDGYIIRRRGSGTVVQDWRQQEKARMIQTLTGTKAVYGSEVESKIIEFTIVGADEIIAEKLGISVGDFVYKIIRLRIIHSIPTIMEHTWMPISVIPGVEVSVLEESIYSHIQNKLGLQVGTSVVRVKGIRPDDKEKQFMNLTNQDFLMRVEQVAYLTDGRTFEYSYADHLPETFEFETVITAKSYKEA

SEQ ID NO: 432 - DNA, 819 bp, Bordetella pertussis Tohama I
  CDS (1)..(819): transl_table=11
atggcggccgggcggataccgaacacacacgactccgacatggcagaagcacggcccgattccctcacgcgttcgcgtgccgcaaaaccggcaggcgagggggccgctttcagtccgctttaccgccagatcaaggaactgctggtccagagcctggaccgcggcgaatggaaacccggcgaactcattcccagcgagatcgacctggcggcccgtttccaggtcagccagggcaccgtgcgcaaggcggtcgacgaactggccgccgagcatctgctgctgcgccgccagggcaagggcacctttgtcgccacccatcacgaagcgcgcgtgcgctatcggttcctgcgcctggcgcccgacgaagagggcgagggcgggcgggccgaaagccgcatcctcgaatgccgccgcctgcgcgcgccggccgagatcgcccgcgccctcgagctgcgggccggcgagaccgtggtgaccatacggcgccagttgtccatgaaccacatgccgacggtcatcgacgatctctggttgcccggcacgcattttcgcgggctcaccctcgaactgctgaccgccagcaaggcgcccctgtatggattgttcgagtccgaattcggggtcagtatggtccgagccgacgaaaaactgcgcgccgtcgccgcctcgcctgaaatcgctccgctcctgggtgtcgagcccggccggcccttgctgcaggtcgatcgcatttcatatacctatggcgatcggcccatggaagtgcgccgcggcttataccttaccgatcattaccactaccgcaatagcctgaattga

SEQ ID NO: 433 - protein, 272 aa, Bordetella pertussis Tohama I
MAAGRIPNTHDSDMAEARPDSLTRSRAAKPAGEGAAFSPLYRQIKELLVQSLDRGEWKPGELIPSEIDLAARFQVSQGTVRKAVDELAAEHLLLRRQGKGTFVATHHEARVRYRFLRLAPDEEGEGGRAESRILECRRLRAPAEIARALELRAGETVVTIRRQLSMNHMPTVIDDLWLPGTHFRGLTLELLTASKAPLYGLFESEFGVSMVRADEKLRAVAASPEIAPLLGVEPGRPLLQVDRISYTYGDRPMEVRRGLYLTDHYHYRNSLN

SEQ ID NO: 434 - DNA, 747 bp, Bordetella parapertussis 12822
  CDS (1)..(747): transl_table=11
atgatgtctgaatcgaaccatgccccgctctatgcccgggtcgaggccgtgctggccgaggcgatcgccgcgggcgaactgccgccgggcagccagttgcccgccgaagacggcctgatcgcgcgcttccaggtcagccgcaccacggtgcgcaaggccatccagaacctggccgagcgtgggctggtcgagatccggcgcggcaagggcaccttcgtggcgcagccgagggtggtgcaggagctcaccgagctcaccggtttcgtggaggacatgcaggccttgggccgcgtgccctcggcgcgcctgctggacgccgagatcgtggccgccggccaggccgtggcgcgccagctggcggtggcgccgggcacgcaggtcatgcgcatccggcgcgtgcgcctggccgatggcgtggccatgtcgctggacgaaacctatctgccgcgcgaaatcggcgaacaggtcgtcacgcacgacctggaggccgagcccatcttcgcgctgctggaacagaaatacgacctgccgctggtcgaggccgaataccggctcgaggccgccatcgccacgcccgaagtggcgcgggccctggcggtgccgcccggcagtccggtcttcctgatcgagcgcacctcgtattgcgcgggccctcggcccatcgactacgaaaagctgtactaccgcggcgacctgatccgcttcgtgacgcggctggcgcggcgcgcgcggcccgtgccggcatga

SEQ ID NO: 435 - protein, 248 aa, Bordetella parapertussis 12822
MMSESNHAPLYARVEAVLAEAIAAGELPPGSQLPAEDGLIARFQVSRTTVRKAIQNLAERGLVEIRRGKGTFVAQPRVVQELTELTGFVEDMQALGRVPSARLLDAEIVAAGQAVARQLAVAPGTQVMRIRRVRLADGVAMSLDETYLPREIGEQVVTHDLEAEPIFALLEQKYDLPLVEAEYRLEAAIATPEVARALAVPPGSPVFLIERTSYCAGPRPIDYEKLYYRGDLIRFVTRLARRARPVPA

SEQ ID NO: 436 - DNA, 858 bp, Bordetella parapertussis 12822
  CDS (1)..(858): transl_table=11
atgtttgcccggacggccatcgcgccgcccttcgccgcgatggcggccgggcggataccgaacacacacgactccgacatggcagaagcacggcccgattccctcacgcgttcgcgtgccgcaaaaccggcaggcgagggggccgctttcagtccgctttaccgccagatcaaggaactgctggttcagagcctggaccgcggcgaatggaaacccggcgaactcattcccagtgagatcgacctggcggcccgtttccaggtcagccagggcaccgtgcgcaaggcagtcgacgaactggccgccgagcatctgctgctgcgccgccagggcaaaggcacctttgtcgccacccatcacgaagcgcgcgtgcgctatcggttcctgcgcctggcgcccgacgaagagggcgagggcgggcgggccgaaagccgcatcctcgaatgccgccgcctgcgcgcgccggccgagatcgcccgcgccctcgagctgcgggccggcgagaccgtggtgaccatacggcgccagctgtccatgaaccacatgccgacggtcatcgacgatctctggttgcccggcacgcattttcgcgggctcaccctcgaactgctgaccgccagcaaggcgcccctgtatggattgttcgagtccgaattcggggtcagtatggtccgagccgacgaaaaactgcgcgccgtcgccgcctcgcctgaaatcgctccgctcctgggtgtcgagcccggccggcccttgctgcaggtcgatcgcatttcatatacctatggcgatcggcccatggaagtgcgccgcggcttataccttaccgatcattaccactaccgcaatagcctgaattga

SEQ ID NO: 437 - protein, 285 aa, Bordetella parapertussis 12822
MFARTAIAPPFAAMAAGRIPNTHDSDMAEARPDSLTRSRAAKPAGEGAAFSPLYRQIKELLVQSLDRGEWKPGELIPSEIDLAARFQVSQGTVRKAVDELAAEHLLLRRQGKGTFVATHHEARVRYRFLRLAPDEEGEGGRAESRILECRRLRAPAEIARALELRAGETVVTIRRQLSMNHMPTVIDDLWLPGTHFRGLTLELLTASKAPLYGLFESEFGVSMVRADEKLRAVAASPEIAPLLGVEPGRPLLQVDRISYTYGDRPMEVRRGLYLTDHYHYRNSLN

SEQ ID NO: 438 - DNA, 747 bp, Bordetella bronchiseptica RB50
  CDS (1)..(747): transl_table=11
atgatgtctaaatcaaaccatgcgccgctctatgcccgggtcgaggccgtgctggccgaggcgatcgccgcgggcgaactgccgccgggcagccagttgcccgccgaagacggcctgatcgcgcgcttccaggtcagccgcaccacggtgcgcaaggccatccagaacctggccgagcgcgggctggtcgagatccggcgcggcaagggcaccttcgtggcgcagccgagggtggtgcaggagctcaccgagctcaccggtttcgtggaggacatgcaggccttgggccgcgtgccctcggcgcgcctgctggacgccgagatcgtggccgccggccaggccgtggcgcgccagctggcggtggcgccgggcacgcaggtcatgcgcatccggcgcgtgcgcctggccgatggcgtggccatgtcgctggacgaaacctatctgccgcgcgaaatcggcgaacaggtcgtcacgcacgacctggaggccgagcccatcttcgcgctgctggaacagaaatacgacctgccgctggtcgaggccgaataccggctcgaggccgccatcgccacgcccgaagtggcgcgggccctggcggtgccgcccggcagcccggtcttcctgatcgagcgcacctcgtattgcgcgggcccccggcccatcgactacgaaaagctgtactaccgcggcgacctgatccgcttcgtgacgcggctggcgcggcgcgcgcggcccgtgccggcatga

SEQ ID NO: 439 - protein, 248 aa, Bordetella bronchiseptica RB50
MMSKSNHAPLYARVEAVLAEAIAAGELPPGSQLPAEDGLIARFQVSRTTVRKAIQNLAERGLVEIRRGKGTFVAQPRVVQELTELTGFVEDMQALGRVPSARLLDAEIVAAGQAVARQLAVAPGTQVMRIRRVRLADGVAMSLDETYLPREIGEQVVTHDLEAEPIFALLEQKYDLPLVEAEYRLEAAIATPEVARALAVPPGSPVFLIERTSYCAGPRPIDYEKLYYRGDLIRFVTRLARRARPVPA

SEQ ID NO: 440 - DNA, 780 bp, Bordetella bronchiseptica RB50
  CDS (1)..(780): transl_table=11
atggcagaagcacggcccgattccctcacgcgttcgcgtgccgcaaaaccggcaggcgagggggccgctttcagtccgctttaccgccagatcaaggaactgctggtccagagcctggaccgcggcgaatggaaacccggcgaactcattcccagcgagatcgacctggcggcccgtttccaggtcagccagggcaccgtgcgcaaggcggtcgacgaactggccgccgagcatctgctgctgcgccgccagggcaaaggcacctttgtcgccacccatcacgaagcgcgcgtgcgctatcggttcctgcgcctggcgcccgacgaagagggcgagggcgggcgggccgaaagccgcatcctcgaatgccgccgcctgcgcgcgccggccgagatcgcccgcgccctcgagctgcgggccggcgagaccgtggtgaccatacggcgccagttgtccatgaaccacatgccgacggtcatcgacgatctctggttgcccggcacgcattttcgcgggctcaccctcgaactgctgaccgccagcaaggcgcccctgtatggattgttcgagtccgaattcggggtcagtatggtccgagccgacgaaaaactgcgcgccgtcgccgcctcgcctgaaatcgctccgctcctgggtgtcgagcccggccggcccttgctgcaggtcgatcgcatttcatatacctatggcgatcggcccatggaagtgcgccgcggcttataccttaccgatcattaccactaccgcaatagcctgaattga

SEQ ID NO: 441 - protein, 259 aa, Bordetella bronchiseptica RB50
MAEARPDSLTRSRAAKPAGEGAAFSPLYRQIKELLVQSLDRGEWKPGELIPSEIDLAARFQVSQGTVRKAVDELAAEHLLLRRQGKGTFVATHHEARVRYRFLRLAPDEEGEGGRAESRILECRRLRAPAEIARALELRAGETVVTIRRQLSMNHMPTVIDDLWLPGTHFRGLTLELLTASKAPLYGLFESEFGVSMVRADEKLRAVAASPEIAPLLGVEPGRPLLQVDRISYTYGDRPMEVRRGLYLTDHYHYRNSLN

SEQ ID NO: 442 - DNA, 735 bp, Chromobacterium violaceum ATCC 12472
  CDS (1)..(735): transl_table=11
atggaaaaccgctggcaagcattgaaaccggatgaaaacctgagcactccgctgtatctgcagctgtcgcgcaagctggccgacgcgatcaacgccggctggtggcaggcggacgaggcgctgccgtcggagcggacgttttcggaagagctgggcatctcgcgggtgaccgcgcgcaaggcgatggacgtgttgctggagcagggcatgatccgccggcgccagggatcgggcaccttcatcacgcccaggctggagcagccgctgtcgcggttgaccggcttcaccgagcagctgaggctgcgcggcttcgtgccgtcgtcggtgtggctggagcgcggggtattcccgcccagcaatgaggaagtgatcaagctggggctgtcgccgacctcgatggtggcgcggctgaagcgccagcgcctcgccgacggcgtggtgatggcgatagaaatgagcacgatgccggtcgcgtatctgcccgacccgcaggcggtgggcacttcgctgtacgcccatctggacgcgaccgggcattcggtggtgcgggcgctgcagcacatccgggcggtgaacgcttccggggacgtggcccagcttgcgggcatccgtcccggcgaggcgatgctgctgatcacccgcatcggcttcaacgccgacaatgtggcgatcgagctgaccgacacctattgccgcaacgattattacgatttcgtagcagaactgaaacgatga

SEQ ID NO: 443 - protein, 244 aa, Chromobacterium violaceum ATCC 12472
MENRWQALKPDENLSTPLYLQLSRKLADAINAGWWQADEALPSERTFSEELGISRVTARKAMDVLLEQGMIRRRQGSGTFITPRLEQPLSRLTGFTEQLRLRGFVPSSVWLERGVFPPSNEEVIKLGLSPTSMVARLKRQRLADGVVMAIEMSTMPVAYLPDPQAVGTSLYAHLDATGHSVVRALQHIRAVNASGDVAQLAGIRPGEAMLLITRIGFNADNVAIELTDTYCRNDYYDFVAELKR

SEQ ID NO: 444 - DNA, 723 bp, Chromobacterium violaceum ATCC 12472
  CDS (1)..(723): transl_table=11
atgatagagaggggttccggcgtcgccgtgtggcgacagatcgaggaaacgctggcggccgacatcgccgccggcgcgctgcatgcgggccagcaactgcccaccgagctgcaactggcggacaggttcggcgtcaaccgccacacgatacgccgcgcggtggccacgctggtggagcgcggcctgctgcgcgtggagcaaggacggggcactttcgtccaggacaacgcgatcgactacgcgatcagcaagcgcacccgcttttcacagaacatggcgcggcagaatctcagctcggacatcgacattctgcaaagcgacacgatgccggccaacgccgaactggcgggactgctgcaggtggcggtgggcgacaccctgttccgcatcaaggtattgagcaaggtggaaaaccgggtggtggattatgcgacgatgtttttcccggcggcgcggctgcccggtctgccggacgcctatctgcgccaccgctctgtgacgcgcgcgctggacgactgcggcgtggccgactacacccgccgcttcacccgcgtcactgcgcggctgccggacgcggagacggtggactatctggggatccccaagaaccggccggtgctgcacgtgaagtcgctgaacgtcgacggcgagggccggccggtgcagtacggcgtcacctgcttcaacggcgacctggtgcaattggtgatggagcaggaatga

SEQ ID NO: 445 - protein, 240 aa, Chromobacterium violaceum ATCC 12472
MIERGSGVAVWRQIEETLAADIAAGALHAGQQLPTELQLADRFGVNRHTIRRAVATLVERGLLRVEQGRGTFVQDNAIDYAISKRTRFSQNMARQNLSSDIDILQSDTMPANAELAGLLQVAVGDTLFRIKVLSKVENRVVDYATMFFPAARLPGLPDAYLRHRSVTRALDDCGVADYTRRFTRVTARLPDAETVDYLGIPKNRPVLHVKSLNVDGEGRPVQYGVTCFNGDLVQLVMEQE

SEQ ID NO: 446 - DNA, 837 bp, Corynebacterium diphtheriae NCTC 13129
  CDS (1)..(837): transl_table=11
gtggttcggaccgccccagaccccgcaatggttcaaagatcacaccagaaaccctcgctggttatgaccactcacagtatgctcatacctatggtcgacactctcctggagttgcccgccaggaccctgactgacggaaccagcactccaaaacaccagcaactcagggaaattctcgaagaactctgccgcacccagctcaaacctggcgacatgctccccggcgaacgcgccctagaggagcaatacggagttagccgcatcacggtacgacgcgccatcggcgacctcgttgccaccggccaactgcgacgcagccgcggcaaaggcaccttcgttgcccaagcccccatgattactcggctgcagttggcgtcgtttagcgacgaaatggccgcccgcaagatcgaagcctccagcaagatcctcgcatcctcatggtcttcacccagcgccgtcgtccacgaatttttcggcaccgaacaaggcaccccgcacacccacctcgtgcgcgtccgcctcggcggcggcaaaccattttgcattaacgacgcctggtacaactccgccatcgcacctgacctgctcgaaaacgacgtatataaatccgtctactccatccttgagcagaactacggcgcatctattaccggtgccgaacaaatcaccactgcggtggccgccaccccagaaaccgcgcggattctcggcgtggatgtcggcgaaccactactgaaggtggaacgccacgcacacgcaggagaaaaccccatcgagtggtgttcctcgctctaccgcaccgaccgcttcgcgttaaggacgtttatcacgaagtag

SEQ ID NO: 447 - protein, 278 aa, Corynebacterium diphtheriae NCTC 13129
MVRTAPDPAMVQRSHQKPSLVMTTHSMLIPMVDTLLELPARTLTDGTSTPKHQQLREILEELCRTQLKPGDMLPGERALEEQYGVSRITVRRAIGDLVATGQLRRSRGKGTFVAQAPMITRLQLASFSDEMAARKIEASSKILASSWSSPSAVVHEFFGTEQGTPHTHLVRVRLGGGKPFCINDAWYNSAIAPDLLENDVYKSVYSILEQNYGASITGAEQITTAVAATPETARILGVDVGEPLLKVERHAHAGENPIEWCSSLYRTDRFALRTFITK

SEQ ID NO: 448 - DNA, 774 bp, Mycobacterium avium subsp. paratuberculosis K-10
  CDS (1)..(774): transl_table=11
gtgacggcggccgccggtgtgccgttgcaccgccagctgtttctggtgttgcacgacgaaatcgaccgcggcgtcatcgccccgggtgaggcgttgcccaccgagcagacgctgtgcgatcagttcggggtctctcgcatcacggtgcgacgggcgctggcggacctggccgcgcagggctacatcgagcgccggcagggcgtgggttcctttgtacgccagcatgatccggccgatgtgccgacagggcgctcatacctgcagggactgcggcagacccagttcgaaaccgaggccgaagtcgtcgagctgggggtgcggtccgcgccccgggcggtcgccgaggccctggggcgctccggcgagttgttacacatcgtgcgggtgcgccggcagcgccgcacccgcgagccgctgatggtgaccaacgcctggctgccgccggagttggccccggtgctgaccgagcgcgcgctgcggcgcgcgccgctgtatgagctgctgtcggcgaacggggtcgccgtggatcgggtgcggcacgagatcacggccgaaatcgccggtccgcgcaacgcgcaactgctcgacgtgccgatcggtgccgccctgctgagggtcaaccggctcgtctacgtcggcgaccgtccgcaccaccacgtctcggcgctgttgtcgccgagccgaagtcgggtgctgctcagccagtccgccgacgacatggagaccggcgacggcctgcggatcgcccacgacgtcggcggcccgcgcggctaa

SEQ ID NO: 449 - protein, 257 aa, Mycobacterium avium subsp. paratuberculosis K-10
MTAAAGVPLHRQLFLVLHDEIDRGVIAPGEALPTEQTLCDQFGVSRITVRRALADLAAQGYIERRQGVGSFVRQHDPADVPTGRSYLQGLRQTQFETEAEVVELGVRSAPRAVAEALGRSGELLHIVRVRRQRRTREPLMVTNAWLPPELAPVLTERALRRAPLYELLSANGVAVDRVRHEITAEIAGPRNAQLLDVPIGAALLRVNRLVYVGDRPHHHVSALLSPSRSRVLLSQSADDMETGDGLRIAHDVGGPRG

SEQ ID NO: 450 - DNA, 717 bp, Lactobacillus johnsonii NCC 533
  CDS (1)..(717): transl_table=11
atgaaaaaaccactttatcagcaagttatttcagatctcgaaaagaaaattaagactgaaatgaagccaaatgatcgattaccgagtgaacgacaacttttgaaagaatatggtgttagtcgaaatacgattcgattagcattaaatgatttagaagaacgtggcattatttatcgattgcatggaaaaggtacatttgtttcgacaatttatctagatcaaactaacttgggaagtatgtattcttttagtgagcaaatgtctgaagcaggccacaagccaacaacacaaaaccgcacattagaacttgtgacacctgaagaagacgttgcaaatcagcttaatttaaaagctggtgagaaagcatacaaattagttaggttacgtctagctgatggagtaccactaatgtatggagaaacttatttacctgaaaaaattttccctaatctaaaaatgtcagacctaaaggaaaacttatatacagtgatgaagcaaaaatataatgaacaaagtattcttgcttttgaagatgtacaagccgttaatttagacgaaaatgacagcaagattttaggtgttaagcctggggatgcaagtttgaagatttttagacgggcaatcaatgataaaaatgtgccgatcgagttcactatttctctcgctagaggagatagatttatttatcgatcacgtcaatataatcatttagtttaa

SEQ ID NO: 451 - protein, 238 aa, Lactobacillus johnsonii NCC 533
MKKPLYQQVISDLEKKIKTEMKPNDRLPSERQLLKEYGVSRNTIRLALNDLEERGIIYRLHGKGTFVSTIYLDQTNLGSMYSFSEQMSEAGHKPTTQNRTLELVTPEEDVANQLNLKAGEKAYKLVRLRLADGVPLMYGETYLPEKIFPNLKMSDLKENLYTVMKQKYNEQSILAFEDVQAVNLDENDSKILGVKPGDASLKIFRRAINDKNVPIEFTISLARGDRFIYRSRQYNHLV

SEQ ID NO: 452 - DNA, 699 bp, Lactobacillus johnsonii NCC 533
  CDS (1)..(699): transl_table=11
atgaaaaaatatgaattagttgcggataaaataaaagcttatatcaccaaaaacaaacttcatcatggagataaattaccaacaattaccgaattaatgaaagaatatcaagttggtaaatctactatcttacaggcgattactttgttaactcaacgaggaatagtttataaagttcaaggttctggcgtttttgtcagacctacagggcgagatggttatatgtcacttactgataacgccgggtttgctcatgttttaaaagatcctactactgaagtaattgagtttgctgagaaaaggccccctaaacctttatgtgactatctgcattctaatgaagtatgttactttataaaaagattgcgcagacaagaaggaaagccatttgttttagaagaatcgtattatcctaagagcattattccgtttatgagtaaggaaattgctgagggatcgatttttgactatatcaaggatggtttaaagaaagaaattcgtttctctgataaatatatgcgcgttagaaagttaagagccgatgaagcaaaatatctagaattagaagaaggagatccctgtttagaagtttatgatactttctatttagccaatgggacaccatttgatagttctaaattggtatacaattatcaaaactctaaattctatgatcaaagttctgatgatattatttaa

SEQ ID NO: 453 - protein, 232 aa, Lactobacillus johnsonii NCC 533
MKKYELVADKIKAYITKNKLHHGDKLPTITELMKEYQVGKSTILQAITLLTQRGIVYKVQGSGVFVRPTGRDGYMSLTDNAGFAHVLKDPTTEVIEFAEKRPPKPLCDYLHSNEVCYFIKRLRRQEGKPFVLEESYYPKSIIPFMSKEIAEGSIFDYIKDGLKKEIRFSDKYMRVRKLRADEAKYLELEEGDPCLEVYDTFYLANGTPFDSSKLVYNYQNSKFYDQSSDDII

SEQ ID NO: 454 - DNA, 726 bp, Lactobacillus johnsonii NCC 533
  CDS (1)..(726): transl_table=11
atggctgcagaagcaaaatacttaaaagttgctcgaattctacaaaaaagaattgaagatggagtctataaacctcaaactccccttcctgaccaaaaaacacttgcagaagaattacacgtaagccgtttaaccgttaagaaggccttagatggtctacaaagaaaaggactagtctataaagaatctggtctcggcacttttgtcttaggcccaattccaattcaagataaatttgattcaccagcgaatgcttttagtggcttagctaatctactaggatctaatgaggtcactagcgatatcattgagtttaatgttgaatttccaaatgaagatgttcaacattacttaaaattaaaatctagcgatccagtttacaatattcgtcgtctaagacggcttgaaggtaaacctctgattctggaacatacatttatgccagttaacttagttccagatttaaatgaagatatattacataattctatctataattatcttcatcataatttgaaacttaaatttggcgttgcctatcgtaaaattaaggctactaaggctgatgattgggatcaacagtatcttcaagccaaaaaagacgatccaatcttagagctggaacaaattgtctggttaaacaatggtcaaccagttgaatattcaacaagccgaaatcgctacaatgaacgaaattatgtcgttttagagacaaatagcttttaa

SEQ ID NO: 455 - protein, 241 aa, Lactobacillus johnsonii NCC 533
MAAEAKYLKVARILQKRIEDGVYKPQTPLPDQKTLAEELHVSRLTVKKALDGLQRKGLVYKESGLGTFVLGPIPIQDKFDSPANAFSGLANLLGSNEVTSDIIEFNVEFPNEDVQHYLKLKSSDPVYNIRRLRRLEGKPLILEHTFMPVNLVPDLNEDILHNSIYNYLHHNLKLKFGVAYRKIKATKADDWDQQYLQAKKDDPILELEQIVWLNNGQPVEYSTSRNRYNERNYVVLETNSF

SEQ ID NO: 456 - DNA, 702 bp, Lactobacillus johnsonii NCC 533
  CDS (1)..(702): transl_table=11
atgcaagaaccgatgtacattaaaattcacaaccaaataaagcgtgatattgaaaataaaaaatataaagttggagagcggatccctgctgagcggcaattagcttcaaaattcaatgtttctagaatgacattgcgccaagcaattaagacattagaagacgaaggaatcctagagagacgcttaggtagtggaacctatgtctctagtcaaaaggttcaagagaaaatgtctgggatcatgagttttaccgatataactcgttctaatggccaggttccttctagtaaattactatcttatcgtataacgaagccatcgttatctgaaaaagaaaagctaaaaattcaagatacagataacgtattaagaatggaacgtgttcgttttgcagataatgtgccgatttgttatgaagtggctacaattccttatgaattagtttcccgtttttctaaagatgaaatttcaagtagtttatatcaaacgcttgaagaaaagggtggctataagattgggagcgttgtagaaaatattggtgcagctgttgctaatgaaaatgaggctcgtttattgtcagttaaaaagggggagccattagtaactagacgccaggtgactgaactcagtaatcattatccttttgaatatgttcgtgcatcatatgtggccgaaagatttgaatttacatttgaaaaataa

SEQ ID NO: 457 - protein, 233 aa, Lactobacillus johnsonii NCC 533
MQEPMYIKIHNQIKRDIENKKYKVGERIPAERQLASKFNVSRMTLRQAIKTLEDEGILERRLGSGTYVSSQKVQEKMSGIMSFTDITRSNGQVPSSKLLSYRITKPSLSEKEKLKIQDTDNVLRMERVRFADNVPICYEVATIPYELVSRFSKDEISSSLYQTLEEKGGYKIGSVVENIGAAVANENEARLLSVKKGEPLVTRRQVTELSNHYPFEYVRASYVAERFEFTFEK

SEQ ID NO: 458 - DNA, 711 bp, Bacillus cereus ATCC 10987
  CDS (1)..(711): transl_table=11
atgatgagtaagtatgaacaaatttatacagaaatcagtaattctattgataataggcaattaaaagagggatgcaaaatcccatcagaaactgaattaatgaagcaatatgaagcgagccgcggtactgtaagaaaagctgtagatttattacaagaacgtggatatgttcaaaaaatacacggaaaaggtgtttttgttttaaagcgaaaaaacattgaattcaactttggtggtattgtaagtttccaagaagaaaatgaacgtttaggacgtcattgtattacagaagtcgtagaaatggagaaagtaaaagcaacaaaagaggttgcaaagctattaaatgtgaaagagaaaacagacatagatcatattaaacgcgtacgaaatattgatggagaaaaagtaattttggatattaatcattttgtatcggaatatattcctggattaacgagtgaaattgcagcgcaatccatttataaatatattgagaaagaactaggtcttcatattagttattcacagagagtaattgaagtgcaaccatgtacagaggacgatagaaagtatttagatttaaatggaacagactatgttgttgtcgtgaaaaactttacgcatttgtatgatggaagtcagttcgaatatacagaatcccgccaccgcttagatatttttcatttttcggatgtggcgcggagaaaataa

SEQ ID NO: 459 - protein, 236 aa, Bacillus cereus ATCC 10987
MMSKYEQIYTEISNSIDNRQLKEGCKIPSETELMKQYEASRGTVRKAVDLLQERGYVQKIHGKGVFVLKRKNIEFNFGGIVSFQEENERLGRHCITEVVEMEKVKATKEVAKLLNVKEKTDIDHIKRVRNIDGEKVILDINHFVSEYIPGLTSEIAAQSIYKYIEKELGLHISYSQRVIEVQPCTEDDRKYLDLNGTDYVVVVKNFTHLYDGSQFEYTESRHRLDIFHFSDVARRK

SEQ ID NO: 460 - DNA, 720 bp, Bacillus cereus ATCC 10987
  CDS (1)..(720): transl_table=11
atgattgcaaaagataatcgaacaccattatactaccaactaatggatattattgtggagcaaattgaaactgggaatttacaagaacatgataagcttccatcagaacgtgaactatgcgagattcatgatgtaagtagaacaacagtaaggcagacgatgcaagaattagaaaaagaaggatatatttataaaaaacatggtaaagggagttttgtctcacctcgtgtatttaatcaaagtcttgtccgtttttatagtttcacagaagaaatgaaaaaatttggaaaggttccatcatcaacagtcgtatcattttccataattcattgcgataaaaaaatatcgaaaattatgaatcttaacaatggagaagaggtgtatcaaattacgagattaaggttagctgataaagaacccatgctatttgaaacatcttatattcctgtaaagttctttccatatttaacgaagaaagaattagaagaaacaccaatgtacgagattttccgtaaaaaataccaagttcatatcacacgtgcggtggaaagtttcaaagcgattgcagcagaaaaagagcatgcaacatggctacaagttgaaaagaatgaaccatctttatctctagaacgtattgcatatgcgaaagaaaatataattgaatacacacagaccattgcaagaggagataaatttacttacacagttgaattacaataa

SEQ ID NO: 461 - protein, 239 aa, Bacillus cereus ATCC 10987
MIAKDNRTPLYYQLMDIIVEQIETGNLQEHDKLPSERELCEIHDVSRTTVRQTMQELEKEGYIYKKHGKGSFVSPRVFNQSLVRFYSFTEEMKKFGKVPSSTVVSFSIIHCDKKISKIMNLNNGEEVYQITRLRLADKEPMLFETSYIPVKFFPYLTKKELEETPMYEIFRKKYQVHITRAVESFKAIAAEKEHATWLQVEKNEPSLSLERIAYAKENIIEYTQTIARGDKFTYTVELQ

SEQ ID NO: 462 - DNA, 738 bp, Bacillus cereus ATCC 10987
  CDS (1)..(738): transl_table=11
atggcaagcggatcaacacaagtaaaatacctcggcatttatcaaaaaatgaaacagcaaattttagatggcgaatataaaatcaacgaaaaaattccaagtagtcctatacttgctgaagaatttggcgtttcagtcctgacaataaaaaaagcgctggatctgttagtgagagacggatacattatccgccggcgcggaagtggaacagtcgttcaagattggcgtcagcaggaaaaggcacgaatgattcaaactttaacaggtacgaaagctgtttatggcagcgaggtagaaagtaaaattatcgagtttacgattgtcggtgccgatgaaatcattgctgaaaaattgggcatttcagtaggggatttcgtatataaaatcattcgccttcgtatcattcacagtatcccaacgattatggagcatacatggatgcctattgcggtcattccaggtgttgaagcttcggttttagaggagtcgatctactcatacattcaaaataaactaggtcttaaagtgggaacatccgttgttagggtcaaaggcattcgcccagatgataaggaaaagcagtttatgaacttaacaaatcaagattttctaatgagagtggagcaggtggcctatttaacggatggacgaacttttgaatactcttatgctgatcacctgccagaaacctttgaatttgaaacagttattactgcaaaaagttataaagaggcataa

SEQ ID NO: 463 - protein, 245 aa, Bacillus cereus ATCC 10987
MASGSTQVKYLGIYQKMKQQILDGEYKINEKIPSSPILAEEFGVSVLTIKKALDLLVRDGYIIRRRGSGTVVQDWRQQEKARMIQTLTGTKAVYGSEVESKIIEFTIVGADEIIAEKLGISVGDFVYKIIRLRIIHSIPTIMEHTWMPIAVIPGVEASVLEESIYSYIQNKLGLKVGTSVVRVKGIRPDDKEKQFMNLTNQDFLMRVEQVAYLTDGRTFEYSYADHLPETFEFETVITAKSYKEA

SEQ ID NO: 464 - DNA, 747 bp, Bacillus cereus ATCC 10987
  CDS (1)..(747): transl_table=11
gtgaggcgattgctgatgaacatcgacaagtattcaccatttccgatctattatcagattcaagagtgggtgaaacagctaattgaggacggcgaatggaagccgggagataaaatcccatctgagaatgaactttgcgataagttcgaagtgagtcgtatgacaatcagacaggcgattaataatttagtggaacaaggttatttatatcggaaacgtggaatcggtacgtttgtccaacttccgaaagtggaacaaaaattgcaaggaatgacaggattcacagaagatatgatttctcgtgggatgaacccaagtagccaattattaagtttccgcctcgttccagctactgcgaaaatagcagaccggctgagaatacaggagggagagtcggtttatgaagtgaggcgtattcgcttagctgacgatgaaccgattgcttttgagacgacatatttgtcgccagctcttgtaaaagatattaacgaagaaatattgcaacaatctttatatgaacatttagagaaaaaactgggcttcaaacttgttagcgctactcaatcaattgaagcttcaattgcaacggataatgaagcggaacatctgcatattcctaaaaaggcgccagtgcttgtcatgcgtcaatggtcatattcagaaggtgaagtaccgttagagtatgtgaaatgtatttatcgtggagatcgttataagtttattacaaacatcgcacgtaacaaataa

SEQ ID NO: 465 - protein, 248 aa, Bacillus cereus ATCC 10987
MRRLLMNIDKYSPFPIYYQIQEWVKQLIEDGEWKPGDKIPSENELCDKFEVSRMTIRQAINNLVEQGYLYRKRGIGTFVQLPKVEQKLQGMTGFTEDMISRGMNPSSQLLSFRLVPATAKIADRLRIQEGESVYEVRRIRLADDEPIAFETTYLSPALVKDINEEILQQSLYEHLEKKLGFKLVSATQSIEASIATDNEAEHLHIPKKAPVLVMRQWSYSEGEVPLEYVKCIYRGDRYKFITNIARNK

SEQ ID NO: 466 - DNA, 714 bp, Listeria monocytogenes str. 4b F2365
  CDS (1)..(714): transl_table=11
atgtcgggaatggctaaatacatggaaatatacatagatatccgtgataaaatcaaccaaaataaatacgaaattaacgagaaattgcctgatggggacagtatggctcgcacgtatgattgcagcaagctcactgtcaaaaaagcactggatatgcttgtacaagaaggcatgattattagacgacgcggggctgggactttcgtgaaatcccattcgactaacggcggagaattcgcgcttgggccaatgtccggacttgtaaatacatttggaaaagacaatattaaatccaaagtcattttattttctattgaaaaaccatcgaaagaagtcgcagagaaattagagatgcaggatgactatatttaccgaatcatccggatgagagaagttggtcataaagcctattcgattgaacatacttatatgccacttgcgattattccaggtctagaaccacgtcatttagaggactcgatttataattatattcgggatgatttgaaacttaagatgcagagtgcgcatgtttgggtacgcggggataaatcaaatcaagaggatagcaagctcctcaatttagaagaacctacttttatgatggaaattgaaaaattagcgcatttggaagatggtcgtgtgttcgaatattcgataacgcgccatacgtatgaatcgtttgtgtttgaaacggtttttgtgcagaattaa

SEQ ID NO: 467 - protein, 237 aa, Listeria monocytogenes str. 4b F2365
MSGMAKYMEIYIDIRDKINQNKYEINEKLPDGDSMARTYDCSKLTVKKALDMLVQEGMIIRRRGAGTFVKSHSTNGGEFALGPMSGLVNTFGKDNIKSKVILFSIEKPSKEVAEKLEMQDDYIYRIIRMREVGHKAYSIEHTYMPLAIIPGLEPRHLEDSIYNYIRDDLKLKMQSAHVWVRGDKSNQEDSKLLNLEEPTFMMEIEKLAHLEDGRVFEYSITRHTYESFVFETVFVQN

SEQ ID NO: 468 - DNA, 729 bp, Listeria monocytogenes str. 4b F2365
  CDS (1)..(729): transl_table=11
gtggctcagaaccagacaaaatatagctttattgctgaagaaatccgcaaaagaattatgaatcacgcctatccgcttaatcaacctattcctgatgagataactttggcgaaagagtttgattgtagtcgaatgacaatgaaaaaagcactggaagtccttgttcttgaaggcttactatatcgtaaacgcggacatggtactttcattatcaaatcggcgctggacgcggaccgcttacagattcataaccaagaggtaaacggcttcactaaacttttgaacggcaagaaagttattagtaaagttattgagtttaaagttatctttccaactgaagaaattgcagagcgtcttcatatcgaaatggaaacaccaatctatgacattcttcgtgttcggctagtgaaagatgagccatatgtgctagaacatacgtatatgccagttggggttatcccaggcatcaatcagcaaattttagaggggtcgatttattcgtacattcaagacgatttgaacctaaaaattgctagttcctacaaacaaattcgcgcggataaagcgacactgcttgatcagcaatatctcgactgcgcttctgatgatcccgttgtcgaagtagaacaaaccgtgtatttaaacaatggtctcgcgtttgaattttccaaatcgcgccaccgttatgataaattcgtgtttacaacagtgaatatagctagacgataa

SEQ ID NO: 469 - protein, 242 aa, Listeria monocytogenes str. 4b F2365
MAQNQTKYSFIAEEIRKRIMNHAYPLNQPIPDEITLAKEFDCSRMTMKKALEVLVLEGLLYRKRGHGTFIIKSALDADRLQIHNQEVNGFTKLLNGKKVISKVIEFKVIFPTEEIAERLHIEMETPIYDILRVRLVKDEPYVLEHTYMPVGVIPGINQQILEGSIYSYIQDDLNLKIASSYKQIRADKATLLDQQYLDCASDDPVVEVEQTVYLNNGLAFEFSKSRHRYDKFVFTTVNIARR

SEQ ID NO: 470 - DNA, 714 bp, Listeria monocytogenes str. 4b F2365
  CDS (1)..(714): transl_table=11
ttggttaagtatgaattgattgcagcagatatccgcgaaaaaataaacaacggtacttatccaccagaatccattcttcctgatcaagtgagcttgtgtaaagcttatgattgtagcagaatgacaataaaaaaagcctttgacgttttagcgcttgaaggacttgtttacagacaacggggtgcggggacttttgtcatgaaaaatgccttagctaataagcaagatgcgagtttgcgggattatgacggtttgacaaaaatgatgggagacaaccgaatctcgagtaaaattattgcattcgatattgctttcccagatgaaaaaacacaagaacaacttttaataaaagcagaccagccagtgtacaagttgattcggttacggctcttggacggcgcaccatatgtgttagagcatacaacgatgccggcagatttagttcctggtttaacgaaagaaattttgcatcattcgatttatgcatacttacaagattcacttggactcgtgctaagcggtgcctttcggaaaattaatgccgataagccatctgaatatgatcaagaatatttagcgtgcggggaacacgacccagttttagaagtggagcaagtagtgtatttgaaagatggtagaccagtggaatattctagatcaagacatcgctatgatacgagaagttttattatggttgaccaccgagaaaagtaa

SEQ ID NO: 471 - protein, 237 aa, Listeria monocytogenes str. 4b F2365
MVKYELIAADIREKINNGTYPPESILPDQVSLCKAYDCSRMTIKKAFDVLALEGLVYRQRGAGTFVMKNALANKQDASLRDYDGLTKMMGDNRISSKIIAFDIAFPDEKTQEQLLIKADQPVYKLIRLRLLDGAPYVLEHTTMPADLVPGLTKEILHHSIYAYLQDSLGLVLSGAFRKINADKPSEYDQEYLACGEHDPVLEVEQVVYLKDGRPVEYSRSRHRYDTRSFIMVDHREK

SEQ ID NO: 472 - DNA, 723 bp, Listeria monocytogenes str. 4b F2365
  CDS (1)..(723): transl_table=11
atgatcgataaacaatcaggaataccgatttacattcagattcaaagtgaaattaaaaagaaaatggaagatggtgtttggaaagttggcacttctattccagctgaacgtcaacttgctgaaatgtttcacgttagccgaatgacggtaagacaagccattcaaggcctcgttgatgataacattttgcaaagacgtgttggtgccgggacctttattgcggaaaagaaactaaccgaacgacttgaagcggttacgagttttacgaatttgatgttacaagaggggaaagttccttcgacgcgaatcgtatcgtatggcattcgtccggcaagtacgcaagaacaagaagcgttgcaactgccagaaaacagcaatgtaatgaaaattgaacggattcgttacggcgaccgtgtgccaattctttatgaagttgctgccattccagaaaaaattgcttcactgcttacaaaggaagacattatggattccctttataaagcgattgaattaaaacttggtcaaccaattggagaagcggaacaaatcatggaagcttctttagtatcagaaaaaattgcgccatatcttgatgtgaaactcggatcgccggttatgaaactcaggcagattacaatgttagaagacggtcgaccatttgaatttacgcgttcccagtatgtaggtagtagatttcaatttgtagctaggattaaacaataa

SEQ ID NO: 473 - protein, 240 aa, Listeria monocytogenes str. 4b F2365
MIDKQSGIPIYIQIQSEIKKKMEDGVWKVGTSIPAERQLAEMFHVSRMTVRQAIQGLVDDNILQRRVGAGTFIAEKKLTERLEAVTSFTNLMLQEGKVPSTRIVSYGIRPASTQEQEALQLPENSNVMKIERIRYGDRVPILYEVAAIPEKIASLLTKEDIMDSLYKAIELKLGQPIGEAEQIMEASLVSEKIAPYLDVKLGSPVMKLRQITMLEDGRPFEFTRSQYVGSRFQFVARIKQ

SEQ ID NO: 474 - DNA, 735 bp, Listeria monocytogenes str. 4b F2365
  CDS (1)..(735): transl_table=11
atggtgagaaagttaaataaaatgtacgatgcatctccgctctatgcgcaaatagctgatgatttacgagaaaaaatccaaacagaagtttggcaaactggagataaaattccaccagagcttgatttatgtgagttatacaatgtcagtagaattaccgttcgaaaagcaattgatgaactcgttcgtgagaatttactttatagagagcgcgcgaaaggtacttttgtacgtgactgggaagaagcagaggatgagcattttacgttagtgcgcagttttacgaatgagatgaaagaacttggtaaaaaggcggctacgctacatgcggaagtagaagtgatcaatgccgataaaaaaattgcgttacagctagggctttctgtcggggacaaggtgctacaaattaagcggctacgcggtacgaaagacttggcatttgctttatttatcagttttattccttataatcaagattactcacttaaagcagaagattattacggttctttttatgaatatttgaaaggcttcggtattgtcgtgaatcaagaaaaggaatatattgaagcgatgttgcctaatcgtgaagtacaggaagcgctcgcaatcgacaaacaagaaccaattttgaaaagggtgcggatgacgaaacaaaaagaaagtgattttagagaatacagcgaatgtttttatataggaaagcattatcgctattatattgattttgaataa

SEQ ID NO: 475 - protein, 244 aa, Listeria monocytogenes str. 4b F2365
MVRKLNKMYDASPLYAQIADDLREKIQTEVWQTGDKIPPELDLCELYNVSRITVRKAIDELVRENLLYRERAKGTFVRDWEEAEDEHFTLVRSFTNEMKELGKKAATLHAEVEVINADKKIALQLGLSVGDKVLQIKRLRGTKDLAFALFISFIPYNQDYSLKAEDYYGSFYEYLKGFGIVVNQEKEYIEAMLPNREVQEALAIDKQEPILKRVRMTKQKESDFREYSECFYIGKHYRYYIDFE

SEQ ID NO: 476 - DNA, 711 bp, Bacillus thuringiensis serovar konkukian str. 97-27
  CDS (1)..(711): transl_table=11
atgatgagtaagtatgaacaaatttatacagcaatcagcaagtctattgataataaacaattaaaagagggatgcaaaatcccatcagaaactgaattaatgaaacagtatgaagcgagccgtggtactgtaagaaaagcagtggatttattacaagagcgtggatatgttcaaaagatacatggaaaaggtgtttttgttttaaagcgtaaaaacattgaattcaactttggtggcattgtaagtttccaagaagaaaatgaacgtttagggcgccattgtattacagaagtcgtggaaatagagaaaataaaagcgacaaaagagattgcaaagctattaaatgtgaaagagaaaacagaaatagatcatattaaacgcgtacgaaatattgatggagaaaaagtaattttggatattaatcattttgtatcggaacatatccctggattaacgagtgaaattgcagcggggtccatttataaatacatagagaaagaattaggtcttcatattagttactcacagagggtaattgaggtgcagccatgtacagaggacgatagaaagtatttagatttaaatggaacagattatgttgtcgttgtgaaaaactttacgcatttttatgatggaagtcagttcgaatatacagaatcacgtcaccgcttagatatttttcatttttcggatgtggcgcggagaaaataa

SEQ ID NO: 477 - protein, 236 aa, Bacillus thuringiensis serovar konkukian str. 97-27
MMSKYEQIYTAISKSIDNKQLKEGCKIPSETELMKQYEASRGTVRKAVDLLQERGYVQKIHGKGVFVLKRKNIEFNFGGIVSFQEENERLGRHCITEVVEIEKIKATKEIAKLLNVKEKTEIDHIKRVRNIDGEKVILDINHFVSEHIPGLTSEIAAGSIYKYIEKELGLHISYSQRVIEVQPCTEDDRKYLDLNGTDYVVVVKNFTHFYDGSQFEYTESRHRLDIFHFSDVARRK

SEQ ID NO: 478 - DNA, 738 bp, Bacillus thuringiensis serovar konkukian str. 97-27
  CDS (1)..(738): transl_table=11
atggcaagcggatcaacacaagtaaaatacctcggtatttatcaaaaaatgaagcagcaaattttagacggcgaatataaaattaatgaaaaaattccaagtagccccgtccttgctgaagaatttggtgtttctgtccttaccataaaaaaagcgctggatctattagttagagacggttacatcattcgccggcgcggaagtggaacagtcgttcaagattggcgtcagcaggaaaaagcacgaatgattcaaactttaacaggtacaaaagctgtttatggcagcgaggtagaaagtaaaattattgagtttacgattgtcggtgccgatgaaattattgctgaaaaattgggcatttcagtaggagattttgtatataaaatcatccgcctccgcatcattcacagtattccaacgattatggagcatacatggatgcctatttcggtcataccgggtgttgaagtttcagttttagaggagtcgatctactcgcacattcaaaataaacttggtcttgaagtgggaacatccgttgttagggtcaaaggagttcgtccagatgataaagaaaagcagtttatgaacttaacaaatcaagatttcttaatgagagttgaacaagtggcctacttaacggatggacgaacttttgaatactcttatgctgatcacctgccagaaacctttgaatttgaaacagttattactgcaaaaagttataaagaggcataa

SEQ ID NO: 479 - protein, 245 aa, Bacillus thuringiensis serovar konkukian str. 97-27
MASGSTQVKYLGIYQKMKQQILDGEYKINEKIPSSPVLAEEFGVSVLTIKKALDLLVRDGYIIRRRGSGTVVQDWRQQEKARMIQTLTGTKAVYGSEVESKIIEFTIVGADEIIAEKLGISVGDFVYKIIRLRIIHSIPTIMEHTWMPISVIPGVEVSVLEESIYSHIQNKLGLEVGTSVVRVKGVRPDDKEKQFMNLTNQDFLMRVEQVAYLTDGRTFEYSYADHLPETFEFETVITAKSYKEA

SEQ ID NO: 480 - DNA, 732 bp, Bacillus thuringiensis serovar konkukian str. 97-27
  CDS (1)..(732): transl_table=11
atgaacatcgacaagtattcaccatttccgatctattatcagattcaagagtgggtgaaacagctaattgaggacggcgaatggaagccgggagataaaatcccatctgagaatgaactttgcgataagtttgaagtgagtcgtatgacaatcagacaggcgattaataatttagtggaacaaggttatttatatcggaaacgtggaatcggtacgtttgtccaacttccgaaagtggaacaaaaattgcaaggaatgacaggattcacagaagatatgatttctcgtggaatgaacccaagtagtcaattactaagtttccgcctagttccagctactgcaaaaatagcagaccggctgagaatacaggagggagaatcggtttatgaagtgagacgtattcgtttagcggatgatgaaccgattgcttttgagacgacatatttgtcgccagctcttgtaaaagatattaacgaagaaatattgcaacaatctttatatgaacatttagagaaaaaactgggctttaaacttgttagcgctactcagtcaattgaagcttcaattgcaacggataatgaagcggaacatctgcatattcctaaaaaggcgccagtgcttgtaatgcgtcaatggtcatattcagaaggtgaagtaccgttagagtatgtgaaatgtatttatcgcggggatcgttataagtttattacgaacatcgcacgtaacaaataa

SEQ ID NO: 481 - protein, 243 aa, Bacillus thuringiensis serovar konkukian str. 97-27
MNIDKYSPFPIYYQIQEWVKQLIEDGEWKPGDKIPSENELCDKFEVSRMTIRQAINNLVEQGYLYRKRGIGTFVQLPKVEQKLQGMTGFTEDMISRGMNPSSQLLSFRLVPATAKIADRLRIQEGESVYEVRRIRLADDEPIAFETTYLSPALVKDINEEILQQSLYEHLEKKLGFKLVSATQSIEASIATDNEAEHLHIPKKAPVLVMRQWSYSEGEVPLEYVKCIYRGDRYKFITNIARNK

SEQ ID NO: 482 - DNA, 747 bp, Erwinia carotovora subsp. atroseptica SCRI1043
  CDS (1)..(747): transl_table=11
atggcatcggatagaggaaagggaggtctaaaagtgatctataaatttattgccgaacagattcgttcacgcattaattccgcagaatttcgcgttggtgaggtgttgccagcggagaaacatctggcgaaagaattctccgtttcgcggatgaccgtgcgtaaagcgctagaaatgcttgtggcggaagggttactggatcgccgccacgggagtggaacctatattctgcaaaaagatgtccagcatgaaagtcacgcgctgaacagttttgccgaacatatgcgtttgattggtcgtacgacgacgaatgacgtcgtggattttcgtattatccccgcgccgccagcgattgcccgacagctgcggcttcgaacagatgaaaagatctactttgcccgacgtattcgctacgtggacggtaaatcctgtatgttggaagacagctatttaccggttgctccctttcctgaactgtcggtaaagcatttgcagggatcgaaattcgcttatatcgaggacgaaaaacatattgagattgccggttgctacgaggttttctcgccgattttggctgatgtgtcggtggcgcgtttattgagcgtgagcgagggcgcgccgttgctacaaatgacctctctatcgcagtcggttgaaggcgcgtatctcgacttttcgattatgatttataacgtacatgattatcaggttagcttttatatgcagcgtaataagctttcgctgtaa

SEQ ID NO: 483 - protein, 248 aa, Erwinia carotovora subsp. atroseptica SCRI1043
MASDRGKGGLKVIYKFIAEQIRSRINSAEFRVGEVLPAEKHLAKEFSVSRMTVRKALEMLVAEGLLDRRHGSGTYILQKDVQHESHALNSFAEHMRLIGRTTTNDVVDFRIIPAPPAIARQLRLRTDEKIYFARRIRYVDGKSCMLEDSYLPVAPFPELSVKHLQGSKFAYIEDEKHIEIAGCYEVFSPILADVSVARLLSVSEGAPLLQMTSLSQSVEGAYLDFSIMIYNVHDYQVSFYMQRNKLSL

SEQ ID NO: 484 - DNA, 726 bp, Propionibacterium acnes KPA171202
  CDS (1)..(726): transl_table=11
atgaagtacgtgaccgtgcgggattaccttgtcgagctcatcgacacccgcttatcggtcggggatgtcgtgcctagtgagcgggagcttgctgagcggttcggtatctcgcgcatgacggtccgccaggcggttgattcgctggtgagtagcggaatgctggagcgtcgtcgcggcagcggtacctatgtcagagctcccaaagtgcatgtgcagtcgcgcatctcgtcttttagtgaggagatgcgtcagcgcggcatgatcccagacacccgagtgctgcgcgatgaggagatctccgccgctcctgacgtggctgtgtggctagggattgagccgggggagccagtccattacatctaccgcgtgcggctagctgacggtgttccgatggccgtcgaaaggacctggatcgctgcccgagtgatgccagatctgttgaccgatggcgttccggcgagtatttatggggcgatggcggcagctgggctagttcctacgtggggcgaggatgcgatcgaggctgtcagcggtgacgcgctggtctgcgagcacctgcagatccccgtcgggtcggctgtattggctatcaaccgtcgtacctacgccgacgataccgcgatctcttattcccgatcttggtaccgaggggatcgttacaaactatgggttccgatctctggtccacacagaaccctgtatccacctcgaggaggttcacgatga

SEQ ID NO: 485 - protein, 241 aa, Propionibacterium acnes KPA171202
MKYVTVRDYLVELIDTRLSVGDVVPSERELAERFGISRMTVRQAVDSLVSSGMLERRRGSGTYVRAPKVHVQSRISSFSEEMRQRGMIPDTRVLRDEEISAAPDVAVWLGIEPGEPVHYIYRVRLADGVPMAVERTWIAARVMPDLLTDGVPASIYGAMAAAGLVPTWGEDAIEAVSGDALVCEHLQIPVGSAVLAINRRTYADDTAISYSRSWYRGDRYKLWVPISGPHRTLYPPRGGSR

SEQ ID NO: 486 - DNA, 726 bp, Streptococcus pyogenes MGAS10394
  CDS (1)..(726): transl_table=11
atgaataaccgacttgaggagtgtggcatgttaccagcttatataaaaattcatgatgcaattaaaaaagacattgatctgggcatctggccaattggtagtcgcttaccaagtgaacgacatttagcggaacatttcaccgttagtcgaatgactctacggcaggctattacattactagtagaagaagggattcttgaaaggcggataggaagtggtacttatgttgccagtcatcgtgttcaagaaaaaatgcgaggaacaacaagtttcacagaaattatacgctcccaaggacgacaaccctcctctaaattattatcctatcaaaagcaattagctagtgataccgaagttaaagaattgaacttagacaaaacagacttggtcattcgaatggaacgtatccgctatgcagacagtgtccctttggtgtacgaaattgcttcaatcccagaaaaatttataaaaacggttaaacgagctgatattacagaacacttttttcactcattgatagcaaatggttacgagattggtaaaagtaaacagacaatctacgctaagctagcaagtgagcgtgtagcctcctacttggaagttgctaaaggacatgccattttggctctaactcaggtgtcttactttacagacggcaaaccttttgagtatgtccgcagtcagtatatcggtgaccgttttgaattttacttagaaaataattag

SEQ ID NO: 487 - protein, 241 aa, Streptococcus pyogenes MGAS10394
MNNRLEECGMLPAYIKIHDAIKKDIDLGIWPIGSRLPSERHLAEHFTVSRMTLRQAITLLVEEGILERRIGSGTYVASHRVQEKMRGTTSFTEIIRSQGRQPSSKLLSYQKQLASDTEVKELNLDKTDLVIRMERIRYADSVPLVYEIASIPEKFIKTVKRADITEHFFHSLIANGYEIGKSKQTIYAKLASERVASYLEVAKGHAILALTQVSYFTDGKPFEYVRSQYIGDRFEFYLENN

SEQ ID NO: 488 - DNA, 714 bp, Streptococcus pyogenes MGAS10394
  CDS (1)..(714): transl_table=11
atgacaaagtatgaacgtatttataaagacctcgaaacaaaaataaacaaagacttttacaaagaaggggattttttacctactgaaatagaattgagtcaacaataccaagctagccgagataccgtccgcaaggctctctcacttctcacaaaggcaggtcttatcctcaaaaaacaaggacgtggcacccaagtgattaaacatcatcagatcatgttccctatctcagaactaactagttatcaggaactcgtctcttactcaaatctagattctaagaccaacgtcattgccattgataaactgattgtggatgagacactttcaaaattgaccggttttagcaaaaacagcttggtctggcgtgttacgcgccaacgcgttgttgagggtgtggcttccgtcttagacattgattaccttagtaaaactttggtgccaataatgacaagggaaatcgcagagcattctatttatcaatatttggaaaaggaactccatctcgccattgactttgccctcaaagaggttaccattgaccaaataaccgatcgtgataaaattttacttgaccttggatcagaccaacatgttgtttccgtcaaatccaaagtttacctttccaataataaccaattccaattcaccgagagtcgccataaactggaaaaatttaaatttttagattttgctcggcgcagaccaaaataa

SEQ ID NO: 489 - protein, 237 aa, Streptococcus pyogenes MGAS10394
MTKYERIYKDLETKINKDFYKEGDFLPTEIELSQQYQASRDTVRKALSLLTKAGLILKKQGRGTQVIKHHQIMFPISELTSYQELVSYSNLDSKTNVIAIDKLIVDETLSKLTGFSKNSLVWRVTRQRVVEGVASVLDIDYLSKTLVPIMTREIAEHSIYQYLEKELHLAIDFALKEVTIDQITDRDKILLDLGSDQHVVSVKSKVYLSNNNQFQFTESRHKLEKFKFLDFARRRPK

SEQ ID NO: 490 - DNA, 759 bp, Leifsonia xyli subsp. xyli str. CTCB07
  CDS (1)..(759): transl_table=11
atgcaggccgagcacccgctaccgcgggatctcttcgccgacctggacaagacgagtcccatcccgctgtactaccagctcaccacacggctcgagcaggcgattcgggaggacgtgctgccgccgggcgcgaggctggagaacgagatcgcgctgggccatcggctggggttgtcgcgtccgactgtccggcgggcgattcaggagctggtcgacaagggattgctggttcggcggcgggggatcgggacgcaggtcgtgcatggcaaagtcacacgcagcgtcgatctgaccagcctgtacgaggacttgtcgcggtcggggcagacgccggagacgcgggtgatcgccacagaggtacggggagcgacgggcgatgaggccgaacgcttgacgatcggggcgggagatccggtgttgcacctggtgcggctgcggttcgcggacggggtgccgctcgcgatcctcgacaacacactgccgacggagttcgccgacatcgcacgggaggacctggagacgagagggctctaccaggtgcttcgggagcggggcgtcacgatgcggatcgccaatcagcggatcggggcgcgagaggcgaccggacgcgagagcgagctgctggagctgaagaaggcggcggccgtgctgacgatggagcggacggcgttcgacacgggcgggcgggcggtggaatatggacagcactgctaccgcccggatctctactcgttcgagatcaccctggtcgatcgatag

SEQ ID NO: 491 - protein, 252 aa, Leifsonia xyli subsp. xyli str. CTCB07
MQAEHPLPRDLFADLDKTSPIPLYYQLTTRLEQAIREDVLPPGARLENEIALGHRLGLSRPTVRRAIQELVDKGLLVRRRGIGTQVVHGKVTRSVDLTSLYEDLSRSGQTPETRVIATEVRGATGDEAERLTIGAGDPVLHLVRLRFADGVPLAILDNTLPTEFADIAREDLETRGLYQVLRERGVTMRIANQRIGAREATGRESELLELKKAAAVLTMERTAFDTGGRAVEYGQHCYRPDLYSFEITLVDR

SEQ ID NO: 492 - DNA, 729 bp, Symbiobacterium thermophilum IAM 14863
  CDS (1)..(729): transl_table=11
atgctggacaagcagagccccacccccctgtacaaccagttggtggacctcctcattcggaccatccagacgtcgatgaaacccgacgacccgctgccctccgagcgggagatctgcgagaagtacggcgtcagccggaccacggtccgcgcggcgctgagcgaactggaggacctcgggtacatctaccgccgccacggcaagggcacctacgtctccgcgctatggaaggagatgaagaacctctccgagttctacagcttcacggagcacatgaggcagctcgggatgaaaccggagacccggatcctctccttcgagacgggggtggccaaccgccccacggccgagcggatgaagatcggcgaaggctccgccatctaccggctgcgcaggctgcgcctggccgacggcctgccgatgatgctggaactgaccttcatcccggtccacctgtttcccgggctgaccctggagatgctgcagagcatgccgctgtacgacctctactccaggcggttcaaccaggagatccggtacgcggacgaggagttctacgcctccctcgtccaggacaaggaagccgagctgctcggcgtgccggtgggttccccgtgcctcaggctggtgcgcaccacctgcaacctggacaaccgggtgatcgagttcaccctcagcgccgcccgggcagaccagtttgtctacaagatccggcaccggcggaggtag

SEQ ID NO: 493 - protein, 242 aa, Symbiobacterium thermophilum IAM 14863
MLDKQSPTPLYNQLVDLLIRTIQTSMKPDDPLPSEREICEKYGVSRTTVRAALSELEDLGYIYRRHGKGTYVSALWKEMKNLSEFYSFTEHMRQLGMKPETRILSFETGVANRPTAERMKIGEGSAIYRLRRLRLADGLPMMLELTFIPVHLFPGLTLEMLQSMPLYDLYSRRFNQEIRYADEEFYASLVQDKEAELLGVPVGSPCLRLVRTTCNLDNRVIEFTLSAARADQFVYKIRHRRR

SEQ ID NO: 494 - DNA, 729 bp, Bacillus licheniformis ATCC 14580
  CDS (1)..(729): transl_table=11
atggcgaaacaaccacagctccacagtcaaattaaacaagatattgtagataagattgaaagcggttattatccgccgggcagcctgttgccgacggagtccgagttttgcaaaatttatgatgtcagccggacgacgctgcggaccgcgctgaatcatttgcttatggaaggggctatttaccgaaagcagggaaaagggacatttgtcgccaaaggaaaagtaaagcagatcttaagctccagcagcctccgctatgcagaacaattgaaggctcaaggctttaaaccgaaaatcaaggttgttgatttgcaaaaaataaagccgtccgaaaaactccaaacccgtctcggaatcgacgctgaacaaatggtctatcaagtaaaaagaatccgctatgcagacgatgaagaaatccagtttgaaacagcctatatcagaacggatctcgtacccgaagtaacggaagaaatggcgaatatctcactttaccagtgcatcagcaggcagggaaacaacattaaaagaacagaggagcaaatcaagattgtgatttctgatgaggagattgcacaccatttaaatattacacaaggcacgccttgcttccagatatcgacgcaaacatttttggcgtctgaagaggttgtcgagtattctatggcctattttcgcggtgaccgcgttgagttcttcattgaacgcgattatggacaaagggggaaatga

SEQ ID NO: 495 - protein, 242 aa, Bacillus licheniformis ATCC 14580
MAKQPQLHSQIKQDIVDKIESGYYPPGSLLPTESEFCKIYDVSRTTLRTALNHLLMEGAIYRKQGKGTFVAKGKVKQILSSSSLRYAEQLKAQGFKPKIKVVDLQKIKPSEKLQTRLGIDAEQMVYQVKRIRYADDEEIQFETAYIRTDLVPEVTEEMANISLYQCISRQGNNIKRTEEQIKIVISDEEIAHHLNITQGTPCFQISTQTFLASEEVVEYSMAYFRGDRVEFFIERDYGQRGK

SEQ ID NO: 496 - DNA, 717 bp, Bacillus licheniformis ATCC 14580
  CDS (1)..(717): transl_table=11
atgaagatcaacaagtatatgatgatttacaaacaaatcgcggaacaaatcgatcaaagcatactgaatgccggagatatcctgccgtctgaaaacgaccttgccgaacagcacgacacctcgagggaaaccgttcggaaagcgctgaacgtgcttgctcagaacggatatattcagaagattaaagggaaggggtcagtcgtgctgcacagggagaaaatgcagttcccggtttccggtttggtcagctttaaggagctttcagaaacgctcggaaaagagacaagcacgacggtccatgagttcggcttgacgcatccggacgcatatattcaaaagcagctccgcacttccggagatgaagaggtatggcgggttgtcaggtcgcggaacatcaacggagagcgtatcatcctggataaagactattttatccgcaaacacgtgccgcttttaacgaaagaaatatgcgaggactcgatctatcaataccttgaagatgaatgcgggctcgtcatcagctatgctcataaggaaattgtagtcgagccatgtacggcagaggatcaagagtatttggatctgaacggatacgagcacattgtggtcgtgaaaaatttcgtttttcttgatgatacgaccttgtttcaatatacggaaagcagacaccgccttgataaattccggtttgtcgattttgcaagaagagaaaagtag

SEQ ID NO: 497 - protein, 238 aa, Bacillus licheniformis ATCC 14580
MKINKYMMIYKQIAEQIDQSILNAGDILPSENDLAEQHDTSRETVRKALNVLAQNGYIQKIKGKGSVVLHREKMQFPVSGLVSFKELSETLGKETSTTVHEFGLTHPDAYIQKQLRTSGDEEVWRVVRSRNINGERIILDKDYFIRKHVPLLTKEICEDSIYQYLEDECGLVISYAHKEIVVEPCTAEDQEYLDLNGYEHIVVVKNFVFLDDTTLFQYTESRHRLDKFRFVDFARREK

SEQ ID NO: 498 - DNA, 714 bp, Bacillus licheniformis ATCC 14580
  CDS (1)..(714): transl_table=11
atgagaaaatacgaatatatttcaaacgaaatgaggaggcggattcaggaggaatactatccgattgatcagcccatacctgatgagctttctctcgccaaggaattttcctgcagcagaatgacgatgaaaagagccctcgatattcttgtgtcagaaggcatgctgtaccgcaagcgcggacacggcaccttcattgtaaaatcatcgattcagcagcttcccgtcagtgtaacagaccgcgaaaaccttgggctgaccaagcttcttgccaacaaacaaatcgaaagccgcatcattcaatttgacgtcgaattcccttcagatgaagtggcaaagcaattgtcaatcgaaaagaccgttccggtgtatcatatcatcaggctcagaaaggttgaaggcgaaccgtatgtcattgaagaaacgtatatgccttcgaacgtcatctctgaattaaatgaagacgtccttcacggctccgtttaccggcacatcaccgagacgctgaaactgacaatcgccggatcgcaccggaagatcagggcggataagtcgagtgcactcgaccgagagtacttggaatgcgcccctgacgatccggttcttgaagtcgaacaggtcgcttttttaaatacgggggaaccgtttgaatattcttttgcaaggcatcgctatgataagtttgtgttttcgagcgtccatattcggaaatga

SEQ ID NO: 499 - protein, 237 aa, Bacillus licheniformis ATCC 14580
MRKYEYISNEMRRRIQEEYYPIDQPIPDELSLAKEFSCSRMTMKRALDILVSEGMLYRKRGHGTFIVKSSIQQLPVSVTDRENLGLTKLLANKQIESRIIQFDVEFPSDEVAKQLSIEKTVPVYHIIRLRKVEGEPYVIEETYMPSNVISELNEDVLHGSVYRHITETLKLTIAGSHRKIRADKSSALDREYLECAPDDPVLEVEQVAFLNTGEPFEYSFARHRYDKFVFSSVHIRK

SEQ ID NO: 500 - DNA, 732 bp, Bacillus licheniformis ATCC 14580
  CDS (1)..(732): transl_table=11
ttgatcaaaaaagattcccacattccgatttactatcagattgagaccgaaattaaaaagcttgccgaaacaaaagatttgaaacccggcgacctcattccttctgaaagagagttcgcagaaaaatatgaggtgagcaggatgaccgttcgacaggcggttaacaatctcgtcaatgaaggcattctcgtccggcagcggggaaaagggacatttattgccgagccaaaaattgagcagcctctcaaaggattgacaagcttttccgaggacatgaaatcaaggggcatgaggcccggcacgaaaatgctcggcttcggcgtcatcccgtgcgaccagagcacagcgcgcaaactggagatacgtgaaggggcttccgtctatgaagtcaaacggatccgcctcgccgatgacatcccgatggcttatgaaatctcctatttgcccgccgacttcattaacggcctgaccgaagacattatgagcgcatctttgtacgactatgtcgaaaatacgctctcccttacgatcgaccgggccgcgcaaacactagaaccggcgattgcctctcaggcagagagcgagcctctcgacatagaggaaggcgcaccagtcctgctcattgaacgcttgagctatttggacgacggcagaccgtttgaagtggtcaaatccgtttacagaggcgaccgctataaattcgtcattgatatgaagaggaaagaccaatga

SEQ ID NO: 501 - protein, 243 aa, Bacillus licheniformis ATCC 14580
MIKKDSHIPIYYQIETEIKKLAETKDLKPGDLIPSEREFAEKYEVSRMTVRQAVNNLVNEGILVRQRGKGTFIAEPKIEQPLKGLTSFSEDMKSRGMRPGTKMLGFGVIPCDQSTARKLEIREGASVYEVKRIRLADDIPMAYEISYLPADFINGLTEDIMSASLYDYVENTLSLTIDRAAQTLEPAIASQAESEPLDIEEGAPVLLIERLSYLDDGRPFEVVKSVYRGDRYKFVIDMKRKDQ

SEQ ID NO: 502 - DNA, 720 bp, Bacillus cereus E33L
  CDS (1)..(720): transl_table=11
atgattgcaaaagataatcgaacaccattatactaccaactaatggatattattgtggagcaaattgaaactgggaatttacaagaacatgataagcttccatcagaacgtgaactatgcgagattcatgatgtaagtagaacaacagtaaggcagacgatgcaagaattagaaaaagaaggatatatttataaaaaacatggtaaagggagttttgtctcacctcgtgtatttaatcaaagtcttgtccgtttttatagtttcacagaagaaatgaaaaaatttggaaaggttccatcatcaacagtcgtatcattttccataattcattgcgataaaaaaatatcgaaaattatgaatcttaataatggagaagaggtgtatcaaattacgagattaaggttagctgataaagaacccatgctatttgaaacatcttatattcctgtaaagttctttccatatttaacgaagaaagaattagaagaaacaccaatgtacgagattttccgtacaaaataccaagttcatatcacacgtgcggtggaaagtttcaaagcgattgcagcagaaaaagagcatgcaacatggctacaagttgaaaagaatgaaccatctttatctctagaacgtattgcatatgcgaaagaaaatataattgaatacacacagaccattgcaagaggagataaatttacttacacagttgaattacaataa

SEQ ID NO: 503 - protein, 239 aa, Bacillus cereus E33L
MIAKDNRTPLYYQLMDIIVEQIETGNLQEHDKLPSERELCEIHDVSRTTVRQTMQELEKEGYIYKKHGKGSFVSPRVFNQSLVRFYSFTEEMKKFGKVPSSTVVSFSIIHCDKKISKIMNLNNGEEVYQITRLRLADKEPMLFETSYIPVKFFPYLTKKELEETPMYEIFRTKYQVHITRAVESFKAIAAEKEHATWLQVEKNEPSLSLERIAYAKENIIEYTQTIARGDKFTYTVELQ

SEQ ID NO: 504 - DNA, 738 bp, Bacillus cereus E33L
  CDS (1)..(738): transl_table=11
atggcaagcggatccacacaagtaaaatacctcggcatttatcaaaaaatgaaacagcaaattttagacggcgaatataagattaacgaaaaaattccaagtagccccgtcctcgctgaagaatttgatgtttctgtccttactataaaaaaagcgctggatctgttagttagagacggctacatcattcgccggcgcggaagtggaacggtcgttcaagattggcgtcaacaggaaaaagcacgaatgattcaaactttaacaggtacaaaagctgtttatggcagtgaggtagaaagtaaaattattgagtttacgattgtcggtgccgatgaagtcattgctgaaaaattgggtatttcagtaggggattttgtatataaaatcattcgcctccgcatcattcacagtattccaacgattatggagcatacatggatgccgatttcggtcattccaggtgttgaggtttctgttttagaggaatcaatctactcccacattcaaaataaactaggtcttcaagtgggaacatccgttgttagggttaaaggaattcgcccggatgataaagaaaagcagtttatgaacttaacaaatcaagatttcctaatgagagtggaacaggtggcctacttaacggatggacgcacttttgaatactcttatgccgatcacttgccggaaacctttgaattcgaaacagttattactgcaaaaagttataaagaggtataa

SEQ ID NO: 505 - protein, 245 aa, Bacillus cereus E33L
MASGSTQVKYLGIYQKMKQQILDGEYKINEKIPSSPVLAEEFDVSVLTIKKALDLLVRDGYIIRRRGSGTVVQDWRQQEKARMIQTLTGTKAVYGSEVESKIIEFTIVGADEVIAEKLGISVGDFVYKIIRLRIIHSIPTIMEHTWMPISVIPGVEVSVLEESIYSHIQNKLGLQVGTSVVRVKGIRPDDKEKQFMNLTNQDFLMRVEQVAYLTDGRTFEYSYADHLPETFEFETVITAKSYKEV

SEQ ID NO: 506 - DNA, 999 bp, Burkholderia mallei ATCC 23344
  CDS (1)..(999): transl_table=11
atgcatgcgcgacgacgcctgaagataggcagaggcacgtggcccgggacgcgccgcagccccgcgaacccttgctcgccccggagtttaggaggcgggacgggtaaagtcaaacggtatcttatgtcttatataagacagatgttttcgagggaaaaatctggacggaaaagcgcgattcatgatgaaatgcgcgccatgacttccaatcaggcgagcgcacccaatccgaacggccaggccggctccacgcagccgggcggcgaggccgcggctgcgccatcgcccactttcagcccgctctaccggcagatcaaggcgctcatcacgcagagcctcgaggcgggcgagtggaagccgggcgagatcatcccgagcgaagtcgaactcgccggccgctataaggtgagccagggcacggtgcgcaaggccatcgacgagctggcggccgacaacctgctcgtgcgccgccagggcaagggcacgttcgtcgcgacccacagcgaggagcgtgcgcaattccggttcctgcggctgctcgccgacgacggcgccgagcatccgcacgtgagccggctgctcgaatgccggcggatgcgcgcgcccgccgagatcgcgcgccagctcgatctgaaaccggccgaccccgtcgtccaggtgcggcgcgtgctcgagttcgacggcgtcgatacggtgctcgacgagatctggctgccgggcgcgatgttccgggggctcacgttcgagcgtctgagcgaatacaaggggccgctctacgcgatgttcgagagcgagttcggcacgcggatgatccgcgcaagcgagaagattcgtgcgatcgcggccgagcccgccgtcgccgacgtgctgcgggtgccgcccggttttccgctgctgtcggtcgagcgcgtgtcgtacacgtatggcgatcgtcccgtcgaagtgcggcgcggatggtatgtcacaaccgggtactactatcagaacgatttgagctga

SEQ ID NO: 507 - protein, 332 aa, Burkholderia mallei ATCC 23344
MHARRRLKIGRGTWPGTRRSPANPCSPRSLGGGTGKVKRYLMSYIRQMFSREKSGRKSAIHDEMRAMTSNQASAPNPNGQAGSTQPGGEAAAAPSPTFSPLYRQIKALITQSLEAGEWKPGEIIPSEVELAGRYKVSQGTVRKAIDELAADNLLVRRQGKGTFVATHSEERAQFRFLRLLADDGAEHPHVSRLLECRRMRAPAEIARQLDLKPADPVVQVRRVLEFDGVDTVLDEIWLPGAMFRGLTFERLSEYKGPLYAMFESEFGTRMIRASEKIRAIAAEPAVADVLRVPPGFPLLSVERVSYTYGDRPVEVRRGWYVTTGYYYQNDLS

SEQ ID NO: 508 - DNA, 747 bp, Burkholderia pseudomallei K96243
  CDS (1)..(747): transl_table=11
atgaagccatcgacggaagaccgctggtccgatctgcgccccgaccccgacaacgacacgccgctttatctgcaactcgcccgcaagctgggcgacgcgatccacgacaaccgttgggccgcaggcgaagcgctgccttccgagcggctgctcgcggaatcgctcggcgtgtcgcggatcaccgcgcgcaaggcgatcgcgctgctcgtcgagcaagggctcatccggcgcacgcaaggcgcgggcaacttcatccagccgcgctacgaggatccgctgtcgcggctgtcgagcttcagcgaaatgctcaagcggcgcggcttcacgccgagctcgacatggctgtcgcgcgacatccagcccgcgaatcgcgacgaggtgatccagctcgggctttcgcccgccgcatcggtcacgcgcctgaagcggctgcggctcgcggacggcatcgtgatggccgtcgagaattcgacgttccccgcaacgatcgttcccgatccgcaggcaatcggcgattcgctttacagctatctcgagcagcgcggcacgccgatcgtgcgcgcgctgcagcactttcgcgcggtcaacgcgaccgacgagatcgcgcggcagatgggcatcgcgccgcacgacgcgctccttttgatcacccggatcggcttcacgcacgatcagcgcgcgatcgaactcaccgacacatactgtcgaaacgattactacgatttcgtcgtcgaactgcgcaaatag

SEQ ID NO: 509 - protein, 248 aa, Burkholderia pseudomallei K96243
MKPSTEDRWSDLRPDPDNDTPLYLQLARKLGDAIHDNRWAAGEALPSERLLAESLGVSRITARKAIALLVEQGLIRRTQGAGNFIQPRYEDPLSRLSSFSEMLKRRGFTPSSTWLSRDIQPANRDEVIQLGLSPAASVTRLKRLRLADGIVMAVENSTFPATIVPDPQAIGDSLYSYLEQRGTPIVRALQHFRAVNATDEIARQMGIAPHDALLLITRIGFTHDQRAIELTDTYCRNDYYDFVVELRK

SEQ ID NO: 510 - DNA, 696 bp, Burkholderia pseudomallei K96243
  CDS (1)..(696): transl_table=11
atgagcacgcccgcctatcaggaaatcaaggatttcatccttgcgcgcattcacgccggcgaatgggcggagggcgatcaggtgccgtccgagaacgagctcgcgcgcgagttcaaggtcgcgcggatgaccgtcaaccgcgcgctgcgcgagctgacggccgagcaggtgctcacgcgcatccagggggcgggtacgttcgtcgcgcggccgaagtacgaatcgacgctcgtcgcgatccgcagcatctccgacgaagtcgctgcgcgcggccaccggcatcacgcgcgcgtgctcgacctcgtcacgatgaaggccgacgaagcgctcgccgacgagatgcaggtgccgcctcacacgaggctcttccgctcggtgatgctgcactacgagaacgacgagccggtgcagctcgaggagcgctgggtgaatccggccgtcgccgccgattacgcggatcaggatttctcggcgatcacgccgaaccagtacctgatgcgcgtcgcgccgctgcagcgcgtcgaataccggatcgaggcggcgatgcccgatcgcgcgatgcgcgaggcgctcgagatggccgataccgaaccgtgcctcgtgctgcatcggcgcacgtggtcgcagggcgtcgtcgcatcggtcgtgaacctctggcatccgggcagccgctatcgcttcaccggccatttctga

SEQ ID NO: 511 - protein, 231 aa, Burkholderia pseudomallei K96243
MSTPAYQEIKDFILARIHAGEWAEGDQVPSENELAREFKVARMTVNRALRELTAEQVLTRIQGAGTFVARPKYESTLVAIRSISDEVAARGHRHHARVLDLVTMKADEALADEMQVPPHTRLFRSVMLHYENDEPVQLEERWVNPAVAADYADQDFSAITPNQYLMRVAPLQRVEYRIEAAMPDRAMREALEMADTEPCLVLHRRTWSQGVVASVVNLWHPGSRYRFTGHF

SEQ ID NO: 512 - DNA, 726 bp, Burkholderia pseudomallei K96243
  CDS (1)..(726): transl_table=11
atgcacgccaccgacgaccgtctcccccgctaccagcgcctgcgcgacgaactggccgcgctgatcgcggcccggcactggcggccgggcgaagcgatcccgaccgagcaggcgctcgcgaagcgctatgacgtcgcgatcggcacggtgcgcaaggcggtcgatctgctcgtcgccgacggcatgctcgaacgcttccaggggcgcggcacgttcgtgcggcgcgcgagcttcgacagctcgctgttccgtttcttccgcttccagggcaggcacggcgagcgccggataccggagagccggatcctgcgccgcgaggtcgtcgaagcgccgtccgcggtggcggccgcgctgcagattccggcccgcgcgtcggtgatcgagatgacgcgggtgcgcctgatcgacggcgcgccgatgctcgccgaggaaatctggctgccctacgaccgcttcgccgcattcgcgcggctcgagctcgcttcgatcggcgatctgctgtatccggtctacgaagcgcattgcaaccagatcgtcgcctcggccaccgagacgctgaccgtcgaggcgatcggccccgtgcacgcgcggctgctgcgcatcgagccgggcacgcccgccgtcgtgatcgagcggctcgcgtacggctacgaccgccggccgctcgaatggcggcgctcgcgcggccccgcgagcgaattcatctatcaggcggaaatccgctag

SEQ ID NO: 513 - protein, 241 aa, Burkholderia pseudomallei K96243
MHATDDRLPRYQRLRDELAALIAARHWRPGEAIPTEQALAKRYDVAIGTVRKAVDLLVADGMLERFQGRGTFVRRASFDSSLFRFFRFQGRHGERRIPESRILRREVVEAPSAVAAALQIPARASVIEMTRVRLIDGAPMLAEEIWLPYDRFAAFARLELASIGDLLYPVYEAHCNQIVASATETLTVEAIGPVHARLLRIEPGTPAVVIERLAYGYDRRPLEWRRSRGPASEFIYQAEIR

SEQ ID NO: 514 - DNA, 801 bp, Burkholderia pseudomallei K96243
  CDS (1)..(801): transl_table=11
atgacttccaatcaggcgagcgcacccaatccgaacggccaggccggctccacgcagccgggcggcgaggccgcggctgcgccatcgcccactttcagcccgctctaccggcagatcaaggcgctcatcacgcagagcctcgaggcgggcgagtggaagccgggcgagatcatcccgagcgaagtcgaactcgccggccgctataaggtgagccagggcacggtgcgcaaggccatcgacgagctggcggccgacaacctgctcgtgcgccgccagggcaagggcacgttcgtcgcgacccacagcgaggagcgtgcgcaattccggttcctgcggctgctcgccgacgacggcgccgagcatccgcacgtgagccggctgctcgaatgccggcggatgcgcgcgcccgccgagatcgcgcgccagctcgatctgaaaccggccgaccccgtcgtccaggtgcggcgcgtgctcgagttcgacggcgtcgatacggtgctcgacgagatctggctgccgggcgcgatgttccgggggctcacgttcgagcgtctgagcgaatacaaggggccgctctacgcgatgttcgagagcgagttcggcacgcggatgatccgcgcaagcgagaagattcgtgcgatcgcggccgagcccgccgtcgccgacgtgctgcgggtgccgcccggttttccgctgctgtcggtcgagcgcgtgtcgtacacgtatggcgatcgtcccgtcgaagtgcggcgcggatggtatgtcacaaccgggtactactatcagaacgatttgagctga

SEQ ID NO: 515 - protein, 266 aa, Burkholderia pseudomallei K96243
MTSNQASAPNPNGQAGSTQPGGEAAAAPSPTFSPLYRQIKALITQSLEAGEWKPGEIIPSEVELAGRYKVSQGTVRKAIDELAADNLLVRRQGKGTFVATHSEERAQFRFLRLLADDGAEHPHVSRLLECRRMRAPAEIARQLDLKPADPVVQVRRVLEFDGVDTVLDEIWLPGAMFRGLTFERLSEYKGPLYAMFESEFGTRMIRASEKIRAIAAEPAVADVLRVPPGFPLLSVERVSYTYGDRPVEVRRGWYVTTGYYYQNDLS

SEQ ID NO: 516 - DNA, 699 bp, Streptococcus thermophilus LMG 18311
  CDS (1)..(699): transl_table=11
atgttaccagcgtatattcgcatacatgataagattaaggaagatgttgatgatggtacttggaaaattgggcaacgtcttcctagcgagcgagatctttgcgagacttttgatgtgagtcgtatgactgtgcgccaggcgataacacttttagtggatgaggggattttagaacgcaaaccaggcagtggaacctttgttgctagtagtcgagttaaggaaaaaatgcgtggaactacgagttttactgagattgtcaaatcccaagggaggaagccatctagtgagcttatttcgtatcaacgtctacatccaaatgagtttgaaatcaagaatttaggtgtcttgccacagtcccatgtcattcgtatggaacgtgttcgttttgctgatgacattccggttgcctatgaaattaccagtatccctgagaaaattatccgaggttttaaggaatcagaaattaccgaacatttcttcaagacattaactgataatggctatgaaataggaaaaagtcagcagacaatatcagcaagtttggccaatagtagtctagccaagcacctcaaggttaagactggtgatgctcttttgagtctgacacaaatttcctttctccaagacgggcaggctttcgaatatgtacgaagttactatgttggcgaccgttttgaattttatttggagaacaattag

SEQ ID NO: 517 - protein, 232 aa, Streptococcus thermophilus LMG 18311
MLPAYIRIHDKIKEDVDDGTWKIGQRLPSERDLCETFDVSRMTVRQAITLLVDEGILERKPGSGTFVASSRVKEKMRGTTSFTEIVKSQGRKPSSELISYQRLHPNEFEIKNLGVLPQSHVIRMERVRFADDIPVAYEITSIPEKIIRGFKESEITEHFFKTLTDNGYEIGKSQQTISASLANSSLAKHLKVKTGDALLSLTQISFLQDGQAFEYVRSYYVGDRFEFYLENN

SEQ ID NO: 518 - DNA, 699 bp, Streptococcus thermophilus CNRZ1066
  CDS (1)..(699): transl_table=11
atgttaccagcgtatattcgcatacatgataagattaaggaagatgttgatgatggtacttggaaaattgggcaacgtcttcctagcgagcgagatctttgcgagacttttgatgtgagtcgtatgactgtgcgccaggcgataacacttttagtggatgaggggattttagaacgcaaaccaggcagtggaacctttgttgctagtagtcgagttaaggaaaaaatgcgtggaactacgagttttactgagattgtcaaatcccaagggaggaagccatctagtgagcttatttcgtatcaacgtctacatccaaatgagtttgaaatcaagaatttaggtgtcttgccacagtcccatgtcattcgtatggaacgtgttcgttttgctgatgacattccggttgcctatgaaattaccagtatccctgagaaaattatccgaggttttaaggaatcagaaattaccgaacatttcttcaagacattaactgataatggctatgaaataggaaaaagtcagcagacaatatcagcaagtttggccaatagtggtctagccaagcacctcaaggttaagactggtgatgctcttttgagtctgacacaaatttcctttctccaagacgggcaggctttcgaatatgtacgaagttactatgttggcgaccgttttgaattttatttggagaacaattag

SEQ ID NO: 519 - protein, 232 aa, Streptococcus thermophilus CNRZ1066
MLPAYIRIHDKIKEDVDDGTWKIGQRLPSERDLCETFDVSRMTVRQAITLLVDEGILERKPGSGTFVASSRVKEKMRGTTSFTEIVKSQGRKPSSELISYQRLHPNEFEIKNLGVLPQSHVIRMERVRFADDIPVAYEITSIPEKIIRGFKESEITEHFFKTLTDNGYEIGKSQQTISASLANSGLAKHLKVKTGDALLSLTQISFLQDGQAFEYVRSYYVGDRFEFYLENN

SEQ ID NO: 520 - DNA, 849 bp, Geobacillus kaustophilus HTA426
  CDS (1)..(849): transl_table=11
atggctatacgggagaactgctgcttgccaattattcggacgcgccggccgattttcgccgcatgcagctgcgcccatacgaatcggttgtttatcttttgcgccggccgtgatacaatacaagcggtgattcttatgcatgaaaacaaatatttaaccatttaccatgacctcatttcccgcatccgccgcggagaatggaaggcgtacgacaagctgccatcggaacacgagctggccgcccgatatgagacatcgcgcgagacgattcgcaaagcgctccatttgttgtccgagcacggctatatccaaaaaatgaaaggaaaaggatctatcgttcttgacgtcggcaaatatgactttcccgtatccggattggtcagctttaaagaactggcgcagacgatgaagcagccggtgcggacgatcgtgcatgaactggcgatcatcaagccggatcgcgagctcaggcagcatctgcgcgcctcaagcaaagacgaagtgtggaaagtcgtgcgcgtccgggaaatcggcggagagcggattattttggataaagacttttttctgaaaaagcatgtgccgctattgaccaaagagatttgcgaagactcgatttatgaatatttggaaacgaagctgtatttgccgatcagctttgcgaaaaaagaaatatcggtcgacgaagcgacggacgaagaccggcgctatttggatttgcatggcgatgaccgcgtcgttgtcgtcaaaaactatgtgtatttaagcaatgctgcattgtttcaatatacggaatcgcgtcaccggctcgacaagttccgatttgtcgattttgcgcgccggaaatga

SEQ ID NO: 521 - protein, 282 aa, Geobacillus kaustophilus HTA426
MAIRENCCLPIIRTRRPIFAACSCAHTNRLFIFCAGRDTIQAVILMHENKYLTIYHDLISRIRRGEWKAYDKLPSEHELAARYETSRETIRKALHLLSEHGYIQKMKGKGSIVLDVGKYDFPVSGLVSFKELAQTMKQPVRTIVHELAIIKPDRELRQHLRASSKDEVWKVVRVREIGGERIILDKDFFLKKHVPLLTKEICEDSIYEYLETKLYLPISFAKKEISVDEATDEDRRYLDLHGDDRVVVVKNYVYLSNAALFQYTESRHRLDKFRFVDFARRK

SEQ ID NO: 522 - DNA, 714 bp, Geobacillus kaustophilus HTA426
  CDS (1)..(714): transl_table=11
atgccaaaatatgagcaaatttctaacgaaatacgcagacgaattaaagagggagtgtattccctagacgagccgattcctgatgaaatctcgctcgctgaggagtttggctgcagccggatgaccgtgaaacgggcgcttgatctgcttgtgtccgaagggctgttgtatcgaaagcgcggccatggcacgtttattgtgaaatccgcgatgcttgacggactcgttaacgtcgtcagcaacgagacactcggtttgacaggtgtactgaaaggacgcgaggtaacaagcaaaatcattgcgttcgaagtgttgtttccgtccgatgaagtggcggcccatttatgcatcgacacgaacacgccggtgtaccacttaatccgcctgcgcaatgtggatggcgaaccgtacgtcattgagcggacgtatatgcccgttcatttgatcccggggctcaatgaaacggtgcttcatggctcgatttatcgttacatcactcacgaactcggcttaacgattgcagggtcgcaccgaaagatccgcgcagataaaccgaatgagctcgatcagcagtacttgcagtgcgcacccgacgatccggtattggaattggaacaggttggttttttgaacaatggagagccctttgaatactccttttcccgtcatcggtacgacaaatttgtcttcgtcaccgtcagcacccgccgctaa

SEQ ID NO: 523 - protein, 237 aa, Geobacillus kaustophilus HTA426
MPKYEQISNEIRRRIKEGVYSLDEPIPDEISLAEEFGCSRMTVKRALDLLVSEGLLYRKRGHGTFIVKSAMLDGLVNVVSNETLGLTGVLKGREVTSKIIAFEVLFPSDEVAAHLCIDTNTPVYHLIRLRNVDGEPYVIERTYMPVHLIPGLNETVLHGSIYRYITHELGLTIAGSHRKIRADKPNELDQQYLQCAPDDPVLELEQVGFLNNGEPFEYSFSRHRYDKFVFVTVSTRR

SEQ ID NO: 524 - DNA, 732 bp, Geobacillus kaustophilus HTA426
  CDS (1)..(732): transl_table=11
gtgatcgataaacagtcgccgattccgatttactatcagctcgagcaatatatgaaagaaaagatcgaaaaaggggagtggcagccgggcgaaatgatcccgtctgagcgcgagttggcggaaatgtatgacatcagccggatgaccgttcggcaggcggtcaacaatttagtgaacgatggctatctcatccgccggcgcgggaaaggaacatttgtcgccgcccaaaaaatcgagcagccgctgaaagggctgacgagcttttccgaagatatgcgggcgcgcggcatggagcccggcacgatcgtcctcagctttgagatggttccagcttccgagaaactcgctgaagggcttggcgtcacggaaggcgatgacctttacgaagtccgccgccttcggttggccgacggcttgccgatggcgttggagacgctgtacattccggtcaatctcgtccccggactgacgcgtgatgttgtaagcggttccgtctatgaatttatcgaaaaagaaaaagggatgatcatcggctccgctgttcaaacattggaagcatctgtcgcccgcaaggtggaggcggagcatctgaagatgaaagaaggggctccggtgctattgcttgagcgccgcacgcaccttgtcgacggtcggccgcttgaagtcgtcaaatcggtgtaccgcggcgaccggtacaaatttatgattgagatgaaaaggggaggatcatga

SEQ ID NO: 525 - protein, 243 aa, Geobacillus kaustophilus HTA426
MIDKQSPIPIYYQLEQYMKEKIEKGEWQPGEMIPSERELAEMYDISRMTVRQAVNNLVNDGYLIRRRGKGTFVAAQKIEQPLKGLTSFSEDMRARGMEPGTIVLSFEMVPASEKLAEGLGVTEGDDLYEVRRLRLADGLPMALETLYIPVNLVPGLTRDVVSGSVYEFIEKEKGMIIGSAVQTLEASVARKVEAEHLKMKEGAPVLLLERRTHLVDGRPLEVVKSVYRGDRYKFMIEMKRGGS

SEQ ID NO: 526 - DNA, 720 bp, Salmonella enterica subsp. enterica serovar Paratyphi A str. ATCC
  CDS (1)..(720): transl_table=11
atgatcgagcaacccgacagtaaaagtgccaaaccgctttataagcagcttgaagacgccttaaaagaggctattgcgcgtggagagtataaaccaggccagcagatcccgacggaaaatgaactgagcgtgcgctggcaggtgagcagggtcacggtccgtaaggcgctggatgcgctgacgcgtgaaaatttgctgacccgtgtctccggcaaaggcacctttgtttctggtgagaaatttcagcgtagcatgaccggcatcatgagtttcagcgagttatgccagtcccagggacgtcgcccggggtcacgcaccatcaaatccgtttttgaatcggtagacgatgagacaaaagcgttactgaatatgaacgatggcgaaaaagcggtcgtcattgaacgtatccgctatgccgacgatgtggcggtatcgctggaaaccgtacatcttcccccacgttttgcgtttttgctggacgaagatcttaataatcactctttgtatgaatgcttacgcgagaaataccatttatggtttacccactcccgtaagatgatcgaactggtttatgccagctttgaagtcgcccattatcttggcgtcaacgagggttatccgctgatcctgataaaaagtgaaatgattgataacaaaggagaactctcctgcgtttcgcaacagttgattgtcggcgataaaatacggtttaccgtatga

SEQ ID NO: 527 - protein, 239 aa, Salmonella enterica subsp. enterica serovar Paratyphi A str. ATCC
MIEQPDSKSAKPLYKQLEDALKEAIARGEYKPGQQIPTENELSVRWQVSRVTVRKALDALTRENLLTRVSGKGTFVSGEKFQRSMTGIMSFSELCQSQGRRPGSRTIKSVFESVDDETKALLNMNDGEKAVVIERIRYADDVAVSLETVHLPPRFAFLLDEDLNNHSLYECLREKYHLWFTHSRKMIELVYASFEVAHYLGVNEGYPLILIKSEMIDNKGELSCVSQQLIVGDKIRFTV

SEQ ID NO: 528 - DNA, 744 bp, Salmonella enterica subsp. enterica serovar Paratyphi A str. ATCC
  CDS (1)..(744): transl_table=11
atgaaaacattgagtaaaagttcacacatcccactgtatcaacaggttgtggagtggataagggaaagtatttatagcggagaattggttgaggatgaccggataccttcagagtttcaaatcatggatatgctggaggtgagtcgcggtaccgttaaaaaagcggttgaccaacttgtccgggaaggtgttcttgtgcaagtgcagggtaaaggaactttcgtaaagaaggaaaatgttgcttacccactgggtgaaggtttgctctcctttgctgaagccttagccagccagaagataaacttcacaaccagtgttataacctcccgactggagcccgctaaccgctttgtagcagagaaactgagtatcaaaccgggacaagatgttttatttcttaaacgccttcgttgtattggcgatgaaaaagtcatgttgattgaaaatcgtatcaacattgatctctgccccggtattattgatgtagattttaccagggagaatttattttcagcaatagaaagattatctgataagaaaataagtttttctgaaagccgttacgcagctaaattaattggtaatgagcgaggccattatcttgatattggtgaagacgcacctgttttgcatttggaacagttggtatttttctctagaggattggccattgattttggtaacgtctggttaaaaggtaataaatattatcttggcactattttacagcgcctggatgcctaa

SEQ ID NO: 529 - protein, 247 aa, Salmonella enterica subsp. enterica serovar Paratyphi A str. ATCC
MKTLSKSSHIPLYQQVVEWIRESIYSGELVEDDRIPSEFQIMDMLEVSRGTVKKAVDQLVREGVLVQVQGKGTFVKKENVAYPLGEGLLSFAEALASQKINFTTSVITSRLEPANRFVAEKLSIKPGQDVLFLKRLRCIGDEKVMLIENRINIDLCPGIIDVDFTRENLFSAIERLSDKKISFSESRYAAKLIGNERGHYLDIGEDAPVLHLEQLVFFSRGLAIDFGNVWLKGNKYYLGTILQRLDA

SEQ ID NO: 530 - DNA, 777 bp, Silicibacter pomeroyi DSS-3
  CDS (1)..(777): transl_table=11
atgagcagcgacgccatcgagaccatcgagacctatctgcgccccggcgcctgggtcgaggacgcggcgggcccgctttacgtgcggctgcgcaagcggatcgaacagggtatcgacagcggcctgttggccaaaagcgcgcctttgcccgccgagcgcgaaatcgccagcctgaccggcctgtcgcgtgtcaccgtgcgccgggcaatgcaggaactggtcgatcgcggcatcatcgttcagcgccagggatcgggcagtttcgtcgccgatgccgccccccgggtcgaacagtcgctgtcgcatctgacctcgttcaccgaggatatggagcggcgcggcctcaatgtcaccagcgaatggctgacgcgcggcgtgttcatcccctcgcctgaagaggtgatggcgctggcgctcagctcgggcgagcaggtggcgcgggtcgcgcgcctgcgccgcgccgaggggcgacccatggcgatcgaacgcgcctcgctgcccaccgatatcctgcctgacccggaactggtgtcctcgtcgctttatgcagtgctagaacgcgacggcaaccgcccggtgcgcgcgctgcagcggatctcggcggtcaatctgggtgccgaggatgcggccttgctaggggtcgaaccgggcaccgccgggctgcgcatcatccgcacctcgtacctgccgaaccggcgggtcatcgaatacacccgctctctttaccgcgcggacgcctacgatttcgtggccgaactgcgccttggcaacagctag

SEQ ID NO: 531 - protein, 258 aa, Silicibacter pomeroyi DSS-3
MSSDAIETIETYLRPGAWVEDAAGPLYVRLRKRIEQGIDSGLLAKSAPLPAEREIASLTGLSRVTVRRAMQELVDRGIIVQRQGSGSFVADAAPRVEQSLSHLTSFTEDMERRGLNVTSEWLTRGVFIPSPEEVMALALSSGEQVARVARLRRAEGRPMAIERASLPTDILPDPELVSSSLYAVLERDGNRPVRALQRISAVNLGAEDAALLGVEPGTAGLRIIRTSYLPNRRVIEYTRSLYRADAYDFVAELRLGNS

SEQ ID NO: 532 - DNA, 711 bp, Bacillus clausii KSM-K16
  CDS (1)..(711): transl_table=11
atgaaggaagcattaccgaaatatcaagttgtaaaagaatatatattggcgcaaataaaaaaaggggtttatttgccgcatcaaattattgaatctgaattagaattgatggaaaagctgaatgtctcaagaataaccattagaagagcgttagaggaattggtgcatgataaagtattgacaaagaaaaaaggggtgggcacatttgtgaacccccttcctaaatacacgggttttaagccaggtgtaagctttactttggaagcaaaaaacagagggatgcgaccctccaccgaactattacaattaacaaaagtgtttgctgatgataaacaggcagaggatatgcaagtggcaattggcgatccattatggctagttgagcggatccgatatgcagacaatatcgccgtatcttatgagttagagtattttgatcatcacttggtgggcgatcttacaggagaaatatgcaaacattcgatttatgaatttttagaaaaaaagggccttgaatatgagtttgttgatcaaaaaatttctgctgtgttagctgatgagacgtcctcaaaccatttaggtgttcctatagggtctccgctcatatcaattaaaaatattgcttgtttaaaaaatggcaaaccgtttaatgttggctttgctttatatcaaaccaattccttttatttaatgcatacgatttatcgataa

SEQ ID NO: 533 - protein, 236 aa, Bacillus clausii KSM-K16
MKEALPKYQVVKEYILAQIKKGVYLPHQIIESELELMEKLNVSRITIRRALEELVHDKVLTKKKGVGTFVNPLPKYTGFKPGVSFTLEAKNRGMRPSTELLQLTKVFADDKQAEDMQVAIGDPLWLVERIRYADNIAVSYELEYFDHHLVGDLTGEICKHSIYEFLEKKGLEYEFVDQKISAVLADETSSNHLGVPIGSPLISIKNIACLKNGKPFNVGFALYQTNSFYLMHTIYR

SEQ ID NO: 534 - DNA, 753 bp, Bacillus clausii KSM-K16
  CDS (1)..(753): transl_table=11
ttgaacgtgaataaaaaaggcactgaccagtcgctccatgctttcgttaaacaagagttagttaccgccattcaacaaggagtttatcccgttaaatcccagctgccaactgaggcagaactgtgcaagatgtatgatgttagccgaacgacgatccgaaatgcactacaacaacttgtcatcgatgggtatgtagaacgtatccaagggcggggcacctttgtcgccagcagaagggtgaagcaaacgttgtctgcaacgcaagggaattatcgagagcaattgcaattgcaaggaaaaaaaccaaaaatacaagtgattgatttgaaagtcgttccttctgatgaatttttgtctgccatgcttgaaatcgaggaaaatgagccgatccaccgcctagaacgaattcgttatgcagatgatgcccccttgcaatacgaaatcgcttatttgccttggcgcaagacgacttggctcacgaaagaagggggagaacactcactctatcaattactgcaaagccagccggacctctcgcttcaccagacaaaagaacatttgcatatcgccctcgcagatgaagaagtagccgcaaagctagggatttcagttggcgacccttgcatacaaattgaaacacacgcttatttagcggatgagtctaaaatcgaatattcaatcgcgtatttccatggagaaaaagctagttttacgattgaacgaaattatcaaaaaccgactaagactggttaa

SEQ ID NO: 535 - protein, 250 aa, Bacillus clausii KSM-K16
MNVNKKGTDQSLHAFVKQELVTAIQQGVYPVKSQLPTEAELCKMYDVSRTTIRNALQQLVIDGYVERIQGRGTFVASRRVKQTLSATQGNYREQLQLQGKKPKIQVIDLKVVPSDEFLSAMLEIEENEPIHRLERIRYADDAPLQYEIAYLPWRKTTWLTKEGGEHSLYQLLQSQPDLSLHQTKEHLHIALADEEVAAKLGISVGDPCIQIETHAYLADESKIEYSIAYFHGEKASFTIERNYQKPTKTG

SEQ ID NO: 536 - DNA, 714 bp, Bacillus clausii KSM-K16
  CDS (1)..(714): transl_table=11
gtgaaaaacaagtttcaatcgatttatcaagcgctcatacaagcaatcaatagcggtgtttatgctcctggcgaaacgttgccttctgaaaacgaactgacagagatgttccaagcatcgagggaaacgattcgcaaagcactgaaaatgttatcagaacacgggtatattcaaaagatacaaggcagaggttctgttgtgcttgatgtcgcacgcctcgatttcccggtttcaggggttgcaagcttccaagaactaaatgaaaagcttggtttgcaagctaagacggatgtcgtctgctttacagctgttaaagcagataaaacaatcgcaaaaaagttggaaattgaaacaggtgagcaagtttggcaagtggagcgaatccgcttaattgatggggaacgaattatattggataaggacacgtttgtttccagtcttgtccctggtttaacgaaagacatttgtgcgggcagcatttatgcctacattgagaagcaactaggccttgctatcagctttgccaaaaaggaaattgtcgttgaagcggcgactgaggaagaccaggccatgcttgacctcgatgaaagtggccgtgtagttgttgtcagaagctatacgtatttagacaatgctgtgcctttccagtacacagagtcacgccatcgtgcggaccgcttccgatttgttgattttgccagacgcaacccttaa

SEQ ID NO: 537 - protein, 237 aa, Bacillus clausii KSM-K16
MKNKFQSIYQALIQAINSGVYAPGETLPSENELTEMFQASRETIRKALKMLSEHGYIQKIQGRGSVVLDVARLDFPVSGVASFQELNEKLGLQAKTDVVCFTAVKADKTIAKKLEIETGEQVWQVERIRLIDGERIILDKDTFVSSLVPGLTKDICAGSIYAYIEKQLGLAISFAKKEIVVEAATEEDQAMLDLDESGRVVVVRSYTYLDNAVPFQYTESRHRADRFRFVDFARRNP

SEQ ID NO: 538 - DNA, 705 bp, Bacillus clausii KSM-K16
  CDS (1)..(705): transl_table=11
gtgattgatgaagaaagcagcattcccctttatttgcaattaaaagatctttttgttgaaaaaatagacagcggcgaatggcaagaaaatgcgaaaattccagacgaacttacattggcgagtcagtaccggttaagccgctcaaccgttcgccaagcattgttaaaactcgttgatgaagggcgtttgacccgaaaacaaggaaaagggacatttgtgaatgagaaaaaaatccaaacgcctgtgtttagtttttattatcctgaaaaattcggtaaaaaacataccgttttgtcagctcaagaactagcttgctcggcgacagtccagtcggcattggaactatttcctggcgaacttgtctatgaacttatccgtctacgctattttgaggatgaagttgtcgctgtggaaacatcttatttaccgagtgcagcggttcctggtttgttgcagaaaaaccttgaaggcacgctttatgaactattgattactcagtacaacttgcaaatccaagcatatgacaccacggtagaaccggtcatcctaacccagttggaaaccgaacgcctacaagttgaaggcaacggacagcctgcattaaaaattacaaaaatcggctcaacatggaataaaaagcgcttaattctcacgaaaagcattttcagaggcgaccgctgtaaactcatgtttcaccatgaatag

SEQ ID NO: 539 - protein, 234 aa, Bacillus clausii KSM-K16
MIDEESSIPLYLQLKDLFVEKIDSGEWQENAKIPDELTLASQYRLSRSTVRQALLKLVDEGRLTRKQGKGTFVNEKKIQTPVFSFYYPEKFGKKHTVLSAQELACSATVQSALELFPGELVYELIRLRYFEDEVVAVETSYLPSAAVPGLLQKNLEGTLYELLITQYNLQIQAYDTTVEPVILTQLETERLQVEGNGQPALKITKIGSTWNKKRLILTKSIFRGDRCKLMFHHE

SEQ ID NO: 540 - DNA, 723 bp, Bacillus clausii KSM-K16
  CDS (1)..(723): transl_table=11
atgattgacaaacagtctcctattccgatttattttcaaattgaggagcttattaaaaagcaaattgccgacgggattttaaaaccaggcgaagcgttgccatctgagcgagaatttgctgacatgtatggcattagccgcatgactgttcgccaaggcattaacaatctagtccagcaaaaaaaactatatcgggaaaaagggcgaggcacattcgtatcgtggcctaaaattgaacaaccactctctaaaatgaccagttttacagaagatatgaaaagccgcaatatggagcctggttcaaagttgctttcttttaaaaccactaaagcggatgaaccgattgccaaagtgctcgcggttgaggaaggcacccctatttatgccattaaacgtgtgcgcctagcagatgagttgcctattgccttggaacggacttatattgcttgcgagctcgccccacatttaaccgctgacacattgaatcattcgctttactcctactttgaacggacatgcggctattcgatttctgacgcagaacagacaatcgcagccgtcctcgctgacgaagaagatgcccggtggcttacggtgcctgccggctccccgcttttggcgattcgccggcaaacaagactggaagacaatcgtgtattagaagccgtttattcccattaccgtggtgaccgctaccactttgtaacgaaaatggtacgttga

SEQ ID NO: 541 - protein, 240 aa, Bacillus clausii KSM-K16
MIDKQSPIPIYFQIEELIKKQIADGILKPGEALPSEREFADMYGISRMTVRQGINNLVQQKKLYREKGRGTFVSWPKIEQPLSKMTSFTEDMKSRNMEPGSKLLSFKTTKADEPIAKVLAVEEGTPIYAIKRVRLADELPIALERTYIACELAPHLTADTLNHSLYSYFERTCGYSISDAEQTIAAVLADEEDARWLTVPAGSPLLAIRRQTRLEDNRVLEAVYSHYRGDRYHFVTKMVR

SEQ ID NO: 542 - DNA, 714 bp, Bacillus clausii KSM-K16
  CDS (1)..(714): transl_table=11
ttggctattcactctcctctatataaacaagtagcggaaaaaattaaaaaggatatttttgcattaaaattaaaaaaagatgaagccattccttccgagaataaattggtagagaagtatcaagtcagcagagttacaatacggcaggcgattaaacttctggtcgaggaggggattttatacagcatcaggggttccggcacatatgtaaaaacggggaaaatcgagcaggacatctatcgcttacaaggctttaccgaagagatgatttatttaaacaaacagcctgctaacgaaattcttgatttttccatgcaagaaccaactgggaaagtgagagaaacattacaactggaagacggagaaaaggtattttttattcgaagattgcggctagctgatggcgaacctctcattttggaggagacgtatatgccagtttcgctgtttcctgacctatccgtcgaagtaatgacccgttctaaatatgcctacgtggaaaagaaagggtaccgtattaaggaaagacagggggagatcttcccgttgctgccggatgaacagcttaagcaaacgttgaagctggaagaaggagagctcgtattgttcatggatctatgggcttatttcgaaaacgatacgatttttgaatacacgaaattatactttaggagtgagaaatacacgtttaagttcacttcaaaacgaatctga

SEQ ID NO: 543 - protein, 237 aa, Bacillus clausii KSM-K16
MAIHSPLYKQVAEKIKKDIFALKLKKDEAIPSENKLVEKYQVSRVTIRQAIKLLVEEGILYSIRGSGTYVKTGKIEQDIYRLQGFTEEMIYLNKQPANEILDFSMQEPTGKVRETLQLEDGEKVFFIRRLRLADGEPLILEETYMPVSLFPDLSVEVMTRSKYAYVEKKGYRIKERQGEIFPLLPDEQLKQTLKLEEGELVLFMDLWAYFENDTIFEYTKLYFRSEKYTFKFTSKRI

SEQ ID NO: 544 - DNA, 741 bp, Gluconobacter oxydans 621H
  CDS (1)..(741): transl_table=11
atgaaaatggacgtctcccgggaacgctctcccgctcggtacgaacaggtcaaactctacattaccgagcgcattcaggacggcgaatggaaagaaggccagaaactcccgtccgagagcgaactggtcgaactcctcggggtctcccgcatgacggtccaccgggcccttcgtgaactgatgaccgaaggcgtcgtggtccgcgcgcagggtgtgggaacattcgtctcgcgcccttcgccaaaggctgaccttctggaacttcacgatatcgctgacgatatcctgagctcaggacacgtccataccgcccgcgtcatcacgctggaagccatccgcgccgatatcgatctcgcgttttccttcgacatgcgtcccggcagcaagctgttccattccgtgatcgtccatttcgaagacgatatcccgcttcaggtggaagaacgtttcgtctctccggcattcgcgcccgaatacctccagcaggacttcaccctcacccatccgcaccggcacctttaccatatctccggccccgacgagatcgaacacgtcgtgttcgccgtctctccaacgccggagctacaatcgctgctggacatcggcccccacgaaccctgcctccagctcgtacgccgcacatgggtcaaaggccgcgtcgtcatgaaaggtatcttcacctaccccggcaaccgttacagcttgggcggccgtcgcaaatcttcctcagataatttttag

SEQ ID NO: 545 - protein, 246 aa, Gluconobacter oxydans 621H
MKMDVSRERSPARYEQVKLYITERIQDGEWKEGQKLPSESELVELLGVSRMTVHRALRELMTEGVVVRAQGVGTFVSRPSPKADLLELHDIADDILSSGHVHTARVITLEAIRADIDLAFSFDMRPGSKLFHSVIVHFEDDIPLQVEERFVSPAFAPEYLQQDFTLTHPHRHLYHISGPDEIEHVVFAVSPTPELQSLLDIGPHEPCLQLVRRTWVKGRVVMKGIFTYPGNRYSLGGRRKSSSDNF

SEQ ID NO: 546 - DNA, 711 bp, Lactobacillus acidophilus NCFM
  CDS (1)..(711): transl_table=11
atgactaaggcaaagtatcaacaaatagaagaaattttgcgtaggcaaattactaatggtcattatcaagaaggcgatctgatacctaaagaatttgatttagctgaaaaatatcaggtttcgcggccaacaattagacatgcagttcaggatctagttaatcaaggttatttagaacgacgtaagcatgtaggtacaattgttaaacagacgaagatcggacaagagtttacacatgtattgcaaagctataatagcgaaatgtcacaaaaggggttaattgcccagactcaagttttgttttttaaaaaagaaaaagcatcggctgaagtagctaaggcattagatttaacagaaaatgcgccagtatacaaactgacgcgtttgcgttctgctgacggtaatcctatcgtattagtgaccacatatctacccgcaagcaagttatctgattttgagaaaatagattttacgcaacaatctctttatcaagaactagagaaaagatcattgccaatcgttcatgttaaacgtaagttagaagtgaagtcggcggatgaaatgacggcaaatctattgaatattgaagaaaaggtacctatcttttatttccacacgtatggttatactaaaggtgaagtgccattagaatattcaattgctatgtatcgtggcgatgagaattattttgtaattgatttaaaaagataa

SEQ ID NO: 547 - protein, 236 aa, Lactobacillus acidophilus NCFM
MTKAKYQQIEEILRRQITNGHYQEGDLIPKEFDLAEKYQVSRPTIRHAVQDLVNQGYLERRKHVGTIVKQTKIGQEFTHVLQSYNSEMSQKGLIAQTQVLFFKKEKASAEVAKALDLTENAPVYKLTRLRSADGNPIVLVTTYLPASKLSDFEKIDFTQQSLYQELEKRSLPIVHVKRKLEVKSADEMTANLLNIEEKVPIFYFHTYGYTKGEVPLEYSIAMYRGDENYFVIDLKR

SEQ ID NO: 548 - DNA, 702 bp, Lactobacillus acidophilus NCFM
  CDS (1)..(702): transl_table=11
atggaagaaccaatgtatatcaagatccacaatcaaattaaacgagatattgaaaatcacgtttataaggtgggggatcgaattccagcagaacgacaattatctgtaaagtttggcgtttcaagaatgactttacgtcaagctattaagacgctggaagaagaagggattcttgaacgacgccttggtagcggaacctacgttgctagtcagaaggtacaggaaaaaatgtcaggtattatgtcgtttactgatatcaccaaagccaatggtcaagttccttcaagtaagctgatttcttatcaaattggtaatccatctttatctgaaaaagagcgtttatcacttaaaatcgatgaaaaagtattgcggatggaaagaattcgttacgctgatgatataccaatttgttatgaagtggttactgtaccttattctttggttaataatttttctaaagaagatatatcaagtcacttatatgaaacgcttgaaaaaagtggtggcttcgcaattggtcgtgttacggaacacatttccgctgcaattgcgaatgaacaagatgcacgtttgttaaatgcaaaaaaaggtgaggctttgatcactagacgtcaggtaactgaactagctagtgggcaaccatttgaatatacgcgtgcacgttacgtggctgaaagatttgaattcactttttctaagtaa

SEQ ID NO: 549 - protein, 233 aa, Lactobacillus acidophilus NCFM
MEEPMYIKIHNQIKRDIENHVYKVGDRIPAERQLSVKFGVSRMTLRQAIKTLEEEGILERRLGSGTYVASQKVQEKMSGIMSFTDITKANGQVPSSKLISYQIGNPSLSEKERLSLKIDEKVLRMERIRYADDIPICYEVVTVPYSLVNNFSKEDISSHLYETLEKSGGFAIGRVTEHISAAIANEQDARLLNAKKGEALITRRQVTELASGQPFEYTRARYVAERFEFTFSK

SEQ ID NO: 550 - DNA, 723 bp, Lactobacillus acidophilus NCFM
  CDS (1)..(723): transl_table=11
atggcaaaggcaaaatatttagaagtcgcagaagaaataaaaaaaagaatccaaaacgatgtatatagtacgcaagagccccttcccgatcaagaggcctttgccaaagaattcgatgttagtagattaaccgttaaaaaagcttttgatggtctagaaagacaaggcttagtatataagcaatcaggtttaggtacctttgtaactggaaacattcctataaagtccgatacggatactccagcaaatgcttttacaggtctaagaaaatcattaggcaaaagtcatgttgaaagcaaagtacttcacttctctgtcgaatttcctgatgagcaaatgcaaaaaaatctttctattcaaagaaatgaacccgtttataatattgttcgtttaagactttataacaatgagccatttattattgagcatacctatatgcctattaaattggtaccagaattagatgaagagatccttcataattcaatttatgattatattcatcaaaagttgcatctaaagtttggacatgcttatcgcaaaattcgtgcagccaaacctaacaaatacgacttaaagtatttaaacgcaaaaaaagacgatcctatgcttgaacttgaacagattatttggttaaccaatggacaaccaatcgaatattcaactagtcgcaatcgctatgatacacgtgactacgtattactagataataatagattttag

SEQ ID NO: 551 - protein, 240 aa, Lactobacillus acidophilus NCFM
MAKAKYLEVAEEIKKRIQNDVYSTQEPLPDQEAFAKEFDVSRLTVKKAFDGLERQGLVYKQSGLGTFVTGNIPIKSDTDTPANAFTGLRKSLGKSHVESKVLHFSVEFPDEQMQKNLSIQRNEPVYNIVRLRLYNNEPFIIEHTYMPIKLVPELDEEILHNSIYDYIHQKLHLKFGHAYRKIRAAKPNKYDLKYLNAKKDDPMLELEQIIWLTNGQPIEYSTSRNRYDTRDYVLLDNNRF

SEQ ID NO: 552 - DNA, 720 bp, Salmonella enterica subsp. enterica serovar Choleraesuis str
  CDS (1)..(720): transl_table=11
atgatcgagcaacccgacagtaaaagcgccaaaccgctttataagcagcttgaagacgccttaaaagaggctattgcgcgtggagagtataaaccaggccagcagatcccgacggaaaatgaactgagcgtgcgctggcaggtgagcagggtcacggtccgtaaggcgctggatgcgctgacgcgtgaaaatttgctgacccgtgtctccggcaaaggcacctttgtttctggtgagaaatttcagcgtagcatgaccggcatcatgagtttcagcgagttatgccagtcccagggacgtcgcccggggtcacgcaccatcaaatccgtttttgaatcggtagacgatgagacaaaagcgttactgaatatgaacgatggcgaaaaagcggtcgtcattgaacgtatccgctatgccgacgatgtggcggtatcgctggaaaccgtacatcttcccccacgttttgcgtttttgctggacgaagatcttaataatcactctttgtatgaatgcttacgcgagaaataccatttatggtttacccactcccgtaagatgatcgaactggtttatgccagctttgaagtcgcccattatcttggcgtcaacgagggttatccgctgatcctgacaaaaagtgaaatgattgataacaaaggagaactctcctgcgtttcgcaacagttgattgtcggcgataaaatacggtttactgtatga

SEQ ID NO: 553 - protein, 239 aa, Salmonella enterica subsp. enterica serovar Choleraesuis str
MIEQPDSKSAKPLYKQLEDALKEAIARGEYKPGQQIPTENELSVRWQVSRVTVRKALDALTRENLLTRVSGKGTFVSGEKFQRSMTGIMSFSELCQSQGRRPGSRTIKSVFESVDDETKALLNMNDGEKAVVIERIRYADDVAVSLETVHLPPRFAFLLDEDLNNHSLYECLREKYHLWFTHSRKMIELVYASFEVAHYLGVNEGYPLILTKSEMIDNKGELSCVSQQLIVGDKIRFTV

SEQ ID NO: 554 - DNA, 744 bp, Salmonella enterica subsp. enterica serovar Choleraesuis str
  CDS (1)..(744): transl_table=11
atgaaaacattgagtaaaagttcacacatcccactgtatcaacagattgtggagtggataagggaaagtatttatagcggagaattggttgaggatgaccggataccttcagagtttcaaatcatggatatgctggaggtgagtcgcggtaccgttaaaaaagcggttgaccaacttgtccgggaaggtgttcttgtgcaagtgcagggtaaaggaactttcgtaaagaaggaaaatgttgcttacccactgggtgaaggtttgctctcctttgctgaagccttagccagccagaagataaacttcacaaccagtgttataacctcccgactggagcccgctaaccgctttgtagcagagaaactgagtatcaaaccgggacaagatgttttatttcttaaacgccttcgttgtattggcgatgaaaaagtcatgttgattgaaaatcgtatcaacattgatctctgccccggtattattgatgtagattttaccagggagaatttattttcagcaatagaaagattatctgataagaaaataagtttttctgaaagccgttacgcagctaaattaattggtaatgagcgaggccattatcttgatattggtgaagacgcacctgttttgcatttggaacagttggtatttttctctagaggattggccattgattttggtaacgtctggttaaaaggtaataaatattatcttggcactattttacagcgcctggatgcctaa

SEQ ID NO: 555 - protein, 247 aa, Salmonella enterica subsp. enterica serovar Choleraesuis str
MKTLSKSSHIPLYQQIVEWIRESIYSGELVEDDRIPSEFQIMDMLEVSRGTVKKAVDQLVREGVLVQVQGKGTFVKKENVAYPLGEGLLSFAEALASQKINFTTSVITSRLEPANRFVAEKLSIKPGQDVLFLKRLRCIGDEKVMLIENRINIDLCPGIIDVDFTRENLFSAIERLSDKKISFSESRYAAKLIGNERGHYLDIGEDAPVLHLEQLVFFSRGLAIDFGNVWLKGNKYYLGTILQRLDA

SEQ ID NO: 556 - DNA, 744 bp, Pseudomonas syringae pv. syringae B728a
  CDS (1)..(744): transl_table=11
atgaataaaataatgaacaagctttccagcgacgaacgtctaccgctttatcagcgcctgcgcgacagcctggcgcaacagatcgccaacaatcgctggcgtccgggtgaggcgattcctaccgaagcggctttgtctgccgagtattgcctgtccaccggcacggtgcgcaaggccattgatctgctggtcagtgacaacattctggagcgtcagcaggggcgtggcacgttcattcgtcgtgcgcagtttcagtcttcgctgtttcgttttttccgttttcaaaccgaagcgggtgaacgccgggtgccggaaagccggattttgtccgtcgagcctgtggacgcgccttcgtcggtcgctcaggcgttggggatggccgccggtgccccggtgattcgtatggtccgcttgcggttgatggatggccagccggtgctggccgaagagatctggctgccacgtgcgcggtttcaggcattgctggagcttgacctcgatacgcaggggccattgctttatccgatctacgaagacgcctgcggtcaggtggtcgcctgtgcgcaagaaagcctgacggccgagacggtcaacgacgtgtacggccggctgctgcagattccggtcggcagtgcggtggtggtcatcgaacgcctggcgctcaattacgcgggtgaacctctggaatggcgtcgttcgcgagggcacgccagtcatttccgctacagcgtggaaattcgctga

SEQ ID NO: 557 - protein, 247 aa, Pseudomonas syringae pv. syringae B728a
MNKIMNKLSSDERLPLYQRLRDSLAQQIANNRWRPGEAIPTEAALSAEYCLSTGTVRKAIDLLVSDNILERQQGRGTFIRRAQFQSSLFRFFRFQTEAGERRVPESRILSVEPVDAPSSVAQALGMAAGAPVIRMVRLRLMDGQPVLAEEIWLPRARFQALLELDLDTQGPLLYPIYEDACGQVVACAQESLTAETVNDVYGRLLQIPVGSAVVVIERLALNYAGEPLEWRRSRGHASHFRYSVEIR

SEQ ID NO: 558 - DNA, 768 bp, Xanthomonas campestris pv. campestris str. 8004
  CDS (1)..(768): transl_table=11
gtgagaacacccatggccaaagccaacgcggagggggacaagcgactggacgacctgcgtcttgacgcctccgcgcccacaccgctgtacctgcagctggccgccaagctcggcgaggcgatccgcggtggccactggaaggccggcgaagcgctgcccgccgagcgccagctgtgcgagcggctgcagatttcgcgggtcaccttgcgccaggcggtggatgcgctggtcgagcaaggcctggtctcgcgtcgccagggcgccggcacctttgtcacctcgcatatccagcaccagctcagcggcttgaccagtttcagtgagacgctgcgcatcaaaggctacgagcccggcaccaagtggctggaacggcgcctgcggcccgcgcatggcgaggaaatcctgcgcctggggctgtcgccggatgcggcggtcgcctcgctcacccgcctgcgcagcgccgatgaccgcgtcatggcctacgaacacgccgtgttgccgcagcgcgtggtcgccgacccggagcaggtgggcgattcgctctacagttttctcgatgcgcaaggcaccccggtggtgcgtgcgctgcagtacttccgcgcgatcaatctgccggcacggctggccgaacacctgcgcatgaagaccggcgaggcgatcctgcatgtggtgcgcgtgggctacacccgcgacggcagcgcgatcgaactcaccgacacctattgccacaacgacttctacgacttcgtcgccgaactgcgccgctga

SEQ ID NO: 559 - protein, 255 aa, Xanthomonas campestris pv. campestris str. 8004
MRTPMAKANAEGDKRLDDLRLDASAPTPLYLQLAAKLGEAIRGGHWKAGEALPAERQLCERLQISRVTLRQAVDALVEQGLVSRRQGAGTFVTSHIQHQLSGLTSFSETLRIKGYEPGTKWLERRLRPAHGEEILRLGLSPDAAVASLTRLRSADDRVMAYEHAVLPQRVVADPEQVGDSLYSFLDAQGTPVVRALQYFRAINLPARLAEHLRMKTGEAILHVVRVGYTRDGSAIELTDTYCHNDFYDFVAELRR

SEQ ID NO: 560 - DNA, 726 bp, Staphylococcus haemolyticus JCSC1435
  CDS (1)..(726): transl_table=11
atggcaacacaaaaattcataacaatatatgaacaacttaaacaacgaatacatgagggtgaatacacatacggacaacagctaccttcagaacatgaattattaacgctgtacggagcgtcacgtgagactgttagaaaagcattggatttattagcaaatgatggcatgattcaaaaaattaggggtaaggggtccgttgtaatagatcaaggtattacggagtttccgttctcagaattgattagcttcaaagaagtgcaagaggaacttggtctcaagcatgaaacggaagtgctcattaacgaattggttaaagcaagctcagttcttcatgttaaaaaacaattgaatattagtaatgatgatgtactaatccatgtagtacgcacgagaaacgtcaatcaaaaggtcaaaattttggatgaagattactttttaacttcaatagtgtccaatatttcggattcagtagcaaaagattctatatatcattacttagaaacgcaattaggattagatatcagttattcaagtaagtcgattacctttgagccttttactgaaagagaatataatgtttttgggaaaatacaaccgccatataccgcaacagtgagaagtgtcgtttatttaaaaaatacgatgccattccaatacaatgtgtcgaagcatttagcgacagagtttaaattccaagaattttcaagacgacacaaattataa

SEQ ID NO: 561 - protein, 241 aa, Staphylococcus haemolyticus JCSC1435
MATQKFITIYEQLKQRIHEGEYTYGQQLPSEHELLTLYGASRETVRKALDLLANDGMIQKIRGKGSVVIDQGITEFPFSELISFKEVQEELGLKHETEVLINELVKASSVLHVKKQLNISNDDVLIHVVRTRNVNQKVKILDEDYFLTSIVSNISDSVAKDSIYHYLETQLGLDISYSSKSITFEPFTEREYNVFGKIQPPYTATVRSVVYLKNTMPFQYNVSKHLATEFKFQEFSRRHKL

SEQ ID NO: 562 - DNA, 732 bp, Pseudomonas fluorescens Pf-5
  CDS (1)..(732): transl_table=11
atgaatcacctcctggccctgcgccccgacgactcccaacccactccgctgtacctgcaactggctcgcaacctggaagcggcaatccatgccggccagtggaaagccgagcaggcactgccgtcggaacgcaacctcagcgaattgctggggatctcccgggtcaccgcgcgcaaggccctggaagtgctcttcgaacagggcttgatccgccgcagccagggctcggggaccttcatcaccccgcgcctggagcaaccgctgtcgcggctctccggcttcagcgaaatgctgcgcctgaagggtttcgtgcccggctcccaatggctggaacgcaccctcaccccgcccacccatgaagaactgatccgcctcggcctgtcgcccaacgacaaggtggcgcggctcaagcgcctgcgcaaagccgatgacacagtgatggccatcgagatgagcaccctgccggccagcatcatcgcccagccggaagcggtcggggattcgctctatgaatacctcgatggcatcggcaagcccgtggtgcgggcgctgcagcacatccaagcgatcaatgcctcggacgaattcgccgccctggtgggcatcgcccccggcaccgccatgttgctgatgacccgggtcggctacctggaagacaacacgccgatcgaggtcaccgacacctactgccgcaacgactactacgacttcgtcgctgaactgcgacgctga

SEQ ID NO: 563 - protein, 243 aa, Pseudomonas fluorescens Pf-5
MNHLLALRPDDSQPTPLYLQLARNLEAAIHAGQWKAEQALPSERNLSELLGISRVTARKALEVLFEQGLIRRSQGSGTFITPRLEQPLSRLSGFSEMLRLKGFVPGSQWLERTLTPPTHEELIRLGLSPNDKVARLKRLRKADDTVMAIEMSTLPASIIAQPEAVGDSLYEYLDGIGKPVVRALQHIQAINASDEFAALVGIAPGTAMLLMTRVGYLEDNTPIEVTDTYCRNDYYDFVAELRR

SEQ ID NO: 564 - DNA, 705 bp, Pseudomonas fluorescens Pf-5
  CDS (1)..(705): transl_table=11
atgagcaaatacaaccagatctacagcgatctgcttgccagcatcaccaccgaacgtctggagcgtggcgcccgcctgccttcggaaagcgaactgatggacagctaccaggccagccgcggcaccgtgcgcaaggccatcgaactgctgcaggagcgcggcttcgcgcagaagatccacggcaagggcaccttcgtgctctcgcccaatcccatcgagttccaactgggcggcatcgtcagcttccaggaaacctatccagggctgggggatgacgtcagcaccgaggtggtggagttcagccagtttcctctcgaaggcccgctgcgggcccatctgcaagccgaagaaggcagcctgatcacccggatcaagcgggtcaggcgcattgacggcaaacgggtgattctcgacatcaaccactttgtcgccgatctgattccagggctggaccggcagatcgccgagcagtcgatctatgcctacatcgaacaaaccctgcaattgagcatcagctacgcccaacgcaccatcgaggccagcccgcggagcaaggacgaccagcagttgctcgacctggacggccagagccacgtgatcgtggtgagcaaccagacctttctccaggacgggcgccagttcgagtacaccgaatcacggcacaccctggacaagttctacttctccgacgtggcgcggcgctga

SEQ ID NO: 565 - protein, 234 aa, Pseudomonas fluorescens Pf-5
MSKYNQIYSDLLASITTERLERGARLPSESELMDSYQASRGTVRKAIELLQERGFAQKIHGKGTFVLSPNPIEFQLGGIVSFQETYPGLGDDVSTEVVEFSQFPLEGPLRAHLQAEEGSLITRIKRVRRIDGKRVILDINHFVADLIPGLDRQIAEQSIYAYIEQTLQLSISYAQRTIEASPRSKDDQQLLDLDGQSHVIVVSNQTFLQDGRQFEYTESRHTLDKFYFSDVARR

SEQ ID NO: 566 - DNA, 801 bp, Pseudomonas syringae pv. phaseolicola 1448A
  CDS (1)..(801): transl_table=11
ttgacgcccaacggcgacgtgccaataatccgctcaaatattcatatatatgactggataactacaacaatgaacaagctctccagcgacgaacgccttccgctttatcaacgcctgcgcgacagtctggccgaacagattgccaataatcgttggcgtccgggtgaagccattcctactgaagcggcgctgtccgctgagtattgcctgtccaccggcaccgtgcgcaaggccattgatctgctggtcagcgacaacgttctggagcgccagcaggggcgtggcacgtttattcggcgtgccaggtttcagtcgtcgctgtttcgttttttccgttttcagaccgaagcgggcgagcgccgtgtaccggaaagccggattttatcaatagagcctgtggctgcgccttcagcggtcagtcaggcgctgggtctggtggccaatgcgccggtcattcggatgatccggctgcgcttgctggatggtcagccggtgctggctgaagaaatctggctgcctcggatccgcttccaggcgttgctggatatggatctcgatactcaggggccgttgctttatccgatctatgaagaggcttgcggtcaggttgtggcttatgcgcaagagagcctgacggctgaagcggtcaacgaggtgtacggccggttgctgcaggtttcggccggcagcccggtagtggtcattgaacgactggcgcgtaattacgccggtgaacctctggagtggcgacgttcacgagggcacgccagccatttccgctacagcgtggaaattcgctga

SEQ ID NO: 567 - protein, 266 aa, Pseudomonas syringae pv. phaseolicola 1448A
MTPNGDVPIIRSNIHIYDWITTTMNKLSSDERLPLYQRLRDSLAEQIANNRWRPGEAIPTEAALSAEYCLSTGTVRKAIDLLVSDNVLERQQGRGTFIRRARFQSSLFRFFRFQTEAGERRVPESRILSIEPVAAPSAVSQALGLVANAPVIRMIRLRLLDGQPVLAEEIWLPRIRFQALLDMDLDTQGPLLYPIYEEACGQVVAYAQESLTAEAVNEVYGRLLQVSAGSPVVVIERLARNYAGEPLEWRRSRGHASHFRYSVEIR

SEQ ID NO: 568 - DNA, 699 bp, Streptococcus pyogenes MGAS5005
  CDS (1)..(699): transl_table=11
atgttaccagcttatataaaaattcatgatgcaattaaaaaagacattgatctgggcatctggccaattggtagtcgcttaccaagtgaacgacatttagcggaacatttcaccgttagtcgaatgactctacggcaggctattacattactagtagaagaagggattcttgaaaggcggataggaagtggtacttatgttgccagtcatcgtgttcaagaaaaaatgcgaggaacaacaagtttcacagaaattatacgctcccaaggacgacaaccctcctctaaattattatcctatcaaaagcaattagctagtgataccgaagttaaagaattgaacttagacaaaacagacttggtcattcgaatggaacgtatccgctatgcagacagtgtccctttggtgtacgaaattgcttcaatcccagaaaaatttataaaaacggttaaacgagctgatattacagaacacttttttcactcattgatagcaaatggttacgagattggtaaaagtaaacagacaatctacgctaagctagcaagtgagcgtgtagcctcctacttggaagttgctaaaggacatgccattttggctctaactcaggtgtcttactttacagacggcaaaccttttgagtatgtccgcagtcagtatatcggtgaccgttttgaattttacttagaaaataattag

SEQ ID NO: 569 - protein, 232 aa, Streptococcus pyogenes MGAS5005
MLPAYIKIHDAIKKDIDLGIWPIGSRLPSERHLAEHFTVSRMTLRQAITLLVEEGILERRIGSGTYVASHRVQEKMRGTTSFTEIIRSQGRQPSSKLLSYQKQLASDTEVKELNLDKTDLVIRMERIRYADSVPLVYEIASIPEKFIKTVKRADITEHFFHSLIANGYEIGKSKQTIYAKLASERVASYLEVAKGHAILALTQVSYFTDGKPFEYVRSQYIGDRFEFYLENN

SEQ ID NO: 570 - DNA, 714 bp, Streptococcus pyogenes MGAS5005
  CDS (1)..(714): transl_table=11
atgacaaagtatgaacgtatttataaagacctcgaaacaaaaataaacaaagacttttacaaagaaggggattttttacctactgaaatagaattgagtcaacaataccaagctagccgagataccgtccgcaaggctctctcacttctcacaaaggcaggtcttatcctcaaaaaacaaggacgtggcacccaagtgattagacatcatcagatcatgttccctatctcagaactaactagttatcaggaactcgtctcttactcaaatctagattctaagaccaacgtcattgccattgataaactgattgtggatgagacactttcaaaattgaccggttttagcaaaaacagcttggtctggcgtgttacacgccaacgcgttgttgagggtgtggcttccgtcttagacattgattaccttagtaaaactttggtgccaataatgacaagggaaatcgcagagcattctatttatcaatatttggaaaaggaactccatctcgccattgactttgccctcaaagaggttaccattgaccaaataaccgatcgtgataaaattttacttgaccttggatcagaccaacatgttgtttccgtcaaatccaaagtctacctttccaataataaccaattccaattcaccgagagtcgccataaactggaaaaatttaaatttttagattttgctcggcgcagaccaaaataa

SEQ ID NO: 571 - protein, 237 aa, Streptococcus pyogenes MGAS5005
MTKYERIYKDLETKINKDFYKEGDFLPTEIELSQQYQASRDTVRKALSLLTKAGLILKKQGRGTQVIRHHQIMFPISELTSYQELVSYSNLDSKTNVIAIDKLIVDETLSKLTGFSKNSLVWRVTRQRVVEGVASVLDIDYLSKTLVPIMTREIAEHSIYQYLEKELHLAIDFALKEVTIDQITDRDKILLDLGSDQHVVSVKSKVYLSNNNQFQFTESRHKLEKFKFLDFARRRPK

SEQ ID NO: 572 - DNA, 756 bp, Dechloromonas aromatica RCB
  CDS (1)..(756): transl_table=11
atgacccgtgacgtctcccgtcctgccccccgtttgtcctcgccgaccttcagtccgctctatcgccagataaaggattttctgatccgtagtctggagcagggggagtgggggccgggtgatgccattcctagcgaaggggagttggctgcgcgttttaatgtcagccagggaactgtgcgcaaggcgattgatgagatggccgccgagaatcttctggtcaggcgtcaagggaagggaacctttgtcgccacgcatagtgatccgcgctccttctatcgctttctgcgccttgtgcccgatgatggcaaggcaacgcatgcggtcagtgacccatttttttgcgaaaccatcgctgcgacgcctgaggtggccgtggcgctgggtttgcagccgggtgatagtgtgcttcacgtcaaacgcctgctgcgtttcaacggtgagccggtggtttttgatcagatttatctggttgccgacctgttcaacggcttggcgctggagggcttgcgcgctggtgagcgttccttgtacagcctttttgagggcgattttggtgtccgcatgattcatgccgaggagcatttgcgggcggttgctgctgatctgcaaagcgccgaattgcttggggtgcaaaagggtgagccgctccttcttgttgaaagaacggcctatacctatggaaacaagccggtcgagtggcgtcgtggtctgtactgtacgcggcggcattactatcggaacgatttggggtga

SEQ ID NO: 573 - protein, 251 aa, Dechloromonas aromatica RCB
MTRDVSRPAPRLSSPTFSPLYRQIKDFLIRSLEQGEWGPGDAIPSEGELAARFNVSQGTVRKAIDEMAAENLLVRRQGKGTFVATHSDPRSFYRFLRLVPDDGKATHAVSDPFFCETIAATPEVAVALGLQPGDSVLHVKRLLRFNGEPVVFDQIYLVADLFNGLALEGLRAGERSLYSLFEGDFGVRMIHAEEHLRAVAADLQSAELLGVQKGEPLLLVERTAYTYGNKPVEWRRGLYCTRRHYYRNDLG

SEQ ID NO: 574 - DNA, 747 bp, Thermobifida fusca YX
  CDS (1)..(747): transl_table=11
gtgacgggtcaacgaactgttgaggacagtccccgggttccgaagtactaccaggtcaaaaaacagctgttgcagttgatcgagacgatgcccgcgggcaacccggtccccccggagcggacgctggcgacccaattcggcacgtcccgcacgacggtgcgacaggcgctcagcgaaatggtggtggagggacggctgctgcgcatccagggcaagggcacctttgtcgccaagccgaaggtgacccaggtcctgcagttgaccagctacacccaggagatgcgttcgcacggcctccagccagacacccggattctcgacgtgggctacatcaacgcggatgaggagctggccgggctgctggcgatccggctcggcggccgggtactgcgcatcgaacgactgcggctggccaacggcgagccgatggctgtggaaaccgcgcacctgcccgcacgccggtttcccgggctacgccgccgcctggaccggcatgcttcgctctacgaagcgctggcgaccgtctacaacgtgcacctcgcggaagcggaagcgactatcgagacggtgctggctaccccgaaagaagcgcagttgctcggcgtggacgtcggcctgccgctggtcctgcactgccagcacagttttgacgacgagggcaatccagtggagtgggtacggtcgctctatcgcggcgaccggtacaagttcgtcacccggctccgcccgccgaaggagcggacgtag

SEQ ID NO: 575 - protein, 248 aa, Thermobifida fusca YX
MTGQRTVEDSPRVPKYYQVKKQLLQLIETMPAGNPVPPERTLATQFGTSRTTVRQALSEMVVEGRLLRIQGKGTFVAKPKVTQVLQLTSYTQEMRSHGLQPDTRILDVGYINADEELAGLLAIRLGGRVLRIERLRLANGEPMAVETAHLPARRFPGLRRRLDRHASLYEALATVYNVHLAEAEATIETVLATPKEAQLLGVDVGLPLVLHCQHSFDDEGNPVEWVRSLYRGDRYKFVTRLRPPKERT

SEQ ID NO: 576 - DNA, 768 bp, Ralstonia eutropha JMP134
  CDS (1)..(768): transl_table=11
atgaaccacgccgtcggccaggggcctgccacttccgctacgaactctcccaccgcgctctaccagcaggtgaaagagtacatcgcccgccagatccagagcggtgcgtggcagccgggcgaccgggtgccgtcggagcaggagctggtgacccgcttcggtgtgtcgcgcatgaccgtcaaccgcgcactgcgcgagctgtccgagcagggcagggtggtgcgcgtggccggcgtgggtaccttcgtggcggagcacaagccgcagtccacgctgcttagcgtggtcaacctgcaggacgaaatccgcatgcgcggccatgactatgcctgcgacgtgatcctggtggagcgcgtggccgcgtcgatcgaagtggccgcggcgctggagttgcgcacgggcgagtcggtcttccactccgtctgcgtgcaccgcgaggacggcgtgcccgtgcagctcgaagaccgctatgtcaatccgcgcgtggcaccggatttcattacgcaggacttcagcggcatcaagcccggcgagtacctgctgcgcaatgtgccctacgatcaggtcgagcacgtggtcgacgccatctccgccacgcccgagcaggccgcgcaactcgaaatgccgccgacgcaaccttgcctgatgctgacacgccgcacgtggaccaatggcgtgcccgtgaccttcgtgcgttgcctgcaccccggcaaccgctaccgcctcggcagccgcttccgcgccgacggcaatcccgccttcggctga

SEQ ID NO: 577 - protein, 255 aa, Ralstonia eutropha JMP134
MNHAVGQGPATSATNSPTALYQQVKEYIARQIQSGAWQPGDRVPSEQELVTRFGVSRMTVNRALRELSEQGRVVRVAGVGTFVAEHKPQSTLLSVVNLQDEIRMRGHDYACDVILVERVAASIEVAAALELRTGESVFHSVCVHREDGVPVQLEDRYVNPRVAPDFITQDFSGIKPGEYLLRNVPYDQVEHVVDAISATPEQAAQLEMPPTQPCLMLTRRTWTNGVPVTFVRCLHPGNRYRLGSRFRADGNPAFG

SEQ ID NO: 578 - DNA, 750 bp, Ralstonia eutropha JMP134
  CDS (1)..(750): transl_table=11
atgtctgatcaggaagtcgaacgaggttccggcgttgcggtatggcgccagattggcgaggcgctggcgcaggatatccgcaacaagctgtatggccccggcgagcaactgccgcctgagcccgagctggccagccggttcgcggtgaaccgccataccatccgccgcgccatgggcgagctggagctgaatggtctcgtgcggatcgagcagggccgcggcacgttcgtccaggaacatgcgatcgactatgcgatcggtcgccgcacacgtttttcgcagaacctggcggcacagggcatgcgcggccacgtcgagattctcgaaagcagcatggtgcgcgcgcccgaggtcgccaagcagctgggcctgccgcgtacggcggacatcctgcacgtccaggtgatcggcaaggccgaagcacgcaccatcgacgtcgccgagcattacttcgatggcaagcgctttccggctttggctgacgagatccgggagcaactgtcgatctcgcgcgcgctcgcgcacttcggcattgccgactacacacgcaagtggtcgcgcatcaccgcgtcgatgccgagcgcaccggtcgcacgcctgctgaaccagccgaagacgcgccccgtgcttcaagtggaagcactcaacgtggatatcgacggtgcaccgctgcaatacagcatgacccgttttgcaggagactgggtgcagctcaccgtttccgacagcgaatcgccagtcattccatga

SEQ ID NO: 579 - protein, 249 aa, Ralstonia eutropha JMP134
MSDQEVERGSGVAVWRQIGEALAQDIRNKLYGPGEQLPPEPELASRFAVNRHTIRRAMGELELNGLVRIEQGRGTFVQEHAIDYAIGRRTRFSQNLAAQGMRGHVEILESSMVRAPEVAKQLGLPRTADILHVQVIGKAEARTIDVAEHYFDGKRFPALADEIREQLSISRALAHFGIADYTRKWSRITASMPSAPVARLLNQPKTRPVLQVEALNVDIDGAPLQYSMTRFAGDWVQLTVSDSESPVIP

SEQ ID NO: 580 - DNA, 798 bp, Shigella sonnei Ss046
  CDS (1)..(798): transl_table=11
gtgctgttacttgccggaaaacgaccctataatccgtgtaattcattctttatttcagggtcgattatgtcagctacggaccgctactctcatcaactcctctacgctaccgtccgccagcggctgctggatgatatcgcgcagggggtttaccaggccgggcaacagatccctaccgaaaacgagctttgtacgcaatataacgtcagccgcattactattcgcaaagctatcagcgacttagtggcagacggcgtactgatccgctggcagggcaaaggcacctttgtacaaagccagaaagttgaaaacgccctgcttactgtcagtggttttaccgattttggcgtctcacaaggcaaggcgacgaaagagaaagtgatcgaacaggaacgggtcagcgccgcgccgttttgcgaaaagctgaacatccccggaaacagcgaagtgttccatctctgccgggtgatgtatctcgataaagagccgctgtttattgatagttcatggatcccgctgtcgcgttatcctgactttgatgagatttacgtcgaaggaagctccacctatcagttatttcaggagcgttttgacacgcgagtggtcagcgacaaaaagaccatcgatatctttgccgccacccgcccgcaggcaaaatggctgaaatgcgaactgggcgaaccgttgtttcgcatcagcaaaatcgcctttgatcagaatgacaaaccggtgcacgtctccgaactcttctgccgcgccaatcgcatcaccttaacgattgataataaaagacattaa

SEQ ID NO: 581 - protein, 265 aa, Shigella sonnei Ss046
MLLLAGKRPYNPCNSFFISGSIMSATDRYSHQLLYATVRQRLLDDIAQGVYQAGQQIPTENELCTQYNVSRITIRKAISDLVADGVLIRWQGKGTFVQSQKVENALLTVSGFTDFGVSQGKATKEKVIEQERVSAAPFCEKLNIPGNSEVFHLCRVMYLDKEPLFIDSSWIPLSRYPDFDEIYVEGSSTYQLFQERFDTRVVSDKKTIDIFAATRPQAKWLKCELGEPLFRISKIAFDQNDKPVHVSELFCRANRITLTIDNKRH

SEQ ID NO: 582 - DNA, 729 bp, Thiobacillus denitrificans ATCC 25259
  CDS (1)..(729): transl_table=11
atgagtcttgtggctttgcaacggaatggcggcgaagcgatctatagccagatcgcgaaattgctcaagggggagatcgcttcgttcctgtcgccgggcgcctgcctgccttcggaaaatgagttggcggagcgttttggcgtcaatcggcacacgatacgacgcgcagtagaggacttgatcgccgccgggttactggagcgccgccacggcaagggcactttcgtactcgatgcccccgccgactatgtgctgggcagcggcacgcgcttcacggaaaccttcgaatccctcggcaagactgccagcagccgcgtcttgcgcaagttggtcatcccggcgagaggtggcgttgccacccgcctgcgcctggctgaaaacgatcccgtcgtctggatcgaatccctgcgcctggcagacgaccgggccatctgcgtgatttcccatttcctgccgcggcaggccttccccgacgtgctggcggactaccccggcggctcgctgcacgaacatcttgccgtccgccacggactgaagctgcggcgcatcgaaagcctggtcagcgcggcactcccgcaaggcgacgacgcctcgctgctgggcatggcccagaaccagccggtgctgcgggtcaaaagcgtcaatgtagacgagcgggacggtaccccgctcgaatacgccctgacccggttccgcgccgaccggatccaactgcgcatcaatccttga

SEQ ID NO: 583 - protein, 242 aa, Thiobacillus denitrificans ATCC 25259
MSLVALQRNGGEAIYSQIAKLLKGEIASFLSPGACLPSENELAERFGVNRHTIRRAVEDLIAAGLLERRHGKGTFVLDAPADYVLGSGTRFTETFESLGKTASSRVLRKLVIPARGGVATRLRLAENDPVVWIESLRLADDRAICVISHFLPRQAFPDVLADYPGGSLHEHLAVRHGLKLRRIESLVSAALPQGDDASLLGMAQNQPVLRVKSVNVDERDGTPLEYALTRFRADRIQLRINP

SEQ ID NO: 584 - DNA, 699 bp, Streptococcus agalactiae A909
  CDS (1)..(699): transl_table=11
ttgttaccagcatatattaaaattcacgacgctattaaaaaggaaatcgataaagggacttggaagattgggcagcggttacctagcgaaagagatttagcggatgattatagtgtaagtcgtatgacacttcgccaatcaattacattgttagttgaagaaggtattttggagagacgagttggtagtggcacctatgttgctagtcatcgtgttcaagaaaaaatgcggggaacaactagttttacagaaattgtcaattctcaagggcgtaagccatccagtaaactaatctcatttcaaagaaaactagcaaatgaaaccgaaattcaaaaattaaatttatcacagtcagattatgtggttcgtatggaaagggtacgttatgctgataaggtaccgttggtttatgaggtagcctctataccagagaatttaattaaaggttttgaacaatcagaggttacagaacatttctttaaaaccttaacagagaatggctacgaaattgggaaaagccaacaaactatatatgctagaaatgctagtgaacgtgttgcttcgcatttagaagttaacgcaggccatgctattttggcattgacacaagtttcatactttactgatggtaagccttttgaatatgttcatgggcaatatgttggagatcgttttgagttttatttagagaataactag

SEQ ID NO: 585 - protein, 232 aa, Streptococcus agalactiae A909
MLPAYIKIHDAIKKEIDKGTWKIGQRLPSERDLADDYSVSRMTLRQSITLLVEEGILERRVGSGTYVASHRVQEKMRGTTSFTEIVNSQGRKPSSKLISFQRKLANETEIQKLNLSQSDYVVRMERVRYADKVPLVYEVASIPENLIKGFEQSEVTEHFFKTLTENGYEIGKSQQTIYARNASERVASHLEVNAGHAILALTQVSYFTDGKPFEYVHGQYVGDRFEFYLENN

SEQ ID NO: 586 - DNA, 696 bp, Burkholderia pseudomallei 1710b
  CDS (1)..(696): transl_table=11
atgagcacgcccgcctatcaggaaatcaaggatttcatccttgcgcgcattcacgccggcgaatgggcggagggcgatcaggtgccgtccgagaacgagctcgcgcgcgagttcaaggtcgcgcggatgaccgtcaaccgcgcgctgcgcgagctgacggccgagcaggtgctcacgcgcatccagggggcgggcacgttcgtcgcgcggccgaagtacgaatcgacgctcgtcgcgatccgcagcatctccgacgaagtcgccgcgcgcggccaccggcatcacgcgcgcgtgctcgacctcgtcacgatgaaggccgacgaagcgctcgccgacgagatgcagatgccgcctcacacgaggctcttccgctcggtgatgctgcactacgagaacgacgagccggtgcagctcgaggagcgctgggtgaatccggccgtcgccgccgattacgcggatcaggatttctcggcgatcacgccgaaccagtacctgatgcgcgtcgcgccgctgcagcgcgtcgaataccggatcgaggcggcgatgcccgatcgcgcgatgcgcgaggcgctcgagatggccgataccgaaccgtgcctcgtgctgcatcggcgcacgtggtcgcagggcgtcgtcgcatcggtcgtgaacctctggcatccgggcagccgctatcgcttcaccggccatttctga

SEQ ID NO: 587 - protein, 231 aa, Burkholderia pseudomallei 1710b
MSTPAYQEIKDFILARIHAGEWAEGDQVPSENELAREFKVARMTVNRALRELTAEQVLTRIQGAGTFVARPKYESTLVAIRSISDEVAARGHRHHARVLDLVTMKADEALADEMQMPPHTRLFRSVMLHYENDEPVQLEERWVNPAVAADYADQDFSAITPNQYLMRVAPLQRVEYRIEAAMPDRAMREALEMADTEPCLVLHRRTWSQGVVASVVNLWHPGSRYRFTGHF

SEQ ID NO: 588 - DNA, 1131 bp, Burkholderia pseudomallei 1710b
  CDS (1)..(1131): transl_table=11
gtgacggcaacgcgctttgcgggcttagccattgaaaatctccaggacattgagcgtgggacgctagggaaaacgccattctatgcgcgttacgcgaagcgttgctttaaagcagggcggaggactcgcggcatgcatgcgcgacgacgcctgaagataggcagaggcacgtggcccgggacgcgccgcagccccgcgaacccttgctcgccccggagtttaggaggcgggacgggtaaagtcaaacggtatcttatgtcttatataagacagatgttttcgagggaaaaatctggacggaaaagcgcgattcatgatgaaatgcgcgccatgacttccaatcaggcgagcgcacccaatccgaacggccaggccggctccacgcagccgggcggcgaggccgcggctgcgccatcgcccactttcagcccgctctaccggcagatcaaggcgctcatcacgcagagcctcgaggcgggcgagtggaagccgggcgagatcatcccgagcgaagtcgaactcgccggccgctataaggtgagccagggcacggtgcgcaaggccatcgacgagctggcggccgacaacctgctcgtgcgccgccagggcaagggcacgttcgtcgcgacccacagcgaggagcgtgcgcaattccggttcctgcggctgctcgccgacgacggcgccgagcatccgcacgtgagccggctgctcgaatgccggcggatgcgcgcgcccgccgagatcgcgcgccagctcgatctgaaaccggccgaccccgtcgtccaggtgcggcgcgtgctcgagttcgacggcgtcgatacggtgcttgacgagatctggctgccgggcgcgatgttccgggggctcacgttcgagcgtctgagcgaatacaaggggccgctctacgcgatgttcgagagcgagttcggcacgcggatgatccgcgcaagcgagaagattcgtgcgatcgcggccgagcccgccgtcgccgacgtgctgcgggtgccgcccggctttccgctgctgtcggtcgagcgcgtgtcgtacacgtatggcgatcgtcccgtcgaagtgcggcgcggatggtatgtcacaaccgggtactactatcagaacgatttgagctga

SEQ ID NO: 589 - protein, 376 aa, Burkholderia pseudomallei 1710b
MTATRFAGLAIENLQDIERGTLGKTPFYARYAKRCFKAGRRTRGMHARRRLKIGRGTWPGTRRSPANPCSPRSLGGGTGKVKRYLMSYIRQMFSREKSGRKSAIHDEMRAMTSNQASAPNPNGQAGSTQPGGEAAAAPSPTFSPLYRQIKALITQSLEAGEWKPGEIIPSEVELAGRYKVSQGTVRKAIDELAADNLLVRRQGKGTFVATHSEERAQFRFLRLLADDGAEHPHVSRLLECRRMRAPAEIARQLDLKPADPVVQVRRVLEFDGVDTVLDEIWLPGAMFRGLTFERLSEYKGPLYAMFESEFGTRMIRASEKIRAIAAEPAVADVLRVPPGFPLLSVERVSYTYGDRPVEVRRGWYVTTGYYYQNDLS

SEQ ID NO: 590 - DNA, 804 bp, Pseudomonas fluorescens PfO-1
  CDS (1)..(804): transl_table=11
atgcaagtggtattaggtttcgcccgactaccgagcgacaacaatcctatatcagcgccggaaatgccttacatgaatgacctccacgccctacgccccgacgattcccagccgacgccgctgtacctgcaactggcgcgcaacctggaagccgcgatccatgccggccagtggaaagccgaacaggcgatgccctcggagcgcaatctcagcgagatgctggggatttcccgggtcaccgcgcgcaaagcgctggaagtcctgctcgatcaaggtttgatccgccgcctgcaaggctccggcaccttcatcaccccacgccttgaacaaccgctgtcgcgcctctcgggtttcagcgaaatgctccgtctcaagggcttcgtgcccagctcgcaatggctggagcgggaaatcaccctgccgacccacgaagaactgatccgcctcggcctgtcgccgaacgacaaggtcgcgcgcatgaaacgcctgcgcaaggccgacgacaccgtgatggccatcgagatgagcaccctgcccgcctcgatcatgcccaagccacaggtggtgggcgattccctctacgaacacctcgacagcatcggcaagccgatcgtgcgcgccttgcagcacatccaggcgatcaacgcctcggacgagttcgccgcactcgtcggcatcgcccccggcaccgcgatgctgctgatgacccgggtcggctacctggaagacaacacgccgatcgaagtcaccgacacctattgccgcaacgactactacgactttgttgcagagcttcgccgctga

SEQ ID NO: 591 - protein, 267 aa, Pseudomonas fluorescens PfO-1
MQVVLGFARLPSDNNPISAPEMPYMNDLHALRPDDSQPTPLYLQLARNLEAAIHAGQWKAEQAMPSERNLSEMLGISRVTARKALEVLLDQGLIRRLQGSGTFITPRLEQPLSRLSGFSEMLRLKGFVPSSQWLEREITLPTHEELIRLGLSPNDKVARMKRLRKADDTVMAIEMSTLPASIMPKPQVVGDSLYEHLDSIGKPIVRALQHIQAINASDEFAALVGIAPGTAMLLMTRVGYLEDNTPIEVTDTYCRNDYYDFVAELRR

SEQ ID NO: 592 - DNA, 732 bp, Pseudomonas fluorescens PfO-1
  CDS (1)..(732): transl_table=11
atgaattctctttccagcgatgttcgcctgccgctttaccaacgtttgcgtgaccacctcgctgagcagattgccaataatcgctggcgcccgggggaggccattcccaccgaagccgcgctttctgcggaataccagctgtccaccggtaccgtgcgtaaagcggtcgacgcgctggtcagtgaaggcattctggagcgtcagcaaggtcgaggcaccttcgttcgccggcctcaatttcaatcttcgttattccgtttcttccgttttcagactgctgctggtgaacgtcaggtacccgagagtcgcatcctgtcgatcgaaccgatgatcgcgccgtcggcggtggcgcaggcgctaggactgccacctgacgcgccggtcattcgcattgtccgagtacgtctgctcgatgttcagccggtgctcgccgaagaaatctggctgccgcgcagccgcttccagccgctgctggagattgacttgagtcgccaagggccgctgctgtatccgatctacgaagaggtttgcggtcaggtcgtcgcctatgccgaagaaacactcaccgctgaatcagtgaatgaggtgcacgcgcgattgctgcaagtaccgatcagcagccccgtggtggtgatcgagcgtctggcgcgcgattacgcgggtacgcccctggagtggcgccgctcccgagggcatgccgaacactttcgctacagcgtggatattcgctaa

SEQ ID NO: 593 - protein, 243 aa, Pseudomonas fluorescens PfO-1
MNSLSSDVRLPLYQRLRDHLAEQIANNRWRPGEAIPTEAALSAEYQLSTGTVRKAVDALVSEGILERQQGRGTFVRRPQFQSSLFRFFRFQTAAGERQVPESRILSIEPMIAPSAVAQALGLPPDAPVIRIVRVRLLDVQPVLAEEIWLPRSRFQPLLEIDLSRQGPLLYPIYEEVCGQVVAYAEETLTAESVNEVHARLLQVPISSPVVVIERLARDYAGTPLEWRRSRGHAEHFRYSVDIR

SEQ ID NO: 594 - DNA, 747 bp, Pseudomonas fluorescens PfO-1
  CDS (1)..(747): transl_table=11
atgaccgataacgttctctccctgggcagcgtcccgctgcacacccaactgcgcgacgtactgcgcgcccgcatcctcgacggcgaatacccgcaggacagccagatgccgtccgaaagcgagcttggaacgctgttcaaggtcagccgcatcaccgtgcgccaggccctgggcgatctgcagaaagaagggctgatcttcaagatccacggcaaaggcaccttcgtcgccaagcccaagacctttcaaaacgtcagtaccctgcaaggcctcgccgagtccatgaccggccgtggctacgaggtgatcaaccgcctgcgcagcttcaaattcatcgccgccgacaaactggttgccgagcgtttgcaggtcgccgaaggcgaaatcgtcgcgcagataaagcgtgtacggctgatcaaccgcgagccgatttcgctggaaatcacctacctgcccaaagccgtcggcgaacggctggagaaggccgatctggtcacccgcgacattttcctgatcctcgagaacgactgcggcatagccctcggccatgccgatctggccatcgacgcggtgctggccgacagcgacctgacccaggcactgaacgtcgaggccggctcgccgatcatgcgcatcgagcggctgacccacgacgctcacggccagccgctggacttcgaacacctttactaccgtggcgatgcgttccagtaccgcctgcggatcgaccggcaaaaaggggcgtga

SEQ ID NO: 595 - protein, 248 aa, Pseudomonas fluorescens PfO-1
MTDNVLSLGSVPLHTQLRDVLRARILDGEYPQDSQMPSESELGTLFKVSRITVRQALGDLQKEGLIFKIHGKGTFVAKPKTFQNVSTLQGLAESMTGRGYEVINRLRSFKFIAADKLVAERLQVAEGEIVAQIKRVRLINREPISLEITYLPKAVGERLEKADLVTRDIFLILENDCGIALGHADLAIDAVLADSDLTQALNVEAGSPIMRIERLTHDAHGQPLDFEHLYYRGDAFQYRLRIDRQKGA

SEQ ID NO: 596 - DNA, 768 bp, Xanthomonas campestris pv. vesicatoria str. 85-10
  CDS (1)..(768): transl_table=11
gtggccaaaccgagaaccaatgccaggacggacgacgaccccaggatggacgcgctggcgctggaggcttccgcgccgacgccgctgtatctgcaattggccgccaagctcagcgacgccatccgtggcgggcagtggaaagctggcgaggcgctgccggccgagcgccagctgtgcgagcgcctgcagatttcgcgggtgaccctgcgccaggcggtggatgtgctcgtcgaacaaggcctggtctcgcgccggcagggcgccggcacctttgtcaccacccagatccagcatcagctcagcggcctgaccagtttcagcgagacgctgcgcatcaagggctatgaacccgggacgcgctggctggaacggcggctgcgcccggcgcatggcgaagaaatcctgcggctgggcttgtcgccggatgcggcggtggcctcgctgacgcgtctgcgcagcgccgacgaccgcgtgatggcctatgagcacgcggtgttgccgcagcgcatcgtcaccgacccgcagcagatcggcgattcgctctacagctatctcgatgcccagggcacgccggtggtgcgcgcgctgcagtacttccgcgccatcaatctgcccgcgcggctggccgagcatctgcgcatgaaaaccggcgaggcgatcctgcacgtggtgcgcgtgggctacgcccgcgacggcagcgcgatcgaattgaccgacacctattgccataacgatttctacgatttcgtcgccgaactgcgccgctga

SEQ ID NO: 597 - protein, 255 aa, Xanthomonas campestris pv. vesicatoria str. 85-10
MAKPRTNARTDDDPRMDALALEASAPTPLYLQLAAKLSDAIRGGQWKAGEALPAERQLCERLQISRVTLRQAVDVLVEQGLVSRRQGAGTFVTTQIQHQLSGLTSFSETLRIKGYEPGTRWLERRLRPAHGEEILRLGLSPDAAVASLTRLRSADDRVMAYEHAVLPQRIVTDPQQIGDSLYSYLDAQGTPVVRALQYFRAINLPARLAEHLRMKTGEAILHVVRVGYARDGSAIELTDTYCHNDFYDFVAELRR

SEQ ID NO: 598 - DNA, 861 bp, Burkholderia sp. 383
  CDS (1)..(861): transl_table=11
atgacgccctcacaaaccgcaacgacccgtatgaaaccttcaaatccgatgccgcgcggccggccccgtgtccgcccggccggcctgaccgacttgttcgacgccacccgggcggcggaactccgcgcgccgggtggcgacggcgaatcgtcgatctcgatgcgcctcgcccgcctgctgcgcgaggcgatcgtcgagggccggctgaagaccggagaaagcctgccgcccgaacgcgaactcgccgaacacttccaggtatcgcgggacaccgtgcggcgcgcgatcgaccgactcacgcggcaaggtctgatcgaatcccggcgaggcgcgggcacgttcgtcgccgccagggtcgagcagcagctcgcgcggatcaccagcttctcggacgacatgctgcggcgcgggctcacgcccgggtcgcagtggatcaggagaacactcgaccgcccgacgcccgacgaactgctcgcgctcggcctcgcgccggacgcgcaggtgttgcgcctcgaacgcgtcagaacggcggacgcggtgccgatggccatcgagcgcgcgacactgccggccgcactgctcgactacaacgtcgatttcggcgagtcgctctatcgcgcactgcaggacgccaacgtccagcccggacgagcgatccagcgcctgcgggccgagctggcgtcggcccgcgatgccgagctgcttggcatcggcacgggcgatcccgtgctttccatcgagcgccgctcgttttcgagcgaaggctctccgctcgaactgacacgctcgctgtatcgcggcgatcgctacgactatgtcgcggtgctcgagcaaccggcaggcggtgccacaacggcatga

SEQ ID NO: 599 - protein, 286 aa, Burkholderia sp. 383
MTPSQTATTRMKPSNPMPRGRPRVRPAGLTDLFDATRAAELRAPGGDGESSISMRLARLLREAIVEGRLKTGESLPPERELAEHFQVSRDTVRRAIDRLTRQGLIESRRGAGTFVAARVEQQLARITSFSDDMLRRGLTPGSQWIRRTLDRPTPDELLALGLAPDAQVLRLERVRTADAVPMAIERATLPAALLDYNVDFGESLYRALQDANVQPGRAIQRLRAELASARDAELLGIGTGDPVLSIERRSFSSEGSPLELTRSLYRGDRYDYVAVLEQPAGGATTA

SEQ ID NO: 600 - DNA, 771 bp, Burkholderia sp. 383
  CDS (1)..(771): transl_table=11
atgacctcccccaacatcgtgccgctgtcggcggccccactctacgtgcagatcaaggacacgctgcgcgcgcgcattctcgacggcacccatgcgccgcacagccggatgccgtccgagcacgaactctgcgcgatgttcgacgtcagtcgcatcacggtgcgccaggcgctcggcgatctgcagaaggaaggactgctgttcaagctgcacggcaagggcaccttcgtgtcgaagccgaaggcattccagaacgtgacgtcgctgcagggcttcgccgaggcgatgtcgtcgatgggctacgagatcgtcaaccaggtgcgcagcttccgcaccgtcaaggccgatcgccatctcgcgacgaagctgaacgtgcccgaaggtgcgccgctcgtcgaaattcatcgcgtgcggctgctgaatcgcgagcccgtgtcgctcgaacagacgtgggtgcccgaagccgtcggcaagcgtctcgcgggcgccgatctcgcgacccgcgacattttcctggttctggaaaacgactgcggcatcccgctcggtcatgccgatgtgtcgatcgacgcgatcctcgccgacgacgaaatcgtcgatgcgctgcacgtcgaggaaagcagccccgtgctgcgcatcgagcgcctcacgcacgacgcgtcgggcgcaccgatcgactacgaatacctctacttccgcggcgacgccttccagtaccggctgcgcatcgaccggcagaagccgcgcaaacctgcaaggaaacagcgatga

SEQ ID NO: 601 - protein, 256 aa, Burkholderia sp. 383
MTSPNIVPLSAAPLYVQIKDTLRARILDGTHAPHSRMPSEHELCAMFDVSRITVRQALGDLQKEGLLFKLHGKGTFVSKPKAFQNVTSLQGFAEAMSSMGYEIVNQVRSFRTVKADRHLATKLNVPEGAPLVEIHRVRLLNREPVSLEQTWVPEAVGKRLAGADLATRDIFLVLENDCGIPLGHADVSIDAILADDEIVDALHVEESSPVLRIERLTHDASGAPIDYEYLYFRGDAFQYRLRIDRQKPRKPARKQR

SEQ ID NO: 602 - DNA, 696 bp, Burkholderia sp. 383
  CDS (1)..(696): transl_table=11
atgagcgcgccggtctaccaggagatcaaggatttcatcctgggccgcatccacgcaggcgagtgggaggagggcgatcaggtgccgtccgagaacgagttggcgcgcgaattcaaggtggcgcgcatgaccgtcaaccgcgcgttgcgcgagttgacggccgagcaggtgctcacccgcatgaagggggcgggcacctacgtcgcgcggccgaagtacgaatcgacgctggtggcgatccgcagcatctcggaggaagtcggtgcacgcgggcatgcgtatcacgccagcgtcctcggcctcgacacgatccgcgccgacgaggcgctcgccgacgagatgcaggtcgccgtgcgcacgaagctgtttcattcgcaggtgctgcacttcgagaatgacgagcccgtgcagcttgaagaacgatgggtgaatccggcggtcgcgccggattacgccgagcaggatttcacgaacacgacgccgaacctgtacctgatgcgcgcggctccgctgcagcgcgtcgagtaccggatcgaagcggcggccccggcgccggagcggcgcgagcagctgcggatggacgacgtcgagccgtgtctggttttacatcgacgcacctggtcgcagggcgtcgtcgcctcggtggcgaatctgtggcatcccggcagccgataccgcttcaccgggcatttctga

SEQ ID NO: 603 - protein, 231 aa, Burkholderia sp. 383
MSAPVYQEIKDFILGRIHAGEWEEGDQVPSENELAREFKVARMTVNRALRELTAEQVLTRMKGAGTYVARPKYESTLVAIRSISEEVGARGHAYHASVLGLDTIRADEALADEMQVAVRTKLFHSQVLHFENDEPVQLEERWVNPAVAPDYAEQDFTNTTPNLYLMRAAPLQRVEYRIEAAAPAPERREQLRMDDVEPCLVLHRRTWSQGVVASVANLWHPGSRYRFTGHF

SEQ ID NO: 604 - DNA, 747 bp, Burkholderia sp. 383
  CDS (1)..(747): transl_table=11
atgaaggcatccacggacgaccgctggcaggacctgcgccccgaccccgacaacgacacgccgctctacctgcagctcgcccgcaagctcggcgacgcgatccacgacaatcgctggacagccggcgaggcattgccctccgagcgcgtgctgtccgatgcgctcggcgtatcgcgcatcaccgcacgcaaggcgatcgcgctgctcgtcgaacaaggcctgattcgccgcacacagggcgccggcaatttcatccagccgcgctacgaagatccgctgtcgcgactgtcgagcttcagcgaaatgctcgaacggcgcggcttcaagccgagctcgcaatggctcgcgcgcgagatccagccggcgaaccgtgacgaagtgatccagctcgggctgtcgcccgccgcatcggtcacgcgcctgaagcgtctgcgcctcgccgacgggatcgtgatggccgtcgagaattcgacgtttcccgcgacgctgatccccgatccgcaggcgatcggcggttcgctgtacagctatctcgaagcacgcggcacgccgatcgtgcgcgcgctgcagcatttccgcgcggtcaacgcgaccgacgaaatcgccgagcagatgggcatcgcaccgcacgacgcgctgctgctgatcacacgaatcggctatacgtcggaccagcgcgcgatcgaactgaccgatacctactgccgcaacgactactacgacttcgtcgtcgaactgcgcaagtaa

SEQ ID NO: 605 - protein, 248 aa, Burkholderia sp. 383
MKASTDDRWQDLRPDPDNDTPLYLQLARKLGDAIHDNRWTAGEALPSERVLSDALGVSRITARKAIALLVEQGLIRRTQGAGNFIQPRYEDPLSRLSSFSEMLERRGFKPSSQWLAREIQPANRDEVIQLGLSPAASVTRLKRLRLADGIVMAVENSTFPATLIPDPQAIGGSLYSYLEARGTPIVRALQHFRAVNATDEIAEQMGIAPHDALLLITRIGYTSDQRAIELTDTYCRNDYYDFVVELRK

SEQ ID NO: 606 - DNA, 738 bp, Burkholderia sp. 383
  CDS (1)..(738): transl_table=11
atggtcacgaaggccaccgcaccgttccagcagatcaagacgctcgttcgccagaacgtcgaatcgggcgactggcgccccggggaccgcattccgtccgaactcgatctcgccgcgcagttcggcgttgcgcgcatgacggtcaatcgcgcgctgcgcgagctgaccgaggaaggcgtgctgaaacgcatcgcgggcgtcggcacgttcgtcgccgaagtgaagccgcaatcgaacctgctgatgatcgcgcatatccgcgacgaaatccgcgcgcgcgggcacgaatatcgctgccgcgtgctgagccggtcgagcgagcccgcgtcgttcgacgtcgcggccgcgttcggcttgccggtcaacacgccggtgtttcatgtagtgtgcgtgcacgaggaaaacggccgcccgatccagctcgaggatcgctacgtgaacccggccgccgcgcccggtttcatcgaccaggatttccaggtcgagccgccgtccgagtacctgtacaacaacgtgtcgcactacgaactggaaatcgagcacgtggtcgatgcgtcgctgccgaccggcgaacaggcgcgactgctcgacatgcgcgccgacgagccgtgcctcacgctcacgcgccgcacctggacgaacgggcagcccgtcacgttcgtgcacttcctgcatccgggcaaccgctaccggctcggctcgcgcttcaagccgggcgccggacgccacccgacctga

SEQ ID NO: 607 - protein, 245 aa, Burkholderia sp. 383
MVTKATAPFQQIKTLVRQNVESGDWRPGDRIPSELDLAAQFGVARMTVNRALRELTEEGVLKRIAGVGTFVAEVKPQSNLLMIAHIRDEIRARGHEYRCRVLSRSSEPASFDVAAAFGLPVNTPVFHVVCVHEENGRPIQLEDRYVNPAAAPGFIDQDFQVEPPSEYLYNNVSHYELEIEHVVDASLPTGEQARLLDMRADEPCLTLTRRTWTNGQPVTFVHFLHPGNRYRLGSRFKPGAGRHPT

SEQ ID NO: 608 - DNA, 744 bp, Burkholderia sp. 383
  CDS (1)..(744): transl_table=11
atgaactccgacttcggcaacgcgccgctctatacgaaggtcgaggccgctctggccctcgaaatctcgacgtccgacctgccgccgggcagccagcttcctcccgaggagcgcctgatcgagcggttcggagtcagccggacgaccgtgcgcaaggcgatcgaaaacctcgtcgcgcgcggcctcgtcgaaatccggcgcgggaaaggcacgttcgtcgccgaaccgaagatcacgcaggaactgaccgagctgaccggcttcgtcgaggacatgcacgcgctcgggcgtacgccgacggcgcggctcgtcgatcgtcaggtcgtcgaagccggcgccgacgtcgcgcggcagctcgcgctgccgccgggcaccgcggtcatgcgcattcgccgcgtgcgcctggccgacggcgtcgcggtctccttcgacgaaacctacctgccgcgcgagctcggcgagaagatcgtcgcgcacgatctggaggccgagccgattttctcgttgctcgaggagcgctacgacgtgccgctcgtcgacgccgagtaccggctcgaagccgtcgcggcgccgcccgaggttgcgcaggcgctcgcgatcgcgcccggcagcccggtcttcctgatcgaacggacgtcgcatacgcacgcgcaccagcccgtggatttcgaaaagctctattaccgcggcgacctcatccgcttcgtcacgcgcctgagccggcgcgcgggcgagcgttcgtaa

SEQ ID NO: 609 - protein, 247 aa, Burkholderia sp. 383
MNSDFGNAPLYTKVEAALALEISTSDLPPGSQLPPEERLIERFGVSRTTVRKAIENLVARGLVEIRRGKGTFVAEPKITQELTELTGFVEDMHALGRTPTARLVDRQVVEAGADVARQLALPPGTAVMRIRRVRLADGVAVSFDETYLPRELGEKIVAHDLEAEPIFSLLEERYDVPLVDAEYRLEAVAAPPEVAQALAIAPGSPVFLIERTSHTHAHQPVDFEKLYYRGDLIRFVTRLSRRAGERS

SEQ ID NO: 610 - DNA, 825 bp, Burkholderia sp. 383
  CDS (1)..(825): transl_table=11
atgcgcgccatgacatcgaaccaggcgaataccgcgaatcagaccggcgcaggcggcccagggcagccgggcgcgagcgatcccgcatcttcgcctgcggctgcgccgtcgccgacgttcagcccgttataccagcagattaagtcattaatcacgcaaagtctcgaaaccggtgagtggaagccgggcgagatcatcccgagcgaagtggagctcgcggcccgctacaaggtcagccagggcaccgtccgcaaggcgatcgacgagctggctgccgaaaacctcgtggtccggcggcagggcaagggtacttttgttgcgacgcacaatgaagatcgcgcgcagttccgcttcctgcggctgctggccgacgacggtgccgagcatccgcacgtgagccgtctgctcgaatgccggcgcctgcgcgcgccggccgagatcgcgcggcagctcgacctgaagccggccgatcccgtcgtgcaggtgcgccgcctgctggagttcgagaacgaagtgaccgtgctggacgagatctggctgccgggcgcgatgttccgcgggctcacgttcgagcggttgagcgagtacaaggggccgctctacgcgatgttcgagacggagttcggcacgcggatgatccgcgcgacggagaagatccgcgcggtggcggcagagccggcggtggccgacctgctgcacgtgccggcaggttttcctttgctgtcggtcgagcgcgtgtcctatacatacggagaccggccggtggaagtgcgtcgcggctggtatgtcacaaccgggtactactatcagaatgacttgagttga

SEQ ID NO: 611 - protein, 274 aa, Burkholderia sp. 383
MRAMTSNQANTANQTGAGGPGQPGASDPASSPAAAPSPTFSPLYQQIKSLITQSLETGEWKPGEIIPSEVELAARYKVSQGTVRKAIDELAAENLVVRRQGKGTFVATHNEDRAQFRFLRLLADDGAEHPHVSRLLECRRLRAPAEIARQLDLKPADPVVQVRRLLEFENEVTVLDEIWLPGAMFRGLTFERLSEYKGPLYAMFETEFGTRMIRATEKIRAVAAEPAVADLLHVPAGFPLLSVERVSYTYGDRPVEVRRGWYVTTGYYYQNDLS

SEQ ID NO: 612 - DNA, 696 bp, Burkholderia sp. 383
  CDS (1)..(696): transl_table=11
atgaccacaccgatctatcaggaaatcaaggacttcatcctcgcgcgcattcatgccggcgaatgggcggaaggcgaccaggtgccgtcggagaatgagctcgcgcgcgaattcaacgtcgcgcggatgaccgtcaaccgcgcgctgcgcgagctgaccgccgagcaggtgctcacgcgcacgcgcggctcaggcacgtacgtcgcatcgccgaagtacgaatcgacgctcgtcgcgatccgcagcatctcggacgaagtcgccgcgcgcggccacgactatcgcgcgcaggtgctgcaggtgggcgcagccgtcgccgatgcgaagctcgccgacgaactgcgaatcgacacgggcagcccgatcttccattcgcgcgtgctgcacttcgagaacgacacgccggtgcagctcgaggaacgctgggtcaatccggcctgcgcgcccgagtatgcgttgcaggacttcacgacgacgacgccgaaccagtacctgacgcgcgtcgcgccgctgcagcgcgtcgaataccggatcgaggccgcgatgcccgataccgaaacgcgccgccacctgacgatggacgaccgcgagccgtgcctgctgctgcatcggcgcacgtggtcgcaggggatagtcgcgtcggtcgccaatctgtggcacccgggcagccgttaccggttcaccgggcatttctga

SEQ ID NO: 613 - protein, 231 aa, Burkholderia sp. 383
MTTPIYQEIKDFILARIHAGEWAEGDQVPSENELAREFNVARMTVNRALRELTAEQVLTRTRGSGTYVASPKYESTLVAIRSISDEVAARGHDYRAQVLQVGAAVADAKLADELRIDTGSPIFHSRVLHFENDTPVQLEERWVNPACAPEYALQDFTTTTPNQYLTRVAPLQRVEYRIEAAMPDTETRRHLTMDDREPCLLLHRRTWSQGIVASVANLWHPGSRYRFTGHF

SEQ ID NO: 614 - DNA, 714 bp, Lactobacillus sakei subsp. sakei 23K
  CDS (1)..(714): transl_table=11
atgtcgaaaaaatacgaaacaatctaccgtgaattggtccataaaattacaaaccaagtctatccagtcaattcatttttaccgagtgaaaatgaactcgcgacagcttatggtacttcgcgcgaaacagtccgcaaggcgcttgctagtcttttagaaaatggctttattcataagattaaaggcaagggttctttagtcctagactttgataaatacgccttcccaatttctggcctaaccagttaccgtgagttggataatctctttgatatgcatacacaaacgactgtcttacaactcaaaaaagccaatgtcccccaagcatccttccatctagattccactgagattcttcctgcaacatacattcagcgattacgaacggttaatggtgagccaattgtcatcgatagtgactacgttttaaccagtgtcgtccccgaaatatcccgcgcagtcgcccaagattcgctttatcactatttcgaacaagaactcgggctcaaaattggttacggcaataaggagttcactgttgtgccagcaactgaagaacaatgtgccattttaaaattaacgcctaatagtgccgtcgttagcgtcaaggggatcacgcatctccaagataatacattaattcaatttacagaatcgattcaccgcgcggataagtttaaatttatagaacatgcccgtcgccaatcaatctaa

SEQ ID NO: 615 - protein, 237 aa, Lactobacillus sakei subsp. sakei 23K
MSKKYETIYRELVHKITNQVYPVNSFLPSENELATAYGTSRETVRKALASLLENGFIHKIKGKGSLVLDFDKYAFPISGLTSYRELDNLFDMHTQTTVLQLKKANVPQASFHLDSTEILPATYIQRLRTVNGEPIVIDSDYVLTSVVPEISRAVAQDSLYHYFEQELGLKIGYGNKEFTVVPATEEQCAILKLTPNSAVVSVKGITHLQDNTLIQFTESIHRADKFKFIEHARRQSI

SEQ ID NO: 616 - DNA, 702 bp, Lactobacillus sakei subsp. sakei 23K
  CDS (1)..(702): transl_table=11
atggaatcacctgtttatattcaaattcataatcaacttaaaaaagatattgaagccggcaagtggtcgattggggatcgcattccttcagaacgtgaactcgcattaaactttgaagtctcgcggatgacgcttagacaagccgttcaaacgctggtagacgaaggcattttagaacgtcggattggtgctgggacctacgtcgctaaccgaaaagtccaagaaaaaatgtccggggtaaccagttttacagatttaatgacggcccaaggtaaaacgccatctagcaagacgatttcttttcacattgctaacccatcattaagtgaatctgaaaagctccaactaaaagacggtgaacaagtgctgcggatggaacggattcgttacgcggataatgtccccatttgttttgaagtggccacagtgccacaatcattagtcgctgatttcagtaaagctgaaatcactagctctttttataagacgctggaagaaaaaggtggctaccaaatgggtggcgcgcaacaaaccgtttcagcgcaactcgcctcagaacgcattgccgaatacttggacatcaagcgcaacggctcaatcttacgcttgcgccaggtatccttcttgaacgacggcacaccatttgaatacgtccgcacacaatacgtgggcgaacgatttgaattttatttggaaagatag

SEQ ID NO: 617 - protein, 233 aa, Lactobacillus sakei subsp. sakei 23K
MESPVYIQIHNQLKKDIEAGKWSIGDRIPSERELALNFEVSRMTLRQAVQTLVDEGILERRIGAGTYVANRKVQEKMSGVTSFTDLMTAQGKTPSSKTISFHIANPSLSESEKLQLKDGEQVLRMERIRYADNVPICFEVATVPQSLVADFSKAEITSSFYKTLEEKGGYQMGGAQQTVSAQLASERIAEYLDIKRNGSILRLRQVSFLNDGTPFEYVRTQYVGERFEFYLER

SEQ ID NO: 618 - DNA, 717 bp, Lactobacillus sakei subsp. sakei 23K
  CDS (1)..(717): transl_table=11
atggcgaagtatctatatgtcgaaattgcagaagcgttaaacgaagatgtccgggcgggaatctatggtgtccatcaaaaattaccgtcagaaacggacttagccgcgcagtttgcgacgacacggttaacaatccgcaaggcaatcgacttactcgaaaaacaacaggttgtggtccgtgatcggaatcgtgggacctatgttttagcgaccgaaggcaaaatttctagtggggctagcggtttagtgggttttaccgaagccgccaaggaattacatttggacgcgagcactcgggtgttagatttgcgccgcgcaattgtctatccagactacgttgcgtctaaattacaactcaacgagcaagaatcggtttggcagattgaacgcatccggatggccgataacgaaccaatgacgcacgaacagatttaccttaaacaaagaatactccccaacttgacggcccacgaagcgcaaggctctctctaccgtttgattgaacaagagatgccaattggttatgcgcaacaagaattagaagctgttatcttagaaccggggttaagcgaattactagaaacaacaccaggacagcccgcctttttggcgcatacggtcgcctattcgatggatggctacccaatcttttatgataattcccattatcgggctgacaagtacacgttccacaatatcttgagtcgtaaacattaa

SEQ ID NO: 619 - protein, 238 aa, Lactobacillus sakei subsp. sakei 23K
MAKYLYVEIAEALNEDVRAGIYGVHQKLPSETDLAAQFATTRLTIRKAIDLLEKQQVVVRDRNRGTYVLATEGKISSGASGLVGFTEAAKELHLDASTRVLDLRRAIVYPDYVASKLQLNEQESVWQIERIRMADNEPMTHEQIYLKQRILPNLTAHEAQGSLYRLIEQEMPIGYAQQELEAVILEPGLSELLETTPGQPAFLAHTVAYSMDGYPIFYDNSHYRADKYTFHNILSRKH

SEQ ID NO: 620 - DNA, 720 bp, Lactobacillus sakei subsp. sakei 23K
  CDS (1)..(720): transl_table=11
ttgccaaaatatgaagagatcgccgacacacttcgccagcggattaagcaaggaatttatcctgctaattcgttgctacctaatcaggttgaacttgtcgaagaattcgatgctagtcgcatgacggttaaaaaggccattacgattctcaccatggaagggctcgtttttgctcgtcgtggcgctggcaccaaagtactggaccattctttttggaataaaaatactgcaccagccgatcaatatcgggggatgtcctttgatttagctgatgccaatcaaaccctcaccagtaaggttattaccttcaaagtcaccttcccctcaccagaagttaaggaacgccttaccttgaatgcacaacaaccggtttacgaaatcattcgcttacggattgtcgatggcgtcaacagcgtccttgaacatacatacatgcccgttaacctagcaccgggtttaacagatgaaattctagaaaattccatttacagttatttgaagaaagaccttcacttaacttttgcgggtgctttccgaaatattcaagccgacaaagctgataaatatgatcaagaatatctcgaatgtgcgcctactgatccggttttagaagtcgaacaagtggtctatctcgatagtggtcaaccgattgagtattcccggagtcgtaaccgctacgaccgccgcggttatacttacttggacgtcaataactgctaa

SEQ ID NO: 621 - protein, 239 aa, Lactobacillus sakei subsp. sakei 23K
MPKYEEIADTLRQRIKQGIYPANSLLPNQVELVEEFDASRMTVKKAITILTMEGLVFARRGAGTKVLDHSFWNKNTAPADQYRGMSFDLADANQTLTSKVITFKVTFPSPEVKERLTLNAQQPVYEIIRLRIVDGVNSVLEHTYMPVNLAPGLTDEILENSIYSYLKKDLHLTFAGAFRNIQADKADKYDQEYLECAPTDPVLEVEQVVYLDSGQPIEYSRSRNRYDRRGYTYLDVNNC

SEQ ID NO: 622 - DNA, 798 bp, Shigella boydii Sb227
  CDS (1)..(798): transl_table=11
gtgctgttacttgccggaaaacgaccctataatccgagtaattcattctttatttcagggtcgattatgtcagctacggaccgctactctcatcaactcctctacgctaccgtccgccagcgactgctggatgatatcgcgcagggggtttaccaggccgggcaacagatccctaccgaaaacgagctttgtacacaatataacgtcagccgcattaccattcgcaaagccatcagcgacttagtggcggacggcgtactgatccgctggcagggaaaaggcacctttgtacaaagccagaaagttgaaaacgccctgcttactgtcagtggttttaccgattttggcgtctcacaaggcaaggcgacgaaagagaaagtgatcgaacaggaacgggtcagcgccgcgccgttttgcaaaaagctgaacatccccggaaacagcgaagtgttccatctctgccgggtgatgtatctcgataaagagccgctgtttattgatagttcatggatcccgctgtcgcgttatcctgactttgatgagatttacgtcgaaggaagctccacctatcagttatttcaggagcgttttgacacgcgagtggtcagcgacaaaaagaccatcgatatctttgccgccacccgcccgcaggcaaaatggctgaaatgcgaactgggcgaaccgttgtttcgcatcagcaaaatcgcctttgatcagaatgacaaaccggtgcacgtctccgaactcttctgccgcgccaatcgcatcaccttaactattgataataaaagacattaa

SEQ ID NO: 623 - protein, 265 aa, Shigella boydii Sb227
MLLLAGKRPYNPSNSFFISGSIMSATDRYSHQLLYATVRQRLLDDIAQGVYQAGQQIPTENELCTQYNVSRITIRKAISDLVADGVLIRWQGKGTFVQSQKVENALLTVSGFTDFGVSQGKATKEKVIEQERVSAAPFCKKLNIPGNSEVFHLCRVMYLDKEPLFIDSSWIPLSRYPDFDEIYVEGSSTYQLFQERFDTRVVSDKKTIDIFAATRPQAKWLKCELGEPLFRISKIAFDQNDKPVHVSELFCRANRITLTIDNKRH

SEQ ID NO: 624 - DNA, 699 bp, Leuconostoc mesenteroides subsp. mesenteroides ATCC 8293
  CDS (1)..(699)
atggctaaacctcgatatattgaaattcacaatcaaatattgtcacgtatcgaagctggtgagtggcgatcacaagaacgtttacctgctgaaagagatttggcacttgaatttaacgtgtcgcgtatgacattacgccaagcagttcaaacattggttgacgaaggcatattggagcgtaaagtaggatcaggcacttacgtcgctgaacagaaggtttctgaacgtgccctgggtgtcactagttttacagaattaatggcagctacaggtcgaacgccgcatacggtgacggttagctataagaccacgacgccatccgcttcggaaattgagcatttgcaactggatagtacagataaagtattgatcatggagcgtttacgtttgggggatgatgaacctattttactagaacgtacaaccttgccagtccaattaattgagtcattcactcgtggcgcattgacagaatcattgtacgccacattagcatcagcgggagtataccctggacatgctgaacaaacaattacggccacgttagcaaatgaaagattgtcggaattattacagataaaaagaggtgatccaattttatctgtgcgacaggtctcatatgatcaacatgatacgccgtttgaatatgtgcgatcatattatgtaggtgagcgtttcgaatttactttaacaagataa

SEQ ID NO: 625 - protein, 232 aa, Leuconostoc mesenteroides subsp. mesenteroides ATCC 8293
MAKPRYIEIHNQILSRIEAGEWRSQERLPAERDLALEFNVSRMTLRQAVQTLVDEGILERKVGSGTYVAEQKVSERALGVTSFTELMAATGRTPHTVTVSYKTTTPSASEIEHLQLDSTDKVLIMERLRLGDDEPILLERTTLPVQLIESFTRGALTESLYATLASAGVYPGHAEQTITATLANERLSELLQIKRGDPILSVRQVSYDQHDTPFEYVRSYYVGERFEFTLTR

SEQ ID NO: 626 - DNA, 738 bp, Bacillus cereus G9241
  CDS (1)..(738): transl_table=11
atggcaagtggatcaacacaagtaaaatacctcggcatttatcaaaaaatgaaacagcaaattttagacagcgaatataaaattaatgaaaaaattccaagtagccccatccttgctgaagaatttgatgtttctgtccttaccataaaaaaagcgctggatctgttagttagagacggctacatcattcgccggcgcggaagtggaacagtcgttcaagattggcgtcaacaggaaaaagcacgaatgattcaaactttaacaggtacaaaagctgtttatggcagcgaggtagaaagtaaaattatcgagtttacgattgtcggtgccgatgaaatcattgctgaaaaattgggcatttcagtaggggacttcgtatataaaatcattcgccttcgtatcattcacagtatcccaacgattatggagcatacatggatgcctatttcggtcattccaggtgttgaagcttcggttttagaggagtcgatctactcatacattcaaaataaactaggtcttaaagtgggaacatccgttgttagggtcaaaggaattcgcccagatgataaggaaaagcagtttatgaacttaacaaatcaagattttctaatgagagtggagcaggtggcctatttaacggatggacgaacttttgaatactcttatgctgatcacctgccagaaacctttgaatttgaaacagttattactgcaaaaagtgataaagaggcataa

SEQ ID NO: 627 - protein, 245 aa, Bacillus cereus G9241
MASGSTQVKYLGIYQKMKQQILDSEYKINEKIPSSPILAEEFDVSVLTIKKALDLLVRDGYIIRRRGSGTVVQDWRQQEKARMIQTLTGTKAVYGSEVESKIIEFTIVGADEIIAEKLGISVGDFVYKIIRLRIIHSIPTIMEHTWMPISVIPGVEASVLEESIYSYIQNKLGLKVGTSVVRVKGIRPDDKEKQFMNLTNQDFLMRVEQVAYLTDGRTFEYSYADHLPETFEFETVITAKSDKEA

SEQ ID NO: 628 - DNA, 711 bp, Oenococcus oeni PSU-1
  CDS (1)..(711)
atgagcgatatgcctatttttcttcaaatccgcgatgatttagccgaaaaaatccgtagacagcattttaagggtggaagtcgtttgccagccgaaagagttttggctgaacagtacaaagtttctcgaatgactttacgccaagcgattgcattattggttaaccaaggtaaattgattagaaaacccggttcgggaacttatgtatccgatcaggaaaaagaagtttcggaaaatctgaagggtatcaccagttttactcagattatgcaatctcagggtaaaaaagctcaatcaaagttcatagtttttaagcgtcacttgccgtcggcgattgaggcctctaatcttgaaattgatcgaaatgaagaagttatcacaatcgagagagttcgttatggggacgaggaaccgatcgcttttgaaattacgacaattccggtttctttagtcggcaatatcaaccgcagccaaatggctcacggactttatgagtatttagaggaccggggctttcattttggtaaagctgttcaggagatttcagcggtcgtaccaaacgaaatcgtttgtaaacgattaaatttaactcttggccaggcagctctttttttgcgtcaaacatcttaccttactgatgacaaaccgtttgaatttgtaaaaacctattacgctggagaccgataccgtttttatcttgaaaagcattaa

SEQ ID NO: 629 - protein, 236 aa, Oenococcus oeni PSU-1
MSDMPIFLQIRDDLAEKIRRQHFKGGSRLPAERVLAEQYKVSRMTLRQAIALLVNQGKLIRKPGSGTYVSDQEKEVSENLKGITSFTQIMQSQGKKAQSKFIVFKRHLPSAIEASNLEIDRNEEVITIERVRYGDEEPIAFEITTIPVSLVGNINRSQMAHGLYEYLEDRGFHFGKAVQEISAVVPNEIVCKRLNLTLGQAALFLRQTSYLTDDKPFEFVKTYYAGDRYRFYLEKH

SEQ ID NO: 630 - DNA, 702 bp, Pediococcus pentosaceus ATCC 25745
  CDS (1)..(702)
atgaattcaccggtatatattcaaattcataatgaaatcaaaaaggcgattgaagccgggaaatggaaagtgggagagcgaattccagctgaacgtgaactttctacagaatttagtgtaagtcgaatgactcttcgccaagctatttcaactttggttgatgagggaattttggaacgtaaggtgggttcgggaacctatgttgctagtcagaaagttcaagaaaaggtttcaggagttactagttttacggaattaacggaggctcaaggtaaaaagccgtctagtcggacaatttcgtaccatactagtgaaccttctttaagtgaaattgaaaaattacagttaaatgatggtgatctagtattgcggatggagcgtattcgatttgctgacgctgttccaatttgttatgaaacggcaactattccagaaaagctagttagtgattttagtaaatctgaagtgactaaatcactttataaaactctggaagaaaaagcagggttgatgattggacgtgcggaacaaaccgtctcggcgatgttggcttctgaaaaagtgtcagagtatttagatattaaacgtggcgatgcaattctacgtttacatcaattatcgtatgctcaagatggtacaccgtttgaatatgtacgtactcagtatgtaggcgaacgttttgaattttatttaaatcgttaa

SEQ ID NO: 631 - protein, 233 aa, Pediococcus pentosaceus ATCC 25745
MNSPVYIQIHNEIKKAIEAGKWKVGERIPAERELSTEFSVSRMTLRQAISTLVDEGILERKVGSGTYVASQKVQEKVSGVTSFTELTEAQGKKPSSRTISYHTSEPSLSEIEKLQLNDGDLVLRMERIRFADAVPICYETATIPEKLVSDFSKSEVTKSLYKTLEEKAGLMIGRAEQTVSAMLASEKVSEYLDIKRGDAILRLHQLSYAQDGTPFEYVRTQYVGERFEFYLNR

SEQ ID NO: 632 - DNA, 717 bp, Lactococcus lactis subsp. cremoris SK11
  CDS (1)..(717)
ttgaataaatatgccaaaattcgaaatgatgtaagaaataaaatcatttcaggaaaatataaacctggaactttgctccctaaagaatcggaaatgatcttgaaatacaatgcttcaaaactaacggtaaaaaaagcaatggatgaacttgttaatgagggattgatcatcaaaaggagagggagcggaacttttgttaaagggctgagcacagaggatattgaaaaattaaaagtagtcaaccaatttcaaggttccagtgctttttttgcagataaggttgttgaaagtcggattttggtatttgaagtggtaaaatctgaacccgaaattatggaaagactgggattaagtgagataagtgatttatatcatgtcgttcggacccgtttgattgatggagacccttatgtcattgagagtacttatatgccagtcgatttaattaaaaatttaacttttgaaatttgttctggttcgatttatgaatatattgaagatgaacttggtttgactattgggagcgctcatcgcagaattgaagcacgaaaaggaactgacgaagaattagtagaattgggtggaaaatctggggacccagttgttctagtatcacaagttggatatttgtctgatggcaggacttttgaggcttccatgaatgttcatcgctacgataaatatgcgtttgaaacagtattaatgcataaaaattga

SEQ ID NO: 633 - protein, 238 aa, Lactococcus lactis subsp. cremoris SK11
MNKYAKIRNDVRNKIISGKYKPGTLLPKESEMILKYNASKLTVKKAMDELVNEGLIIKRRGSGTFVKGLSTEDIEKLKVVNQFQGSSAFFADKVVESRILVFEVVKSEPEIMERLGLSEISDLYHVVRTRLIDGDPYVIESTYMPVDLIKNLTFEICSGSIYEYIEDELGLTIGSAHRRIEARKGTDEELVELGGKSGDPVVLVSQVGYLSDGRTFEASMNVHRYDKYAFETVLMHKN

SEQ ID NO: 634 - DNA, 702 bp, Lactobacillus casei ATCC 334
  CDS (1)..(702)
atggatgcaccagtttatattcaaattcataacgcgattcgggcagatattgaagcaggcaaatggcgcgttggcgaccgaattccttctgagcgtgatttagctgtcacgtttaaagtgtcacggatgacgttgcgccaagccattcaaacattggtcgatgaaggcattctcgaacggcgcgtcgggtccggtacctatgttgccaaccagaaagtccaagagaaaatgtctggcgtcacaagctttacggatctgatgcaagcacaaggcaaggtgccatccagtaagacagtctcctaccacgtggcccagccaacaagttctgaagttgaaaaacttaaacttgagcctaaagaacaagtcttgcgcatggaacggattcgttacgcggataagattccgattagctttgaaacggcggctgttccatacaacctcgtcaaaaactttaccaagaaagaaatgacagccagtttttaccataccttggagaaaaaaggcggttatgtgcttggcggtgcgcaacagactgtcagtgcgatgctggcaagcgaacgaatctcagagtatctggacatcaaacgtggcgaagcgatcctacgtttgcgtcaggtatcattcttgcaggacggtacgccgtttgaatacgttcgaacgcagtatgttggcgaaagatttgaattttatctagaacggtaa

SEQ ID NO: 635 - protein, 233 aa, Lactobacillus casei ATCC 334
MDAPVYIQIHNAIRADIEAGKWRVGDRIPSERDLAVTFKVSRMTLRQAIQTLVDEGILERRVGSGTYVANQKVQEKMSGVTSFTDLMQAQGKVPSSKTVSYHVAQPTSSEVEKLKLEPKEQVLRMERIRYADKIPISFETAAVPYNLVKNFTKKEMTASFYHTLEKKGGYVLGGAQQTVSAMLASERISEYLDIKRGEAILRLRQVSFLQDGTPFEYVRTQYVGERFEFYLER

SEQ ID NO: 636 - DNA, 699 bp, Streptococcus thermophilus LMD-9
  CDS (1)..(699)
atgttaccagcgtatattcgcatacatgataagattaaggaagatgttgatgatggtacttggaaaattgggcaacgtcttcctagcgagcgagatctttgcgagacttttgatgtgagtcggatgactgtgcgccaggcgataacacttttagtggatgaggggattttagaacgcaaaccaggcagtggaacctttgttgctagtagtcgagttaaggaaaagatgcgtggaactacgagttttactgagattgtcaaatcccaagggaggaagccatctagtgagcttatttcgtatcaacgtctacatccaaatgagtttgaaatcaagaatttaggtgtcttgccacagtcccatgtcattcgtatggaacgtgttcgttttgctgatgacattccggttgcctatgaaattgccagtatccctgagaaaattatccgaggttttaaggaatcagaaattaccgaacatttcttcaagacattaactgataatggctatgaaataggaaaaagtcagcagacaatatcagcaagtttggccaatagtagtctagccaagcacctcaaggttaagactggtgatgctcttttgagtctgacacaaatttcctttctccaagacgggcaggctttcgaatatgtacgaagttactatgttggcgaccgttttgaattttatttggagaacaattag

SEQ ID NO: 637 - protein, 232 aa, Streptococcus thermophilus LMD-9
MLPAYIRIHDKIKEDVDDGTWKIGQRLPSERDLCETFDVSRMTVRQAITLLVDEGILERKPGSGTFVASSRVKEKMRGTTSFTEIVKSQGRKPSSELISYQRLHPNEFEIKNLGVLPQSHVIRMERVRFADDIPVAYEIASIPEKIIRGFKESEITEHFFKTLTDNGYEIGKSQQTISASLANSSLAKHLKVKTGDALLSLTQISFLQDGQAFEYVRSYYVGDRFEFYLENN

SEQ ID NO: 638 - DNA, 744 bp, Bacillus anthracis str. A2012
  CDS (1)..(744)
atggaaatggcaagcggatccacacaagtaaaatacctcggcatttatcaaaaaatgaaacagcaaattttagacggcgaatataagattaacgaaaaaattccaagtagccccgtccttgctgaagaatttgatgtttctgtccttactataaaaaaagcgctggatctgttagttagagacggctacatcattcgccggcgcggaagtggaacagtcgttcaagattggcgtcagcaggaaaaagcacgaatgattcaaactttaacaggtacaaaagctgtttatggcagcgaggtagaaagtaaaattattgagtttacgattgtcggtgccgatgaaattattgctgaaaaattgggcatttcagtaggagattttgtatataaaatcatccgcctccgcatcattcacagtattccaacgattatggagcatacatggatgccgatttcggtcattccaggtgttgaagtttctgttttagaggaatcaatctactcccacattcaaaataaactaggccttcaagtgggaacatccgttgttagggtaaaaggaattcgcccggatgataaagaaaagcagtttatgaacttaacaaatcaagatttcctaatgagagtggaacaggtggcctacttaacggatggacgcacttttgaatactcttacgccgatcacttgccggaaacctttgaattcgaaacagttattactgcaaaaagttataaagaggcataa

SEQ ID NO: 639 - protein, 247 aa, Bacillus anthracis str. A2012
MEMASGSTQVKYLGIYQKMKQQILDGEYKINEKIPSSPVLAEEFDVSVLTIKKALDLLVRDGYIIRRRGSGTVVQDWRQQEKARMIQTLTGTKAVYGSEVESKIIEFTIVGADEIIAEKLGISVGDFVYKIIRLRIIHSIPTIMEHTWMPISVIPGVEVSVLEESIYSHIQNKLGLQVGTSVVRVKGIRPDDKEKQFMNLTNQDFLMRVEQVAYLTDGRTFEYSYADHLPETFEFETVITAKSYKEA

SEQ ID NO: 640 - DNA, 699 bp, Streptococcus pneumoniae TIGR4
  CDS (1)..(699)
atgctacctgcttatataaaaatccatgatcagataaaaaaggatattgacgagtaccgttgggctattggtgagaggcttcccagtgaaagagatttagctgagcagtttgcggtcagtcgcatgaccctccgccaagccgtatctctattagtcgaagaaggcgtcttagagcgccgtgtaggaagcggcacctttgtttccagtactcgagtacaagaaaagatgcgagggacaaccagttttactgaaattgtcaaatcccaaggtaaagttccctctagccagctcatttcctacaaaaaaaccattcccaatgagcaagaagttgccaagctaggaatttttccaacggacaatattatccgaatggagcgggtccgctatgccgaccaagttcccctagtttatgaagttgcttctattcctgaaaaattcattaaggactttaaaaaagaagaaatcaccagtcatttcttccaaaccttgcaaaaacatggctatcgtatcggcaaatctcaacagaccatctatgctcgccttgctaaagaaaagattgcccactatttggaagttgaaaaaggacatgctattcttggattgacccaggtttcctacctagaagatggtactgcttttgaatacgtaaaaagtcaatatgtaggcgaacgctttgaattttatcttgaaaataattag

SEQ ID NO: 641 - protein, 232 aa, Streptococcus pneumoniae TIGR4
MLPAYIKIHDQIKKDIDEYRWAIGERLPSERDLAEQFAVSRMTLRQAVSLLVEEGVLERRVGSGTFVSSTRVQEKMRGTTSFTEIVKSQGKVPSSQLISYKKTIPNEQEVAKLGIFPTDNIIRMERVRYADQVPLVYEVASIPEKFIKDFKKEEITSHFFQTLQKHGYRIGKSQQTIYARLAKEKIAHYLEVEKGHAILGLTQVSYLEDGTAFEYVKSQYVGERFEFYLENN

SEQ ID NO: 642 - DNA, 795 bp, Arthrobacter sp. FB24
  CDS (1)..(795): transl_table=11
atggcggcgtctgacgcgagcaggatggtaggggagatcgaccgcgacagcgggacgcccatctatgtccagctgcgggaactcctgcgcgcacacatcacggcttcctgcccgccaggctcgtcgctgccttcggagcgcgacctcgccgaaagattcgggctggcccgcatgacggtccgccaggccatcgatgcgctggtaggcgaggaggtcattgaacgggtggttggcctggggaccttcgtccggaaaccaaaactcgatctgcaggtgaagctgacctcttacagtgaggaaatgcagcgccgtggcatggtccctgccgccaaggtgttgagcttcgagcagatcggcgcgagtgcgttcctggcccgcgagctgcagctggacgagggtacccccctggtccgcttcaggcgcctcctgctggccgacaacgagcccatgagcgtcgacgagaacttcattcccgctcatcgcgttcccggcctgctcgacggcgaaccacccacctcgctgtacaacgtcctgagtgaacgctttggcctggtcatggagtggggggaggacatgattgaggccacggcagcgtctccgtccactgccaggcttcttaatgtagaggtgggatccccgctgctgaagatccagaggcacgccttcgttgctcgctccatggtggactactccgtgtcttactaccgggcagaccgctacaagctgtgggtgccgctgcaacgtcccggagtccgtcccacgcgcaactacgcctccggctaccggaatccatag

SEQ ID NO: 643 - protein, 264 aa, Arthrobacter sp. FB24
MAASDASRMVGEIDRDSGTPIYVQLRELLRAHITASCPPGSSLPSERDLAERFGLARMTVRQAIDALVGEEVIERVVGLGTFVRKPKLDLQVKLTSYSEEMQRRGMVPAAKVLSFEQIGASAFLARELQLDEGTPLVRFRRLLLADNEPMSVDENFIPAHRVPGLLDGEPPTSLYNVLSERFGLVMEWGEDMIEATAASPSTARLLNVEVGSPLLKIQRHAFVARSMVDYSVSYYRADRYKLWVPLQRPGVRPTRNYASGYRNP

SEQ ID NO: 644 - DNA, 696 bp, Burkholderia mallei 10229
  CDS (1)..(696)
atgagcacgcccgcctatcaggaaatcaaggatttcatccttgcgcgcattcacgccggcgaatgggcggagggcgatcaggtgccgtccgagaacgagctcgcgcgcgagttcaaggtcgcgcggatgaccgtcaaccgcgcgctgcgcgagctgacggccgagcaggtgctcacgcgcatccagggggcgggtacgttcgtcgcgcggccgaagtacgaatcgacgctcgtcgcgatccgcagcatctccgacgaagtcgctgcgcgcggccaccggcatcacgcgcgcgtgctcgacctcgtcacgatgaaggccgacgaagcgctcgccgacgagatgcaggtgccgcctcacacgaggctcttccgctcggtgatgctgcactacgagaacgacgagccggtgcagctcgaggagcgctgggtgaatccggccgtcgccgccgattacgcggatcaggatttctcggcgatcacgccgaaccagtacctgatgcgcgtcgcgccgctgcagcgcgtcgaataccggatcgaggcggcgatgcccgatcgcgcgatgcgcgaggcgctcgagatggccgataccgaaccgtgcctcgtgctgcatcggcgcacgtggtcgcagggcattgtcgcatcggtcgtgaacctctggcatccgggcagccgctatcgcttcaccggccatttctga

SEQ ID NO: 645 - protein, 231 aa, Burkholderia mallei 10229
MSTPAYQEIKDFILARIHAGEWAEGDQVPSENELAREFKVARMTVNRALRELTAEQVLTRIQGAGTFVARPKYESTLVAIRSISDEVAARGHRHHARVLDLVTMKADEALADEMQVPPHTRLFRSVMLHYENDEPVQLEERWVNPAVAADYADQDFSAITPNQYLMRVAPLQRVEYRIEAAMPDRAMREALEMADTEPCLVLHRRTWSQGIVASVVNLWHPGSRYRFTGHF

SEQ ID NO: 646 - DNA, 735 bp, Exiguobacterium sp. 255-15
  CDS (1)..(735): transl_table=11
gtgattcagcatatcaataaaaattcaccacttccaatctactaccaaatcgaggctgccttgaagcaacaaatcgaggagggtctgttacaacccggcgatttaatcccctcggaacgcgagtttgccgaagcccatcaaatcagccggatgactgtccgtcaagccatctcgaatcttgttaacgctggttatctcattcgtcaaaaaggacgcggcacattcgtcgccaataaaaaaatcgtcatgcaactgtccggattaaccagtttttctgaagagatggaacatcttggtttggaaccggcgagtgagctgctgtcttatcaaacgattgctgctgaaatgacgattgcgaataaactcgggattcgtgaaggtgccaaaatttatgaattaaaacggttacgcatcgcaaacgaacaaccgcttgcgctcgaaactgtttatatcccagaacagctgttgccgggtttgaaccaggatgtcgccattacgtccctttatgcctttgctgaagccagtggactcaacctgggtcgcgccagtcagactttcgaatcacgtctcgcgacaaaagaagaagcacaacacctcggtctgtcggtcagttcacctgttttgtccgtcgaacaactgactttccttgccaccgatcaaccgtttgagtatgtcatttccgcgtatcgcggcgaccggtatacgttcacggtcgaaatggaacggcaacgctga

SEQ ID NO: 647 - protein, 244 aa, Exiguobacterium sp. 255-15
MIQHINKNSPLPIYYQIEAALKQQIEEGLLQPGDLIPSEREFAEAHQISRMTVRQAISNLVNAGYLIRQKGRGTFVANKKIVMQLSGLTSFSEEMEHLGLEPASELLSYQTIAAEMTIANKLGIREGAKIYELKRLRIANEQPLALETVYIPEQLLPGLNQDVAITSLYAFAEASGLNLGRASQTFESRLATKEEAQHLGLSVSSPVLSVEQLTFLATDQPFEYVISAYRGDRYTFTVEMERQR

SEQ ID NO: 648 - DNA, 912 bp, Jannaschia sp. CCS1
  CDS (1)..(912): transl_table=11
atggcagcagggggagcggatctgcgccttgggcgggcttgcaccgcactacgccccctacctgccagccgacatcgcagcccatctggcggagcctgcgggcacagcgctggacggcacgctgatccttgcggcgcaattgaccccgatgggagagacggcatgagcatcacggattacctgcgtgacgcgccgccgatcttgtcgggcaagggcccgcgttacatgcagctgcgcgaacggttgagtgacgccatcggtgcgggtatcctgacgcccggcagcgcgcttccgtcggagcgggagattggcaatctgaccgatctgtcgcgcgtgaccgtgcgcaaggccatacaggcgctggtggacagcggcgatgtcgtccagcggcaagggtccgggtcgttcgtgaccgaacgggcggagcggttgcagcaatccctgtcgcacctgacgtcgttctccgaagatatggcccgtcgcggcatgtccaccaaggttcagatgctggagcaaagtgtttgtctgccctccgccgatgaggtggcggcgctcggcattgagaatggcgcgtctgtctctcggctggcgcgtctgcgtatggccgatggacgtcccttggcgattgagcgggcgtcgctgcctgtcgatattctgcccaaccccatggaggtcacggcctcgctttatgatgtgttggagcggctcgacaggcgtcctgttcgggccgttcagaaaatatcagcgatcaatctgcaagaggcggacgcgagcctgctgggggtgcctgccggggcggcggggctgcggatcgagcgtttgtcctatctggcgtccggccagatcgcggagttcacaaaatccatctatcgcggcgatgcctacgacttcgtggcagagctgcgcctttga

SEQ ID NO: 649 - protein, 303 aa, Jannaschia sp. CCS1
MAAGGADLRLGRACTALRPLPASRHRSPSGGACGHSAGRHADPCGAIDPDGRDGMSITDYLRDAPPILSGKGPRYMQLRERLSDAIGAGILTPGSALPSEREIGNLTDLSRVTVRKAIQALVDSGDVVQRQGSGSFVTERAERLQQSLSHLTSFSEDMARRGMSTKVQMLEQSVCLPSADEVAALGIENGASVSRLARLRMADGRPLAIERASLPVDILPNPMEVTASLYDVLERLDRRPVRAVQKISAINLQEADASLLGVPAGAAGLRIERLSYLASGQIAEFTKSIYRGDAYDFVAELRL

SEQ ID NO: 650 - DNA, 729 bp, Rubrobacter xylanophilus DSM 9941
  CDS (1)..(729): transl_table=11
ttggccggcatagacaccgagagccccgttcccaagtactaccagctcaaggagatcatccgggacatgatcgagaaggaggagctgagggccgggcaggccataccctcggagcgggagttctgcgagcggtacggcataagccggatgacggcgcgccaggcgataatggagctggtcaacgaggggctgctgtaccgggagcaggggcggggcaccttcgtcgcggagaagaagctccagcaggaggcggtccggctcacgagcttcacccaggacatgcgggaccgggggatgcgggcctccagccgggtgctggagatggaggtggagccggcgggtccggtggtggccaggatgctgggggtggaccgggggacgaggatcgtccgcctgcgccgggtgcgcgacgccgacggggagccgatggcgctggagaccagccacctgctctacgaggtcgcccggggcgttctcgacgtggatctctcggaacgttcgctctacgaggagctcaggaaggcgggggtcaggatgtcccgcgccgagcagagctacgaggcggggctggtgagcgaggccgaggcggagcacctcggcgttcccgccgggagcccggccctgctcatcgagaggatcaccttcgaccagaacgaccgccccttcgagtacgtgaagagcacctaccgggccgaccgctaccgggtcaccacggtactgcacccttag

SEQ ID NO: 651 - protein, 242 aa, Rubrobacter xylanophilus DSM 9941
MAGIDTESPVPKYYQLKEIIRDMIEKEELRAGQAIPSEREFCERYGISRMTARQAIMELVNEGLLYREQGRGTFVAEKKLQQEAVRLTSFTQDMRDRGMRASSRVLEMEVEPAGPVVARMLGVDRGTRIVRLRRVRDADGEPMALETSHLLYEVARGVLDVDLSERSLYEELRKAGVRMSRAEQSYEAGLVSEAEAEHLGVPAGSPALLIERITFDQNDRPFEYVKSTYRADRYRVTTVLHP

SEQ ID NO: 652 - DNA, 777 bp, Burkholderia ambifaria AMMD
  CDS (1)..(777): transl_table=11
atggccggcaacctgatcgatacccattccatgaagtcacccacggacgaccgctggcaggacctgcgccccgaccccgacaacgacacgccgctctatctgcagctcgcccgcaagctcggcgacgcgatccacgacaatcgctgggcggctggcgaggcgctaccgtccgagcgtgtgctgtccgaagcgctcggcgtgtcgcgcatcaccgcgcgcaaggcgatcgcgctgctcgtcgagcagggcctgatccgccgcacgcaaggcgccggcaacttcatccagccgcgttacgaggatccgctgtcgcggctgtcgagcttcagcgagatgctcgagcgccgcggcttcaagccgagctcgcaatggctcgagcgcgaaatccagccggcgaaccgcgacgaagtgattcagctcgggctgtcgccggccgcatccgttacacggctgaagcgcctgcgcctcgccgacggcatcgtgatggccgtcgagaactcgacgttccccgctacgctgattcccgatccgcaggcgatcggcggttcgctgtacagctatctcgaagcgcgcggcacgccgatcgtgcgcgcgctgcagcatttccgcgcagtcaacgcgaccgacgagatcgcgcaacagatgggcatcgcgccgcacgacgcgctgctgctgatcacgcggatcggctacacggccgaccagcgcgcgatcgagctcaccgatacctactgccgcaacgattactacgacttcgtcgtcgagctgcgcaagtaa

SEQ ID NO: 653 - protein, 258 aa, Burkholderia ambifaria AMMD
MAGNLIDTHSMKSPTDDRWQDLRPDPDNDTPLYLQLARKLGDAIHDNRWAAGEALPSERVLSEALGVSRITARKAIALLVEQGLIRRTQGAGNFIQPRYEDPLSRLSSFSEMLERRGFKPSSQWLEREIQPANRDEVIQLGLSPAASVTRLKRLRLADGIVMAVENSTFPATLIPDPQAIGGSLYSYLEARGTPIVRALQHFRAVNATDEIAQQMGIAPHDALLLITRIGYTADQRAIELTDTYCRNDYYDFVVELRK

SEQ ID NO: 654 - DNA, 762 bp, Bacillus thuringiensis serovar israelensis ATCC 35646
  CDS (1)..(762): transl_table=11
ttgcagtataaaggaggtatgaaaatggcaagcggatcaacacaagtaaaatacctcggcatttatcaaaagattaaacagcaaattttagacggtgaatataaaatcaacgaaaaaattccgagtagccccgtccttgctgaagaatttggtgtttcagcccttactattaagaaagcgctggatctattagttagagatggctacatcatccgccggcgcggaagcggaacagtggtgcaagattggcgtcaacaggaaaaggcacgaatgattcaaactttaacgggtacgaaagctgtatacggcagtgaggtagaaagtaaaattatcgagtttgcgattgttggggctgatgaagtagttgctgagaaattgggagtttcaatcggtgatttcgtctataaaatcattcgcctccgcatcattcacagcattccgacgattatggagcatacatggatgccaatttcggttatcccaggtgttgaggcttctgttttagaggagtcgatatactcacatattcaaaataaacttggccttgaagtagggacatctgttgtcagggttaaaggaattcgcccagatgatagggaaaagcagtttatgaacttaacaaatcaggatttcctaatgcgagttgaacaagtagcttacttaacggatggacgaacttttgaatattcttatgcagatcatctaccagaaacctttgagtttgaaacagtcattacggcaaaaaattataaagagacataa

SEQ ID NO: 655 - protein, 253 aa, Bacillus thuringiensis serovar israelensis ATCC 35646
MQYKGGMKMASGSTQVKYLGIYQKIKQQILDGEYKINEKIPSSPVLAEEFGVSALTIKKALDLLVRDGYIIRRRGSGTVVQDWRQQEKARMIQTLTGTKAVYGSEVESKIIEFAIVGADEVVAEKLGVSIGDFVYKIIRLRIIHSIPTIMEHTWMPISVIPGVEASVLEESIYSHIQNKLGLEVGTSVVRVKGIRPDDREKQFMNLTNQDFLMRVEQVAYLTDGRTFEYSYADHLPETFEFETVITAKNYKET

SEQ ID NO: 656 - DNA, 708 bp, Vibrio sp. Ex25
  CDS (1)..(708)
atgaaacccaaatacatagacattgcggaacgattagaaaaaaagatcaaagatggggaactacaacctaaatcgatgcttccaaaagagagtgatttgcaagaagagttttccgtaagccgcgtaaccatcagaaaaagcttacaaattctggtcgacaataatttaattagtcggacaagaggtagtggaacttatgtaaacgatctaaaagcccaacatgatgccttacatttgctgggttttatcgaggaagtcagtaaacaggggaaaactcctagctctcaagtcataaagttcgaacttaaaaagccgaatgagcaggttgctaagcagttaaatctctcgcccaatgatgatacatatgaaatacatagactcagatgtattaatgatgagcctgaaatttacgaagtcactcatatgccagcagtgttatttccagacttgagcatagccataatgaatggttctaaatatgagtacattgaaaatagcaaaggattgaaaattgcgaaaagcagtcagtctgtcaaaccgtatttgttagatgcagagacggcctcatacctgaatgaatcagaagcttcccctattctaaaagttgagtccactggttacctagaagatggtcgtgcatttgaatataccgtcaattacttccgacttcatcaatacagcttcgagtttatttcaactaggacgtag

SEQ ID NO: 657 - protein, 235 aa, Vibrio sp. Ex25
MKPKYIDIAERLEKKIKDGELQPKSMLPKESDLQEEFSVSRVTIRKSLQILVDNNLISRTRGSGTYVNDLKAQHDALHLLGFIEEVSKQGKTPSSQVIKFELKKPNEQVAKQLNLSPNDDTYEIHRLRCINDEPEIYEVTHMPAVLFPDLSIAIMNGSKYEYIENSKGLKIAKSSQSVKPYLLDAETASYLNESEASPILKVESTGYLEDGRAFEYTVNYFRLHQYSFEFISTRT

SEQ ID NO: 658 - DNA, 741 bp, Thermoanaerobacter ethanolicus ATCC 33223
  CDS (1)..(741): transl_table=11
atgacagagtttagaaaaagtaagaagtctgtttctttaagccaagaagtaaagaaaaaaatattggagtacatagaaaaagaaaatttacaaccagatgataaattaccttcggaaagtcaactgacaaaaatgttcaagattagtagatatactataagagaggctttggcccttttagaacaggaaaagataatatataaaattaaaggtaagggtacttttgtaaacaaaaagcctatacagataaagagtggattagaatatttggatagcataacagaaattattagaaaatttggatatgagccgggaacaaaatgggttagtattgaggaaactatacctacaaaagatatggtgaaaaaactaaatcttaaaccaaaggaaaaggtgattacttttaaaagaattagaacggctgatggcaaacctgctgcttttttagtagatacagttgcgaaaaaaatacttggtaacaaaaaacctgatcaaattaattttgaatccctgtttgaatacatggaaaaggagtttggaataattattgaatatgccatttcagaaattataccgactttccctactgaagagatgattcaatatttaggtgtagataaaaattccctgtttttgttgctttatcaattacattatgacaaagaaggaaggactatattttattctttagattattttgatccaaaaatatttaaatttaaagttatacgaagtcggtaa

SEQ ID NO: 659 - protein, 246 aa, Thermoanaerobacter ethanolicus ATCC 33223
MTEFRKSKKSVSLSQEVKKKILEYIEKENLQPDDKLPSESQLTKMFKISRYTIREALALLEQEKIIYKIKGKGTFVNKKPIQIKSGLEYLDSITEIIRKFGYEPGTKWVSIEETIPTKDMVKKLNLKPKEKVITFKRIRTADGKPAAFLVDTVAKKILGNKKPDQINFESLFEYMEKEFGIIIEYAISEIIPTFPTEEMIQYLGVDKNSLFLLLYQLHYDKEGRTIFYSLDYFDPKIFKFKVIRSR

SEQ ID NO: 660 - DNA, 699 bp, Streptococcus agalactiae 515
  CDS (1)..(699): transl_table=11
ttgttaccagcatatattaaaattcacgacgctattaaaaaggaaatcgataaagggacttggaagattgggcagcggttacctagcgaaagagatttagcggatgattatagtgtaagtcgtatgacacttcgccaatcaattacattgttagttgaagaaggtattttggagagacgagttggtagtggcacctatgttgctagtcatcgtgttcaagaaaaaatgcggggaacaactagttttacagaaattgtcaattctcaagggcgtaagccatccagtaaactaatctcatttcaaagaaaactagcaaatgaaaccgaaattcaaaaattaaatttatcacagtcagattatgtggttcgtatggaaagggtacgttatgctgataaggtaccgttggtttatgagatagcctctataccagagaatttaattaaaggttttgaacaatcagaggttacagaacatttctttaaaaccttaacagagaatggctacgaaattgggaaaagccaacaaactatatatgctagaaatgctagtgaacgtgttgcttcgcatttagaagttaacgcaggccatgctattttggcattgacacaagtttcatactttactgatggtaagccttttgaatatgttcatgggcaatatgttggagatcgttttgagttttatttagagaataactag

SEQ ID NO: 661 - protein, 232 aa, Streptococcus agalactiae 515
MLPAYIKIHDAIKKEIDKGTWKIGQRLPSERDLADDYSVSRMTLRQSITLLVEEGILERRVGSGTYVASHRVQEKMRGTTSFTEIVNSQGRKPSSKLISFQRKLANETEIQKLNLSQSDYVVRMERVRYADKVPLVYEIASIPENLIKGFEQSEVTEHFFKTLTENGYEIGKSQQTIYARNASERVASHLEVNAGHAILALTQVSYFTDGKPFEYVHGQYVGDRFEFYLENN

SEQ ID NO: 662 - DNA, 639 bp, Yersinia frederiksenii ATCC 33641
  CDS (1)..(639)
ttgccgtctgaaattcagttagccgagcgctttggtgcatcgcgaatgacggtcagaaaagcgttggaggtcttaattcaggatggtttgctggaacgacaacaaggccggggtacatttattatcgggaaagatcttaaacacgataataatcatctgaacagttttactgaacatatgaaaatgctaggtaaaactcctcatactgaagtatctgaattcaaaattattagggcaccacaagctatagccagccagttgaatattcaaccagaagataaaacttattatatcaagcgattgcgttatgctgataagcagattattcagatagaggagagttatctcccggtcgctctgatgcccgatttaacttatcatcatcttgagtcatcaaagtatgactttattgagaaacacgctaattatcaaattgaaggttgccgacagacatttttgcctattgcggccagccaagagtttgctctgcaacttcattgcgacccacgcacgctgttgctgcaattattagccgtgtctaatacaactgatggggtgattgtagatttttcggtgattacctttaatccggtagattataaaattagttattatcttaagcgccaccctctcgattaa

SEQ ID NO: 663 - protein, 212 aa, Yersinia frederiksenii ATCC 33641
MPSEIQLAERFGASRMTVRKALEVLIQDGLLERQQGRGTFIIGKDLKHDNNHLNSFTEHMKMLGKTPHTEVSEFKIIRAPQAIASQLNIQPEDKTYYIKRLRYADKQIIQIEESYLPVALMPDLTYHHLESSKYDFIEKHANYQIEGCRQTFLPIAASQEFALQLHCDPRTLLLQLLAVSNTTDGVIVDFSVITFNPVDYKISYYLKRHPLD

SEQ ID NO: 664 - DNA, 714 bp, Streptococcus suis 89/1591
  CDS (1)..(714): transl_table=11
atgaaaaaataccaagaaatttataatgacttaaaagaaaaaatacggacaaatgtttatccggcagaaagctccctaccgacagaacagcagcttcaggaaatctatggtgttagtcgtgatacggttcgtaaggcgttggcgattttgactgagggaggtttgattcaaaaagtgcaagggcgtggttcaatggtccttaagcaagaaattctcaatttcccagtttcaggtttaacttcctatcaggaattaacaaatgttctccagctttctaccaagacagatgttgtcagcttagatatgattaccgttaatagtagcctttcgcacttgacaggctttgagccgtatagcaaggtgtggaaagttgtccgtacacgttcaattgacggtaaggtctccgttgtggatacagattatcttgctgtcgatgtcgtgccagagttgacaactgctattgctgaaaaatccatctacgaatacctagaaaataagttagaccttgatattgcttatgcacaaaaagagattacggtagagccgaccaatcgagaagagcgtgagctaatgcaatcgaaggatgattatttggtcttgattaaatctcgtgtctatctcggtgatacccaacaattccaatatacagaaagcaagcataaaattgataaattccgctttgtagattttgctcgtagaaagcattctttatag

SEQ ID NO: 665 - protein, 237 aa, Streptococcus suis 89/1591
MKKYQEIYNDLKEKIRTNVYPAESSLPTEQQLQEIYGVSRDTVRKALAILTEGGLIQKVQGRGSMVLKQEILNFPVSGLTSYQELTNVLQLSTKTDVVSLDMITVNSSLSHLTGFEPYSKVWKVVRTRSIDGKVSVVDTDYLAVDVVPELTTAIAEKSIYEYLENKLDLDIAYAQKEITVEPTNREERELMQSKDDYLVLIKSRVYLGDTQQFQYTESKHKIDKFRFVDFARRKHSL

SEQ ID NO: 666 - DNA, 699 bp, Streptococcus suis 89/1591
  CDS (1)..(699): transl_table=11
atgaaagcagcatatatcacaattcacgataaaattaaggaacaaatcgataacggaatctggaaaattggtcaacgtttaccaagtgaacgcgatttagcagatgaatttggtgtttctcgtatgacgctccgtcaaggaatcacacttttagtggaagaaggtattctacaacgcaagattggttccggtacttatgtcgccagtacacgggttcaagaaaagatgcgaggcacgacttcctttactgaattagtacaactccaaggaaagacgccaagcagcaaattattgtcctatacgcgaaccaaacctaatgaaaaagaagttgaacaattaggtttatcccgtggcgagtatgttattcgaatggagcgggtccgctatgcagataatgttcccgtcgtgtatgaggttaccagcattcctgaacgcttgataaaaaatgtcccaaaagaagatgttaccaaccatttctttaaaacacttatggacaatggttatcgaattggaacgagcaaacaaaccatttttgcgcgtttagccaacgaaaaagtggctcaatatttacaaatttctaaaaaccaggctattctcgcactaaaacaggtatcttatctcgaggatggtcaagcatttgaatttgtaaatagtcagtatgttggggaacgtttcgaattctatttagaaaacaattaa

SEQ ID NO: 667 - protein, 232 aa, Streptococcus suis 89/1591
MKAAYITIHDKIKEQIDNGIWKIGQRLPSERDLADEFGVSRMTLRQGITLLVEEGILQRKIGSGTYVASTRVQEKMRGTTSFTELVQLQGKTPSSKLLSYTRTKPNEKEVEQLGLSRGEYVIRMERVRYADNVPVVYEVTSIPERLIKNVPKEDVTNHFFKTLMDNGYRIGTSKQTIFARLANEKVAQYLQISKNQAILALKQVSYLEDGQAFEFVNSQYVGERFEFYLENN

SEQ ID NO: 668 - DNA, 732 bp, Streptococcus suis 89/1591
  CDS (1)..(732): transl_table=11
atggttagtcaaactgttgaaaaacctctctatttgcagttggttgatgaattggaagttgcaattcgtgagaggatggctccgaatgacaagttattttcagagcgtgagttgacacaggtttatggtgtcagtcgtattacagttcgtttggctttgcaagaattggaaaaacgtggcttagtctataagaagcatggtaagggaacctatgtatctgagatttcagatactgcagttgatttgtctcaggcctatagttttactgagcaaatgaaaaaaattgggaaagtaccgaggacatctattttatcctttgaattggttaaggcgtcggactatattgcgcagcatctacaacttagtcagggtgaggaagtgtttgaagttgagcgtttgagacttgcagatgaggttccgatgatgttggaaaggacatatgttcctgcctcgctatttcctggattagctgctcagcgaatgaagtcaactcccttgtatgaaattttttcagaggattatcatcaggtgattcgtttggcagaagaagagttctatgcaagtattgctttggataatgaagctaagatactcggaattccaagcaatagtccagtgcttcatttggtaagaaaaacgtataatgataagaatagaattatcgagtttacgtttagtattgctagagcggaccagtttcgttacaagattacccatcaacggggatattag

SEQ ID NO: 669 - protein, 243 aa, Streptococcus suis 89/1591
MVSQTVEKPLYLQLVDELEVAIRERMAPNDKLFSERELTQVYGVSRITVRLALQELEKRGLVYKKHGKGTYVSEISDTAVDLSQAYSFTEQMKKIGKVPRTSILSFELVKASDYIAQHLQLSQGEEVFEVERLRLADEVPMMLERTYVPASLFPGLAAQRMKSTPLYEIFSEDYHQVIRLAEEEFYASIALDNEAKILGIPSNSPVLHLVRKTYNDKNRIIEFTFSIARADQFRYKITHQRGY

SEQ ID NO: 670 - DNA, 705 bp, Alcaligenes faecalis
  CDS (1)..(705): transl_table=11
gtgagtacaaaaccgctctacgaacagcttgctgacaagctgacccgctatatccaggacggtcgcttaaagccgggcgaccgtttgcccacggaagccgagctgggggaaatgtttggtgtcagccgcattacggtacggcagggtctggcaatcctgacccgtaatggcctgatcgagcgctttcccagccgtggctcctttgtgctggagcgcaagaatacggggtcctgggaactgaactccctcaatgatctggttcagctgggcaaggacaccagtaccaaggttgcccggtgggaattggtcgcccctccggcggagattgccgaattctttgcgtccgacgagccggtgtataagctgcaagcggtgcgctacaagtctgccgtgccgctttattttgcagaaaactacgtgctgcgctcgattggcgaacgtcttgggcaacaggatctggaaacccgcaccatggtggagatgctgacctctgtgctgaatgtgcccatcaagcatgcccaagaagagatcagcatggccgatgcctcagcggagatggccaagcagttgtggatcaaggaaagccaggcagtgatcgtgcagcgtatcgacttgttcgatgtcgatgacaaaccggtacaaagtggcaagggctggtggcgcagcgagcatttcaaacgccgcttcacgctcaattacctctga

SEQ ID NO: 671 - protein, 234 aa, Alcaligenes faecalis
MSTKPLYEQLADKLTRYIQDGRLKPGDRLPTEAELGEMFGVSRITVRQGLAILTRNGLIERFPSRGSFVLERKNTGSWELNSLNDLVQLGKDTSTKVARWELVAPPAEIAEFFASDEPVYKLQAVRYKSAVPLYFAENYVLRSIGERLGQQDLETRTMVEMLTSVLNVPIKHAQEEISMADASAEMAKQLWIKESQAVIVQRIDLFDVDDKPVQSGKGWWRSEHFKRRFTLNYL

SEQ ID NO: 672 - DNA, 765 bp, Streptomyces sp
  CDS (1)..(765): transl_table=11
atgagtacggacgtcagcagcgccggggccgacacgagggcgccgggccgccgggaccgcgtgccgaagtactacctcatcaagcagcggctgctgcagatgaccgacgagcgcgcgccgggctccccgatgccggccgagcggctgctcgccgtcgagttcggcacgtcccgcaccaccgtccgcaaggcactgctggaactggtgagcgagggccggctcgaccgcatccagggcaagggcaccttcgtggcccggccgaaggtgtatcggacactccaactgacctcgtacaccgaggacatgcgcgcccaggggctcagccccgcctcgcaggtcctggacatcggatacgtcccggcggacgcggagctggcggcgctgctggaggtggaaccggaggaccgggtcctgcggatcgagcggctgcggctggccggtggcgagccgatggccatcgaggcgacccacctctccgcccgccgcttccccggcctgcggcgcaacctcacccgctacacctctctctacaccacgctcgccgaggtgtacggggtccggcccgcggaggccgacgagaccatcgagacctccccggcgacaccgcgtgaggcgggcctcctcggcacggacgtgggcctgccgatgctgctgctgtcccgccactcgcgggacgagaacggggccccggtggagtgggtacggtcggtgtaccgcggctcccgctacaagttcaccgcgcgactgcggcgaccgcgggggtga

SEQ ID NO: 673 - protein, 254 aa, Streptomyces sp
MSTDVSSAGADTRAPGRRDRVPKYYLIKQRLLQMTDERAPGSPMPAERLLAVEFGTSRTTVRKALLELVSEGRLDRIQGKGTFVARPKVYRTLQLTSYTEDMRAQGLSPASQVLDIGYVPADAELAALLEVEPEDRVLRIERLRLAGGEPMAIEATHLSARRFPGLRRNLTRYTSLYTTLAEVYGVRPAEADETIETSPATPREAGLLGTDVGLPMLLLSRHSRDENGAPVEWVRSVYRGSRYKFTARLRRPRG

SEQ ID NO: 674 - DNA, 717 bp, Corynebacterium glutamicum
  CDS (1)..(717): transl_table=11
gtggacggccttaaaccaaagcatcagcagcttcgtgaaattttggaggaaatctgcaccacccagcttcagcctggggacatgctgcctggtgagcgcatcctggaagaaaagtatggcgtcagccgaattacggttcgtcgggcgattggtgatctggtcgcgtccggcaggttgaagcgagctcgcggcaaaggtaccttcgtggcccactcgccgttgatttcccgcctgcatttggcctcgttttccgcagagatggccgcccagaagctatcggctaccagcaggattttgagttcttcccgcggtcccgccccagatgatattgctgatttctttggtaccgatcgcgcggcccagcacatcacgttgcgccgcctgcgccttggaaatggtcgaccctatgccattgacaacggctggtacaactccgaattcgcacctgacctgctggaaaatgatgtgtacaactccgtgtactccatcctggaccgcgtctatggcgtccccgtcacccaggccgagcaaacggtcaccgccgtagcagccgacgaagacaccgcacggcttctcgacgtcacccccggcgccccactccttcgtatccttcgacagtcactttctggcgataagcccgtggaatggtgcgtttccttgtaccgaaccgaccgatattctttaaaaacattggttacacgctccgaagatctctga

SEQ ID NO: 675 - protein, 238 aa, Corynebacterium glutamicum
MDGLKPKHQQLREILEEICTTQLQPGDMLPGERILEEKYGVSRITVRRAIGDLVASGRLKRARGKGTFVAHSPLISRLHLASFSAEMAAQKLSATSRILSSSRGPAPDDIADFFGTDRAAQHITLRRLRLGNGRPYAIDNGWYNSEFAPDLLENDVYNSVYSILDRVYGVPVTQAEQTVTAVAADEDTARLLDVTPGAPLLRILRQSLSGDKPVEWCVSLYRTDRYSLKTLVTRSEDL

SEQ ID NO: 676 - DNA, 762 bp, Streptomyces griseus
  CDS (1)..(762): transl_table=11
atgggcgccgaaggggcagtacggggggcgagaccggtaccggtacgcgcacagcgcgtaccgaagtactaccggctcaagcgccatctcctcgacatgacggacaccctgccgcccggcacccccgtgccgcccgaacgcaccctggcggccgaattcgacacctcgcgcaccaccgtgccgcaggcgctccaggagctggtcgtggagggccggctggagcgcatccagggcaagggcaccttcgtggccaagccgaaggtctcccaggccctccagctcacctcgtacaccgaggacatgcgtgcccagggactggagccgacgtcccaactgctggacatcggctatgtgacggcggacgacacgctcgccggcctgctggacatctcgacgggcggccgggtgctgcgcatcgagcggctgcggctcgccagcggggagccgatggcgatcgagaccacgcacctttcggccaaacgcttcccggcgctgcgccgttcgctggtgaagtacacctcgctctacaccgcgctcgccgaggtgtacgacgtgcgcctcgccgaggcggaggagaccatcgagacctcgctcgcgacgccgcgcgaggcgggactgctcggcaccgacgtggggctgccgatgctcatgctgtcccgccattcggtggacggccagggcgaacccgtggagtgggtgcgatcggtgtaccggggcgaccggtacaagttcgtggcccgcctgaagcggggcacggactga

SEQ ID NO: 677 - protein, 253 aa, Streptomyces griseus
MGAEGAVRGARPVPVRAQRVPKYYRLKRHLLDMTDTLPPGTPVPPERTLAAEFDTSRTTVPQALQELVVEGRLERIQGKGTFVAKPKVSQALQLTSYTEDMRAQGLEPTSQLLDIGYVTADDTLAGLLDISTGGRVLRIERLRLASGEPMAIETTHLSAKRFPALRRSLVKYTSLYTALAEVYDVRLAEAEETIETSLATPREAGLLGTDVGLPMLMLSRHSVDGQGEPVEWVRSVYRGDRYKFVARLKRGTD

SEQ ID NO: 678 - DNA, 801 bp, Lactococcus lactis
  CDS (1)..(801): transl_table=11
atggcaagaaaatcagtaccaaattatgtaaaaatacatgatgccttaaaagatgaagttgaaaaaggcatctggaaaattggacaacgtcttccaagcgaacgagatttagccgagcgttttacagtgagtcgtatgacagccagacaagctgtgacagccttagtagatgagggaattctcgaccgtcgagtaggttctggaacctacgttgctagccgacgtgtgcgtgaaaaaatgcgtggaacaacttcttttacagaaattatcagttcgcaaggcaaggttccctcaacagaagttttaagttatattagaactgctcctaatgaagttgaatgtgagaagttgaacatcactaaaaaagattcgattattcgaatggagcggattcgatatgctgacaatgttcccatttgttatgaagtggcaagtattccatttaaattagtgaaatcttttgataaaaaagaaattactagtaatttctttaaaactttggaaagccatgggcatgaaattggtcggagtgaacaaattgtttcggcaaagagagtcagtacagaagtatcagaatacttaaaaacaagagttggagctgctatacttggtttaacacaggtttcttatctagtagatgggactgttttgaatatgttttgtcacaatatgttggtgaccgttttgaattttatttggaaagataaaaaggacttaatgaactcctttttttacttgccgacgatattgatactgacgaagttgaaaatgaatccaacagcccacacaaaagccacttaa

SEQ ID NO: 679 - protein, 266 aa, Lactococcus lactis
MARKSVPNYVKIHDALKDEVEKGIWKIGQRLPSERDLAERFTVSRMTARQAVTALVDEGILDRRVGSGTYVASRRVREKMRGTTSFTEIISSQGKVPSTEVLSYIRTAPNEVECEKLNITKKDSIIRMERIRYADNVPICYEVASIPFKLVKSFDKKEITSNFFKTLESHGHEIGRSEQIVSAKRVSTEVSEYLKTRVGAAILGLTQVSYLVDGTVLNMFCHNMLVTVLNFIWKDKKDLMNSFFYLPTILILTKLKMNPTAHTKAT

SEQ ID NO: 680 - DNA, 705 bp, Pseudomonas fluorescens
  CDS (1)..(705): transl_table=11
atgagcaaatacaaccagatctatacggatctgcttgccagcatcaccaccgaacgcctgcaacgcggcacgcgccttccctctgaaaccgaattgatggacgcctaccaggccagccgtggcaccgtgcgtcgggccatcgagcaattgcaagagcgtgggttcgcgcaaaagatccatggcaagggcacgttcgtgctgtcccccaacccgattgagttccaactggggggcattgtcagcttccacgaaacccacgccgacctgggcgatgacgtacgtaccgaagtggtcgaattcactcaactgcccctggaaggctccctgcagcagcatatcgaggccgagcccggcaccctgatcacgcgcatcaagcgagtgcggcgcatcggcggcaaacgggtgatcctcgacatcaaccgcttcgtcgccgacctgatcccgggcctggaccagacgattgccgaacagtcgatctacgcgtttatcgagcagacgctgcaactgcagatcagctacgcccagcgcaccatcgaagccctgccccgcagcaaggacgaccaggcgcacttggacctcgacggccagagccatgtgattgtggtgagtaaccagacgtttttgcaggatgggcggcagttcgagtacaccgagtcgcggcatacattggataagttttacttttcggatattgcgcggcgctaa

SEQ ID NO: 681 - protein, 234 aa, Pseudomonas fluorescens
MSKYNQIYTDLLASITTERLQRGTRLPSETELMDAYQASRGTVRRAIEQLQERGFAQKIHGKGTFVLSPNPIEFQLGGIVSFHETHADLGDDVRTEVVEFTQLPLEGSLQQHIEAEPGTLITRIKRVRRIGGKRVILDINRFVADLIPGLDQTIAEQSIYAFIEQTLQLQISYAQRTIEALPRSKDDQAHLDLDGQSHVIVVSNQTFLQDGRQFEYTESRHTLDKFYFSDIARR

SEQ ID NO: 682 - DNA, 801 bp, Bacillus halodurans
  CDS (1)..(801): transl_table=11
atggattttaaaagatggtcgtaccctgaccatctttttttacggatcaatcaaagtcttttgcaaaaggtgggtggggatgcgatgaaaaagtacgaggccatttcaatggaaataaaaaagagaataaaagaaaacgactatcctgtagatcaaccgataccagatgaaatctccctttcaaaagagtttggctgtagccggatgacgatgaaaagagcgctggacattttggttatggaagggcttctttatcgaaagcgagggcatgggacgtttattgttcaatcggccatccatacgagccgtgtcaatgtactgaccaatgaagttaaagggttgtccaatttgttaaaggataaacaggtaacgagtaaagtaatccaatttaatgtggagtttccagcggaagaagtggcagcccatttagccattgaccaaaaaacgccagtctatcatattatccgcttacggctcgtcgacggtgagccttatgtgatagagaaaacgtacatgccgaccccgctcattccagggattaatgatgaggtgttgcacggctcgatctattcttatctgattgacaagttagggttaacgatagccggatctcaccggaaaattcgtgcctgtaaagcagaggcgttagagatagaacatttgcattgtgaagcggatgatccgattttggaagtggaacatgtaggtttcttaaataatggtgtgccgttcgaatattccttttctcgtcatcggtacgataaatttgaggtgacgaccatcaatatgaaacggtcctag

SEQ ID NO: 683 - protein, 266 aa, Bacillus halodurans
MDFKRWSYPDHLFLRINQSLLQKVGGDAMKKYEAISMEIKKRIKENDYPVDQPIPDEISLSKEFGCSRMTMKRALDILVMEGLLYRKRGHGTFIVQSAIHTSRVNVLTNEVKGLSNLLKDKQVTSKVIQFNVEFPAEEVAAHLAIDQKTPVYHIIRLRLVDGEPYVIEKTYMPTPLIPGINDEVLHGSIYSYLIDKLGLTIAGSHRKIRACKAEALEIEHLHCEADDPILEVEHVGFLNNGVPFEYSFSRHRYDKFEVTTINMKRS

SEQ ID NO: 684 - DNA, 726 bp, Klebsiella aerogenes
  CDS (1)..(726): transl_table=11
atgtttgcacaacaacctcgttccgcgcccgcgcctttctatgaaaaggtgaagcaggcgatcagcgaaaagatccacagcggcgtctggcgaccgcatgaccgtatcccgtcggaagctgagctggtggcccagttcggcttcagccggatgaccatcaatcgcgcgctgcgcgagctgacggacgaaggcctgctggtcaggttgcaaggggtgggaacctttgtcgccgagccgaaagggcagtcggcgctgttcgaggtgcgcagtattgccgcagaaattgtcgcccgtcaccatcagcaccgctgtgaggtactcctgcttgaggagacccgggcggatcatattcaggcgacggcgctcagcgtcccggaaggcacccgcatctttcactcgctgatggtgcattacgaaaacgaggtgccggtgcaaatcgaagatcgctgcgtcaatgccgcagtggtaccggactatctgcatcaggactacaccgccaccacgccccatgattacctgtcgctgatcgcgccgttaaccgaaggtgaacatattgttgaagcggtgcaggccacggcggaagagtgcgcgctgctgcatattcacgcccacgatccgtgcctgctgatccgtcgtcgcacctggtcgacaacccacatcgtctcccacgcgcgcctgctgttccccggtagccgatatcgtctgcaggggcgctttggctcctga

SEQ ID NO: 685 - protein, 241 aa, Klebsiella aerogenes
MFAQQPRSAPAPFYEKVKQAISEKIHSGVWRPHDRIPSEAELVAQFGFSRMTINRALRELTDEGLLVRLQGVGTFVAEPKGQSALFEVRSIAAEIVARHHQHRCEVLLLEETRADHIQATALSVPEGTRIFHSLMVHYENEVPVQIEDRCVNAAVVPDYLHQDYTATTPHDYLSLIAPLTEGEHIVEAVQATAEECALLHIHAHDPCLLIRRRTWSTTHIVSHARLLFPGSRYRLQGRFGS

SEQ ID NO: 686 - DNA, 717 bp, Bacillus subtilis
  CDS (1)..(717): transl_table=11
atgaaggtgaataaattcatcacaatttataaagacatcgcacagcaaattgaaggcggccgatggaaagcggaggagattcttccgtctgaacatgagttgaccgcacagtacggtacatcaagagaaacggtccgaaaggcgcttcatatgctcgcgcaaaacggttatatccagaaaatcaggggaaaaggctccgtcgtgctcaatcgtgaaaaaatgcagtttcccgtttcgggccttgtcagcttcaaggagctcgcgcaaacgcttggcaaagaaacgaaaacaactgtacacaaattcgggctggagcctccgtcagagctgatccaaaaacagctccgggccaatctggatgacgacatctgggaagtcatcaggtctagaaagattgacggggaacatgtgattttggacaaggattactttttcagaaagcatgtccctcacctgacgaaagaaatttgtgaaaactccatatatgaatatatagaaggagagctcggtctttcgatcagttacgcccaaaaagaaattgtagccgagccgtgtacggacgaggacagagagctgctcgatttacgcggctatgaccatatggtcgtggtgagaaactacgtctttttggaggataccagtttgtttcaatatacggaaagcagacaccgtctcgacaaattccgatttgttgattttgcgcggcgggggaaatga

SEQ ID NO: 687 - protein, 238 aa, Bacillus subtilis
MKVNKFITIYKDIAQQIEGGRWKAEEILPSEHELTAQYGTSRETVRKALHMLAQNGYIQKIRGKGSVVLNREKMQFPVSGLVSFKELAQTLGKETKTTVHKFGLEPPSELIQKQLRANLDDDIWEVIRSRKIDGEHVILDKDYFFRKHVPHLTKEICENSIYEYIEGELGLSISYAQKEIVAEPCTDEDRELLDLRGYDHMVVVRNYVFLEDTSLFQYTESRHRLDKFRFVDFARRGK

SEQ ID NO: 688 - DNA, 732 bp, Rhizobium meliloti
  CDS (1)..(732): transl_table=11
gtggcgaaggtcgtcgaacggcagatgggcgtggcgctatggcggcagattgccgacaggatacggctcgcgatcagcaatggcgactatgacgccaccggcatggtgccgccggagacggcccttgcggcggaattcggcgtcaatcgccacaccgtccgcagcgcgctggccgcactcgcggaagaaggtctggtgcgcgcggtgcaggggcgcggcacgatgatcgagcgcaaggatcgcgtgagctatccgatctcgcggcgcactcgcttctcgcagggtctcggccgccaggtgagagaaatcggaaccgagctcctggggcacgcccaagtgccggcaagcggcgaaatcgccactgcgcttggcgttcccccaggcacccctctcatcgagctcagcaccgtcagcagcggcgacgggcggccgctttcgacggcggtcagctactaccccgccgagcgctttgcgaggatggcggaggaatatgcgcagctcggctcggtcaccaaggcctttgccgcgcatgggctcgacgactacgtccgggtctcgacggagatcgtcgcgcggcacgcggaggcagaggaactctcgcttctgaaactatcgccgggggcgatcgtcatggagacgcaatcggtcaacgccgatctagaaggccgcccggtcgaatattcgcgaacgcgctttgcagccgaccgggtgaagctccggatcgagacttga

SEQ ID NO: 689 - protein, 243 aa, Rhizobium meliloti
MAKVVERQMGVALWRQIADRIRLAISNGDYDATGMVPPETALAAEFGVNRHTVRSALAALAEEGLVRAVQGRGTMIERKDRVSYPISRRTRFSQGLGRQVREIGTELLGHAQVPASGEIATALGVPPGTPLIELSTVSSGDGRPLSTAVSYYPAERFARMAEEYAQLGSVTKAFAAHGLDDYVRVSTEIVARHAEAEELSLLKLSPGAIVMETQSVNADLEGRPVEYSRTRFAADRVKLRIET

SEQ ID NO: 690 - DNA, 717 bp, Escherichia coli
  CDS (1)..(717): transl_table=11
atgatctacaaaagcattgcggagcggttaagaattcgacttaactccgcagatttcacgctaaacagccttcttcccggtgaaaaaaagctggcggaagagtttgcggtatcgcggatgaccatccgtaaagccattgacctgctggtagcgtgggggctggtggtccgccgccacggtagtggcacttacctggtgcgcaaagatgtactgcatcaaaccgccagtctgaccgggctggtggaggtgttaaaacggcagggaaaaacggtcaccagccaggtgctgatttttgaaatcatgcctgcgcctccggccattgccagccagttacggattcaaatcaacgagcagatctacttctcccgtcgcgttcgttttgtggaagggaaaccgctgatgctggaagacagctatatgccggtaaaactgttccgtaatctttcgctgcaacatctggaagggtcgaagtttgaatatattgaacaagagtgcgggattttgattggcggtaattatgaaagcctgacgccagtgctcgccgatagactgctggcgcggcaaatgaaggtagcggaacacacgccactgctgcggatcacctcgttgtcatatagcgagagcggggagtttttgaattattcagtgatgttcagaaatgccagcgaataccaggtggagtaccatttacggcgactccacccggaaaagagttaa

SEQ ID NO: 691 - protein, 238 aa, Escherichia coli [sequence omitted]

SEQ ID NO: 692 - DNA, 729 bp, Bacillus subtilis
  CDS (1)..(729): transl_table=11
ttgttaaacaacggaagttctacacctttatacattcagctaaaacaaatcatcactgatgacatcaaaaagggcgtgtattccccaaccgccaagctgcctaccgaaaacgagctttgcaccaagtataacgtcagccgcatcaccgtcaggaaagccattctcgatttagtcgaagaaggctatctgatcaggcagcagggaaagggaacgttcgttaaaagccctaaattaaaacgagagctgatcgctgtaaacggctactcggaatttatggaatcaaccggcaaaaaaccgaagcatcatgtgctgtcccatgacatcattccagcgtcaaaacccatcgccgaaaagcttcaaatccaacccgagagccctgtggttgaattaaaacggattttatataatgatgatcagcctctcacctttgaagtgacgcattatccgcttgatttgtttcccggcattgatacctttattgctgacggcgtctccatgcatgatattttgaaacagcaatacaaagttgtacccacgcacaatacgaagctattaaacgttgtatatgcccaacaggaggaaagcaaatacctggattgtgatatcggggatgcgctgtttgaaattgataaaacggcttttacatcaaacgaccagccaatctattgctcattgtttttgatgcacacaaaccgtgtcacttttaccatcaacagcccctacacataa

SEQ ID NO: 693 - protein, 242 aa, Bacillus subtilis
MLNNGSSTPLYIQLKQIITDDIKKGVYSPTAKLPTENELCTKYNVSRITVRKAILDLVEEGYLIRQQGKGTFVKSPKLKRELIAVNGYSEFMESTGKKPKHHVLSHDIIPASKPIAEKLQIQPESPVVELKRILYNDDQPLTFEVTHYPLDLFPGIDTFIADGVSMHDILKQQYKVVPTHNTKLLNVVYAQQEESKYLDCDIGDALFEIDKTAFTSNDQPIYCSLFLMHTNRVTFTINSPYT

SEQ ID NO: 694 - DNA, 711 bp, Bacillus subtilis
  CDS (1)..(711): transl_table=11
atgttaaaataccagcaaatcgcaacggaaattgaaacatatatagaagaacaccagcttcagcagggagacaaactgccagtcctagaaaccctcatggcccagtttgaagtcagcaaaagcaccatcacaaagtccctcgagctattagagcaaaaaggcgcgatctttcaggtcagaggaagcggcattttcgtcagaaaacataaacgaaaaggctatatcagccttctgtcgaatcagggatttaaaaaagatctcgaggatttcaacgtcacctcaaaagtcatcgaactggacgtgagaaagccaacaccggaagcggcggaaaacctgaacatcggaatggacgaggacatctactatgtcaaaagggtccgctacatcaacggccagaccctttgctacgaagaatcctattacaccaaatccatcgtgacgtatttaaacaacgaaatcgtctcccactccatcttccattacatccgggaaggactggggttgaagattggtttttctgatttgtttctgcacgtgggccagcttaatgaggaagaagcggaatatttgggattagaggctggactgccgaagctgtatatagaaagtatttttcacctgacaaatgggcagccgtttgattactcgaagatttcgtataattatgagcagtcgcagtttgtggtacaggctaatagttttttattatag

SEQ ID NO: 695 - protein, 236 aa, Bacillus subtilis
MLKYQQIATEIETYIEEHQLQQGDKLPVLETLMAQFEVSKSTITKSLELLEQKGAIFQVRGSGIFVRKHKRKGYISLLSNQGFKKDLEDFNVTSKVIELDVRKPTPEAAENLNIGMDEDIYYVKRVRYINGQTLCYEESYYTKSIVTYLNNEIVSHSIFHYIREGLGLKIGFSDLFLHVGQLNEEEAEYLGLEAGLPKLYIESIFHLTNGQPFDYSKISYNYEQSQFVVQANSFLL

SEQ ID NO: 696 - DNA, 23 bp, Artificial sequence
  primer
atgggacacaagcccttataccg

SEQ ID NO: 697 - DNA, 23 bp, Artificial sequence
  primer
ttatcgcgatgattttcgctgcg

SEQ ID NO: 698 - protein, 198 aa, Artificial sequence
  consensus sequence
  Variant (2)..(10): Xaa in position 2 to 10 is any amino acid
  Variant (11)..(11): Xaa in position 11 is any or no amino acid
  Variant (13)..(13): Xaa in position 13 is any amino acid
  Variant (14)..(23): Xaa in position 14 to 23 is any or no amino acid
  Variant (25)..(25): Xaa in position 25 is any amino acid
  Variant (27)..(28): Xaa in position 27 to 28 is any amino acid
  Variant (30)..(35): Xaa in position 30 to 35 is any amino acid
  Variant (38)..(38): Xaa in position 38 is any amino acid
  Variant (40)..(42): Xaa in position 40 to 42 is any amino acid
  Variant (44)..(46): Xaa in position 44 to 46 is any amino acid
  Variant (48)..(50): Xaa in position 48 to 50 is any amino acid
  Variant (52)..(57): Xaa in position 52 to 57 is any amino acid
  Variant (59)..(59): Xaa in position 59 is any amino acid
  Variant (62)..(62): Xaa in position 62 is any amino acid
  Variant (64)..(115): Xaa in position 64 to 115 is any amino acid
  Variant (116)..(126): Xaa in position 116 to 126 is any or no amino acid
  Variant (128)..(128): Xaa in position 128 is any amino acid
  Variant (130)..(188): Xaa in position 130 to 188 is any amino acid
  Variant (189)..(197): Xaa in position 189 to 197 is any or no amino acid
YXXXXXXXXXXIXXXXXXXXXXXPXEXXLXXXXXXSRXTXXXAXXXLXXXGXXXXXXGXGTXVXXXXXXXXXXXXXXXXXXXXXXXXXXXXXXXXXXXXXXXXXXXXXXXXXXXXXXXXXXXXXXXRXRXXXXXXXXXXXXXXXXXXXXXXXXXXXXXXXXXXXXXXXXXXXXXXXXXXXXXXXXXXXXXXXXXXXXL

SEQ ID NO: 699 - DNA, 1191 bp, Escherichia coli K12
  CDS (1)..(1191): transl_table=11
atgacaacaaacactgtttcccgcaaagtggcgtggctacgggtcgttacgctggcagtcgccgccttcatcttcaacaccaccgaatttgtccctgttggcctgctctctgacattgcgcaaagttttcacatgcaaaccgctcaggtcggcatcatgttgaccatttacgcatgggtagtagcgctaatgtcattgccttttatgttaatgaccagtcaggttgaacggcgcaaattactgatctgcctgtttgtggtgtttattgccagccacgtactgtcgtttttgtcgtggagctttaccgttctggtgatcagtcgcattggtgtggcttttgcacatgcgattttctggtcgattacggcgtctctggcgatccgtatggctccggccgggaagcgagcacaggcattgagtttaattgccaccggtacagcactggcgatggtcttaggtttacctctcgggcgcattgtgggccagtatttcggttggcgaatgaccttcttcgcgattggtattggggcgcttatcacccttttgtgcctgattaagttacttcccttactgcccagtgagcattccggttcactgaaaagcctcccgctattgttccgccgcccggcattgatgagcatttatttgttaactgtggtggttgtcaccgcccattacacggcatacagctatatcgagccttttgtacaaaacattgcgggattcagcgccaactttgccacggcattactgttattactcggtggtgcgggcattattggcagcgtgattttcggtaaactgggtaatcagtatgcgtctgcgttggtgagtacggcgattgcgctgttgctggtgtgcctggcattgctgttacctgcggcgaacagtgaaatacacctcggggtgctgagtattttctgggggatcgcgatgatgatcatcgggcttggtatgcaggttaaagtgctggcgctggcaccagatgctaccgacgtcgcgatggcgctattctccggcatatttaatattggaatcggggcgggtgcgttggtaggtaatcaggtgagtttgcactggtcaatgtcgatgattggttatgtgggcgcggtgcctgcttttgccgcgttaatttggtcaatcattatatttcgccgctggccagtgacactcgaagaacagacgcaatag

SEQ ID NO: 700 - protein, 396 aa, Escherichia coli K12
MTTNTVSRKVAWLRVVTLAVAAFIFNTTEFVPVGLLSDIAQSFHMQTAQVGIMLTIYAWVVALMSLPFMLMTSQVERRKLLICLFVVFIASHVLSFLSWSFTVLVISRIGVAFAHAIFWSITASLAIRMAPAGKRAQALSLIATGTALAMVLGLPLGRIVGQYFGWRMTFFAIGIGALITLLCLIKLLPLLPSEHSGSLKSLPLLFRRPALMSIYLLTVVVVTAHYTAYSYIEPFVQNIAGFSANFATALLLLLGGAGIIGSVIFGKLGNQYASALVSTAIALLLVCLALLLPAANSEIHLGVLSIFWGIAMMIIGLGMQVKVLALAPDATDVAMALFSGIFNIGIGAGALVGNQVSLHWSMSMIGYVGAVPAFAALIWSIIIFRRWPVTLEEQTQ

SEQ ID NO: 701 - DNA, 1176 bp, Corynebacterium glutamicum
  CDS (1)..(1176): transl_table=11
atgccttttgccctctacatgcttgccctggcggtcttcgtcatgggcacttcagaattcatgctcgcgggattgctccccgcgatcgcgaccgaacttgacgtctcggtcggcactgcgggcctgctgacctccgcattcgcagtcggtatggtcgtcggcgcgccagtgatcgcggcattcgctcgccgttggccaccgcggctcacattgatcgtttgccttctcgtgttcgcgggaagccacgtcatcggagcgatgacaccagtgttctctctcctgctcatcacccgggtgctcagcgctctcgcaaacgcaggattcctcgccgtagcactgagcacggccactaccctcgtgccagcgaaccagaaggggcgtgcactgtcgatcctgctctccggcacgacgatcgcaaccgtcgtgggcgtccccgccggggcactgctcggcacagcgctgggctggcgaacgacgttctgggcgatcgccatcctctgtattcccgcggccgttggagtcattcgtggcgtcacgaacaatgttggtcggagcgagactagcgcgacctcaccaaggctccgtgtcgagctcagccagttggcgacgccgcggctcatcctggccatggcactcggagcgctgatcaacggagggacctttgcggcattcaccttcctggcacccatcgtgaccgagaccgcgggcttggccgaagcgtgggtgtccgtcgcgctggtgatgttcggcatcggatcgttccttggcgtcacgatcgcaggacgactatcagatcaacgacctggcctcgtgctcgcagtcggcggaccgctattgctgacaggctggatcgtgttggcagtggtcgcatctcatcccgttgcgcttatcgtcctcgtcctcgttcagggattcctgtcgttcggcgtcggcagtactctgatcacgcgtgtgctgtatgcagcatcgggtgcgccaacgatgggcggttcgtacgcaaccgcagcattgaatatcggagctgcagcggggcccgtgcttggtgcgctcgggctcgcgaccgggctggggctgctcgcgccggtttgggtcgcttcggtgctgacagcgatcgctctcgtcatcatgcttctcaccagacgcgcgcttacgaagaccgcggcggaggccaattga

SEQ ID NO: 702 - protein, 391 aa, Corynebacterium glutamicum
MPFALYMLALAVFVMGTSEFMLAGLLPAIATELDVSVGTAGLLTSAFAVGMVVGAPVIAAFARRWPPRLTLIVCLLVFAGSHVIGAMTPVFSLLLITRVLSALANAGFLAVALSTATTLVPANQKGRALSILLSGTTIATVVGVPAGALLGTALGWRTTFWAIAILCIPAAVGVIRGVTNNVGRSETSATSPRLRVELSQLATPRLILAMALGALINGGTFAAFTFLAPIVTETAGLAEAWVSVALVMFGIGSFLGVTIAGRLSDQRPGLVLAVGGPLLLTGWIVLAVVASHPVALIVLVLVQGFLSFGVGSTLITRVLYAASGAPTMGGSYATAALNIGAAAGPVLGALGLATGLGLLAPVWVASVLTAIALVIMLLTRRALTKTAAEAN

SEQ ID NO: 703 - DNA, 1209 bp, Mesorhizobium loti MAFF303099
  CDS (1)..(1209): transl_table=11
gtgacagacacgacattacagcttgaagatgcggcgatagacgttgatgcggctgcgccggccacgtgggacgcaaccatctggttcgcggtcatttcattggccgccaccagctttgccctggtgtcagccgaatttctgccggcaggtctgctgacgcccctggcgcgcgatctcggcatcagcgaaggaacggccgggcaggtcgtcaccgccacagcttctgtcggcgccgtgacggccatgttgagcaatgttctcatcggccgattaaaccgcaaggcagtgctggttggtctcagcgccttggccgttggttccaacattcttgcggcgctggcgaccgatttctggctgttgttgctgggtcgggccggactggggatcgctctcagcgctttctgggcgctttcggtcgccgtcgtggcgaggctggttggcgccaatgcgactgggcggggcatggctatcgtcaccctcggcgtctcgctcgcaaccatagccgcaccgtcgatgggcgcgttgatcagcgactggctgggttggcgcagcgccatggccatgacagcggggttggccttgcttgccatgctgctgcagttgcttagcctgccgtccttgcctgcaacggcaagcaatagtcttgcagacgtccttcggctgacacggcggcgtggcattcaacttggtatgcttgctatccttttgttgatgacggggcattttgccggctcggtctatgtgcgccccttcctcgaacatgtgacgctccttgcaaccgggccaattgccctggcgttgctcggatttggcatcgccgcagtgatcggcaatattgctggtggccgcatggccgacgccaatatccacgtggctctcgtggttaacgccgcattgatggcgtttgcggcgctggcattggtgctctggggcgtgcacattggcgttgcctttggcttcgctacgctgtggggcttcgccttcggcatggcgccggtggtgctgccgacaaatttgtctcgcgcagcgccggacgcgctggaagcagcgggcagcctgatggtcgcctcttttcaggtcgccatcaccatcggcgcggttgtcggcggctatgctgtggacacctatggccctacggcgcctttgaccgtgactgctatccttgcagcatcgacagccgtcttggcgctgctacagccgcgcggctag

SEQ ID NO: 704 - protein, 402 aa, Mesorhizobium loti MAFF303099
MTDTTLQLEDAAIDVDAAAPATWDATIWFAVISLAATSFALVSAEFLPAGLLTPLARDLGISEGTAGQVVTATASVGAVTAMLSNVLIGRLNRKAVLVGLSALAVGSNILAALATDFWLLLLGRAGLGIALSAFWALSVAVVARLVGANATGRGMAIVTLGVSLATIAAPSMGALISDWLGWRSAMAMTAGLALLAMLLQLLSLPSLPATASNSLADVLRLTRRRGIQLGMLAILLLMTGHFAGSVYVRPFLEHVTLLATGPIALALLGFGIAAVIGNIAGGRMADANIHVALVVNAALMAFAALALVLWGVHIGVAFGFATLWGFAFGMAPVVLPTNLSRAAPDALEAAGSLMVASFQVAITIGAVVGGYAVDTYGPTAPLTVTAILAASTAVLALLQPRG

SEQ ID NO: 705 - DNA, 1185 bp, Mesorhizobium loti MAFF303099
  CDS (1)..(1185): transl_table=11
atgtcgcttccgctcattgccctgttcatcgccgctttcgctttcggcaccaccgaattcgtcattgctggcgtgctgccgcaggtggcggaggggcttggcgtttcggttccctccgccggctatctcgtctccggctatgcctgcggcatcgccatcggcggcccgctgctggcgctggtcaccaaatccctgccgcgcaagaccttgctgctcggcctcgccatcgccttcaccatcggccaggcagcctgtgcgctggcgcccgactttacctcgatgctgctgctgcgcattgccgttgccgtcgcgcacggcgcctatttcggcgtcgccatggtggtcgccgtcggcctcgttcccgaggacaagcgcggcatggcggtcgccgtcatcctgtccggcctcaccgtctccaatgtcatcggcgtgccggcgggcaccgccatcggcaatatctggggctggcgcgcaaccttctgggtgatgtgtgcgctgggcgtggcggcgacttgcgccatggcggcccttctgccgcgcaccgccggatatcaggccgagcccgccggcctggcgcgtgaggtccgcgtgctggcgcgccagcaggtctggacctcgctgatcctgatgctcatgctgatgctcggccagttctgcctgttcacctacatcacgccgaccttgcttgaggtcaccgggctcgacgaaggcctggtgccctgggtgctgctgctcaacggcgtcggcgccacacttggcgtcttcctcggcggcaagctgtcggactggaagctgatgccgtcgctcatcaccatgctggccctgcaggcggtgacgctggcggtcatctatgccgtcagcccctaccccgtgccgatgatcgtggcgatcgtcgtctggggtggcctcaacttcgccatcggcacgccgatccagacccgcatcctggcctggacggcggatgcctccaatcttgcctcatcactgattccgtccggcttcaatgtcggcatcgcgctggccgcgtcgctgggcgccgccatgctcaatgccggctacggctaccgcagcctgcctgtggtgggcgcggccgccatgctggtcgccgtggtggtggcagtcgtctcccaggtctgggaagggcgcagcaacgccacgccgccgctgacggccccggcggagtaa

SEQ ID NO: 706 - protein, 394 aa, Mesorhizobium loti MAFF303099
MSLPLIALFIAAFAFGTTEFVIAGVLPQVAEGLGVSVPSAGYLVSGYACGIAIGGPLLALVTKSLPRKTLLLGLAIAFTIGQAACALAPDFTSMLLLRIAVAVAHGAYFGVAMVVAVGLVPEDKRGMAVAVILSGLTVSNVIGVPAGTAIGNIWGWRATFWVMCALGVAATCAMAALLPRTAGYQAEPAGLAREVRVLARQQVWTSLILMLMLMLGQFCLFTYITPTLLEVTGLDEGLVPWVLLLNGVGATLGVFLGGKLSDWKLMPSLITMLALQAVTLAVIYAVSPYPVPMIVAIVVWGGLNFAIGTPIQTRILAWTADASNLASSLIPSGFNVGIALAASLGAAMLNAGYGYRSLPVVGAAAMLVAVVVAVVSQVWEGRSNATPPLTAPAE

SEQ ID NO: 707 - DNA, 1179 bp, Mesorhizobium loti MAFF303099
  CDS (1)..(1179): transl_table=11
atggacaagcgcctcttctggcttgcgctcggatcgttcacgatctcgaccgagggcttcgtcatctccagccttctgcccgacattgccagggatgccggcatttccattccgctcgccggcacgctgatcaccgccttcgcgctcgcctacgccatcggcacgccgatcctggcgacgctgacaggcgaatgggaccggcgccgcgtcatcctgtggacgctggtgttcttcgtcatcggcaacattgccgccgccttgagttcctccttcgaagtgctgttgatcgcgcgcgtcatcatggcgctgtcgtcgggcctgttcgccgcgaccgcgcagggtacggcggtggcgctggtcgatgatcatcaccgggcacgcgccatcgccgttgtcgtcggcggcaccacagtggccgtcgccgtcggtgcgccgctcggcgcgctggtcgcgacgatcgccggctggcgcggcaccttctatgccattgccgggctcggcgcgcttgccggcgccatcctgtggtaccggctgccgcgcggcatcgtcggcaccaggctgccgctgaagcgccggctggcggccgccatgcggcccggggtgatgccgatcctggtgacgacattgctggcgctgaccggcgccttcaccgtctttgcctatgtcgcgccgctcgccatcgagggcgccgggctcagccagatcgcgctgcccggcatgctgctcgccttcggcgtcggcgccgtcatcggcaacattgccggcggccaggcggccgatcgtttcggtgccacccgcaccgtcggctggtcgctgacgctgagtgcggccatgctggtgatgctgtcggtcgtgccggccttcctgccgcagcacattgccgggccggcgctgatggcaatgatggtgccgtggggcatcgtcggctgggcgttcccgccggcgcaggccagccgcatcatcaagctggcgcctgatgccgcgccgatcgtgctgtcgctcaacgggtcggcgctctatctcggggtggcgcttggcgcggtggtcggcggtggtgtgctgcgctacggcgcgccggtcgatctcggtttggtcgcggctgccttcccgttgatcgggctgggcatcgtgctggccggccgctgggcggcacggccggtcgcgatgccggccgaatag

SEQ ID NO: 708 - protein, 392 aa, Mesorhizobium loti MAFF303099
MDKRLFWLALGSFTISTEGFVISSLLPDIARDAGISIPLAGTLITAFALAYAIGTPILATLTGEWDRRRVILWTLVFFVIGNIAAALSSSFEVLLIARVIMALSSGLFAATAQGTAVALVDDHHRARAIAVVVGGTTVAVAVGAPLGALVATIAGWRGTFYAIAGLGALAGAILWYRLPRGIVGTRLPLKRRLAAAMRPGVMPILVTTLLALTGAFTVFAYVAPLAIEGAGLSQIALPGMLLAFGVGAVIGNIAGGQAADRFGATRTVGWSLTLSAAMLVMLSVVPAFLPQHIAGPALMAMMVPWGIVGWAFPPAQASRIIKLAPDAAPIVLSLNGSALYLGVALGAVVGGGVLRYGAPVDLGLVAAAFPLIGLGIVLAGRWAARPVAMPAE

SEQ ID NO: 709 - DNA, 1176 bp, Mesorhizobium loti MAFF303099
  CDS (1)..(1176): transl_table=11
atgcctttgccgatccttgcgcttgccattgcgtccttctgcatcggcaccaccgaattcgtcatcatgggcctgctaccggaggtcgccgccgaccttcgcgtgtcgatcccttcggccggcctgctggtcaccggctatgcgctgggcgtcgtcttcggcgcgccgatcgtcgccatggccaccgcgcatctgccgcgcaagccggtgctggtggggttggccgcgtcgttcgtcgtcggcaatctgttctgcgccatcgcgcctgactattggacactgatggcggcgcgtgtcttcaccgcttttggccacggcgctttcttcggcatcggctcggtcgttgccgcgagcctcgtgccgcgcaacaaacgcgccagcgccatggcgctgatgtttgccggcctgacgctttccaacattctgggcgttcccgccggcacagcccttggcgaagctttcggctggcgctccacattcatcgccgtggtcggcatcggactgatctcggtcgctgccatcgcctggctggtgccgtcggatgtcgccgaacccagcggcggcggtctgcgcggcgagttgcgggtgctgggcaggctgcaggtctggctggcgatgctgatcgcctcgctggcctcggccagcttgtttgccgttttcacctatataaaaccctacctcaccgacgtgtccggcctgtcgacctccgcggtcacctgggtgcttttgctgttcggcgccggcatgacgatcggcaacatcattggtgggcggctggcggactggaagctgatgccgaccgtcatcggcacgctgctgttgatggcggtgctgttcatcggcttcatgcagttcggcgcgatagccagtgtcgccatcggcatcgtcttcctctgggggctgctcatcttcgtcgtcgtgccgccgctgcagatccgcgtcgtcgaggcggcctcggaagggccgaaccttgccgccacgctgaaccagggcgccttcaatgtcggcaatgccagcggcgcctggatcggcggcgtggccctttcagccggcgtctcctacgcccacctgcccctggtcggcgcggtgctcgccttgctggcggtcaccgtcgcggtgctgtcgcaagcgctggaccggcgcgcgcctgtcccgctccaggctgcagccgaatag

SEQ ID NO: 710 - protein, 391 aa, Mesorhizobium loti MAFF303099
MPLPILALAIASFCIGTTEFVIMGLLPEVAADLRVSIPSAGLLVTGYALGVVFGAPIVAMATAHLPRKPVLVGLAASFVVGNLFCAIAPDYWTLMAARVFTAFGHGAFFGIGSVVAASLVPRNKRASAMALMFAGLTLSNILGVPAGTALGEAFGWRSTFIAVVGIGLISVAAIAWLVPSDVAEPSGGGLRGELRVLGRLQVWLAMLIASLASASLFAVFTYIKPYLTDVSGLSTSAVTWVLLLFGAGMTIGNIIGGRLADWKLMPTVIGTLLLMAVLFIGFMQFGAIASVAIGIVFLWGLLIFVVVPPLQIRVVEAASEGPNLAATLNQGAFNVGNASGAWIGGVALSAGVSYAHLPLVGAVLALLAVTVAVLSQALDRRAPVPLQAAAE

SEQ ID NO: 711 - DNA, 1215 bp, Mesorhizobium loti MAFF303099
  CDS (1)..(1215): transl_table=11
atggccgaacccgcaacgggcgtgatcgacgccagacttctgaaccccgcagacaccgatgaacgaaccgagccggcctggggcgccgtggtttcgctggcacttggcgttttcggtctcgtgaccgccgaattcctgcccgccagcctgctgacaccgatggcgcgcgatctcggcgtcaccgagggcgtggcaggacaagcggtgacggcaaccgccatcgtcggcgccattgccgcgcccaccatggcgatcatcacaaggcgcatggaccgcaggctggtgatgtggatgctgacctcgttcctcatcctgtccaaccttctcgccacctttgctgcgtcgctgcccatgcttctgttggcccgcgtcgtgctcggcgtggcgctcggcggcttctgggcaatgtcggcggccatggcgctgcggctggtgccgatgcggctgatgccgcgcgccatgtcgatcatcctgaccggcgtttcgctggccacggtcaccgccgcccctctcggcgcctatgtcggtgacatctggggctggcgcacggcgttcatgattgcgaccatcgtcggtgccctggcgctgctggtgcaattggccaccattccgaagctgccgccgatgggtgtcgcgagcttcctcaccttgcttgatgttttgaagcggccgtcgatccgggtggctctgctggtcgtgctgctggtcgcgtcggggcattttgccggcttcacctatgtgcgccccttcctcgaaaaggtgccggtgctccacatcgagacaatctcattggtgcttctggcctatggcattggcggtttcttcggcaatatcgccggcggcttcctggccgaacgcaacctcaagatagccgtggcgctggcgcccctgctgatcgccctggcggccgcctcgatgctgatcttcggtccctcgccgacgattgccgcggccgccgtcaccgcctggggctttgccttcggcgcggtgccggtcgggctgcagagctggctggtgcgggcggcacccgaccaggctgaaagcgccggcggcttgatggtggcgaccttccaggtggcgattgcgctgggcgccgtcttcggcggtctgctggtcgatcatgccggcgtggccagcgccttcgcctattgcggcatcgcaacgctgctggcggccatcgtggtgttcctgcgcggcccgaagcaagccgaataa

SEQ ID NO: 712 - protein, 404 aa, Mesorhizobium loti MAFF303099
MAEPATGVIDARLLNPADTDERTEPAWGAVVSLALGVFGLVTAEFLPASLLTPMARDLGVTEGVAGQAVTATAIVGAIAAPTMAIITRRMDRRLVMWMLTSFLILSNLLATFAASLPMLLLARVVLGVALGGFWAMSAAMALRLVPMRLMPRAMSIILTGVSLATVTAAPLGAYVGDIWGWRTAFMIATIVGALALLVQLATIPKLPPMGVASFLTLLDVLKRPSIRVALLVVLLVASGHFAGFTYVRPFLEKVPVLHIETISLVLLAYGIGGFFGNIAGGFLAERNLKIAVALAPLLIALAAASMLIFGPSPTIAAAAVTAWGFAFGAVPVGLQSWLVRAAPDQAESAGGLMVATFQVAIALGAVFGGLLVDHAGVASAFAYCGIATLLAAIVVFLRGPKQAE

SEQ ID NO: 713 - DNA, 1194 bp, Mesorhizobium loti MAFF303099
  CDS (1)..(1194): transl_table=11
atgcctattgctctctacgccctcgccgccggtgcctttggcattggcgtcaccgaattcgtcatcatgggtctgctgatcgatgtcagcaaggacctcggcgtctcgatctcggccgccggccagctcatttcgggctatgcgctgggcgtcgtcatcggcgcgccgctgctcaccatcgccaccggcaactggccgcgcaagaccgtgctgctggcgctgatggcgatcttcacgctgggcaatctcgcctgtgcgctggcgcccgactattgggccctgatgggcgcccggatcatcaccgcctttgcccatggcacgttcttcggcgtcggctctgtcgtcgccaccggcctggtcgcgcccaacaagaaggcgtcggcgatcgcgctgatgttcaccgggctcaccatcgccaacatcctcggcgtgcccttcggcacctggctcggccaggccttcggctggcgcgcgaccttctgggcggtgaccgcggtcggcctcgcggccttcgccgtcatcctggccctggtgccgcgcagccaggtcgcgcccgagaagagcgacctgcgcgccgatctcgccgtgctgcgccgcacgccggtcctgctcggccttgctaccaccgtgcttggctatgccggtgtcttcgccgtcttcacctacatcgctccgctgttgaccgagatcagcggcttcaaggaagccgccgtgtcgccgatcctgctcgtcttcggcggcggcctcatcgccggcaatctcgccggcggcaaggtcgccgaccgttggctggtgccggcggtgctgggcagcctcgtggtgctggccctggtgctggcgaccatgagcttcgccatccacagccaggtactggccgtgatctatgtcgggctgctcggcgccgccgccttcgccaccgtggcgccgttgcagatgtgggtgctggacaaggcgcaaggcgccggccagagcctcgcctcgtccttcaacatcgccgccttcaatctcggcaatgccgctggcgcctggctcggcggcgcggtcatcgcccatggccttgggctgggttccctcacctgggtcgccgccttgctgccggtcgcggcactcgccgtggccgggctggccctgcgcctcgacagacatgaagagcggctgatcccggctgctgccggcaccgcctgcatgaagtga

SEQ ID NO: 714 - protein, 397 aa, Mesorhizobium loti MAFF303099
MPIALYALAAGAFGIGVTEFVIMGLLIDVSKDLGVSISAAGQLISGYALGVVIGAPLLTIATGNWPRKTVLLALMAIFTLGNLACALAPDYWALMGARIITAFAHGTFFGVGSVVATGLVAPNKKASAIALMFTGLTIANILGVPFGTWLGQAFGWRATFWAVTAVGLAAFAVILALVPRSQVAPEKSDLRADLAVLRRTPVLLGLATTVLGYAGVFAVFTYIAPLLTEISGFKEAAVSPILLVFGGGLIAGNLAGGKVADRWLVPAVLGSLVVLALVLATMSFAIHSQVLAVIYVGLLGAAAFATVAPLQMWVLDKAQGAGQSLASSFNIAAFNLGNAAGAWLGGAVIAHGLGLGSLTWVAALLPVAALAVAGLALRLDRHEERLIPAAAGTACMK

SEQ ID NO: 715 - DNA, 1428 bp, Mesorhizobium loti MAFF303099
  CDS (1)..(1428): transl_table=11
atgacgcgctttccgacgacgacatcgtcgtccggcccaaggaaagggccatcgatttgcgcgccgcaccgtcacaaaatatcgcgaagcgatgaacatcccctcgtccgtgcaatgccgcagggaatggcgcttctggcgttaatccgggtcaacgcagcaacccgagtttgcagcacatccaaactggagaccctgttgatgaccgaatccgctacgggcttcatggacggagttctgcatgacccaaaacagccagatcaacggtctggtcccgcatggggtgcagtcatttcgcttgccttaggcacctttgggcttgtgacggcagagtttctgcctgccagcgtgctgacgccgctcgcgcatgatctctctatcaccgagggtgcagtcggacaggcgctgacaacgaccgccatcgtgggggcgatctcggcgccgacgatggccgtcatcacaaggcccctggaccgcaggatcgtcatatgggcgatgacgctgctgctgatcctgtcgaacgttctatcggccgtcgcggggtcgctgccggttctcctggccgcccgcgtcgtgctcggcatagcactcggagggttctggtcgatttcggcagcgctggcgatgcggctcgttccaagtcacctcctgcggcgcgccatgtcgatcatcctcaccggcgttacctgcgctaccgtttgcgcggctccaatcggcgcctatgtcggcgatatctggggatggcgaaccgccttcatgatcgctgcggtcgtcggcgccgtgacgctggtagtgcaactcataaccattccgaggctgcctccgattggagtggccagcttccgcagtctgctggatgtggccaagaatccgatgatcaaagtcgcgatgttggtcgtcctgctggtcgcttccgggcacttcgccggcttcacctatatccgcgccttccttgagaagtttcccgcgcttgatatcgagacgatctcgctggtgttgctcgtctttggcatcggcggcttcttcggcaatttggccggcggattcctggccgagcacagcctcaaggcagccgcggccctgcctcccctgttcatagcgatggccactgtctcgctgctgacgctgggagcatcggcttgggccacggcgattgcggttacagtatggggctttgccttcggcgcggtgccggtgggactgcagacatggatggtgctgcacgccgctcccgagcaggccgaaagcgccggtgggctgatggccgcaacgttccaggtagccatcgcagcgggcgcgattttcggcggactactgatggacaatgccggcgtcgccagttcccttgcctacagcgccgttgcctcgttcctcggcgccctgacagtgttcttgctcggcccgaagcgcgaacctcagaccacctga

SEQ ID NO: 716 - protein, 475 aa, Mesorhizobium loti MAFF303099
MTRFPTTTSSSGPRKGPSICAPHRHKISRSDEHPLVRAMPQGMALLALIRVNAATRVCSTSKLETLLMTESATGFMDGVLHDPKQPDQRSGPAWGAVISLALGTFGLVTAEFLPASVLTPLAHDLSITEGAVGQALTTTAIVGAISAPTMAVITRPLDRRIVIWAMTLLLILSNVLSAVAGSLPVLLAARVVLGIALGGFWSISAALAMRLVPSHLLRRAMSIILTGVTCATVCAAPIGAYVGDIWGWRTAFMIAAVVGAVTLVVQLITIPRLPPIGVASFRSLLDVAKNPMIKVAMLVVLLVASGHFAGFTYIRAFLEKFPALDIETISLVLLVFGIGGFFGNLAGGFLAEHSLKAAAALPPLFIAMATVSLLTLGASAWATAIAVTVWGFAFGAVPVGLQTWMVLHAAPEQAESAGGLMAATFQVAIAAGAIFGGLLMDNAGVASSLAYSAVASFLGALTVFLLGPKREPQTT

SEQ ID NO: 717 - DNA, 1242 bp, Mycobacterium tuberculosis H37Rv
  CDS (1)..(1242): transl_table=11
atgactgccccaaccggaacctccgccactacgacgcgaccgtggacgccacggatcgccacgcaactgtccgtgctggcttgcgcggcctttatctatgtcaccgccgaaatcctgccagtgggcgcgctgtcggcgatagcgcggaacttgcgcgtcagcgtggtcctagttgggaccttgctgtcctggtatgcccttgtcgcggccgtgacaacggttccgctggtgcgttggaccgcacactggccgcgccgccgggccctggtggtcagcctggtctgcctgaccgtctcgcaactcgtctcggcgctggcgcccaacttcgcggtgctggccgccgggcgggtgctctgcgcggtcacccatggcctgctgtgggcggtcatcgcgccgatcgccacccggctggtgccgcccagtcacgccgggcgcgccacgacgtcgatctacatcggaaccagtctggcgctggtcgtcggtagcccactcacggctgccatgagcctgatgtggggttggcggctggcggcggtgtgcgtgaccggcgcggcggccgcggtcgccctggccgcccggctggcgttgccggagatggtgctgcgcgccgaccagctcgagcacgttggccgacgggctcgtcaccaccgtaatcctcgcctggtcaaggtcagtgtgctcacgatgatcgcggtaaccggccatttcgtgtcctacacctacatcgtggtgatcatccgcgacgtcgtcggtgtacgtgggccgaatctggcctggctgctcgccgcctatggggtcgccggcctggtgtccgtgcccctggtggcgcggccgttggaccgttggcccaagggcgccgtcatcgtcggtatgaccggactgacggcggcgttcaccttgctgaccgcgctggcattcggtgaacgccacaccgcggcgacggcactgctgggcaccggtgcgattgtgctgtggggagccttggccactgccgtgtcaccgatgctgcaatcggcggcgatgcgtagcggcggcgacgaccccgacggggcctcaggtttgtatgtgacggcgtttcagatcggcatcatggccggcgctctgctgggtgggctgctctacgagcgcagcttggcgatgatgctgaccgcgtcggcgggtttgatgggtgttgcgttgttcgggatgacggttagccagcacttgttcgagaatccgactctgagtcccggcgacggctaa

SEQ ID NO: 718 - protein, 413 aa, Mycobacterium tuberculosis H37Rv
MTAPTGTSATTTRPWTPRIATQLSVLACAAFIYVTAEILPVGALSAIARNLRVSVVLVGTLLSWYALVAAVTTVPLVRWTAHWPRRRALVVSLVCLTVSQLVSALAPNFAVLAAGRVLCAVTHGLLWAVIAPIATRLVPPSHAGRATTSIYIGTSLALVVGSPLTAAMSLMWGWRLAAVCVTGAAAAVALAARLALPEMVLRADQLEHVGRRARHHRNPRLVKVSVLTMIAVTGHFVSYTYIVVIIRDVVGVRGPNLAWLLAAYGVAGLVSVPLVARPLDRWPKGAVIVGMTGLTAAFTLLTALAFGERHTAATALLGTGAIVLWGALATAVSPMLQSAAMRSGGDDPDGASGLYVTAFQIGIMAGALLGGLLYERSLAMMLTASAGLMGVALFGMTVSQHLFENPTLSPGDG

SEQ ID NO: 719 - DNA, 1194 bp, Pseudomonas aeruginosa PAO1
  CDS (1)..(1194): transl_table=11
atgggcgagactgaacggagcagggcggaggtcggcgtctggctgctggccggactggccttcgtggtcggcacggtggaactggtggtggccggggtgctcgacgaactggccgccagtttcgccgtcagccagggccgggccgggttgctgatgagcctgtacgcgctggtctatgcgctgctcggcccgctgctggtctacctcagcgccggtatcgagcgccgccgcctgctggccggcgcgctgctggtgttcgtcggcgccaacctggccagcgccgccgcgccgagcttcgccctgttgctggcgagccggctgctggtggcggccagcgcctcggtcatcgtggtggtggcgatcaccctggcggtggccattgtcgcgccggaacggcgcggccgggcgatcggtctggtgttcgccggcatcgtcgcctcgctggtgctgggcgtaccgctgggcaccctgatcggcgagttctggggctggcgtagcctgttcctgctgctcgccggggtcgcgttgctcggcctgccgctgctcctgcgcctgctgccggccatccccggcgcgcccggcatcgccccggcggagcaactgcgggcgctggcccggggccgggtgccgttcgcccacctggcatcgctgttgcagatgaccggccagttcaccgtctacacctacatcgtgccgttcctggtcggcagcatggccctcgacaaaccgaccatcagcctggtcctgctggtctacgggggcggcggcatcctcggcgcgctgctcggcggacgcgccgccgaccgctggccggggccggccaccttcgtcgccttcctgctcctgcacgcactggccctggtcctgctgccgttcgccaccggcggcctgccgctgctgctgggcgcggtggtgttctggtgcgtgttcaacatggcgccggggccggcgatccagaaatacctggtggaactcagcccggacaccgcggcgatccagatcagcctcaacaccagcgcgatccagctcggcgtggccctgggcgccttcatcggcgcgatcctggtggaccaggtggcggtgcgcgcgctcccctggtggggcgccgcgctgatcctcggcgccgccgcctgcggctggctgtccgcgcagcggccggcgggcacggcggactgccgggagcgcctcgattga

SEQ ID NO: 720 - protein, 397 aa, Pseudomonas aeruginosa PAO1
MGETERSRAEVGVWLLAGLAFVVGTVELVVAGVLDELAASFAVSQGRAGLLMSLYALVYALLGPLLVYLSAGIERRRLLAGALLVFVGANLASAAAPSFALLLASRLLVAASASVIVVVAITLAVAIVAPERRGRAIGLVFAGIVASLVLGVPLGTLIGEFWGWRSLFLLLAGVALLGLPLLLRLLPAIPGAPGIAPAEQLRALARGRVPFAHLASLLQMTGQFTVYTYIVPFLVGSMALDKPTISLVLLVYGGGGILGALLGGRAADRWPGPATFVAFLLLHALALVLLPFATGGLPLLLGAVVFWCVFNMAPGPAIQKYLVELSPDTAAIQISLNTSAIQLGVALGAFIGAILVDQVAVRALPWWGAALILGAAACGWLSAQRPAGTADCRERLD

SEQ ID NO: 721 - DNA, 1254 bp, Pseudomonas aeruginosa PAO1
  CDS (1)..(1254): transl_table=11
atgggacgccgcgaagcatttccggagaacgccggggccgctgcgtcggccgtggcgccgcggctgccgctgagcgcgttgctggcgatggcgatgtccggcttcgtcgccattctcagcgaaaccctgccggccggcctgctgccgcaaatcggcgcggggctggcggtcagcgaggcgctggccgggcagttggtcagcgtctatgccctgggttcgctactggccgcgttgccggcggcgagcctgacccagggctggcggcggcgccgggtgctgctgctggcgctgctgatcttcttcgtctgcaacagcttcaccgccgtttcctcggattaccgcctgaccctgctggcgcgcttcggcagcggcgtcgccgccggcctcgcctggggcctgctggccggctacgcgcggcgcctggtgccgccggagcagcaggggcgggcgctggcggtggccatgctcggtgcgccgctggcgctgtcgctcggcgttccgctgggcacctggctgggcggcctgctcggctggcgctgggccttcggcctgttgtcgctgaccgcgctgctgctggtcggctgggtgctgcgcagcgtgccggacttccctggccagccggccgggcggcgcctgcgcctgctcggggtgctgcgcacgccgggcgtgcgtccggtattgctggtgatcgtcgcctgggtgctggcgcacaacatcctctacacctatatcgcgccgttcctcgccaaggtcggcctgggcgcctcggtggacctggccctgctggtattcggcagcgccgcggtggcgggaatctggctggtcggcgtgctggtcgaccggcacctgcggcggatggtcctggccagcctggcgctgttcgccgtggcggcgctggcgctgtgcctgggcgctcgctggagctggctggcgttcgccggcctggccctctgggggctgacgttcggtggcgcggcgacgctgctgcagaccgcctcggcggacgccgccggggagggcgccgacctggcccaatcgatgatcgtggtggcctggaacctggccatcgccggcggcggagcgttgggtggcatggtgttgcagcgctggggcagcgagatgctgccctggaccctgctaccgctgatcggcttggccgccgtgctggtctggggcaatgccgcgcacgctttccgcgtcggcccgcgcgacttccgcagggcatcgtccgagcaccggaaagcggcgcaatag

SEQ ID NO: 722 - protein, 417 aa, Pseudomonas aeruginosa PAO1
MGRREAFPENAGAAASAVAPRLPLSALLAMAMSGFVAILSETLPAGLLPQIGAGLAVSEALAGQLVSVYALGSLLAALPAASLTQGWRRRRVLLLALLIFFVCNSFTAVSSDYRLTLLARFGSGVAAGLAWGLLAGYARRLVPPEQQGRALAVAMLGAPLALSLGVPLGTWLGGLLGWRWAFGLLSLTALLLVGWVLRSVPDFPGQPAGRRLRLLGVLRTPGVRPVLLVIVAWVLAHNILYTYIAPFLAKVGLGASVDLALLVFGSAAVAGIWLVGVLVDRHLRRMVLASLALFAVAALALCLGARWSWLAFAGLALWGLTFGGAATLLQTASADAAGEGADLAQSMIVVAWNLAIAGGGALGGMVLQRWGSEMLPWTLLPLIGLAAVLVWGNAAHAFRVGPRDFRRASSEHRKAAQ

SEQ ID NO: 723 - DNA, 1179 bp, Pseudomonas aeruginosa PAO1
  CDS (1)..(1179): transl_table=11
gtgctattgccgatcctcctgctggccgccgccggcttcaccatcctgaccaccgagttcgtcatcgtcggcctgctcccggcacttgccgcagacctccaggtcagcgtcgcccaggccggcctgctggtcagcctgttcgccttcagcgtcgccgccttcggtccgttcctcaccgccgcgctggcgggcgtcgaacgcaagcggctgttcgtcgcctgcctgctgctgttcgccgcggccaatgcgctggccgccgtggccggcgatatctggacgatggccgtggcgcgcttcgtcccggccctggcgctcccggtgttctgggccatggccagcgaaaccgccgcgcacctggccggcccctcgcgcgaagggcgcgccgtggcgctggtgttcttcggcatcgtcgccgccaccgtgcttggcattcccatcggcacgctgatcgccgacgcctggggttggcgcctggcattcgccgcactcgccgcgctggccctggccaaggcgctgctgctggccgcctggctgccgcgcattcccggacggccgggcatctcgctgcgcagccaggcgagcgtgttgcgccaaccgctggtgctcggccacctgttgctgtcgctgctggtcttcaccggcatgttcaccccctacacctacctggccgacatcctccagcgcctggccggcttcagcggttcgctggtcggctggacgctgatgggcttcggcgcggtaggcctgctcggcaactggctcggcgggcgcctggtggatcgcagcccgctgggcgcaaccctgctgttcgtcctgctgatggcgctgggcatgctcgccctggtgccgaccctcggcaacgcctggctgctcgccgccaccctggcgacctggggcgtggcccaggcagcactgttcatcgtcggccaggtgcgggtgatgaagtccgcgccgcgggccccggcgttcgccgcctcgctgaacatctccgcctgcaacgccgggatcggcatcggcgccctcgccggcagccgggtgatcgacggcagcggcctggcgccgctcggcgaggtcggcgcgctggtctgcctggcggcgatggccgtggccctgctgctgatgctggcgccacgccaagctgccaccgagccgtccctcggcggccaaatccctcactga

SEQ ID NO: 724 - protein, 392 aa, Pseudomonas aeruginosa PAO1
MLLPILLLAAAGFTILTTEFVIVGLLPALAADLQVSVAQAGLLVSLFAFSVAAFGPFLTAALAGVERKRLFVACLLLFAAANALAAVAGDIWTMAVARFVPALALPVFWAMASETAAHLAGPSREGRAVALVFFGIVAATVLGIPIGTLIADAWGWRLAFAALAALALAKALLLAAWLPRIPGRPGISLRSQASVLRQPLVLGHLLLSLLVFTGMFTPYTYLADILQRLAGFSGSLVGWTLMGFGAVGLLGNWLGGRLVDRSPLGATLLFVLLMALGMLALVPTLGNAWLLAATLATWGVAQAALFIVGQVRVMKSAPRAPAFAASLNISACNAGIGIGALAGSRVIDGSGLAPLGEVGALVCLAAMAVALLLMLAPRQAATEPSLGGQIPH

SEQ ID NO: 725 - DNA, 1176 bp, Pseudomonas aeruginosa PAO1
  CDS (1)..(1176): transl_table=11
atggaccttcgcttgctgttgctatccctgaccaccttcgccgccggcctggcggaaagcatcctgatcggcatcctgccgcccctggccgaagacctgcgggtctccatcagcctggccggccagctcaccaccctgttctccctcggcttcgccctcgccgcaccgctgctcggctggctgacccggcgcatcgaacgccgccgcctgctgctggcgaccctgctgctgttcgccctcagcaacgcgctcgccgccctcgctccgggctatctcggcctgctcctggctcgcctgggaatgtcggcctgttgcgggctgctgatcgtcctcgccagcctgctcgccgccgagctggccgccccggcccagcgcggccgggcgatcggcctgatcttcatgggcatcagcggttcgctggtgttcggcgtgccactgggcgtacagatcagcgactggttcggctggcgctggatcttcgccggcatcgcggtctattcgctgcccttgtgcctgctgctctggcgctacctgccgcaacgccaggccggcgacctgcccggccgcgaaggctacctgcggcagttgcgccagcccgcgctgtggctcgcgcaactggtatcgatcctgttgctcggcgggcacttcaccctgttcgcctatttcaccccgtacctggcgagcatggccggtattcgctcgcccagcgagatcagcctgatcctcctgctgatcggcctggcagcgctgagcggcggctatatcggcggctggctggccgaccacctcggccaccggcgcgccctgcgtctggtgccggcggccttcgccctggcgctggcggcggtgccgctgagcctgggcagcatcgggttcctgccggtactgatggtctggagcgcgatcagctggatgatctcgccggtggtgcagagcttcctgctgcgcagcgatccggccagcggttccgccggcgtcgccctgaacacctcggccatgcacctgggcgtgggcctcggcgcggcgctgggcggcctggtggtggcggcactgggagtcgccgcgacgccctgggtcggcctcgccctggtgctggcggcgctggcctgcgcgcttggcgccagcacgctggatggcgccacgcaagcgctgccgttcagtccccctgcacggtga

SEQ ID NO: 726 - protein, 391 aa, Pseudomonas aeruginosa PAO1
MDLRLLLLSLTTFAAGLAESILIGILPPLAEDLRVSISLAGQLTTLFSLGFALAAPLLGWLTRRIERRRLLLATLLLFALSNALAALAPGYLGLLLARLGMSACCGLLIVLASLLAAELAAPAQRGRAIGLIFMGISGSLVFGVPLGVQISDWFGWRWIFAGIAVYSLPLCLLLWRYLPQRQAGDLPGREGYLRQLRQPALWLAQLVSILLLGGHFTLFAYFTPYLASMAGIRSPSEISLILLLIGLAALSGGYIGGWLADHLGHRRALRLVPAAFALALAAVPLSLGSIGFLPVLMVWSAISWMISPVVQSFLLRSDPASGSAGVALNTSAMHLGVGLGAALGGLVVAALGVAATPWVGLALVLAALACALGASTLDGATQALPFSPPAR

SEQ ID NO: 727 - DNA, 1167 bp, Pseudomonas aeruginosa PAO1
  CDS (1)..(1167): transl_table=11
atgcctttgattgtctatgtgctcggtgccgcgatcttcgccctgaccaccagcgaatacatggtcgccgggctgatgccggcgctggccgccgaattcggcgtgtccttcgccgcgatcggctacctggtcaccttctacgccggtgcgatggccgtcggcggcccgctgttgaccaccgccctgctccgggtgccgcgcaagaacgccctgctcggcctgatcgcgctgttcgtggtcggccaggtcatcggcgccctggcgccgggctatgcggtgatggtcgcggcgcgactggtcaccgcggtcgccgccgcggccttcttcggcgtggcgctgaccgcctgcgccgaactggtcgaaggcaaccagttcggccgcgcgtcgtcgctggtgctcggtggcctgatggtcggcaccgtgctcggcctgcccgtcgccacctggctgggcgaatggtacggctggcgcgcgagcttcttcgcggtggcgctggtggcggtgctggtcggcctgctggtgttgcagctgatgccggcgatcccggggtcggcgggcagcggctcgctgcgcgaggaactgaaggtgttcaggaacgcccatctatggtgggtctacgccaccagcctgctgctgatcggcgccaccttcgccggcttcacctatttcgtgccgatcctcaccgaggtcagcggcttctccgcctcgaccgtaccgctgctgctggtggtctacggcctggcgacgctggtgggcaacaacatcgtcggccgcctggccgaccgccataccatcgcggtcctggccttcggcctgctggcggccatcgccgcgatggtggccttcgccctgttcggacaggttccggcggtggcggtggcggcgctggtggtgatcggcctgaccggggtgtcgatgaacccggcgctggtgacccgcggcgcacgggtcggccataacaacatgctggtcaactcggtgcacactgcctgcatcatgctcggcgtaatggccggttcctggatcggcggcctgggcatcgccggcggattcggcctgcagggcgcgctctgggtcggcgcggccctcggagtactggcgctgctgaccctgctgccggagctgcgcttcgcccgcgccccggtaggcggggcgctgggccgctga

SEQ ID NO: 728 - protein, 388 aa, Pseudomonas aeruginosa PAO1
MPLIVYVLGAAIFALTTSEYMVAGLMPALAAEFGVSFAAIGYLVTFYAGAMAVGGPLLTTALLRVPRKNALLGLIALFVVGQVIGALAPGYAVMVAARLVTAVAAAAFFGVALTACAELVEGNQFGRASSLVLGGLMVGTVLGLPVATWLGEWYGWRASFFAVALVAVLVGLLVLQLMPAIPGSAGSGSLREELKVFRNAHLWWVYATSLLLIGATFAGFTYFVPILTEVSGFSASTVPLLLVVYGLATLVGNNIVGRLADRHTIAVLAFGLLAAIAAMVAFALFGQVPAVAVAALVVIGLTGVSMNPALVTRGARVGHNNMLVNSVHTACIMLGVMAGSWIGGLGIAGGFGLQGALWVGAALGVLALLTLLPELRFARAPVGGALGR

SEQ ID NO: 729 - DNA, 1167 bp, Pseudomonas aeruginosa PAO1
  CDS (1)..(1167): transl_table=11
atgccggcgtctcttctcgtcctcgctttatccgcctttgccatcggtaccaccgaattcgtcatcatgggcctgctgccgcaggtcgccggcgacctgcgggtatccattcccagcgccggctggctgatcagcggctacgccttcgccgtggccttcggcgccccgctgatggccatggccaccgcccgcctggagcgcaagaaagccctgctcgcgctgatgggcatcttcatcgtcggcaacctgctctgcgcggtggccgccaactacggcctgctgatgctggcgcggatcgtcaccgcgctctgccatggcgccttcttcggcatcggctcggtggtcgccgccagcctggtggcgccgaaccgccgcgcttccgccgtggccctgatgttcaccggcctgaccctggccaacgtgctcggcgtgccgctgggtaccgcgctcggccaggaagccggctggcgcgcgaccttctgggtggtgaccctgatcggcgtggtcgccttcgtcggcctggccagggtgctgccaaacgaccgcgaggaagagaaggtcgacctgcgccaggaaatgtccgcgctgaagaacccgtcgctgtggctggccctgggcaccaccgtgctgttcgccgcctcgatgttcgccctgttcacctacgtcgcgccgctgctcggcgaagtcaccggggtcagcccgcgcggcgtgacctggaccctgctgctgatcggcgtcggcctgaccgtcggcaacgtgatcggcggccgcctcgccgactggcgcctgggcaccaccatggccgcggtgttcgccgccatggcgctggtctcggcgctgttcagctggaccagccaggccctgctgccggcggaaatcaccctgttcttctgggccgccgccgccttcgccgcggtgcccgcgctgcaggtcaacgtggtccgcgtcgggcatgccgcgccgaacctggtggcgaccctgaacatcggcgccttcaacgtcggcaacgcgctcggcgcctgggtcggcggcagcgtcatcgaccacggcctgggcctgacccgcgtgccgctggccgccgccgcgctggccgcgctggcgctactggccaccctgatcgccttttccggaaacggccgcgcccaggcgcagccggtcctcgattga

SEQ ID NO: 730 - protein, 388 aa, Pseudomonas aeruginosa PAO1
MPASLLVLALSAFAIGTTEFVIMGLLPQVAGDLRVSIPSAGWLISGYAFAVAFGAPLMAMATARLERKKALLALMGIFIVGNLLCAVAANYGLLMLARIVTALCHGAFFGIGSVVAASLVAPNRRASAVALMFTGLTLANVLGVPLGTALGQEAGWRATFWVVTLIGVVAFVGLARVLPNDREEEKVDLRQEMSALKNPSLWLALGTTVLFAASMFALFTYVAPLLGEVTGVSPRGVTWTLLLIGVGLTVGNVIGGRLADWRLGTTMAAVFAAMALVSALFSWTSQALLPAEITLFFWAAAAFAAVPALQVNVVRVGHAAPNLVATLNIGAFNVGNALGAWVGGSVIDHGLGLTRVPLAAAALAALALLATLIAFSGNGRAQAQPVLD

SEQ ID NO: 731 - DNA, 1182 bp, Lactococcus lactis subsp. lactis Il1403
  CDS (1)..(1182): transl_table=11
atgaaaaaaatatctcccagtctcactcttctagctctagcaattaatgcttttgctatcggctcaaccgaatttatcagtgttggtttaatgccaatgattgtcaacacctttaatattagtttatctcaagcgggtttaaccgtttctctttatgctttaggggtaacggttggtgctcccttattaactattcttacaggaacttggaatcgaaaaactttgatggtttcgattatgggtctctttattcttggtaatttactgtcagctttcgctccaactttccttttacttttagtaggacgggttcttgcctcacttgctcatggtattttcatgtcaatttccacagtcattgccgctgatgttgttcgacctgagaaaagggcctcagcaatcgccctcatgtttacaggattaaccgttgctactgtcattggtgttcctttagggactttcattggtcagcactctaactggcatatgtcatttgttttcattgttgttattggcttaattggactgattgctactagtattcttgttccaaaagggcttccaattcccggaaaaattaatttaagtgggcttgctagaatttttactaataaatcaattttaatgtctctttttatcaccgcttttggttatggaggaactttcgcggcttatacttatcttacaccaatccttgaaggaacttttagattttcagcaagtacagtagtgattattctggttgcttatggtgtgatggttgccattggtaattcactaggtggacatctagcaaataaaaatatcctacctgcccttcaaaaaatgtttgcggctttagctttgagtttactttttctttttatcagtgcaagtttagcttcgcaagctttgggattgattgcaactttacttttgggcttgtttgcctttatgaatgtccctggtttacaactatacgttgttcaattggcagagaaatttacgccaaaagatattactttagtttcagcttttaacattgcagctttcaatgtcggaattactttaggctcatttgttggaggacaaatttctaaaggctcaagtgttgtctttactccacttgggggaatcattatcattctccttgcaatgttcctcattcgtttggctcaaaaagaccaagcaagtaaattataa

SEQ ID NO: 732 - protein, 393 aa, Lactococcus lactis subsp. lactis Il1403
MKKISPSLTLLALAINAFAIGSTEFISVGLMPMIVNTFNISLSQAGLTVSLYALGVTVGAPLLTILTGTWNRKTLMVSIMGLFILGNLLSAFAPTFLLLLVGRVLASLAHGIFMSISTVIAADVVRPEKRASAIALMFTGLTVATVIGVPLGTFIGQHSNWHMSFVFIVVIGLIGLIATSILVPKGLPIPGKINLSGLARIFTNKSILMSLFITAFGYGGTFAAYTYLTPILEGTFRFSASTVVIILVAYGVMVAIGNSLGGHLANKNILPALQKMFAALALSLLFLFISASLASQALGLIATLLLGLFAFMNVPGLQLYVVQLAEKFTPKDITLVSAFNIAAFNVGITLGSFVGGQISKGSSVVFTPLGGIIIILLAMFLIRLAQKDQASKL

SEQ ID NO: 733 - DNA, 1200 bp, Campylobacter jejuni subsp. jejuni NCTC 11168
  CDS (1)..(1200): transl_table=11
atgcaaaattacaaaaaagctctttttgcactagctcttagtgctttttgtatgggcgtaactgaatttgttatggcaggagttttggttgatgttgaagcgtattttagcgtagatgcaaaaaccgcgggctatcttacaaccttatatgctataggtgttgttataggtgctcctcttatcaccatacctttaagtcgttttcatagacatacacaacttttaatcaatcttggaatttttgctttagcaaatttcatcatcttttttagccaaaatttctatcttactgcttttgcacgctttatagcaggaacacaacatggggtattttttgtcattgccaccttagctgtaagtgctataactccagatgataaaaaatcaagtgctctagctataatggtcacagggcttactgtagccttagttactggagtgccgcttggaacttttatagggcattattttggctttaaatttatctttttactcatttttatcattacaagtctagcattttttggagtatggcatatgatgcccaaaaatttacatcctagcccaaccaatcttaaaaatctaatccctgctttttctcatcaaaatttgttaaaaacttatactataaccatttgtagttgtggggctcaatttgttctttatacttatttgcaaaaaatacttgtagaaataagcggttttaaagtccaagatacagcttatatcttgcttttatatggaatttgtgcaatttgtgggaatttatggggcggaaaaatagtagataaaaaaggtgctattttttctttgcgtcttattttaagcatacaagttctagtatttttaagtgtatttctcaccatgcattctaaaattttaatcatttttagcgtagctttgataggattttttgccttttcaaccatacctgcactaaaaatgcttagcattactaaagctaaacgccatacttataaagtcatagacagtacagtaagtgtgaatgaagcagcttttaatgtaggcatagctttagcaagttttttaggtgggattgttttagcaagattgggtatagaatttaatgctttattttcagcactttttgtaagccctgctttgatttttgccttgctttttgccaaagataaattaaattataaaaaatttcaaagaaaaagttttacaaaggtataa

SEQ ID NO: 734 - protein, 399 aa, Campylobacter jejuni subsp. jejuni NCTC 11168
MQNYKKALFALALSAFCMGVTEFVMAGVLVDVEAYFSVDAKTAGYLTTLYAIGVVIGAPLITIPLSRFHRHTQLLINLGIFALANFIIFFSQNFYLTAFARFIAGTQHGVFFVIATLAVSAITPDDKKSSALAIMVTGLTVALVTGVPLGTFIGHYFGFKFIFLLIFIITSLAFFGVWHMMPKNLHPSPTNLKNLIPAFSHQNLLKTYTITICSCGAQFVLYTYLQKILVEISGFKVQDTAYILLLYGICAICGNLWGGKIVDKKGAIFSLRLILSIQVLVFLSVFLTMHSKILIIFSVALIGFFAFSTIPALKMLSITKAKRHTYKVIDSTVSVNEAAFNVGIALASFLGGIVLARLGIEFNALFSALFVSPALIFALLFAKDKLNYKKFQRKSFTKV

SEQ ID NO: 735 - DNA, 1185 bp, Escherichia coli O157:H7 EDL933
  CDS (1)..(1185): transl_table=11
atgaaaaaagtcattttatctttggctctgggcacgtttggtttggggatggccgaatttggcattatgggcgtgctcacggagctggcgcataacgtaggaatttcgattcctgctgccgggcatatgatctcgtattatgcgctgggggtggtggtcggtgcgccaataatcgcactcttttccagccgctactcactcaaacatatcttgttgtttctggtggcgttgtgcgtcattggcaacgccatgttcacgctctcttcgtcgtacctgatgcttgccattggtcgcctggtttccggctttccgcatggcgcattttttggcgtcggagcgatcgtgttatcaaaaattatcaaacccggaaaagtcaccgccgccgtggcggggatggtttccgggatgacagtcgccaatttgctgggcattccgctgggaacgtatttaagtcaggaatttagctggcgttacacctttttattgatcgctgtttttaatattgcggtgatggcatcggtctatttttgggtgccggatattcgcgacgaggcgaaaggaaagctgcgcgaacaatttcactttttgcgcagcccggccccgtggttaattttcgccgccaccatgtttggcaacgcaggtgtgtttgcctggttcagctacgtaaagccatacatgatgtttatttccggtttttcggaaacggcgatgacctttattatgatgttagttgggctagggatggtgctgggaaatatgctaagtggcaggatttcaggacgttattcaccactgcgcattgcagcagtgactgactttataattgtactggcactgctgatgctctttttctgcggcggcatgaaaacaacgtcgcttatttttgcttttatttgttgcgcgggattatttgccctttcagcacctctgcaaatattgttactgcaaaatgccaaaggcggagagttattaggtgccgcaggtgggcaaatagcgtttaacctcggtagcgccgtcggcgcatattgcggaggtatgatgctgacgctggggctggcatataattacgtggcgctgcctgccgccctgctttcgtttgctgcgatgtcatcgttgctgctgtatggtcgctataagcgccagcaagcggcggatagtccggtgctggcgaaaccactggggtag

SEQ ID NO: 736 - protein, 394 aa, Escherichia coli O157:H7 EDL933
MKKVILSLALGTFGLGMAEFGIMGVLTELAHNVGISIPAAGHMISYYALGVVVGAPIIALFSSRYSLKHILLFLVALCVIGNAMFTLSSSYLMLAIGRLVSGFPHGAFFGVGAIVLSKIIKPGKVTAAVAGMVSGMTVANLLGIPLGTYLSQEFSWRYTFLLIAVFNIAVMASVYFWVPDIRDEAKGKLREQFHFLRSPAPWLIFAATMFGNAGVFAWFSYVKPYMMFISGFSETAMTFIMMLVGLGMVLGNMLSGRISGRYSPLRIAAVTDFIIVLALLMLFFCGGMKTTSLIFAFICCAGLFALSAPLQILLLQNAKGGELLGAAGGQIAFNLGSAVGAYCGGMMLTLGLAYNYVALPAALLSFAAMSSLLLYGRYKRQQAADSPVLAKPLG

SEQ ID NO: 737 - DNA, 1344 bp, Xylella fastidiosa 9a5c
  CDS (1)..(1344): transl_table=11
ttgaacccatgcgcacggcctgccggctgcggctgccgcagccggagcaggcgtgcgctttttactttgaccccccggttgagccctcgggcctggatctgccgccagatcgctcgccggggccacggccaggcggtatccacgttgacccatcgcacccccataccggcctcatctgctgaggccgacacgctgccgaccgcagccttgctcatgctggcaatgaccggcttcatcgccatcgtcaccgaaacgttgccggccgggctgctcccgcagatcgcccaagaccttgccataccggcgacggcagccggacagatggtgaccgtctatgcggcgggatcgctgctcgccgccattccgctggtcagcctgacgcaaacccggcgacgcaagccggtgctgatgctggcgctcgcgggttttctcttcttcaatctcgtgaccgcgttctcgccgtggttcgccctgaccttggttgcgcggttcctggccggcgtctcggcagggctgtcctggggactgctcggcggctacgcgcgacgcatggtggtggaccgcctcaagggccgcgcgctcgcggtggccatggtcggcacacccctggcgctgtcgatcggcgtcccgctgggcacgttcacgggcggcatcatcggctggcgcggcgcctttgtctccctgagcgtggtggccgcgctgctgctcgtcgcgatggcctggcggatgcccgacgtgccgggccagccacccgagcggcgcatttccattggaagcgtgctcggctccgcaggcgtgcgctcgatcctgttcacggccctggcctgggtcacggcgcagtacatgctctacacctacatcgccgttttcgccggcacgctgggccgaagcgcagacgtggacctgctgctgctcgcgttcggcgtggccgccatcgtcggcatctggctcgccggcgtcatggtcgatcgccacctgcgcctgcacgtgatcggcagcctggtgctgttcgtcgcggtgaccttggtcttcaccagcccggcgtcggccgcgctgttcgccgtgcccgcaatgatgttgtggggcgcgagcttcggcggcgctgcgacctcgatccagacggccgcatccgatgcggctggtgagggcgtggacatcgtgggggcgatgctcaccacggtatggaacgcaggcatcgcggctgggggcgcactgggcgcgctggttcttgcgcgcggcggtgcgagcgtcctgccggcttccatgctgccgctgatcctcgtcgccctggcgacggcgctggcctgccgcagacacggcttcaaggccggagcgcgcgcctga

SEQ ID NO: 738 - protein, 447 aa, Xylella fastidiosa 9a5c
MNPCARPAGCGCRSRSRRALFTLTPRLSPRAWICRQIARRGHGQAVSTLTHRTPIPASSAEADTLPTAALLMLAMTGFIAIVTETLPAGLLPQIAQDLAIPATAAGQMVTVYAAGSLLAAIPLVSLTQTRRRKPVLMLALAGFLFFNLVTAFSPWFALTLVARFLAGVSAGLSWGLLGGYARRMVVDRLKGRALAVAMVGTPLALSIGVPLGTFTGGIIGWRGAFVSLSVVAALLLVAMAWRMPDVPGQPPERRISIGSVLGSAGVRSILFTALAWVTAQYMLYTYIAVFAGTLGRSADVDLLLLAFGVAAIVGIWLAGVMVDRHLRLHVIGSLVLFVAVTLVFTSPASAALFAVPAMMLWGASFGGAATSIQTAASDAAGEGVDIVGAMLTTVWNAGIAAGGALGALVLARGGASVLPASMLPLILVALATALACRRHGFKAGARA

SEQ ID NO: 739 - DNA, 1230 bp, Xylella fastidiosa 9a5c
  CDS (1)..(1230): transl_table=11
atgaccgccaacgtaacaacagtcccccaggacgactccgaaaccccgaatgaagccccagcgcaagtggcgtcctggagcggcgtgttcgccatgtcggtctgcgcgttcgcgctgatcgcctcggagttcctgcccgtcagcctgctgacgcccatggcccgcgacctgcaggtcaccgaaggcatgaccggccagggcatcgccatctccggcgcgttcgccgtgctcaccagcctattcatctcggcgctggccggtagcctcaaccgcaagacgctgctgctgggcctgacgctggcgatgggcgtctcgggtgccatcgtcgcgctggcaccgaactacgccatctacatgctgggccgcgccctgatcggcgtggtcgtcggcggcttctggtccatgtcggccgccacggcgatccgcatggtgcccaagcgcgacgtgccgcgagcgctcgccatcgtcaacggcggcaatgcgctcgccacggtggtggccgcgccgatgggcgcgtacctgagcaccgtgatcggctggcgcggcgccttcctgtgcctggtgccggtatcgctgatcgcgctggcctggcagtggaagacgctgccgtccatgcccgccgccgcgcgtgcgccgggcatcggccaggtgttcaaggtgttcaccctgttcaagcacccgggcgtggtcgtcggcatgctcgccagcagcctgctgttcatggggcagttcggcctgttcacctatgtgcgcccgttcctcgaaaccgtcacgaacgtgcatggcgcgacgatttcgctgttcctgctcgtgctgggcgcggccggcttcatcggcacggtgctcatcggccgtgtgctgcaacgtagcttctaccagacgatgatcgtcatccccgtactgatggccttgacggccctggccctgatcgccttcggcagctccgtcgccatcgtcctcgtgctgctcgcgctgtggggcctgaccggcacgtcggcgccggtgggctggtgggcctggatcgccaaggtgttccccaaggatgccgaagccggcggcggcctgttcgtcgccgtggtccagatgtccatcgcgctgggctccaccgtgggcggcattctgttcgaccacagcggctaccgcaccaccttcgtggcgagcgccgtgctgctggcgatctgcgccgtgctgaccgtcgtgaccgcgcgccagtccgcgtcgcacggctga

SEQ ID NO: 740 - protein, 409 aa, Xylella fastidiosa 9a5c
MTANVTTVPQDDSETPNEAPAQVASWSGVFAMSVCAFALIASEFLPVSLLTPMARDLQVTEGMTGQGIAISGAFAVLTSLFISALAGSLNRKTLLLGLTLAMGVSGAIVALAPNYAIYMLGRALIGVVVGGFWSMSAATAIRMVPKRDVPRALAIVNGGNALATVVAAPMGAYLSTVIGWRGAFLCLVPVSLIALAWQWKTLPSMPAAARAPGIGQVFKVFTLFKHPGVVVGMLASSLLFMGQFGLFTYVRPFLETVTNVHGATISLFLLVLGAAGFIGTVLIGRVLQRSFYQTMIVIPVLMALTALALIAFGSSVAIVLVLLALWGLTGTSAPVGWWAWIAKVFPKDAEAGGGLFVAVVQMSIALGSTVGGILFDHSGYRTTFVASAVLLAICAVLTVVTARQSASHG

SEQ ID NO: 741 - DNA, 1194 bp, Escherichia coli O157:H7
  CDS (1)..(1194): transl_table=11
atgtcgacactaagccaaacaccatcacctcatcatcagcacgcatactggggcggtatttttgccatgaccctgtgcgtgtttgtgctgattgcttctgaatttatgcccgtcagcctgctcacgccgattgcccgtgacctgggcgtgacggaggggctggcagggcgggggattgctatctccggtgcgctggcggttctgaccagcctgacgctttcaacgctagctggaaagatgaatcgtaagttcctgctgctggggatgacggttctgatggccgtatcggggcttattattgcgctggctaccagttatctgatgtatatggtcggtcgtgcgatgattggtgtggccattggcggattctggtcgatgtcagcggcaacggcgattcgtctggtgccgcagcatcaggtcacgcgtgcgctggcgattttcaacgccggtaatgcgctggcgacggtcgtggccgcgccgctgggaagctatctgggggctacggtcggatggcgaggcgctttcttgtgcttggtgcccatggcggttgtcgcctttatctggcagtgcattagtctgcccagcatggatgcgaataaaagccacacgtcatgtggcgcggtattccgcttatttagccgccgcatggttgtggtcggcatgatagcttgtggcctgtttttcatggggcagtttgcgctattcacctatgtgcgcccatttctggagtcggtgacacgggttaattccttaggcttgtcgttgattttgctgattatcggcgtggccggttttattggcacgctggttgtttcgatatttctcaacagaaaatgctaccccacgctgatggccatacccggactgatggccgtcattgccatcggtctgatgcttaccgggcatcacgtctggatggtctcgctgctgttaggactctggggcatgctggccaccgccgcgccaaccggatggtggacatggattgcgcgtacgttgcctgacaacgccgaagccggaggcgggctcatggtcgcggtgattcagctctcaatcgcccttggatcaacggcaggaggcatcgtgtttgaccgccttggctggcagagtacgtttgccatgagtagtgtgctgctcctttgcgcgggcgtactgacctttgttacagcacgccagaaggccggtgcgctttag

SEQ ID NO: 742 - protein, 397 aa, Escherichia coli O157:H7
MSTLSQTPSPHHQHAYWGGIFAMTLCVFVLIASEFMPVSLLTPIARDLGVTEGLAGRGIAISGALAVLTSLTLSTLAGKMNRKFLLLGMTVLMAVSGLIIALATSYLMYMVGRAMIGVAIGGFWSMSAATAIRLVPQHQVTRALAIFNAGNALATVVAAPLGSYLGATVGWRGAFLCLVPMAVVAFIWQCISLPSMDANKSHTSCGAVFRLFSRRMVVVGMIACGLFFMGQFALFTYVRPFLESVTRVNSLGLSLILLIIGVAGFIGTLVVSIFLNRKCYPTLMAIPGLMAVIAIGLMLTGHHVWMVSLLLGLWGMLATAAPTGWWTWIARTLPDNAEAGGGLMVAVIQLSIALGSTAGGIVFDRLGWQSTFAMSSVLLLCAGVLTFVTARQKAGAL

SEQ ID NO: 743 - DNA, 1269 bp, Escherichia coli O157:H7
  CDS (1)..(1269): transl_table=11
ttggccttgctggtcgttatcctgcaagctatcactttattggctacggtgattggtagccgttctggtagttgtgatggtggtatgaaaaaagtcattttatctttggctctgggcacgtttggtttggggatggccgaatttggcattatgggcgtgctcacggagctggcgcataacgtaggaatttcgattcctgctgccgggcatatgatctcgtattatgcgctgggggtggtggtcggtgcgccaataatcgcactcttttccagccgctactcactcaaacatatcttgttgtttctggtggcgttgtgcgtcattggcaacgccatgttcacgctctcttcgtcgtacctgatgcttgccattggtcgcctggtttccggctttccgcatggcgcattttttggcgtcggagcgatcgtgttatcaaaaattatcaaacccggaaaagtcaccgccgccgtggcggggatggtttccgggatgacagtcgccaatttgctgggcattccgctgggaacgtatttaagtcaggaatttagctggcgttacacctttttattgatcgctgtttttaatattgcggtgatggcatcggtctatttttgggtgccggatattcgcgacgaggcgaaaggaaagctgcgcgaacaatttcactttttgcgcagcccggccccgtggttaattttcgccgccaccatgtttggcaacgcaggtgtgtttgcctggttcagctacgtaaagccatacatgatgtttatttccggtttttcggaaacggcgatgacctttattatgatgttagttgggctagggatggtgctgggaaatatgctaagtggcaggatttcaggacgttattcaccactgcgcattgcagcagtgactgactttataattgtactggcactgctgatgctctttttctgcggcggcatgaaaacaacgtcgcttatttttgcttttatttgttgcgcgggattatttgccctttcagcacctctgcaaatattgttactgcaaaatgccaaaggcggagagttattaggtgccgcaggtgggcaaatagcgtttaacctcggtagcgccgtcggcgcatattgcggaggtatgatgctgacgctggggctggcatataattacgtggcgctgcctgccgccctgctttcgtttgctgcgatgtcatcgttgctgctgtatggtcgctataagcgccagcaagcggcggatagtccggtgctggcgaaaccactggggtag

SEQ ID NO: 744 - protein, 422 aa, Escherichia coli O157:H7
MALLVVILQAITLLATVIGSRSGSCDGGMKKVILSLALGTFGLGMAEFGIMGVLTELAHNVGISIPAAGHMISYYALGVVVGAPIIALFSSRYSLKHILLFLVALCVIGNAMFTLSSSYLMLAIGRLVSGFPHGAFFGVGAIVLSKIIKPGKVTAAVAGMVSGMTVANLLGIPLGTYLSQEFSWRYTFLLIAVFNIAVMASVYFWVPDIRDEAKGKLREQFHFLRSPAPWLIFAATMFGNAGVFAWFSYVKPYMMFISGFSETAMTFIMMLVGLGMVLGNMLSGRISGRYSPLRIAAVTDFIIVLALLMLFFCGGMKTTSLIFAFICCAGLFALSAPLQILLLQNAKGGELLGAAGGQIAFNLGSAVGAYCGGMMLTLGLAYNYVALPAALLSFAAMSSLLLYGRYKRQQAADSPVLAKPLG

SEQ ID NO: 745 - DNA, 1239 bp, Escherichia coli O157:H7
  CDS (1)..(1239): transl_table=11
atgttaaagtggtcggcttttcccctgaaacatgccacgggtaacaccatgagtgaatttattgccgaaaaccgcggcgcggatgccatcacccgaccgaactggtcagccgttttctcggtggcgttttgcgtcgcctgtctgattatcgttgagtttttgcctgtcagtttgttgacgccaatggcccaggatttaggcatttcggaaggggttgccgggcaatcggtgaccgtgaccgcctttgtggcaatgtttgccagtttgtttattacccagacaattcaggccactgaccgccgctacgttgttattttgtttgccgttttgctgacgctctcctgcttgctggtttcctttgctaactcattcagtttgcttttaatcggtcgtgcctgtctggggctggcgctgggcgggttctgggcgatgtcggcgtcgctgaccatgcgtctggtgccgccgcgtacggtgccgaaggcgctgtcggtgatcttcggcgcggtttctattgcgctggtgattgccgcgccgttgggctgttttttaggcgagcttatcggttggcgcaatgtctttaatgcggcggcggcgatgggtgtgctgtgtattttctggattatcaaatcactgccttcgctgccaggtgaaccttcgcatcagaaacaaaatactttccgcttattacaacgtccgggagtgatggccgggatgatcgccatctttatgtcctttgccggacagtttgcttttttcacttatattcgcccagtgtatatgactctggcgggattcggtgttgatggcttaaccctggtgctgctgagttttggtatcgccagctttgtcgggacatcgctttcgtcgtttattctcaaacgttcggtgaaactggccttagcgggcgcaccgtttgtgctcgccctgagcgcgctggtactgacgctgtggggaagcgataaaattgttgctactggtgtggcgattatctgggggctgacctttgctttaattcccgttggttggtcaacgtggatcactcgctcattggccgatcaggcagaaaaggctggatctattcaggttgccgttattcagcttgccaatacctgcggtgcggcaatcggcggttatgcgttggataacattggtctgacttcgccgctgatgttgtccggcacattgatgttgctgactgcattgttggtgactgcaaaggtgaaaatgaagaaatcctga

SEQ ID NO: 746 - protein, 412 aa, Escherichia coli O157:H7
MLKWSAFPLKHATGNTMSEFIAENRGADAITRPNWSAVFSVAFCVACLIIVEFLPVSLLTPMAQDLGISEGVAGQSVTVTAFVAMFASLFITQTIQATDRRYVVILFAVLLTLSCLLVSFANSFSLLLIGRACLGLALGGFWAMSASLTMRLVPPRTVPKALSVIFGAVSIALVIAAPLGCFLGELIGWRNVFNAAAAMGVLCIFWIIKSLPSLPGEPSHQKQNTFRLLQRPGVMAGMIAIFMSFAGQFAFFTYIRPVYMTLAGFGVDGLTLVLLSFGIASFVGTSLSSFILKRSVKLALAGAPFVLALSALVLTLWGSDKIVATGVAIIWGLTFALIPVGWSTWITRSLADQAEKAGSIQVAVIQLANTCGAAIGGYALDNIGLTSPLMLSGTLMLLTALLVTAKVKMKKS

SEQ ID NO: 747 - DNA, 1242 bp, Mycobacterium tuberculosis CDC1551
  CDS (1)..(1242): transl_table=11
atgactgccccaaccggaacctccgccactacgacgcgaccgtggacgccacggatcgccacgcaactgtccgtgctggcttgcgcggcctttatctatgtcaccgccgaaatcctgccagtgggcgcgctgtcggcgatagcgcggaacttgcgcgtcagcgtggtcctagttgggaccttgctgtcctggtatgcccttgtcgcggccgtgacaacggttccgctggtgcgttggaccgcacactggccgcgccgccgggccctggtggtcagcctggtctgcctgaccgtctcgcaactcgtctcggcgctggcgcccaacttcgcggtgctggccgccgggcgggtgctctgcgcggtcacccatggcctgctgtgggcggtcatcgcgccgatcgccacccggctggtgccgcccagtcacgccgggcgcgccacgacgtcgatctacatcggaaccagtctggcgctggtcgtcggtagcccactcacggctgccatgagcctgatgtggggttggcggctggcggcggtgtgcgtgaccggcgcggcggccgcggtcgccctggccgcccggctggcgttgccggagatggtgctgcgcgccgaccagctcgagcacgttggccgacgggctcgtcacccacgtaatcctcgcctggtcaaggtcagtgtgctcacgatgatcgcggtaaccggccatttcgtgtcctacacctacatcgtggtgatcatccgcgacgtcgtcggtgtacgtgggccgaatctggcctggctgctcgccgcctatggggtcgccggcctggtgtccgtgcccctggtggcgcggccgttggaccgttggcccaagggcgccgtcatcgtcggtatgaccggactgacggcggcgttcaccttgctgaccgcgctggcattcggtgaacgccacaccgcggcgacggcactgctgggcaccggtgcgattgtgctgtggggagccttggccactgccgtgtcaccgatgctgcaatcggcggcgatgcgtagcggcggcgacgaccccgacggggcctcaggtttgtatgtgacggcgtttcagatcggcatcatggccggcgctctgctgggtgggctgctctacgagcgcagcttggcgatgatgctgaccgcgtcggcgggtttgatgggtgttgcgttgttcgggatgacggttagccagcacttgttcgagaatccgactctgagtcccggcgacggctaa

SEQ ID NO: 748 - protein, 413 aa, Mycobacterium tuberculosis CDC1551
MTAPTGTSATTTRPWTPRIATQLSVLACAAFIYVTAEILPVGALSAIARNLRVSVVLVGTLLSWYALVAAVTTVPLVRWTAHWPRRRALVVSLVCLTVSQLVSALAPNFAVLAAGRVLCAVTHGLLWAVIAPIATRLVPPSHAGRATTSIYIGTSLALVVGSPLTAAMSLMWGWRLAAVCVTGAAAAVALAARLALPEMVLRADQLEHVGRRARHPRNPRLVKVSVLTMIAVTGHFVSYTYIVVIIRDVVGVRGPNLAWLLAAYGVAGLVSVPLVARPLDRWPKGAVIVGMTGLTAAFTLLTALAFGERHTAATALLGTGAIVLWGALATAVSPMLQSAAMRSGGDDPDGASGLYVTAFQIGIMAGALLGGLLYERSLAMMLTASAGLMGVALFGMTVSQHLFENPTLSPGDG

SEQ ID NO: 749 - DNA, 1179 bp, Clostridium acetobutylicum ATCC 824
  CDS (1)..(1179): transl_table=11
atgttaaataaagaatcattagaatgtgaaggaatacattacagattacaggtgatatttctctttatagcaagtatctgtgtaggtacgggtatttatgaatggattccgctcaccaatgtgttacagcagagttttcatgtaggacaagaacaaattatttttataggaagtgtgttttcgttattttatgcaataggcttcctaatttttggttggttagctaattatgttgaaataaaaaaactattaattgtgggaactttattattgatgatctcaacatttctgataggatttgcaacaaattataaacttatgatagttttccgtgctattcaaggtatatttgcagcttcttttgcaccactaggcttttctattatagttaagatgtttccggaatctaaacgtatagctggtattagtgccattactacaggatttgttatggcaggtattttaggacaattgtatggaagtataatagctaattcatattcatggtcagttgtattttggctgcaagcattaatttatttgatgattattatttccatgatatttcttgtgcccaaaacagataaagtttcagagagacctacaagcttcattggtgaattagtaaaattgttaataagtaagtcactttttccatgttacgtgattacattgactttgcttttctgctttgttggtatgtatactgtaatgggaatgttttttcaaaaagactttggtcttaataatgaaaaaatcttatggattagaggaattggtattattggaatgataggttcaatggtatttgccaaattatcaaaaaaaataggagtaggtaatattctatctttagggcttgtgtgtgcttcaataggcgttttaattattggtatatcaaataatgtaggtctatcagttgcgatgagtgtagtttttgtatttggaattaccatatcattgccaatggttgtttcatcaatagggactttggctgggaagaaaagtggaaatgcaatgacgctatatacatttgtattgtttataggagcaacagtaggaccaattgtatgtaatcgcattatagaaagtggaagctaccctttggcatttatatttttagctgttgttttaggtattagttttattgcttcactaatagtaagaaaaactatataa

SEQ ID NO: 750 - protein, 392 aa, Clostridium acetobutylicum ATCC 824
MLNKESLECEGIHYRLQVIFLFIASICVGTGIYEWIPLTNVLQQSFHVGQEQIIFIGSVFSLFYAIGFLIFGWLANYVEIKKLLIVGTLLLMISTFLIGFATNYKLMIVFRAIQGIFAASFAPLGFSIIVKMFPESKRIAGISAITTGFVMAGILGQLYGSIIANSYSWSVVFWLQALIYLMIIISMIFLVPKTDKVSERPTSFIGELVKLLISKSLFPCYVITLTLLFCFVGMYTVMGMFFQKDFGLNNEKILWIRGIGIIGMIGSMVFAKLSKKIGVGNILSLGLVCASIGVLIIGISNNVGLSVAMSVVFVFGITISLPMVVSSIGTLAGKKSGNAMTLYTFVLFIGATVGPIVCNRIIESGSYPLAFIFLAVVLGISFIASLIVRKTI

SEQ ID NO: 751 - DNA, 1287 bp, Agrobacterium tumefaciens str. C58
  CDS (1)..(1287): transl_table=11
ttgcccttttttctgtgggccctccccgtttttcaggtcacgatgagccagtcgaatatgtccgaagcccgctctggtgcggagagtgaaaccgtttacacggcagcaccagccgtcgccctttcaccgcttgccatcgcgctgatcgaactggcgctggccgccggcggtttcggcatcggcaccggcgaattcgccatcatgggcctgctgcctgacgtcgccaccacctatggcgtcaccgttccgcaggcgggttatgtcatcacggcctatgcgctgggcgtcgtcatcggcgcgccgatcatcgccgtgctggctgcgcgcataacacgccgcacgctgcttcttggcctgatgggactttttgcggccggcaacatcttgagcgcgcttgcgcctgacttcctgagcttcaccctgctgcgtttcgttaccggcctgccacatggtgcctatttcggcgttgcagcactggtggcggcctccatggcgcctatccacaagcgtgcccgcgcggttggccgcgtcatgctcggtctcaccattgccaccctgctcggcacgccgcttgccactttcttcggccagctcctgtcctggcgtgcggccttcatgctggtgggcggcatcgggctcctgacagtcgcgcttctgtggctgttccagccgcgtgacaaggtggaggaaggcgcaagcgtctggcgcgaactcggcgcattcaggcgcgtgcaggtgtggctgacgctcgccatcgccgccgttggtttcggcggcatgttctcggtgttcagctatatcgccaagaccaccaccgatgtggcgatgatgccggtgtccaccgtatccatggtgctggcgctgttcggcatcggcatgaatgtcggcaatgtcgtcggctcacggctcgccgatatctcgctcaatggcacgattggcggcatgctggccttcaacgtgctggccatgacggtgttcggcatgacggcggacaatccgttcatgctgtgcatctgcgtgttcctgatcggctgcggttttgccgcctgcccggccgtgcagacccggctgatggatgtggcgcaggatgcgcagacgctggcggccgcctccaaccattccgccttcaacattgccaatgcgctcggcgcctggcttggcggcctcgtcatcgccatgggtttcggttacgcctcgacagggtatgtcggcgcggtcctttcccttctcgggcttggcgttttccttgtttcggtcaccgtcgaacggcgcgcaaaagccggctga

SEQ ID NO: 752 - protein, 428 aa, Agrobacterium tumefaciens str. C58
MPFFLWALPVFQVTMSQSNMSEARSGAESETVYTAAPAVALSPLAIALIELALAAGGFGIGTGEFAIMGLLPDVATTYGVTVPQAGYVITAYALGVVIGAPIIAVLAARITRRTLLLGLMGLFAAGNILSALAPDFLSFTLLRFVTGLPHGAYFGVAALVAASMAPIHKRARAVGRVMLGLTIATLLGTPLATFFGQLLSWRAAFMLVGGIGLLTVALLWLFQPRDKVEEGASVWRELGAFRRVQVWLTLAIAAVGFGGMFSVFSYIAKTTTDVAMMPVSTVSMVLALFGIGMNVGNVVGSRLADISLNGTIGGMLAFNVLAMTVFGMTADNPFMLCICVFLIGCGFAACPAVQTRLMDVAQDAQTLAAASNHSAFNIANALGAWLGGLVIAMGFGYASTGYVGAVLSLLGLGVFLVSVTVERRAKAG

SEQ ID NO: 753 - DNA, 1296 bp, Agrobacterium tumefaciens str. C58
  CDS (1)..(1296): transl_table=11
gtgtcgattatcacacaagccctcttcgaccatattgcatcacagcaattccaacccgacagcaacgctgtccctgcaaccctcacccgggcggtgagcggagaggaacctgtcatgcccctagccatcttcgccttgacgatcgcggcctatgcgatcggaacaacggagttcgtcattgtcggccttctgccgacggtggcgaacgatctccacatcaccctgccgcttgccggcctcatcgtcagtgtttatgcgcttggcgtcaccttcggcgcgccgattctgaccgcgctcaccggcaggattgaaagaaagccgcttctgcttggcctgatggccctcttcatcgtcggcaacacggcagcggccctttcgcccagctatgagatgttactcgtcgcccgcgtgatcgccgcctttgcgcatggtgtcttcttctctgtcggcgcgaccattgccgccgatctcgtgccggaaaatcgccgcgcctcggcgatcgccatgatgttcatgggtctgaccgttgccattgtcaccggcgtgccgatcggcacctatatcggtcagatattcggctggcgtgcgacattctgggccgttggtgcgcttggtatcgttgccttcgttgcgattgcggtcctgttgccgaacacgctgaaaaaggctcctccggcaagcattttcgatcaggtccgcgtgcttggctccggccgtctgctgatcgtcttcgccatgaccgcacttggttacggcggcaccttcgtcgccttcacctttctggcgccgatcttgcaggatgtcaccggcttttcggaatccagtgtcagcctgatcctcgtgctctacggcatcgccatcgccgccggcaatatcggcggcggcaagatcgccaaccacaacccggtcaaggcgttgatcggcctcttcgccctgcaggcaatcgttctggtgatcttttccttcaccgcggtttcaccggtcttgaccctgatcacgcttgtggccctcggcttcctgtcgttcgccaacgttcccggcctgcaactttatgtcgtgcagcttgccaaggagcaccgccccggtgccgtcgatgttgcctcggcgcttaacatcgcggccttcaatctcggcatcgcacttggtgcatggctcggaggcgttgtggtggaatcgccgatgggtcttggcgcgaccccctgggttggtgcgatcctggtcgccgtcgccttgttgctgaccatctggagcggcgcactcgaccgccgtgcagcccccgtgctgaaagccgcgtga

SEQ ID NO: 754 - protein, 431 aa, Agrobacterium tumefaciens str. C58
MSIITQALFDHIASQQFQPDSNAVPATLTRAVSGEEPVMPLAIFALTIAAYAIGTTEFVIVGLLPTVANDLHITLPLAGLIVSVYALGVTFGAPILTALTGRIERKPLLLGLMALFIVGNTAAALSPSYEMLLVARVIAAFAHGVFFSVGATIAADLVPENRRASAIAMMFMGLTVAIVTGVPIGTYIGQIFGWRATFWAVGALGIVAFVAIAVLLPNTLKKAPPASIFDQVRVLGSGRLLIVFAMTALGYGGTFVAFTFLAPILQDVTGFSESSVSLILVLYGIAIAAGNIGGGKIANHNPVKALIGLFALQAIVLVIFSFTAVSPVLTLITLVALGFLSFANVPGLQLYVVQLAKEHRPGAVDVASALNIAAFNLGIALGAWLGGVVVESPMGLGATPWVGAILVAVALLLTIWSGALDRRAAPVLKAA

SEQ ID NO: 755 - DNA, 1188 bp, Staphylococcus aureus subsp. aureus Mu50
  CDS (1)..(1188): transl_table=11
atgtcaatcatgcgactatttacattcattttaagtatttttatcgtaggaatggttgaaatgatggttgcaggaattatgaacttgatgagtcaggacttacatgtatcagaagctgtcgttggtcaattagtgacaatgtacgctttaacatttgcgatatgtggacctattctggttaaattaacgaaccgtttttcatcaaggcctgtattattatggacattacttatatttatcattggtaatggcattattgctgtagcgccaaatttttcaatattagtagttggtagaattatctcatctgcagcagcagcactaattatcgtaaaagtattagctattacagcgatgttatcagcacctaaaaatcgtggcaaaatgattggacttgtctatacagggtttagtggggccaatgtttttggtgtaccaattggaacggttatcggcgatttagtaggttggcgctatacatttctattcttaattattgtgagtattattgttggcttcttgatgatgatctatttaccgaaggatcaggaaatacaacgaggccctgtgaatcatgaggcaccatctcatgaaaatcatgttacttcgaaaatattaagacctgctgaagtagcaaaatatttaattattacgtttttagtattgattgcaaactcagtgacattcgtctttataaatccacttattttatctaatggtcatgatatgtcattcgtttcattagcacttctagtaaatggaatcgctggcgttattggaacatcattgggtggtatattctccgataaaattacaagtaagcgttggttaatgatttctgtttctatttttatcgttatgatgttacttatgaatttaatcttacctggttcaggtctattgttagcaggactatttatttggaatatcatgcaatggagtactaatccagcagtgcaaagcggtgtgattcaacatgttgaaggcgacacaagccaagtaatgagttggaacatgtctagtttaaacgctggtattggtgttggcggcattattggaggcttggtcatgacacatgtttctgttcaagctatcacatatacgagtgccatcattggcgcattaggattaatcgttgttttcacattgaaaaataatcattatgctaaaacatttaaatcatcataa

SEQ ID NO: 756 - protein, 395 aa, Staphylococcus aureus subsp. aureus Mu50
MSIMRLFTFILSIFIVGMVEMMVAGIMNLMSQDLHVSEAVVGQLVTMYALTFAICGPILVKLTNRFSSRPVLLWTLLIFIIGNGIIAVAPNFSILVVGRIISSAAAALIIVKVLAITAMLSAPKNRGKMIGLVYTGFSGANVFGVPIGTVIGDLVGWRYTFLFLIIVSIIVGFLMMIYLPKDQEIQRGPVNHEAPSHENHVTSKILRPAEVAKYLIITFLVLIANSVTFVFINPLILSNGHDMSFVSLALLVNGIAGVIGTSLGGIFSDKITSKRWLMISVSIFIVMMLLMNLILPGSGLLLAGLFIWNIMQWSTNPAVQSGVIQHVEGDTSQVMSWNMSSLNAGIGVGGIIGGLVMTHVSVQAITYTSAIIGALGLIVVFTLKNNHYAKTFKSS

SEQ ID NO: 757 - DNA, 1236 bp, Sinorhizobium meliloti 1021
  CDS (1)..(1236): transl_table=11
atgtccgaagatgtcctttccgccgatatcggccccacgaatattggccccgcgaacgtgggcaaatcccgtaacagggtttccgcgacggaaatcgcgctggcagtcggtggtttcggtatcggtaccggcgaattcgccatcatgggcctgttgcctcaggtcgcagacgacgtcgccgtctcggtgccggcggcgggcgccgtcatcagcgcctacgcgctcggcgtggtcgtcggcgcgccgttgatcgcggtacttgcggcgcggttcgcccgctttcatgtgctgctggtattgatggccgtctttgcattgggcaatttcgcgtccgccgttgcgccaagtttccacccgctcgtcgccgcgcgcttcttcgcgggcctgccgcacggcgcctatttcggcgtggcggcactggtcgcggcaggacttgcggcaccaaaccagcgggcgcgcgcagtcggtcgggtcatgatgggcctgacgatcgccactcttttcggcacgccgctcgtcgcctggttcggccaggcgctcggatggcgcagcgccttcgcgatcgtcggcggcatcagcctcatgacgatggtcctgatctggctccacgtgccgcgggacaggggcgatccgcaggcgacgccgctgcgggaactgagcgcgctggggagcctccaggtctggttgctgctcggtatctgtgcgatcggatgcggcggaatgttcgccgtcttcacctatatcgcaccggcgctgacccaggtcgcgggcgtttccgtcgccaatgtgcccgtcatgctgtcggtcttcggcgccggcatgatcctcggcaatatcgtgggttcgcggctcgccgattggtcgctcacgcgcgccatcggcatcgcgctcgtcttcaacgtcttcgcctacatcctcttctatttcaccatgacaagcccctggatggcgatcgtcaacgtgcttttcatcggcggcggcttcgccgtcgttccgggcgtccagacccgcctgatggacgtcgccggaaaggcgcagacgctcgcggcagccctcagtcattccgccttcaatttcgccaatgccctcggcgcctggctcggcggcattgccatcgccgccggttacggctggacttcgccggggctcgtcggcgccgtgctcggcataggcggtttcgccatcttcctcgcttcggtgatcgtggatcgccggcggacggggcgcgtagcctga

SEQ ID NO: 758 - protein, 411 aa, Sinorhizobium meliloti 1021
MSEDVLSADIGPTNIGPANVGKSRNRVSATEIALAVGGFGIGTGEFAIMGLLPQVADDVAVSVPAAGAVISAYALGVVVGAPLIAVLAARFARFHVLLVLMAVFALGNFASAVAPSFHPLVAARFFAGLPHGAYFGVAALVAAGLAAPNQRARAVGRVMMGLTIATLFGTPLVAWFGQALGWRSAFAIVGGISLMTMVLIWLHVPRDRGDPQATPLRELSALGSLQVWLLLGICAIGCGGMFAVFTYIAPALTQVAGVSVANVPVMLSVFGAGMILGNIVGSRLADWSLTRAIGIALVFNVFAYILFYFTMTSPWMAIVNVLFIGGGFAVVPGVQTRLMDVAGKAQTLAAALSHSAFNFANALGAWLGGIAIAAGYGWTSPGLVGAVLGIGGFAIFLASVIVDRRRTGRVA

SEQ ID NO: 759 - DNA, 1173 bp, Bacillus subtilis subsp. subtilis str. 168
  CDS (1)..(1173): transl_table=11
atgtctaacacttggaaaatttatattttagccattgtcagctttttagttggaacctcagagtacatcatttccggaattttggatcaaattgctcatactctcgggatcactttagctgccgcgggccagcttattaccattttctcacttgtatatgctctttctacacccgtacttatggcgttgacagcaagtatggatagacgcaaattgatgatgtatgccctaggtttgtttgtgttcggtaatgtcctggcttttgtactgcctggttatggatggtttattgcagcgcggatcattatggcgatgggagcaggtgtggttgttgtcaccgcattaacgattgccgctaagattgcatcggaagggaagcagggcagtgccatcgctacggtcgtgatgggatttaccgcttctttaatcattggtgttccgcttggaagaatgatagcagtagcattaggctggaagtctgtatttggagccattgctttgttgggattgatcgcaatggtcgttattttctttactcttccgtatactgaaggggataagcctgtgcctttgcttcaacagcttgctcttttcaaaaaacggaaagtggctatgggattatcaatcactttcttctggctcgggggatattctgttgcttacacttatttgtcaccgtatctcttgaacatctcaggtataaatggcaagctgctcagcggtgttttgcttatatttggaattgccagtttggttggatcgaagtttgggggatatagcaccgataaatggggagtgccctttacactcgttggcgggatgacgttgcatatcgtcacactgattctgctgtcacttgttactcattcctatatcggagtgttggtgattctcatattatggtcgtttgccgcatggtccaccggtccgacacagcaatttcacctggctacaatagaaccggaaatgtcaggtgttttgcttagcatgaatcagtcaatgatgcaattcgccatggcggtcggcgcaggtataggaggggtttttgtggaaaacgtatcattggcctcgattacctgggttggtgcgttaggggttatgattgcaattattgcatcattgctgattttcaattcgcaaccgaaacaagcgctaaaagatatcaatcaataa

SEQ ID NO: 760 - protein, 390 aa, Bacillus subtilis subsp. subtilis str. 168
MSNTWKIYILAIVSFLVGTSEYIISGILDQIAHTLGITLAAAGQLITIFSLVYALSTPVLMALTASMDRRKLMMYALGLFVFGNVLAFVLPGYGWFIAARIIMAMGAGVVVVTALTIAAKIASEGKQGSAIATVVMGFTASLIIGVPLGRMIAVALGWKSVFGAIALLGLIAMVVIFFTLPYTEGDKPVPLLQQLALFKKRKVAMGLSITFFWLGGYSVAYTYLSPYLLNISGINGKLLSGVLLIFGIASLVGSKFGGYSTDKWGVPFTLVGGMTLHIVTLILLSLVTHSYIGVLVILILWSFAAWSTGPTQQFHLATIEPEMSGVLLSMNQSMMQFAMAVGAGIGGVFVENVSLASITWVGALGVMIAIIASLLIFNSQPKQALKDINQ

SEQ ID NO: 761 - DNA, 1167 bp, Bacillus subtilis subsp. subtilis str. 168
  CDS (1)..(1167): transl_table=11
atgaatttcaaagttttcctgcttgcagcttctacgattgcagtcggattggttgagttaattgtggggggaattcttcctcagatcgcaaatgatttagacatttccattgtttcagccggacagctgatcagtgtgtttgcgctgggatatgcagtatctgggccgctgcttttggcattgactgcgaagattgagcggaagcgcttatatctaattgctttatttgttttcttccttagcaatcttgtcgcctatttcagccctaatttcgcaacactgatggtatctagggtattggcagcaatgagtacagggctgattgttgtgctttctttaacaattgccccgaaaattgtagcgcctgaatacagagcccgcgcaatcggaattatttttatgggattcagctctgctatcgcattaggcgtgccgctcggaatcttaatcagcgattccttcgggtggcggattttgttccttggcatcggcctgttggcactgatctccatgctgattatttcaatcttctttgaaagaataccggcggagaaaatgattcctttccgggaacaactcaagacgatcggtaatctgaaaatcgcgagttcacacctcgtcacgatgtttacattagctggccactacacgctttacgcttactttgcgccgtttttagaagagactcttcacctgagctctttctgggtcagcatttgttatttccttttcgggatatctgctgtatgcggaggccctttcggaggagcgctatctgaccggcttggttcctttaagagcattttgctggtgaccggttcctttgccatcattatgttcttactgccgctgtctacatcgtctatgattttctttttgcctgtcatggtgatttggggtcttctgagctggagcctcgccccggctcagcaaagctatttaattgaaattgcacctgattcgtctgacattcagcaaagctttaacacatcggccctccaagtcggaattgcccttggctcagccattggcggtgttgttttggatcagacgggtactgtggtgtcaacggcatggtgcggcggatcgattgtgatcatcgctgtcctgtttgctttcatttctttaacaagacctgttcaaacagcaaaaaaatcctccttgtaa

SEQ ID NO: 762 - protein, 388 aa, Bacillus subtilis subsp. subtilis str. 168
MNFKVFLLAASTIAVGLVELIVGGILPQIANDLDISIVSAGQLISVFALGYAVSGPLLLALTAKIERKRLYLIALFVFFLSNLVAYFSPNFATLMVSRVLAAMSTGLIVVLSLTIAPKIVAPEYRARAIGIIFMGFSSAIALGVPLGILISDSFGWRILFLGIGLLALISMLIISIFFERIPAEKMIPFREQLKTIGNLKIASSHLVTMFTLAGHYTLYAYFAPFLEETLHLSSFWVSICYFLFGISAVCGGPFGGALSDRLGSFKSILLVTGSFAIIMFLLPLSTSSMIFFLPVMVIWGLLSWSLAPAQQSYLIEIAPDSSDIQQSFNTSALQVGIALGSAIGGVVLDQTGTVVSTAWCGGSIVIIAVLFAFISLTRPVQTAKKSSL

SEQ ID NO: 763 - DNA, 1194 bp, Bacillus subtilis subsp. subtilis str. 168
  CDS (1)..(1194): transl_table=11
ttgagtatcaaaaacccatctgtaaaatttattatatttgttcttatgatttgtacattttcaatcggctatacagaatacgcggtgatgggtattttgacgtcgattgccaatgactttcatatacaggtttcatccgcagggcttcttgtcacggcttatgcggcaagcgtttgtttgacagggccgctcgtcaccatcatttccgtcaagcttccgagaaagcctgtgcttcttgggctgatggcgatatttatcctttccaacctgatgagcgcactggcgccgaattttgcggtattggccatttcaagaattttatctgcgtccattcacggcgctttcttcgcgattgccatggtattcgcaagtgaaatggttccgccggaaaagcgtgctgcagctgctgcttcaatgaacggcggactgacagtggctctaatgcttggtgttccattcggctcttatctcggagatgtcctgaattggagagcggtgttttccatcattacggcacttggtgtcatcggatttttaggccttatggctgccgtgccgaacagaaaaccaaaagtgatcccaatgcttatgaatgagtggggtgtttttaaacacaaacaagtgctgttttccttcgcgattaccattttaggctattccggtgtctttatcgcctacacctttatcgaacccattttgaggcattcagccggattcagcacggttggcattacaggtgctctctttgcgtatggattgggaggcgttgccgggaatttctttgctggaaaggtaccgctgcctttgctgactcggacgatgatcggcgtaatgatcggtttaatcggtgttctggctgtatttccttacatcgccatttacccggctgcagccattgtggcaacgttcctattcggggcatgcgcattcggcacgccgcctcttctgcaaacaaaggtcatttcctcatctgagggcggcacaaccattgccgcagctgtcagcgtatcagcatttaaccttgccaatgcccttggtgcatggatcggcggaatgattttaaacggaacaggctcttattcctggctgtttgcaggaggtgcgcttatgaccgcatgcggacttgtgctttctaccttcgcacacttatcagaaaagaagagcgtctacgaatatcaagtcaataaagggtaa

SEQ ID NO: 764 - protein, 397 aa, Bacillus subtilis subsp. subtilis str. 168
MSIKNPSVKFIIFVLMICTFSIGYTEYAVMGILTSIANDFHIQVSSAGLLVTAYAASVCLTGPLVTIISVKLPRKPVLLGLMAIFILSNLMSALAPNFAVLAISRILSASIHGAFFAIAMVFASEMVPPEKRAAAAASMNGGLTVALMLGVPFGSYLGDVLNWRAVFSIITALGVIGFLGLMAAVPNRKPKVIPMLMNEWGVFKHKQVLFSFAITILGYSGVFIAYTFIEPILRHSAGFSTVGITGALFAYGLGGVAGNFFAGKVPLPLLTRTMIGVMIGLIGVLAVFPYIAIYPAAAIVATFLFGACAFGTPPLLQTKVISSSEGGTTIAAAVSVSAFNLANALGAWIGGMILNGTGSYSWLFAGGALMTACGLVLSTFAHLSEKKSVYEYQVNKG

SEQ ID NO: 765 - DNA, 1191 bp, Bacillus subtilis subsp. subtilis str. 168
  CDS (1)..(1191): transl_table=11
atgacttcagccaataaaagcaatattcctgcactactggctttggccgtaagtgcattcgcaatagggacaactgaatttatcagtgtcggccttttgccgctcattgctgatgacctggatattcccgtcacgacagcaggattgaccgtttccctttatgcgctcggcgttacatttggggcacctatattaacttcattgacctcaagcatgtcacgtaagacactattgctttggatcatgtttatttttattgccggtaatacgatggcagcaaccgcttcaagcatcgggattttactagcagcacgtgtgatatcggcattttcgcacggtgtgtttatgtcgatcggttcgacaatcgcagcggatattgtcccggaggataaaagggctagcgcgatttcaattatgtttactggcctcactgtggcaactgtaaccggagttccttttgggacatttatcggccagcagttcggctggcgtttcgcctttatggtcattatcgccgtcggaatcattgctttcattacaaatggcattcttgtaccgtccaaattacgaaaagggacgaaaacaacgatgcgggatcaattgaagcttgtgacaaacagccggttattgcttttatttgtcattacagcgcttggatacggaggaacattcgttgtgttcacgtatctgtctcccctgcttcaggaagtaacaggcttcaaagccgggactgttgcagtgattctgctcggatacggaatagctattgctatcggcaatatgattggcggaaagctgtcaaaccgaaatccgattgccgctttattctatatgtttatcgtacaggcaatcgttctattcgtactgacatttacagccccgtatcaagcagcagggctcattaccattctctgtatgggattgctggcctttatgaacgtgcccggccttcaggtgtatgtcgtcatgctggctgagcgttttgtcccgagtgcagttgacgtcgcatccgcgatgaatatcgctgcctttaatgcagggatcgcgcttgggtcataccttggcggtgtgatcaccgattcaatcggattgattcataccgcttggataggcggattaatggtggtcggtgcagtcattttaacaggctggagccgcttgatggaaaaacgagatcggcaggaagcctga

SEQ ID NO: 766 - protein, 396 aa, Bacillus subtilis subsp. subtilis str. 168
MTSANKSNIPALLALAVSAFAIGTTEFISVGLLPLIADDLDIPVTTAGLTVSLYALGVTFGAPILTSLTSSMSRKTLLLWIMFIFIAGNTMAATASSIGILLAARVISAFSHGVFMSIGSTIAADIVPEDKRASAISIMFTGLTVATVTGVPFGTFIGQQFGWRFAFMVIIAVGIIAFITNGILVPSKLRKGTKTTMRDQLKLVTNSRLLLLFVITALGYGGTFVVFTYLSPLLQEVTGFKAGTVAVILLGYGIAIAIGNMIGGKLSNRNPIAALFYMFIVQAIVLFVLTFTAPYQAAGLITILCMGLLAFMNVPGLQVYVVMLAERFVPSAVDVASAMNIAAFNAGIALGSYLGGVITDSIGLIHTAWIGGLMVVGAVILTGWSRLMEKRDRQEA

SEQ ID NO: 767 - DNA, 1356 bp, Escherichia coli K12
  CDS (1)..(1356): transl_table=11
gtggataagacgttcacgccgcatccggtaatctttgccctgttccgtttcgatcttaactccagctcaagcaacaccgtaaaagttgcaaaaacgttaaatgcgtcacacatttcaatgttaaagtggtcggcttttcccctgaaacatgccacgggtaacaccatgagtgaatttattgccgaaaaccgcggcgcggatgccatcacccgaccgaactggtcagccgttttctcggtggcgttttgtgtcgcctgtctgattatcgttgagtttttgcccgtcagtttgttgacgccaatggcccaggatttaggcatttcggaaggggttgccgggcaatcggtgaccgtgaccgcctttgtggcaatgtttgccagtttgtttattacccagacaattcaggctactgaccgccgctacgttgttattttgtttgccgttttgctgacgctctcctgcttgctggtttcctttgctaactcattcagtttgcttttaatcggtcgtgcctgtctggggctggcgctgggcgggttctgggcgatgtcggcgtcgctgaccatgcgtctggtgccgccgcgtacggtgccgaaggcgctgtcggtgatcttcggcgcggtttctattgcgctggtgattgccgcgccgttgggcagttttttaggcgagcttatcggttggcgcaatgtctttaatgcggcggcggtgatgggcgtgctgtgtattttctggattatcaaatcattgccttcactgccaggcgaaccctcgcatcagaaacaaaatactttccgcttattacaacgtccgggtgtgatggcagggatgatcgccatcttcatgtctttcgccgggcagtttgctttcttcacgtatattcgcccggtgtatatgaacctggcgggattcggcgtggatggcttaacgctggtgctgttgagttttggtatcgccagctttattggtacgtcgctttcgtcgttcattcttaaacgttcggtaaaactggccttagcaggcgcgccgttaatactggctgtgagtgcgttggtactgacgttgtggggaagcgataaaatcgttgctaccggcgtggcgattatctgggggctaacttttgcattggttcccgtcggctggtcaacgtggatcacccgctcgctggccgatcaggcagaaaaagccgggtctattcaggtggcggttattcagcttgctaatacctgtggcgcggcaatcggcggttatgcgctggataatattggtctgacttcgccgttgatgttgtccggcacattgatgttgctgactgcattgttggttactgcaaaggtgaaaatgaagaaatcctga

SEQ ID NO: 768 - protein, 451 aa, Escherichia coli K12
MDKTFTPHPVIFALFRFDLNSSSSNTVKVAKTLNASHISMLKWSAFPLKHATGNTMSEFIAENRGADAITRPNWSAVFSVAFCVACLIIVEFLPVSLLTPMAQDLGISEGVAGQSVTVTAFVAMFASLFITQTIQATDRRYVVILFAVLLTLSCLLVSFANSFSLLLIGRACLGLALGGFWAMSASLTMRLVPPRTVPKALSVIFGAVSIALVIAAPLGSFLGELIGWRNVFNAAAVMGVLCIFWIIKSLPSLPGEPSHQKQNTFRLLQRPGVMAGMIAIFMSFAGQFAFFTYIRPVYMNLAGFGVDGLTLVLLSFGIASFIGTSLSSFILKRSVKLALAGAPLILAVSALVLTLWGSDKIVATGVAIIWGLTFALVPVGWSTWITRSLADQAEKAGSIQVAVIQLANTCGAAIGGYALDNIGLTSPLMLSGTLMLLTALLVTAKVKMKKS

SEQ ID NO: 769 - DNA, 1143 bp, Sinorhizobium meliloti 1021
  CDS (1)..(1143): transl_table=11
atgagcgagggcgaggccggacaggcgatttcgatctccggtctgttcgccgtgttgaccagtctcttcattgcggggttcacgcggaagatcgaccgcaagttcgtcctgtcctcgttctcgctcatgctgatcgtctcggggctcgtcgtatccttcgcccccaattacacggctctgatggtcggtcgggcgctgctcggcgttgccatcggcggattctggtcgatgtccaccgcggtcgtcatgcgcctcctgccggagagtgcggtgccggagggccttgcgttgctgaatgccggcaacgctatcgctgccacgatctccgctccgctcggcagctttctgggggattacatcggctggcggggcgcgttcttcttcgtggttccgctggcgctcattgcgctcatcgggcaatggacgaacatgccgtccctgccgccgcgaaaccgccgggcaaccgggaacgttttccggcttttggcacgccgacaggtcgctctcggcatgacggcgatcctgttgctgttcatgggacagtttgctctgttcacctatctgcggccgttcctcgagtccgccgccggcttttccgtctccggcttgtcactggttcttttgttgatgggcctggccggcgtagcggggacgtggtgcattagccgattgctcgttacgcgcctctattcgatcgtgatcgccattcccctggtgatggcggccatcgccctcacgctgatggccgttgggtccaagttgcctgtcgcggccttgttgatcgcctggggctttttcgggactgcggcgccggtcggctgggggacctggctgagccgggttctgcacgacgatgcggaggcggggggtggccttcaggttgcggtcatccagtttgccatcgcgatcggtgcggcagccggaggtcttctgttcgattgggccggatggtggagttcgttcgccttcgccgccgcactgttgcttggctcgtcggttgccgcctgggcagcctcgttcgaatgggagcattcaaaatcaaacggcgatccccctcgatcacgccgcgggtctcgatcggcggcgccatcaccagggccgtactgccgcgcctggtatgggctcaaaaggagactaacatga

SEQ ID NO: 770 - protein, 380 aa, Sinorhizobium meliloti 1021
MSEGEAGQAISISGLFAVLTSLFIAGFTRKIDRKFVLSSFSLMLIVSGLVVSFAPNYTALMVGRALLGVAIGGFWSMSTAVVMRLLPESAVPEGLALLNAGNAIAATISAPLGSFLGDYIGWRGAFFFVVPLALIALIGQWTNMPSLPPRNRRATGNVFRLLARRQVALGMTAILLLFMGQFALFTYLRPFLESAAGFSVSGLSLVLLLMGLAGVAGTWCISRLLVTRLYSIVIAIPLVMAAIALTLMAVGSKLPVAALLIAWGFFGTAAPVGWGTWLSRVLHDDAEAGGGLQVAVIQFAIAIGAAAGGLLFDWAGWWSSFAFAAALLLGSSVAAWAASFEWEHSKSNGDPPRSRRGSRSAAPSPGPYCRAWYGLKRRLT

SEQ ID NO: 771 - DNA, 1194 bp, Sinorhizobium meliloti 1021
  CDS (1)..(1194): transl_table=11
atgcctttggccatattcgcattgacgatcgctgcctatgcgatcggaaccaccgaattcgtgatcgtcggtctcctgccgacggtcgccaccgacctcgcaatcacgctgccgcttgccggcctcatcgtcagcgtctacgcgctcggcgtcaccttcggcgcgccggtcctgacggcgctgaccgggcggatcgaacgcaagcccctgcttctcggcctgatggcgctcttcatcggcggcaacacggcggcggcactgtcgccgaactacgaggtgctgctcgtcgcacgggtgctttcggcctttgcccacggcgtcttcttctcggtcggctcgacgatcgccgccgatctggtaccggagaaccgccgcgcttccgcgatcgcgatgatgttcatgggactcacggtcgcgatcgtcaccggcgtgccgatcggcacctatatcggccaggtctttggctggcgggcgaccttctggggcgtctccggcctcggcgtcgtcgcctttgccggtatcgccaccctgctcccgggcacgctcgccaaggccgctccggcgagccttctcgaccaggtgcgggtgctcggctccggccgtctgctgatcgttttcgccatgaccgcgctcggctatggcggcaccttcgtcgccttcaccttcctggcgccgatcctgcaggaggtcaccggtttctccgaacggagcgtcagtctgatcctcgtgctctatggcgtcgccatcgccatcggcaacatcgccggcgggcggatcgccaacaccaatcccgtcaaggcgctgatcggcctcttccttctgcaggcgctcgtgctggtgatcttctcgttcaccgccgtttcgccggtcctgacgctcgtgacgctcgccgctctcggttttctgtccttcgccaacgtgccgggcctgcagctctatgtggtgcagcttgcgatggagcaccgccccggcgccgtcgacgtcgcctccgcgctcaacattgccgccttcaatctcgggatcgcgctcggcgcctggctcggcggcatggtggtcgactctcccttcggactttccgccaccccatgggtgggcgcaatcctcgtctccggtgcgcttctgctgacgctttggagcggcgttctcgaccggcgcggcgcggtatcaggcgagcccgccactgtcacaggctga

SEQ ID NO: 772 - protein, 397 aa, Sinorhizobium meliloti 1021
MPLAIFALTIAAYAIGTTEFVIVGLLPTVATDLAITLPLAGLIVSVYALGVTFGAPVLTALTGRIERKPLLLGLMALFIGGNTAAALSPNYEVLLVARVLSAFAHGVFFSVGSTIAADLVPENRRASAIAMMFMGLTVAIVTGVPIGTYIGQVFGWRATFWGVSGLGVVAFAGIATLLPGTLAKAAPASLLDQVRVLGSGRLLIVFAMTALGYGGTFVAFTFLAPILQEVTGFSERSVSLILVLYGVAIAIGNIAGGRIANTNPVKALIGLFLLQALVLVIFSFTAVSPVLTLVTLAALGFLSFANVPGLQLYVVQLAMEHRPGAVDVASALNIAAFNLGIALGAWLGGMVVDSPFGLSATPWVGAILVSGALLLTLWSGVLDRRGAVSGEPATVTG

SEQ ID NO: 773 - DNA, 1185 bp, Sinorhizobium meliloti 1021
  CDS (1)..(1185): transl_table=11
atggacaagcgcatcatctggctcgccgttggctcttttacgatgagcacggtcggcttcgtcttttcaagccttttgccgtcgatcgctgccgacacgcacacgaccattccccgttcggggcacctgatcacgctgttctcgctttcctatgccatcggcgcgccgctgctttcggccctggccggcgcggcggaccggcgtcgactgctggtgactgcaatgctcgtattcgtcgtcggcaactgcatcgcggcgatgagcgtctccttcaccacgctgctgctcgcccagatcgtgatgggaatggcaagcggactgtttgccgccacggcgcaagcggcggcggtttcactggcaggaccggagcaccgcgcattggcgatttcaatcgtggtgggcggcaccacattcgccgtggcgctgggcgcgcctctcggcgcgctgattgccgccttctggggatggcgcggcacgttcggggcggtcgctctgcttgggctcacctgcgctgccgtgctctggctgcgcctgccgcggggcctcagtggaacgaagctgacaatgtccgagcgcttcggcgccatcggccgtccgggcgtggcctcgtcactcatggtgacgtttctgtatctcaccggcggcttcatgatcatctcttatctcgccccgctggcgatcgacggagccgggctttcgcaactggcgctgccggggctgttgctcgccttcggggtcggcgcggtgatcggcaatctctccagcggctatctggccgaccggctcggcgccacgcgcgtggtgacagcttcgctgatctccgcgctcgcggtctcgctgatgatcgccttcggcctgcacttcctcacgcgcgatctcgccggcttgctgctgatcggcataatggtgccatggggaatcgtcggttgggcgtttccgccggcccaggcgagccgcatcgtcggcttcgcgccggaggttgcccatttgaccctgtcgcttaacgcctcggcgatctatctcggcatcgcgaccggcacggcgatcggcggacgggtgctcgagaatacggctgccgcggatctcggcttcttcgcggcactgtttccggtggcttcactcgccgtcctttatgcaggactgcgatcccatcggcggcgcctggcgactgcggcggcggaatag

SEQ ID NO: 774 - protein, 394 aa, Sinorhizobium meliloti 1021
MDKRIIWLAVGSFTMSTVGFVFSSLLPSIAADTHTTIPRSGHLITLFSLSYAIGAPLLSALAGAADRRRLLVTAMLVFVVGNCIAAMSVSFTTLLLAQIVMGMASGLFAATAQAAAVSLAGPEHRALAISIVVGGTTFAVALGAPLGALIAAFWGWRGTFGAVALLGLTCAAVLWLRLPRGLSGTKLTMSERFGAIGRPGVASSLMVTFLYLTGGFMIISYLAPLAIDGAGLSQLALPGLLLAFGVGAVIGNLSSGYLADRLGATRVVTASLISALAVSLMIAFGLHFLTRDLAGLLLIGIMVPWGIVGWAFPPAQASRIVGFAPEVAHLTLSLNASAIYLGIATGTAIGGRVLENTAAADLGFFAALFPVASLAVLYAGLRSHRRRLATAAAE

SEQ ID NO: 775 - DNA, 1206 bp, Sinorhizobium meliloti 1021
  CDS (1)..(1206): transl_table=11
atgacagatacagcgaccactctggacgccacgttcataccggaaagcgaggagcgaatcgatccggcatgggccggggtcggctccctcgcgctcggcgtgttcggcctcgtcaccgcagaattcctccccgtcagcattctgacgccgatggccgccgatctcggtatcagcacgggcacggccggccaggcggtgacggcgaccgcgtcggtcggcgcggttgccgggctgacgatcgccatcgccacgcgccggttcgaccgccggctcgtgctttggggcttcaccctggcgctgatcgcctccagcctgcttgcggctttcgccaccaatctcgccatgctccttgccgcacgcgtcgtcctcggcatcgggctcggcggcttctggtcgatgatggcggcaatcgccttgcgtctcgtgccgatgtcgctcgtgccgcgtgccatgtcgatcgtcttcaccggcgtctcggtggcgacggtctgcgcggcgcccataggcgcctatatcggcgatctctggggctggcgcgccgcattcctgatggctgcggcggtcggtgccgtaacgctgatcgtgcagatggcgaccataccgcggctgccgccgcaatcggcgccgagcctgaagctcctcttcgatctgatgcgcatgccgagcatccgcatcgggatcatcaccgtcctgcttttcgtctcgggccacttcgccggcttcacctatgtgcgcccgttcctcgaaaacgtcccggaattcggcatcgaggcgatctcgctgatcctgctggcttacggcaccggcggcttcttcggcaatctcgccggcgggctcatcatcgaacgcagcatcacggcggccgtgagcatcggaacgctgctcatcgcagcgatggcgttcgccctcgtgaccttcggttcgttcgatgtcgtgtcggccgtggcggtgaccctctggggcttcgcattcggggcgctgcccgtcgccgtccagacctggatggtgcgagccgcccccgaccatgcggaaagcacgggcggcctcatcgtcgcgaccttccaggtcggcatcgccagcggcgctgtcctcggcgggctcttcgtggacagcttcggcccgctcggcgccatcacctattgcgctgtcgcgaccctcgcgagcgggctctatgtcgtggcctcgcggcgcagcatagaggtctga

SEQ ID NO: 776 - protein, 401 aa, Sinorhizobium meliloti 1021
MTDTATTLDATFIPESEERIDPAWAGVGSLALGVFGLVTAEFLPVSILTPMAADLGISTGTAGQAVTATASVGAVAGLTIAIATRRFDRRLVLWGFTLALIASSLLAAFATNLAMLLAARVVLGIGLGGFWSMMAAIALRLVPMSLVPRAMSIVFTGVSVATVCAAPIGAYIGDLWGWRAAFLMAAAVGAVTLIVQMATIPRLPPQSAPSLKLLFDLMRMPSIRIGIITVLLFVSGHFAGFTYVRPFLENVPEFGIEAISLILLAYGTGGFFGNLAGGLIIERSITAAVSIGTLLIAAMAFALVTFGSFDVVSAVAVTLWGFAFGALPVAVQTWMVRAAPDHAESTGGLIVATFQVGIASGAVLGGLFVDSFGPLGAITYCAVATLASGLYVVASRRSIEV

SEQ ID NO: 777 - DNA, 1176 bp, Salmonella typhimurium LT2
  CDS (1)..(1176): transl_table=11
atgcctctcgctttatttgcactgacaataagtgctttcgctatcggtacgactgagtttgtgattgtcggcctggtgccgaccattgctcaacaactggctatctcgttaccttccgccggaatgctggtttcaatctatgcgctgggtgtggctattggcgcgccggtgctaaccgcgctgaccggacgcctgccgcgtaaacagttactggtcgcgctgatggtcttgtttacggcggggaatttgctggcatggcaggcaccgggctatatgacattaatcgtcgcccgtctgctgacgggcctggcgcacggcgtgttcttctcgattggatctaccatcgcgacaagtctggtgccaaaagagaaagcggcttctgcgatcgctattatgtttggtggtttaacggtagcgctggtcacgggcgtgccgctgggaacatttatcggtcagcattttggctggcgtgagaccttccttgcggtatcactgttaggcgtgattgcgctgatgagcagtcaattgctgattccggccaatattcccggtcgggcggccgccagcattcgtgaccaggtgaaagtactgactcatcctcgtctgttgctgatttacgccgttacggcgctgggctacggcggggtattcacggcattcaccttcctggcgccaatgatgcaggatctggcgggattctccccggcagcggtaagctggatcttactggggtatggcgtatcagtggctatcggcaatatctggggcggtaaactggctgataagcatggtgccgtgccggcgctgaaattcattttcgccgcgctgtttgttctgcttatggtcttccaggtgacggcctccacgcagtatgctgcgctggctaccatcctagtgatgggggtctttgccttcggtaacgtaccggggttgcaggtctacgtggtacagaaagcggaacaattcacgcctaatgcggtagatgtggcgtcaggtctgaacattgcggcgtttaacattggtattgcgctgggctccgtgattggcgggcaaacggtggagcattacggtttggcgcagacgccgtggattggcgccctcattgttctggtggctttcctgctgatgggtgtcagcggacgtcttgataaacctgtacgcattgctctggagtaa

SEQ ID NO: 778 - protein, 391 aa, Salmonella typhimurium LT2
MPLALFALTISAFAIGTTEFVIVGLVPTIAQQLAISLPSAGMLVSIYALGVAIGAPVLTALTGRLPRKQLLVALMVLFTAGNLLAWQAPGYMTLIVARLLTGLAHGVFFSIGSTIATSLVPKEKAASAIAIMFGGLTVALVTGVPLGTFIGQHFGWRETFLAVSLLGVIALMSSQLLIPANIPGRAAASIRDQVKVLTHPRLLLIYAVTALGYGGVFTAFTFLAPMMQDLAGFSPAAVSWILLGYGVSVAIGNIWGGKLADKHGAVPALKFIFAALFVLLMVFQVTASTQYAALATILVMGVFAFGNVPGLQVYVVQKAEQFTPNAVDVASGLNIAAFNIGIALGSVIGGQTVEHYGLAQTPWIGALIVLVAFLLMGVSGRLDKPVRIALE

SEQ ID NO: 779 - DNA, 1173 bp, Salmonella typhimurium LT2
  CDS (1)..(1173): transl_table=11
atgaaaaaagttattttttctttggcgctgggtacgttcggactggggatggccgagtttggcattatgggcgtgctgacggagctggcacgcgatgtcgggataacaattcccgccgccgggcatatgatctcgttttacgccttcggcgtcgtgctgggcgcgcctgttatggcgctcttttccagccgcttttcgcttaaacatatactgttgtttctggtcatgttgtgcgtgatgggcaatgccatatttaccttttcctcgtcatatctgatgctcgccgtcggcagactggtttccggctttccgcacggtgccttttttggcgtcggcgccattgtcttgtcaaagattatccgccccgggaaggtcaccgccgccgtcgcgggtatggtttcagggatgacggtggcgaatctggtgggcattccgttcggcacttacctgagccaggaatttagctggcgctacacctttttattgatcgcggttttcaacatcgccgtgctcaccgcaattttcttctgggtgccggatattcgcgacaaagcccaaggcagcctgcgcgagcagtttcacttcttgcgtagcccctcgccgtggctcattttcgccgccacgatgttcggcaatgcgggcgtttttgcctggttcagctatatcaagccatttatgatgtacatctccggtttttcggagacgagcatgacgtttattatgatgctggtcgggctggggatggtgttaggcaatctgttaagcggcaaactctccggcagatatactccgctgcgcatcgcggtagtgactgacctcgttatcgtgctttctctcatggcgctctttttcttcagcggatacaaaacgacatcgctgactttcgcgtttatctgctgcgctggtctgtttgcgctctctgcgccgctgcaaatcctgctactgcaaaacgccaaaggcggcgaactgctgggcgcggcgggagggcaaatcgcgtttaatctcggtagcgcgattggcgcctggtgcggcgggctgatgctgacactaggttttgcgtaccactatgtggcgcttcccgccgccctgctctcgttttccgccatgtcgtcgttgctggtatacggacgtctaaaacacaagcagccatcggtcacgccggttgccggatga

SEQ ID NO: 780 - protein, 390 aa, Salmonella typhimurium LT2
MKKVIFSLALGTFGLGMAEFGIMGVLTELARDVGITIPAAGHMISFYAFGVVLGAPVMALFSSRFSLKHILLFLVMLCVMGNAIFTFSSSYLMLAVGRLVSGFPHGAFFGVGAIVLSKIIRPGKVTAAVAGMVSGMTVANLVGIPFGTYLSQEFSWRYTFLLIAVFNIAVLTAIFFWVPDIRDKAQGSLREQFHFLRSPSPWLIFAATMFGNAGVFAWFSYIKPFMMYISGFSETSMTFIMMLVGLGMVLGNLLSGKLSGRYTPLRIAVVTDLVIVLSLMALFFFSGYKTTSLTFAFICCAGLFALSAPLQILLLQNAKGGELLGAAGGQIAFNLGSAIGAWCGGLMLTLGFAYHYVALPAALLSFSAMSSLLVYGRLKHKQPSVTPVAG

SEQ ID NO: 781 - DNA, 1194 bp, Salmonella typhimurium LT2
  CDS (1)..(1194): transl_table=11
atgaatgaaaatatcgcagaaaaattccgcgctgatggggttgccaggcctaactggtcagccgtttttgccgtggcgttttgtgtcgcctgcctgattaccgttgagtttttgcccgttagtctgttgacgccgatggcgcaggatctggggatctccgagggcgtcgccggtcagtcggtcaccgttacggcgtttgtcgcgatgttttccagcctgttcattacccagattattcaggcgaccgacaggcgttatatcgttattctgttcgccgttttgctgacggcttcttgtctgatggtctcctttgccaacagctttacgctgctattgctgggccgcgcctgtcttgggttggcgctgggcggattctgggcgatgtcggcgtcgctgaccatgcgactggttcccgcgcgtaccgtgccgaaagcgctgtcggtgatttttggcgctgtctccatcgcgttagtgatcgccgcgccgctgggcagctttttgggcggtattattggctggcgtaatgtctttaacgccgctgcggtgatgggcgtactgtgcgtcatctgggtggtgaaatcactgccgtcgctgccgggcgaaccttctcaccagaaacagaatatgtttagcctgttgcaacgccctggcgtgatggccgggatgatcgccatctttatgtcttttgccgggcagttcgctttctttacctatattcgcccggtctatatgaatctggcgggctttgacgttgatggtctgacgctggtgttgctaagttttggtattgccagcttcgttggcacttctttctcatcctatgtcctgaaacgttcggtaaaactggcgctggccggtgcgccgctgctactggcgctgagcgcgctgacgctcattgtgtggggaagcgacaaaaccgtggcggcggcaatagcgattatctgggggctggcgtttgcgctggtgccggtgggatggtcaacgtggatcactcgttctcttgccgatcaggcggaaaaagccggttccatccaggtcgcggtgattcaactggcaaatacctgtggcgcggcggtgggcggttatgcgctcgacaatttcgggctgctttcgccgctggcgctttccggcggcctgatgctgttgacggcgttagtcgtggcggcgaaagtccgtattacgccaatgagttga

SEQ ID NO: 782 - protein, 397 aa, Salmonella typhimurium LT2
MNENIAEKFRADGVARPNWSAVFAVAFCVACLITVEFLPVSLLTPMAQDLGISEGVAGQSVTVTAFVAMFSSLFITQIIQATDRRYIVILFAVLLTASCLMVSFANSFTLLLLGRACLGLALGGFWAMSASLTMRLVPARTVPKALSVIFGAVSIALVIAAPLGSFLGGIIGWRNVFNAAAVMGVLCVIWVVKSLPSLPGEPSHQKQNMFSLLQRPGVMAGMIAIFMSFAGQFAFFTYIRPVYMNLAGFDVDGLTLVLLSFGIASFVGTSFSSYVLKRSVKLALAGAPLLLALSALTLIVWGSDKTVAAAIAIIWGLAFALVPVGWSTWITRSLADQAEKAGSIQVAVIQLANTCGAAVGGYALDNFGLLSPLALSGGLMLLTALVVAAKVRITPMS

SEQ ID NO: 783 - DNA, 1167 bp, Listeria monocytogenes EGD-e
  CDS (1)..(1167): transl_table=11
gtggatatgaaaaaagtgaatcctaatttgacacttttagcgctagcaattagtgcgtttgggattggttcaacagaatttattagtgtggggctacttccactgatttcttctagtatgggtgtgtcgattagcacggctggtttgacagtatcgatttatgcgcttggtgtaatggtcggagcgccggttttaacaaccgtgacggcgaagatgaatcgtaaaaatctgttattattagtaatgctcgtgtttctaataggtaatcttgtctctgcatttgctgtaagttttggaatgctccttactgggcgcgtagttgcggcgtttgcgcacggggtgtttatgtcgattgcttctgttatcgcagccgatgtggttcatccgagtaaacgggctagtgcaattgcggtgatgtttacagggctgactgtggcgactgtgacaggggtaccacttgggacgtttatcggtcaactatttggctggcggatgtcattcctgtttattgttgcgattggtgtgatagcaattattgctaattttttccttgtgccgaaaaacttatctaatggaaaaagtatttcgtttaaatcgattgggcaattgttagttaataaaaaaatcgtgatggtgttactcatgacggcgtttggttatggtggtacttttgtggtttatacgtatttatcgccgatgtttagcggaatgggctattcgacaagtatgatagttattttactgattgtttatggtgtgatggttgcgattgggaatacgattggtgggcattttgcgaatgagcgtcctgccaaagcacttttcattatgtttagcttacaaggtgtgacgttgttgttgcttcaattcacttcaggaaatgccattttaggtttaatgactattatgctaatgggatttttcgcgtttatgaatgtgtctggtttgcaactttatgtggtgcaattagcagaacggtatttgccagaaacggttagcatggcttctgcgcttaatatttctgcgtttaatattggaatcgcactcggagcatttatcggtggattagtagcagaatatattggtttaagttatacaccaattgttggatttttgatggttttcatcgcaattattttaactttctatatgaaaaaagataaatag

SEQ ID NO: 784 - protein, 388 aa, Listeria monocytogenes EGD-e
MDMKKVNPNLTLLALAISAFGIGSTEFISVGLLPLISSSMGVSISTAGLTVSIYALGVMVGAPVLTTVTAKMNRKNLLLLVMLVFLIGNLVSAFAVSFGMLLTGRVVAAFAHGVFMSIASVIAADVVHPSKRASAIAVMFTGLTVATVTGVPLGTFIGQLFGWRMSFLFIVAIGVIAIIANFFLVPKNLSNGKSISFKSIGQLLVNKKIVMVLLMTAFGYGGTFVVYTYLSPMFSGMGYSTSMIVILLIVYGVMVAIGNTIGGHFANERPAKALFIMFSLQGVTLLLLQFTSGNAILGLMTIMLMGFFAFMNVSGLQLYVVQLAERYLPETVSMASALNISAFNIGIALGAFIGGLVAEYIGLSYTPIVGFLMVFIAIILTFYMKKDK

SEQ ID NO: 785 - DNA, 1167 bp, Listeria innocua Clip11262
  CDS (1)..(1167): transl_table=11
gtggatatgaaaaaagtaaatcctaatttgacacttttggcgctggcgattagtgcgtttgggattggttcaacagaatttattagtgtagggcttcttccactgatttcttctagtatgggtgtgtcgattagttcagcgggattaactgtatcgatttatgcgctaggtgtgatggtgggggcgccggttttaacaacaatgacgtcgaaaatgaatcgtaaaaatctactattattagtaatgttagtatttctgatagggaatcttgtctcggcatttgctgtaagttttggaatgctccttaccgggcgggtagtggcggcatttgcgcatggggtgtttatgtcgattgcttcggttattgcggcagatgtcgttcatccgagcaaacgagctagtgcgattgcggtgatgtttacagggctgaccgtggcgactgtgactggggtgccacttggaacctttatcgggcaactatttggctggcggatgtcgtttctgtttattgttgtgataggcgtgattgccattattgccaacttctttttagttccaaaaaatttatctaatgcaagtagtatttcatttaaatcgattgggcaattattagttaataaaaaaatcgtgatggtattactcatgacggcgtttggttacgggggcacatttgttgtttatacgtatttatcgccaatgtttagcaatatgggttattcgacaagtatgatagttattttactgattatttatggtgtgatggttgcgattgggaatacgattggtgggcattttgcgaatgagcgcccagctaaagcacttttcgtgatgtttagtttgcaagggattacgttattattgcttcaatttacgtcgaccaatgctattttaggtttaattactattatgctaatgggatttttcgcgtttatgaatgtgtctggattgcagctttatgtggtgcaattagcagaacggtatttgccagaaacggtgagcatggcttctgcgcttaatatttctgcgtttaatattggaatcgcgctcggagcatttattggtggattagtaacggaatatattggtttaagttatacaccgattgtcggatttttgatggttttcatcgcaattattttaactttctatatgaaaaaagataaatag

SEQ ID NO: 786 - protein, 388 aa, Listeria innocua Clip11262
MDMKKVNPNLTLLALAISAFGIGSTEFISVGLLPLISSSMGVSISSAGLTVSIYALGVMVGAPVLTTMTSKMNRKNLLLLVMLVFLIGNLVSAFAVSFGMLLTGRVVAAFAHGVFMSIASVIAADVVHPSKRASAIAVMFTGLTVATVTGVPLGTFIGQLFGWRMSFLFIVVIGVIAIIANFFLVPKNLSNASSISFKSIGQLLVNKKIVMVLLMTAFGYGGTFVVYTYLSPMFSNMGYSTSMIVILLIIYGVMVAIGNTIGGHFANERPAKALFVMFSLQGITLLLLQFTSTNAILGLITIMLMGFFAFMNVSGLQLYVVQLAERYLPETVSMASALNISAFNIGIALGAFIGGLVTEYIGLSYTPIVGFLMVFIAIILTFYMKKDK

SEQ ID NO: 787 - DNA, 1227 bp, Ralstonia solanacearum GMI1000
  CDS (1)..(1227): transl_table=11
gtggaaggacacacgcacgctgatccgcatcacgcggaggtctccggcgggcgaccggcatggggcgcggtgttcgcgctgtcgctcgccgcattcatactggttgcatcggaattcatgccggtgagtctgctgacacccatcgcggggagccttcatctcactgaaggtcaagcggggcaggccatctccgtttctggggcgtttgccttgctgaccagcctgttcatcccggcgatggcagcccggctcgatcgcaaagtgctccttctgctgttgacgctgttgacggtcgtctccggtgtagtggtcacgctggcgcccgactactcgacattcatcatcggtcgggcactgatcggtgtggccattggcggtttctggtcgatgtcggcagcgacggccatgcggctcgtgccgcatcatgacgtgccgcacgctttggcgatcgtcaacggtggtaacgctctcgcaacggtgttggccgcgccgcttggcagcttgcttggcgccgtcgttggctggcgcggtgcgtttttctgcatcgtgcctgtggcgacgatcgcgctggtctggcaatggatgaccctgcccgcgctgaaagctgacagcagccctggcgccgccggtgatgtcttcacgctgttgaggcggcctgcggtggcgttgggcatggcggcggttggcctcttcttcatgggccagttcatgctgttcacctacctgcggccctttcttgaaacggtgaccaacaccagggcttccacactctcgttcgtgttgcttgtcatcggcgtggcgggtttcgtggggaccgccgtgattggcacgtttctaaaagatggcctctaccggacgctgatcgtcattcctgtgttgatggcagggattgcactggcgcttgcgtcgttcggtggctcactggccgcctccacgatccttctcgccatttgggggctggtcgcgaccgctgctccggtcggctggtggacatggctggctagaacactgccgcaagacgcggagaccggcggcggactcatggtggcgatcatccagctggcgatcacgttgggcgcagccggcggcggcgcaatgttcgacgcgggcggctaccgcgcgacctttggcatgagtgcggctgtgctggtcgcggcagcggtgcttgccatactggccgcacgtgcgggcacgcgaacggttcgggccggcgcagccgtcgcttga

SEQ ID NO: 788 - protein, 408 aa, Ralstonia solanacearum GMI1000
MEGHTHADPHHAEVSGGRPAWGAVFALSLAAFILVASEFMPVSLLTPIAGSLHLTEGQAGQAISVSGAFALLTSLFIPAMAARLDRKVLLLLLTLLTVVSGVVVTLAPDYSTFIIGRALIGVAIGGFWSMSAATAMRLVPHHDVPHALAIVNGGNALATVLAAPLGSLLGAVVGWRGAFFCIVPVATIALVWQWMTLPALKADSSPGAAGDVFTLLRRPAVALGMAAVGLFFMGQFMLFTYLRPFLETVTNTRASTLSFVLLVIGVAGFVGTAVIGTFLKDGLYRTLIVIPVLMAGIALALASFGGSLAASTILLAIWGLVATAAPVGWWTWLARTLPQDAETGGGLMVAIIQLAITLGAAGGGAMFDAGGYRATFGMSAAVLVAAAVLAILAARAGTRTVRAGAAVA

SEQ ID NO: 789 - DNA, 1203 bp, Ralstonia solanacearum GMI1000
  CDS (1)..(1203): transl_table=11
atgccgattgctttgcttgcgctcacgctgagcgcgttcgccatcgggacgaccgagttcgtcatcgttggcctgatcccgacggtggcggccgatctcggcatcacgctgccgtcggccggatggctggtcagcctgtatgcgctgggtgtggcggtcggcgccccggtgctcacggcgctgacggggcggctgccgcgcaaggcgctgctgctggcgctgatggcgctgttcacgctcggcaacctgctggcgtggcgcgcgccgggctatgcgccgctggtgctggcgcgcgtgatgacggggctggcgcacggcgtgttcttttcgatcggctcgacgctcgccaccagcctggtgcccagggagaaggccgcgagcgccatcgccatcatgttcacgggcctgacggtggcgctggtgacgggcgtgccgctgggcacgttcatcggccagcacttcggctggcgcgagacgttcctggcggtggccgggctgggtgtgatcgccttcgtcggcagcctggtgttcgtgccgcgcgacatcgcgcatgcgccgccggcgtcgctggccaggcaactgcaggtgctggcgcagccgcgcctgctgatggtctacgcgaagacggccatcggctacggcggctcgttcatcccttttaccttcctggcgccgatcctgcaggacgtggccggcttcagcgccggggcggtgggctgggtgatgctggtgtacggcgtgtcggtggcggcggggaacctttggggcggccggctggccgatcgcaaggggccgatcgcggcgctgcaggtcatcttcgcgctgctcgcggcggtgctgttcgccttcacgttcaccgcgcggtatccgtggacggcggtggcgacggtgctgctgtggggcgcggtggcgttcggcaatgtgccggggctgcaggcctacgtggtcaagcaggcggagcgcttcgcgccgcaggccgtggacgtggcgtcgggcctgaacattgccgcgttcaacctgggcattgccggggcggcatgggccggcggctggatcgtgacgcacctgggcctgatgcatacgccctggatcggcgcgctggtggtgctggtctcgctgggcctgaccgcctggagcggagcgctggatcgccgcggcggcatcggcccgcgcctggatggcccggccccggtggggcattga

SEQ ID NO: 790 - protein, 400 aa, Ralstonia solanacearum GMI1000
MPIALLALTLSAFAIGTTEFVIVGLIPTVAADLGITLPSAGWLVSLYALGVAVGAPVLTALTGRLPRKALLLALMALFTLGNLLAWRAPGYAPLVLARVMTGLAHGVFFSIGSTLATSLVPREKAASAIAIMFTGLTVALVTGVPLGTFIGQHFGWRETFLAVAGLGVIAFVGSLVFVPRDIAHAPPASLARQLQVLAQPRLLMVYAKTAIGYGGSFIPFTFLAPILQDVAGFSAGAVGWVMLVYGVSVAAGNLWGGRLADRKGPIAALQVIFALLAAVLFAFTFTARYPWTAVATVLLWGAVAFGNVPGLQAYVVKQAERFAPQAVDVASGLNIAAFNLGIAGAAWAGGWIVTHLGLMHTPWIGALVVLVSLGLTAWSGALDRRGGIGPRLDGPAPVGH

SEQ ID NO: 791 - DNA, 1266 bp, Ralstonia solanacearum GMI1000
  CDS (1)..(1266): transl_table=11
atgccccctctcgccccccaacacgagcgccgcctgctgtggctgctggcgctgacccaattcaccatcatcatggacttcatggtgatgatgccgctcgggccccagatcatgcacaccttcggcatcggcccggcggcgttcgccgcggcggtgtcggcgtattcgtggtgctcgggcgcgtccggcctgctggcggccacgtacatcgaccgcttcgaccggcggcgcctgctgctcacggtgtatgcgctgttctcgctgtccaacctggcctgcgcgctggcgggcacgtttccgctgctgctggcggcgcgggcgtttgccgggctgtcgggcggggtgctgggcgcggtcatcctggccatcgtgtcggatgtggtcccgccagcgcggcggggcgcggccaccggcgtgatcatgtcgtcgttcgcgctggcggcggtggcgggggtgccgatcggcatcgcgctcggtgcgcacctggggtgggcggcgccgttcttcctgctgaccgcgctgacggcactgttctggctgggcgcgcggcagacggtgccaccgctgaccgcacacctgcgcgaggacggccactcgctcggccagatcctcggcgggctgtggcaactgctgacccatccgcaccacctgcgcgccttcgtgctgaccttcgtgatgatgtcatcgcacatgatggtgattccgttcatctcgccggtgctggtggccaaccacggcatcgcgccgcaggacctgtcctggctgtacgtggcgggcggcgcggcgacgttcttcacctcgcgcgcggtcggcaggctggccgaccgctacggccgccgccgcgtgttcgtggcggccgcgctgctgtcgttcattcccgtgctggtgatgacgcatctgccggcgtggccgttcatcggcatgctgctattcttcccgtgcttcatggtgatcctgtcgagccggatggtgccgatgcaggcgctgatgaccacggtgccggcgccgcaggtgcgcggggccttcctgtcggccaacaacgcggtgatgtcgatcggcacgggctgcggagcctggctgggcggcctgctgctgtccaccggcgcgggcgggcagatcggcggctacggcttcaacggctgggtggccgtggtggcttcgctgttctgcgtgctgtggatccgcggcatcaaagggtcggatgcgcatggcgatccgtcgatgccgcaccaggcctgcgccccgggcgaaacggaacggacctga

SEQ ID NO: 792 - protein, 421 aa, Ralstonia solanacearum GMI1000
MPPLAPQHERRLLWLLALTQFTIIMDFMVMMPLGPQIMHTFGIGPAAFAAAVSAYSWCSGASGLLAATYIDRFDRRRLLLTVYALFSLSNLACALAGTFPLLLAARAFAGLSGGVLGAVILAIVSDVVPPARRGAATGVIMSSFALAAVAGVPIGIALGAHLGWAAPFFLLTALTALFWLGARQTVPPLTAHLREDGHSLGQILGGLWQLLTHPHHLRAFVLTFVMMSSHMMVIPFISPVLVANHGIAPQDLSWLYVAGGAATFFTSRAVGRLADRYGRRRVFVAAALLSFIPVLVMTHLPAWPFIGMLLFFPCFMVILSSRMVPMQALMTTVPAPQVRGAFLSANNAVMSIGTGCGAWLGGLLLSTGAGGQIGGYGFNGWVAVVASLFCVLWIRGIKGSDAHGDPSMPHQACAPGETERT

SEQ ID NO: 793 - DNA, 1230 bp, Agrobacterium tumefaciens str. C58
  CDS (1)..(1230): transl_table=11
atgtccgaagcccgctctggtgcggagagtgaaaccgtttacacggcagcaccagccgtcgccctttcaccgcttgccatcgcgctgatcgaactggcgctggccgccggcggtttcggcatcggcaccggcgaattcgccatcatgggcctgctgcctgacgtcgccaccacctatggcgtcaccgttccgcaggcgggttatgtcatcacggcctatgcgctgggcgtcgtcatcggcgcgccgatcatcgccgtgctggctgcgcgcataacacgccgcacgctgcttcttggcctgatgggactttttgcggccggcaacatcttgagcgcgcttgcgcctgacttcctgagcttcaccctgctgcgtttcgttaccggcctgccacatggtgcctatttcggcgttgcagcactggtggcggcctccatggcgcctatccacaagcgtgcccgcgcggttggccgcgtcatgctcggtctcaccattgccaccctgctcggcacgccgcttgccactttcttcggccagctcctgtcctggcgtgcggccttcatgctggtgggcggcatcgggctcctgacagtcgcgcttctgtggctgttccagccgcgtgacaaggtggaggaaggcgcaagcgtctggcgcgaactcggcgcattcaggcgcgtgcaggtgtggctgacgctcgccatcgccgccgttggtttcggcggcatgttctcggtgttcagctatatcgccaagaccaccaccgatgtggcgatgatgccggtgtccaccgtatccatggtgctggcgctgttcggcatcggcatgaatgtcggcaatgtcgtcggctcacggctcgccgatatctcgctcaatggcacgattggcggcatgctggccttcaacgtgctggccatgacggtgttcggcatgacggcggacaatccgttcatgctgtgcatctgcgtgttcctgatcggctgcggttttgccgcctgcccggccgtgcagacccggctgatggatgtggcgcaggatgcgcagacgctggcggccgcctccaaccattccgccttcaacattgccaatgcgctcggcgcctggcttggcggcctcgtcatcgccatgggtttcggttacgcctcgacagggtatgtcggcgcggtcctttcccttctcgggcttggcgttttccttgtttcggtcaccgtcgaacggcgcgcaaaagccggctga

SEQ ID NO: 794 - protein, 409 aa, Agrobacterium tumefaciens str. C58
MSEARSGAESETVYTAAPAVALSPLAIALIELALAAGGFGIGTGEFAIMGLLPDVATTYGVTVPQAGYVITAYALGVVIGAPIIAVLAARITRRTLLLGLMGLFAAGNILSALAPDFLSFTLLRFVTGLPHGAYFGVAALVAASMAPIHKRARAVGRVMLGLTIATLLGTPLATFFGQLLSWRAAFMLVGGIGLLTVALLWLFQPRDKVEEGASVWRELGAFRRVQVWLTLAIAAVGFGGMFSVFSYIAKTTTDVAMMPVSTVSMVLALFGIGMNVGNVVGSRLADISLNGTIGGMLAFNVLAMTVFGMTADNPFMLCICVFLIGCGFAACPAVQTRLMDVAQDAQTLAAASNHSAFNIANALGAWLGGLVIAMGFGYASTGYVGAVLSLLGLGVFLVSVTVERRAKAG

SEQ ID NO: 795 - DNA, 1209 bp, Agrobacterium tumefaciens str. C58
  CDS (1)..(1209): transl_table=11
atgacggacacaacatcacagttcgatggggcagagatcgcgctggaggccgccgaggaaccggcatggaccgcagcgacatggttcgcggtcctttcgatggcggccaccagctttgcactcgtatcggccgagttcctgccggcgggccttctgacgcccatggcgcgcgatcttggaattaccgagggaacggcggggcaggtcgtcacggccacggcctcggtaggcgccgtgacggcgctgttcagcaacgttctcatcggcaaattgaaccgcaagaccgtgcttgtcggtcttagcgcgctggcaatcggctccaatatccttgcatcattcgcgaccgatttctggctgttgctggtcggtcgggcaggacttgggatcgcgctgagcggtttctgggcgctctcggttgcggttgtggcgcggctcgtcggggcgaacgcaaccggtcgcggcatggccatcgtcaccctcggcgtctcgctcgccacgatagcggcgccttccatgggggcgttgatcagcgactggctgggatggcgtgtcgccatgtcgatgacggcgggacttgccgcaattgccatgctgctgcagatcttgagcctgccgacgctgccggcaagcacaagcaacagtcttgccgatgttttccggctgacgcggcggccgagcgttcagcttgggatgcttgccatcctgctgctgatgacaggccatttcgccggctccgtctatgtccgtccgttcctcgaacaggtcacacatctcgataccacgccgatcgcactcgccctactcgggttcggcgtggcctcggtgctgggcaatgtcgccggtggccggatggccgacaacagcattcgtctggcactcgcggtcactgccgctctgatgggatttgccacgctcttcctggttttctggggcgcgcataccagtgccgcttttgcgctcgtcgcactctggggttttgccttcggcatggcgccggtggtcctgccgacgaacctgtctcgcggcgcgccggatgcacttgaagcggcaggcagcctgatggtggtgtcttttcaggtagccatcagtattggtgcagttttcggtggttacatcgttgactattatggcgccaccgccccactgtccctgaccgcagttctggctgcagcaacgcttgcccttgtactggtgcagccgcgccgctga

SEQ ID NO: 796 - protein, 402 aa, Agrobacterium tumefaciens str. C58
MTDTTSQFDGAEIALEAAEEPAWTAATWFAVLSMAATSFALVSAEFLPAGLLTPMARDLGITEGTAGQVVTATASVGAVTALFSNVLIGKLNRKTVLVGLSALAIGSNILASFATDFWLLLVGRAGLGIALSGFWALSVAVVARLVGANATGRGMAIVTLGVSLATIAAPSMGALISDWLGWRVAMSMTAGLAAIAMLLQILSLPTLPASTSNSLADVFRLTRRPSVQLGMLAILLLMTGHFAGSVYVRPFLEQVTHLDTTPIALALLGFGVASVLGNVAGGRMADNSIRLALAVTAALMGFATLFLVFWGAHTSAAFALVALWGFAFGMAPVVLPTNLSRGAPDALEAAGSLMVVSFQVAISIGAVFGGYIVDYYGATAPLSLTAVLAAATLALVLVQPRR

SEQ ID NO: 797 - DNA, 1182 bp, Agrobacterium tumefaciens str. C58
  CDS (1)..(1182): transl_table=11
atgcccctagccatcttcgccttgacgatcgcggcctatgcgatcggaacaacggagttcgtcattgtcggccttctgccgacggtggcgaacgatctccacatcaccctgccgcttgccggcctcatcgtcagtgtttatgcgcttggcgtcaccttcggcgcgccgattctgaccgcgctcaccggcaggattgaaagaaagccgcttctgcttggcctgatggccctcttcatcgtcggcaacacggcagcggccctttcgcccagctatgagatgttactcgtcgcccgcgtgatcgccgcctttgcgcatggtgtcttcttctctgtcggcgcgaccattgccgccgatctcgtgccggaaaatcgccgcgcctcggcgatcgccatgatgttcatgggtctgaccgttgccattgtcaccggcgtgccgatcggcacctatatcggtcagatattcggctggcgtgcgacattctgggccgttggtgcgcttggtatcgttgccttcgttgcgattgcggtcctgttgccgaacacgctgaaaaaggctcctccggcaagcattttcgatcaggtccgcgtgcttggctccggccgtctgctgatcgtcttcgccatgaccgcacttggttacggcggcaccttcgtcgccttcacctttctggcgccgatcttgcaggatgtcaccggcttttcggaatccagtgtcagcctgatcctcgtgctctacggcatcgccatcgccgccggcaatatcggcggcggcaagatcgccaaccacaacccggtcaaggcgttgatcggcctcttcgccctgcaggcaatcgttctggtgatcttttccttcaccgcggtttcaccggtcttgaccctgatcacgcttgtggccctcggcttcctgtcgttcgccaacgttcccggcctgcaactttatgtcgtgcagcttgccaaggagcaccgccccggtgccgtcgatgttgcctcggcgcttaacatcgcggccttcaatctcggcatcgcacttggtgcatggctcggaggcgttgtggtggaatcgccgatgggtcttggcgcgaccccctgggttggtgcgatcctggtcgccgtcgccttgttgctgaccatctggagcggcgcactcgaccgccgtgcagcccccgtgctgaaagccgcgtga

SEQ ID NO: 798 - protein, 393 aa, Agrobacterium tumefaciens str. C58
MPLAIFALTIAAYAIGTTEFVIVGLLPTVANDLHITLPLAGLIVSVYALGVTFGAPILTALTGRIERKPLLLGLMALFIVGNTAAALSPSYEMLLVARVIAAFAHGVFFSVGATIAADLVPENRRASAIAMMFMGLTVAIVTGVPIGTYIGQIFGWRATFWAVGALGIVAFVAIAVLLPNTLKKAPPASIFDQVRVLGSGRLLIVFAMTALGYGGTFVAFTFLAPILQDVTGFSESSVSLILVLYGIAIAAGNIGGGKIANHNPVKALIGLFALQAIVLVIFSFTAVSPVLTLITLVALGFLSFANVPGLQLYVVQLAKEHRPGAVDVASALNIAAFNLGIALGAWLGGVVVESPMGLGATPWVGAILVAVALLLTIWSGALDRRAAPVLKAA

SEQ ID NO: 799 - DNA, 1275 bp, Corynebacterium glutamicum ATCC 13032
  CDS (1)..(1275): transl_table=11
atgcacgaatctggaaaaaatcctgtcaaggttgtcgactcgcaggcaccacaaggacgcggtgggcatatcggcggacatatcaaacgccgcccgattcctaggcaaacggaaatttccgaggttcgtcgatatatcgtcatgactgccctcgcactcggtggcttcgccatcggtgtgacggaatttgtctccatgggtctgctcagcgcgatcgcctccgactttgagatctccgaagaccaagccggacacatcatcaccatctacgccctcggcgtggttgtgggtgccccgctgatcacagcgtttaccggcaaacttccacgacgccgcctgctgctcatcctggtggccttctttgtggtgggtaacgcgttgtccacactgaatgcgtcctatgaagtcctgttgattgcccgcttcatcgctggtctgccacacggcgcgtacttctcagttgcaggtttggcagcagcatcgatggcaccagacggacagcgtggacgtgcgatcgcctatgtcggtatgggtctttccgtgggtactgtcgccggtgttccagcagcccaagcactgggcgatgctttcggttggtccaccgcctacgtgctggtcaccgtcctgggtgttctcaccttgctggccctatggttcctcatgccacacatgacagagatgaaacccaccagcccgctgacagaactcagtgctttgaagaacagccaggtctggctcaccctgggcattggttccatcggtttcggtggcatgttcgcggtctacacctacatctcttggaccatgaccgaccaagctggcatgccaagctccctgatctggattgtgctgatggcctacggcgtgggcatgatctgcggaaactacgtcggtggacgcatcgccgactggaacgtggaccgcggaatcctcctcgcactgatctgcatcgtggtggccctcatcggtttctacttcacctccaacaacgccatcctgggaaccatcaacttcggactcgtcggattcttcggctccacactgatcccatcactgcagatccgactcatggacgttgcaggacgcgcacaaacgttggctgcatctctgaatcaatctgcactgaatatcggtaacgctttgggcgcagcgatcggtggcgtggttatcggcgcgggttattcctacagcactccagcccttgctggcgctggcctggcattccttgccatcgtggtgtggttccccatggtggccttgcgtaaacgcacataa

SEQ ID NO: 800 - protein, 424 aa, Corynebacterium glutamicum ATCC 13032
MHESGKNPVKVVDSQAPQGRGGHIGGHIKRRPIPRQTEISEVRRYIVMTALALGGFAIGVTEFVSMGLLSAIASDFEISEDQAGHIITIYALGVVVGAPLITAFTGKLPRRRLLLILVAFFVVGNALSTLNASYEVLLIARFIAGLPHGAYFSVAGLAAASMAPDGQRGRAIAYVGMGLSVGTVAGVPAAQALGDAFGWSTAYVLVTVLGVLTLLALWFLMPHMTEMKPTSPLTELSALKNSQVWLTLGIGSIGFGGMFAVYTYISWTMTDQAGMPSSLIWIVLMAYGVGMICGNYVGGRIADWNVDRGILLALICIVVALIGFYFTSNNAILGTINFGLVGFFGSTLIPSLQIRLMDVAGRAQTLAASLNQSALNIGNALGAAIGGVVIGAGYSYSTPALAGAGLAFLAIVVWFPMVALRKRT

SEQ ID NO: 801 - DNA, 1179 bp, Corynebacterium glutamicum ATCC 13032
  CDS (1)..(1179): transl_table=11
atgagcaccaccaccgcgcccgaagcacggtttcctgtcgtccctttgaccgccatgagtttcgcggcatttgtttatgtcacgttcgagatgtttgcagttggcctcatcaagccgatggccagcgatcttggagtgtcagaatccagcatcggcctgttgatgactgtgtatgcgactgtcgttgccgtggtgacgatccctgccatgttgtgggtttctcgatttaacaagcgcacagttttcctgattactctggcatttttggccacgggcattgttgttcaggcactgaccgttaattatggaatgctagccatcggccgcactatcgcagcattgactcacggggtgttttgggcacttgttgggccaatggcagcgcgtatgtccccaggtcacactggtcgtgcagtaggcgttgtgtcgattggatcaaccatggcgctggtcgttggttctccgctggcaacatggatcggtgaactcatcggatggcgtcctgccacctggattcttggtgcgctgaccattgcggccgtggctgtactcattccaaccgttccatcactgccaccacttccagacacggaatcagagtccaaagaaaagaaatcccttccatggggtctcatttccctggtcattttccttctccttgccgtcaccggtgtttttgctgcctacacctaccttggcctcatcatcgctgaaacagcaggggacagcttcgtgtccattggcttgttcgccttcggtgcactcggactcattggcgtgacagtggcaacccgaactgtggatcaacgcatgctgcgtggaagtgttcacaccaccactttgtttgtcattgctgcaattctcggacagatcgcattcggattagagggcacactagccgtagtagctatcttccttgcagtcaccgtgtttggtggagcatacggcgctctcccaaccctgggaaccaccatcttcctccatgcgggtcgcgaccacccagatactgcatcctccatttatgtggtcacttaccaagtgggtatcgcgtctggcgcggcacttggcgcgatggctgtggatgccgattgggttgctggcactttgtggatcatggctggactgtcattggcttccacgttggccttggcgctgtggtcccgcccgctactgaagtag

SEQ ID NO: 802 - protein, 392 aa, Corynebacterium glutamicum ATCC 13032
MSTTTAPEARFPVVPLTAMSFAAFVYVTFEMFAVGLIKPMASDLGVSESSIGLLMTVYATVVAVVTIPAMLWVSRFNKRTVFLITLAFLATGIVVQALTVNYGMLAIGRTIAALTHGVFWALVGPMAARMSPGHTGRAVGVVSIGSTMALVVGSPLATWIGELIGWRPATWILGALTIAAVAVLIPTVPSLPPLPDTESESKEKKSLPWGLISLVIFLLLAVTGVFAAYTYLGLIIAETAGDSFVSIGLFAFGALGLIGVTVATRTVDQRMLRGSVHTTTLFVIAAILGQIAFGLEGTLAVVAIFLAVTVFGGAYGALPTLGTTIFLHAGRDHPDTASSIYVVTYQVGIASGAALGAMAVDADWVAGTLWIMAGLSLASTLALALWSRPLLK

SEQ ID NO: 803 - DNA, 1224 bp, Streptomyces coelicolor A3(2)
  CDS (1)..(1224): transl_table=11
atgcccacagcaaccaccacttccatcgactcgccttcattgccggcgcgatcgccattggtatcgtggctggcggtgatttcggtgatgttggggatcttctcgatcatcaccaccgagatcctgccgatcggccttttgacctcgattggctcgagtttcaccatctccgatggaatggctggtctgatgatgaccatgcctggttttctggccgcggtatcggcgcccgtggtaactgtcgccacggggcgcatcgatcgtcggctcatgctgggtacgtttattctgttgctggcattggcgaatttcttggccgcggttgcgccgagctactggctggtcctggtctcacgtgtattggtcggggtcaccatcggtggtttctggtccatcggcgcggggctggcaagccggctggttcctgccgaatcggtgggccgggcaaccgccgtgatcttctccgcggtgcctctcgggtccgtgctcggagtcccgctgggtacgcttatcggagacgttgcggggtggcgtaccgcgttccttgtcatggggattctgaccctctgtgtcttcgccatgttgctcctggtggtcccgccgctgccgaccgatgagccgactcgtctgagtgcgctcacgggcatgctcaggagtgtcaatactcggtttgccttggtgatgacgttccttgtcgtgctcgcccacttcggcgcctacacctatgtcactccgttcctggagcaggtgactcatgtgagcgccgggctcatcacggtctatctgctcgtgtacggagttgcaggaattgccgggaacttcctgggcggatcggctgtggcgcggtatccgatcggcaccttcgcagccgccgccctgatgatcgccggcgcgactgtgctgctcccggtgctcggcaaggaggatctcggcgccgtggccctgctggttttgtggggcgttgcctacggtgccgtgcctgtctgctcgcagacctggttcgccaaggcctcacccgattcacccgaagcctcttccgtgctcttcacggcttcgttccaggccaccatttccatcggggcgctggtcggaggtgtcgtggttgaccactcctccccatccatggtcatgacgctcgctggcacagccgctgccctggtggtgctggtcgcctggtcccacggcgcccggaagaacccgttgcctgacccggccaagccttaa

SEQ ID NO: 804 - protein, 407 aa, Streptomyces coelicolor A3(2)
MPTATTTSIDSPSLPARSPLVSWLAVISVMLGIFSIITTEILPIGLLTSIGSSFTISDGMAGLMMTMPGFLAAVSAPVVTVATGRIDRRLMLGTFILLLALANFLAAVAPSYWLVLVSRVLVGVTIGGFWSIGAGLASRLVPAESVGRATAVIFSAVPLGSVLGVPLGTLIGDVAGWRTAFLVMGILTLCVFAMLLLVVPPLPTDEPTRLSALTGMLRSVNTRFALVMTFLVVLAHFGAYTYVTPFLEQVTHVSAGLITVYLLVYGVAGIAGNFLGGSAVARYPIGTFAAAALMIAGATVLLPVLGKEDLGAVALLVLWGVAYGAVPVCSQTWFAKASPDSPEASSVLFTASFQATISIGALVGGVVVDHSSPSMVMTLAGTAAALVVLVAWSHGARKNPLPDPAKP

SEQ ID NO: 805 - DNA, 1242 bp, Streptomyces coelicolor A3(2)
  CDS (1)..(1242): transl_table=11
atgcccctggccctgctcgcccttgccgtgggcgccttcggcatcggtaccaccgagttcgtgatgatgggcctgctgcccgacgtcgcggacgacctgggcatctccatccccaccgccggccacctcgtctccgcctacgcgctcggcgtcgtcatcggcgccccgctgctcgccgcggtgacgacccggatgtcccgccgcgccgtcctgatcgccctcatggcgctgttcgtggtgggcaacgccctgtcggccgtcgcccccggcgagatctccctgctcgccgcccgcttcgtcagcggcctgccgcacggcgccttcttcggcgtcggcgcggtcgtcgccaccggcatggtcgcgccggaacgcaaggcccgctccgtctccctgatgttcctcggcctcaccgtcgccaacatcgtcggcgtcccggccgccaccgccatgggccagcagctcggctggcgggccaccttcctcggcgtgagcgcgatcggcgtggcggcgatagcggcgctggccttcctcatcccgcgcgacagcgcccccgcccccaccacgggcctgcgcggcgaactggccgccctgcgctccctgcccgtctggctggcactcgggacgacggtcgcgggcttcggcgcgctcttcgcggcctacagctacatcacgccgatgctgaccgacgccgccgggttcgccgagagcagcgtgacgctgctgctggccctcttcggcgtcggcgccaccgcgggcaacctgctgggcggccgcctggccgaccactccctgcgcggcaccctcttcggcggcctcgcctctctcgtcgtggtcctggcgctgttccccctcctcatgcgtacgccggtcacggcggccgcgtcggtggccctgctcggcatggccgccttcgtcaccggctcgcccctccagctcatggtcatggagaaggccgccgcggccccttccctggcctcctccgccaaccaggccgccttcaacctcgccaacgcgggcggcgcctggatcggcggcctggccctggccgccggattcggggccacctccccggcgacggcgggcgcggccctggcggtcctcggcctcgcggtcgcgggcacggcgtggacggtggaccggcgtcgcgcggtcctcgccccggttcccgggcgcgagcgggtggtcgcgggacacgtgccggactccgaccgggccgcatcccacgccggagtgacggagtga

SEQ ID NO: 806 - protein, 413 aa, Streptomyces coelicolor A3(2)
MPLALLALAVGAFGIGTTEFVMMGLLPDVADDLGISIPTAGHLVSAYALGVVIGAPLLAAVTTRMSRRAVLIALMALFVVGNALSAVAPGEISLLAARFVSGLPHGAFFGVGAVVATGMVAPERKARSVSLMFLGLTVANIVGVPAATAMGQQLGWRATFLGVSAIGVAAIAALAFLIPRDSAPAPTTGLRGELAALRSLPVWLALGTTVAGFGALFAAYSYITPMLTDAAGFAESSVTLLLALFGVGATAGNLLGGRLADHSLRGTLFGGLASLVVVLALFPLLMRTPVTAAASVALLGMAAFVTGSPLQLMVMEKAAAAPSLASSANQAAFNLANAGGAWIGGLALAAGFGATSPATAGAALAVLGLAVAGTAWTVDRRRAVLAPVPGRERVVAGHVPDSDRAASHAGVTE

SEQ ID NO: 807 - DNA, 1215 bp, Streptomyces coelicolor A3(2)
  CDS (1)..(1215): transl_table=11
atgcctctcgcgcttctggccctcgcgatcggggccttcgggatcggaacgaccgagttcgtgatcatgggtttgctgcccgaggtcgcgagcgactacggggtctccatccccaccgccggctacctggtgaccgggtacgcgctcggtgtgatgctcggcgccccgctgatgaccgtgctcggtaccagggttccgcgcaagcggatgctgatgctgctgatgggcctgttcatcgtcggcaacctgctgtccgccctcgcccccgccttctcggtcatgctgatcggccgcgtggtcgcctcgctcgcccacggcgccttcttcggcatcggatcggtcgtcgcggccggtctggtcgctccgcacaagaaggccggcgcgatcgcgatgatgttcaccgggctgaccgtcgccaatgtcgtcggcgtcccgctgggcacgctgatcgggcagaccgccggctggcgcgtcaccttcgccgtcgtcgccgcgctcggcgtggtcggcctggccggagtcgccaagctggtccccgacctgcccagggccgagggcgtgcgactgcgccacgaaatggccgcgttcaagaacgtgcaggtcctgctcgcgatggccatgaccgtcctcggcttcggcggggtcttcgcggcgatcacctacatcgcgccgatgatgacccatgtcgcgggcttcgacgacggctcggtcacctggctgctggtcctcttcggcctcggcatggtcggcggcaacctcgtcggcggccggttcgccgaccgcgccctgatgcccatgctgtacatctccctgggcgccctgtccgtcgtactcgccctcttcaccctcaccgcgcacgacaagatcgcgtccgccgtgaccatcgtcctgatcggtgccctgggcttcgccaccgtcccgccgctgcagaagcgcgtactggaccacgcgcacggcgccccgacgctggcctccgcggtgaacatcggcgccttcaacctcggcaacgcgctctccgcctggctgggcggggtcgtgatcgcggccggcttcggctacaccgcccccaactgggtcggcgccgtgctcgccgctgccgcgctggtcctcgccgttctctcggccgccctggaacggcgcggaagcgctccgggctcggtcgccgcggcttccgcgtcctccaccgaacagcgggccgccgccgtccgccactga

SEQ ID NO: 808 - protein, 404 aa, Streptomyces coelicolor A3(2)
MPLALLALAIGAFGIGTTEFVIMGLLPEVASDYGVSIPTAGYLVTGYALGVMLGAPLMTVLGTRVPRKRMLMLLMGLFIVGNLLSALAPAFSVMLIGRVVASLAHGAFFGIGSVVAAGLVAPHKKAGAIAMMFTGLTVANVVGVPLGTLIGQTAGWRVTFAVVAALGVVGLAGVAKLVPDLPRAEGVRLRHEMAAFKNVQVLLAMAMTVLGFGGVFAAITYIAPMMTHVAGFDDGSVTWLLVLFGLGMVGGNLVGGRFADRALMPMLYISLGALSVVLALFTLTAHDKIASAVTIVLIGALGFATVPPLQKRVLDHAHGAPTLASAVNIGAFNLGNALSAWLGGVVIAAGFGYTAPNWVGAVLAAAALVLAVLSAALERRGSAPGSVAAASASSTEQRAAAVRH

SEQ ID NO: 809 - DNA, 1212 bp, Streptomyces coelicolor A3(2)
  CDS (1)..(1212): transl_table=11
atgccgctcgccgtctacatcctcggcctgtccgtcttcgccctcggcaccagcgagttcatgctctccggactgctgccgcccatcgccgacgacatggacgtgtcgatcccgcgagccgggctgctgatatcggcgttcgcgatcggcatggtggtcggcgcgccgctgctggccgtggcgaccctgcgcctgccccgcaagaccacgctggtcgcgctgatctcggtgttcggcgtcggccaggtcgcgggcgcgctcgcgacgagctacgaggtcctgttcgtctcgcgggtcgtcagcgcgctcgcctgcgccggcttctgggcggtgggcgcggccgcggccatcgcgatggtgccggtgacggcgcgggcccgcgcgatggccgtgatgatcggcggactgtccatcgccaacgtcctcggcgtcccggcgggcgccttcctcggcgagcacctgggctggcggtccgcgttctgggccgtgggcggcgcgtccgccgtcgcgctcgtcggcgtggtgaccctcatcccccgcatcccgctgcccgagcggcggccccggctgcggggcgagctggcgatctaccgggaccgccaggtctggctgtccatcgtcgtgaccgcgctcgccgccggcggcgtcttctgcgccttctcctacctcgccccgctgctcaccgacgtcgccggactggcggacggatgggtaccgaccgtgctggcgctgttcggcgtcggggcgctcatcggcacgacgatcggcggccgggtcgccgacgcccacctgttcggcgtactgctctccggcatcaccgcctcgacggtgctgctggccgccctcgcgctgttcgcctccagccccgccgtcgtgatcgtcctgtcgctgctgctcggggtctccgcgttctacaccgcgcccgcgctcaacgcgcgcatgttcaacgtcgccggtgccgcccccaccctcgcgggcgcgacgacgaccgccgcgttcaacctgggcaacaccggcgggccctggctcggcggcacggtgatcgacgcggacctcggctacgaggccaccgcctgggcgggcggggcgatgaccctggtcgcgatcgccttcgtcgccgtctccctgcggctgcacacccggtcgcgcgtcgtgacgggcggcggcccggccagcgagaccgcgagcctggagcgggcccagcgggtgtga

SEQ ID NO: 810 - protein, 403 aa, Streptomyces coelicolor A3(2)
MPLAVYILGLSVFALGTSEFMLSGLLPPIADDMDVSIPRAGLLISAFAIGMVVGAPLLAVATLRLPRKTTLVALISVFGVGQVAGALATSYEVLFVSRVVSALACAGFWAVGAAAAIAMVPVTARARAMAVMIGGLSIANVLGVPAGAFLGEHLGWRSAFWAVGGASAVALVGVVTLIPRIPLPERRPRLRGELAIYRDRQVWLSIVVTALAAGGVFCAFSYLAPLLTDVAGLADGWVPTVLALFGVGALIGTTIGGRVADAHLFGVLLSGITASTVLLAALALFASSPAVVIVLSLLLGVSAFYTAPALNARMFNVAGAAPTLAGATTTAAFNLGNTGGPWLGGTVIDADLGYEATAWAGGAMTLVAIAFVAVSLRLHTRSRVVTGGGPASETASLERAQRV

SEQ ID NO: 811 - DNA, 1179 bp, Streptomyces coelicolor A3(2)
  CDS (1)..(1179): transl_table=11
atgcctcttccgctgtacctgctcgccgtggccgtctgcgccatgggcacctcggagttcatgctcgccggtctcgtgccggacatcgcctcggatctcggcgtcaccgtcgggaccgcaggcacgctcacctcggccttcgcgaccggcatgatcgtcggcgctcccctcgtggcggcgctggcccgcacctggcccaggcgttccagcctcctcggattcatcctcgccttcgcggcggcacacgccgtgggagccggcaccacgagcttccccgtcctggtggcctgccgggtcgtggccgcgctcgcgaacgcgggattcctcgcggtcgcactgacgactgccgccgcactggtccctgccgacaagaagggacgcgcgctggccgtgctgctgtccggcacgacggtggccacggtcgccggcgtccccggcgggtcactcctcggcacatggctcggctggcgggccacgttctgggccgtcgccgtctgctgcctgcccgcggcgttcggcgtgctgaaggcaatccccgccggacgtgcgacggcagcggcgaccggtgggccgccgctgcgagtcgagctcgccgcgctcaagaccccccggttgctgctggcgatgctgctgggcgcgctggtgaacgcggcaaccttcgcgagcttcaccttcctggcccccgtcgtgaccgacaccgcagggctgggcgacctgtggatctctgtcgccctggtgctcttcggcgccggttccttcgccggcgtcaccgtcgccggacgactgtccgaccgacgccccgcccaggtgctcgccgtcgccggtccgctgctgctcgtcggctggcccgcgctggcgatgctggccgaccggccggtcgccctgctgaccctcgtgttcgtccaaggcgcactgtcgttcgcgctgggcagcacgctgatcacgcgggtcctctacgaggcggcgggagcacccaccatggccggttcgtacgcgaccgccgccctcaacgtgggcgccgcggccggaccgctcgtcgccgcgaccactctcggccacacgaccggcaacctcgggccgctgtgggcgagcgggctcctggtcgccgtcgcgctgctcgtcgcgttccccttccgcacggtgatcacgacggccgcacccgccgacgcgacccggtga

SEQ ID NO: 812 - protein, 392 aa, Streptomyces coelicolor A3(2)
MPLPLYLLAVAVCAMGTSEFMLAGLVPDIASDLGVTVGTAGTLTSAFATGMIVGAPLVAALARTWPRRSSLLGFILAFAAAHAVGAGTTSFPVLVACRVVAALANAGFLAVALTTAAALVPADKKGRALAVLLSGTTVATVAGVPGGSLLGTWLGWRATFWAVAVCCLPAAFGVLKAIPAGRATAAATGGPPLRVELAALKTPRLLLAMLLGALVNAATFASFTFLAPVVTDTAGLGDLWISVALVLFGAGSFAGVTVAGRLSDRRPAQVLAVAGPLLLVGWPALAMLADRPVALLTLVFVQGALSFALGSTLITRVLYEAAGAPTMAGSYATAALNVGAAAGPLVAATTLGHTTGNLGPLWASGLLVAVALLVAFPFRTVITTAAPADATR

SEQ ID NO: 813 - DNA, 1200 bp, Xanthomonas axonopodis pv. citri str. 306
  CDS (1)..(1200): transl_table=11
atgcaagccagttcgctcgctaccgattcaacctcgcgcaccgcacccgtcgcaacccgccagacctggagcgcggtcggctcgatgtcgctctgcgttgcgctgctgatcgcttccgaattcatgccggtcagcctgctcacgccgatcgcctccgatctgcacgccagtgccggcatggccggccaggcgatctcgatctccggcctgttcgctgtggtcgccagcctgctgatcgcaccgctgtcgtcgcgcttcaaccggcgccatgtgttgatcgcgctgaccgggatgatgctgttgtcgttgctgttgatcgccaatgcgcacagcttcggaatgttgatggtggcgcgtgcgctgctcggcatcaccatcggcggcttctgggcattgtccaccgccacggtgatgcgcctcatgcccgagcatgcggtgcccaaggcgctgggcatcgtgtttatcggtaacgcagtcgctgctgcattcgccgcgccgttgggcagctatctgggcgccagcatcggctggcgcggggtgttctggggcatgttgccgttggtggcgctgaccatcgtctggcaatggcgcagcctgccgtcgatgctcgcgcagggcgccacctcgctgggcagcatcgtcaccttgttgaagcgtcgctatgttgcgcgcgccatgctcgcggtaatgctcggattcgccggtgcgttttctgcgttcacctacttccgcccgtttctggaaaccgttgcgcaggtcgatgtatcgcaactgtcgttgctgctgctcggcctgggcctggctggattcgtcggtacctctgccgccaccgcgttagtgccgaagcgcttgttcaccctgctcagcgtgctgccggtcgcgctgggcgtggtgaccatcagcatgctgctggccggtcacctggtgtgggccgtggcagtggcgatgattgcctggggcacgctcaactcggcgatgccggtggcttggtccacctggttgagccgctgcgtcaaggacgcaccggaaagcggcggcggcctgatggttgccgcaatccagctctccatcatgctgggcggggccgcaggcggcgtgctgctggatcatgtgtcgatcggcgccacctttgtcggtgccagcgtattgctgctggcctcgtcactggttgcaggccggggcgatcgtttgcagccgtga

SEQ ID NO: 814 - protein, 399 aa, Xanthomonas axonopodis pv. citri str. 306
MQASSLATDSTSRTAPVATRQTWSAVGSMSLCVALLIASEFMPVSLLTPIASDLHASAGMAGQAISISGLFAVVASLLIAPLSSRFNRRHVLIALTGMMLLSLLLIANAHSFGMLMVARALLGITIGGFWALSTATVMRLMPEHAVPKALGIVFIGNAVAAAFAAPLGSYLGASIGWRGVFWGMLPLVALTIVWQWRSLPSMLAQGATSLGSIVTLLKRRYVARAMLAVMLGFAGAFSAFTYFRPFLETVAQVDVSQLSLLLLGLGLAGFVGTSAATALVPKRLFTLLSVLPVALGVVTISMLLAGHLVWAVAVAMIAWGTLNSAMPVAWSTWLSRCVKDAPESGGGLMVAAIQLSIMLGGAAGGVLLDHVSIGATFVGASVLLLASSLVAGRGDRLQP

SEQ ID NO: 815 - DNA, 1182 bp, Xanthomonas axonopodis pv. citri str. 306
  CDS (1)..(1182): transl_table=11
gtgtcccggcgcgattacgtgctgatcctgcttgcgctggcgatgggcggctttgcgatcggcatcagcgaattttccaccatgggcctgatgacgcagattgcgcagggcttgcagattaccgagccgcaggtcggtcacgtcatcagcgcgtatgcattgggtgtggtggtgggtgcgcccttgctggcgatcctgggcgcgcgctggccgcggcgcaccttgttgctgctgttgatggtgttctatgcgctgggcaacgtggccagcgcattggcgccgggctaccacgccatgctgctgtgtcgcttcatcgccgggctgccgcatggcgcctacttcggcgttgcgtcgctggtggccgcatcgatcagcccacccaatcaacgtgccactgcagtggggcgcgtgttgttgggtttgagcgttgcgctgctggtgggcaacccgctggcgacctggctggggcaaatcgtgagctggcgctgggcctatgcatcggtgtcggtgattgcgctgggcacggtcgccgctgtggcggtcctgttgccgccgcagccggaggagccgcgtcagcagccgctgcgcgaattgcgcgcgttcaatcagccgcaggtgtggctggcattggcgatcggggcggtgggtttttccggcatgttctgcgtcttcagttaccttgcgccgacgttgacggcagtgaccggcgtcatcgcagcgcgcattccgttagcgatggtggcattcggcgtgggcggggtgctgggaagcatcctgggcggttggttgttcgatcgcatgcagttccgcgcggtgccggtgttgctggtgtggtcggtggtggtgatgttgacgtttccgctggcagcgcaatcggccgtgtgggtgttcgtctccatcgtggcggtcggcaccatgggggcgctggcgccagccttgcagacacgcttgatggacgtggcggcagaagcgcagaccctggccgcagcctccaaccacgcagcgttcaatacggccaatgcattgggtccatggctgggtggcatggcgatcacggcaggctggggttggacctctaccggttacgtcggcgcggccaccgcgctcggcgggttgctggtctatgcagcggcggtgtggcaggaacgtcatcagcaacgtacggtattgaggagttgctga

SEQ ID NO: 816 - protein, 393 aa, Xanthomonas axonopodis pv. citri str. 306
MSRRDYVLILLALAMGGFAIGISEFSTMGLMTQIAQGLQITEPQVGHVISAYALGVVVGAPLLAILGARWPRRTLLLLLMVFYALGNVASALAPGYHAMLLCRFIAGLPHGAYFGVASLVAASISPPNQRATAVGRVLLGLSVALLVGNPLATWLGQIVSWRWAYASVSVIALGTVAAVAVLLPPQPEEPRQQPLRELRAFNQPQVWLALAIGAVGFSGMFCVFSYLAPTLTAVTGVIAARIPLAMVAFGVGGVLGSILGGWLFDRMQFRAVPVLLVWSVVVMLTFPLAAQSAVWVFVSIVAVGTMGALAPALQTRLMDVAAEAQTLAAASNHAAFNTANALGPWLGGMAITAGWGWTSTGYVGAATALGGLLVYAAAVWQERHQQRTVLRSC

SEQ ID NO: 817 - DNA, 1002 bp, Xanthomonas axonopodis pv. citri str. 306
  CDS (1)..(1002): transl_table=11
atgtccaacctcacctctgcgcgttcatcgcgctttccgccggcgttgctggcactgaccatcggtgccttcggcattggcacgaccgagttcgtgatcatggggctgctgcagcaggtagccgcggatctgggcgtttcgctcagcgcggcgggcctgttgatcagcggttatgcgctgggtgtgttcgtcggtgcgccggtgctgaccctggccagcgcacgcctgccgcgcaaggcggtgctggtcggtctgatgctgatcttcacggtcggcaacgtggcctgcgcgctggcgccggactacaccagcctgatggttgcgcgggtgctgacgtcgctggcccacggcacgtttttcggcgtcggcgccgtcgtggcgacgtcgctggtgccggccgaacgccgtgcatcggccatctcgctgatgttcgccgggctgaccgtggccaccttgctcggggtgccggccggtgcctggctggggctgcaactgggttggcgcgcgaccttctgggcggtggctgcgatcggtgtgctggccacttccgcggtcgcggtgtgggtgccggccgcggcaggtgctgccacgccggtgtcgtggcggcaggaagtggcggtattgcagcgggggcaggtgctgctggcgctggcgatcaccgtggtgggctacgccggtgtgttcgccgtgttcgcctacatccagccgctgctgctgcaggtcaccggctttgcgcaatcgacggtgtcgccggtgctgctggtgttcggcgtgggcatgatcgtcggcaatctgctcggtgggcggctggcggaccgtcgccccaccgcggccctgctgggcagcctggcggccctggtggtcgtgctgggcgcactgggatgcgtcctgcacagcaaggccgccatggtgacctttgtcgggctactgggcgtggctgccttcgccaccgtggcgccactgcagttgcgcgtgctggaacacgcgcgcggcgccggctag

SEQ ID NO: 818 - protein, 333 aa, Xanthomonas axonopodis pv. citri str. 306
MSNLTSARSSRFPPALLALTIGAFGIGTTEFVIMGLLQQVAADLGVSLSAAGLLISGYALGVFVGAPVLTLASARLPRKAVLVGLMLIFTVGNVACALAPDYTSLMVARVLTSLAHGTFFGVGAVVATSLVPAERRASAISLMFAGLTVATLLGVPAGAWLGLQLGWRATFWAVAAIGVLATSAVAVWVPAAAGAATPVSWRQEVAVLQRGQVLLALAITVVGYAGVFAVFAYIQPLLLQVTGFAQSTVSPVLLVFGVGMIVGNLLGGRLADRRPTAALLGSLAALVVVLGALGCVLHSKAAMVTFVGLLGVAAFATVAPLQLRVLEHARGAG

SEQ ID NO: 819 - DNA, 1173 bp, Oceanobacillus iheyensis HTE831
  CDS (1)..(1173): transl_table=11
atggataaacgagtgtatttattaatgaccatctcctttgtagttggaatggtagaattaattatcagtggtattttagatttagtagcaaatgatcttaatgtatcgatgggacaggccgggttgcttatcaccatcttttcattagtatttgcaatctcggcaccaattttattatttctaacagcttcgattgaacgaaaaaaattaacattaattgctttaagtactttttttataggtaatttaatagctatatttagtttttcctatacaatgctatttataagtagaattatctctgctgcaagtgcttcgatccttatcgtactttgtatcatgatggcatcatccattgttcaacctgaataccgcggaagagccattggaattgtcagcatgggcgtcagcggttcattagtatttggtattccgtttggtttaatacttggagaggcattcggatggcgagcgccattcgtactcatagcgatcttaaccgttttatctatggtaggtgtttatttctttatgacgaagatttatacatccgaaaagcctttaccattacaatcccagcttaaaatggttagtagtaaatccgtcttatttgcattactaacaacattatttgttttggcaggacatactacgttatacgcctacctaaaccctttcgttagtgaaatgatgaatatgaatggtttttggcttagcgttgtttatttagcctttggaatcgctgcagttagtggcggtggtgcgggcggagctttatctgatcattttggaccaaaacgcactattcttaccgtaattatactattcattttagcaataatctccttaccttttgctacttttaatataattatattctttgttgtattaattatttggggtatgatgagttgggcggtgtcaccaccagttcagagcttcttaattgaaactgctccaaaaaatgcagatatattagtgagtctaaataattctgcattacacttcggaatagcaattggctcgttcattggtagtttcgtcattgaaaagtctcatgtacaattcaatgcgtttgtaggaggagtaatagttcttatcggtctgatcacatcgattattgctttaaaaggatataaagataaacaatcgctagtttcttcatctaaataa

SEQ ID NO: 820 - protein, 390 aa, Oceanobacillus iheyensis HTE831
MDKRVYLLMTISFVVGMVELIISGILDLVANDLNVSMGQAGLLITIFSLVFAISAPILLFLTASIERKKLTLIALSTFFIGNLIAIFSFSYTMLFISRIISAASASILIVLCIMMASSIVQPEYRGRAIGIVSMGVSGSLVFGIPFGLILGEAFGWRAPFVLIAILTVLSMVGVYFFMTKIYTSEKPLPLQSQLKMVSSKSVLFALLTTLFVLAGHTTLYAYLNPFVSEMMNMNGFWLSVVYLAFGIAAVSGGGAGGALSDHFGPKRTILTVIILFILAIISLPFATFNIIIFFVVLIIWGMMSWAVSPPVQSFLIETAPKNADILVSLNNSALHFGIAIGSFIGSFVIEKSHVQFNAFVGGVIVLIGLITSIIALKGYKDKQSLVSSSK

SEQ ID NO: 821 - DNA, 1191 bp, Oceanobacillus iheyensis HTE831
  CDS (1)..(1191): transl_table=11
atgacagagaaattctctcgaaataccattctagctatcttcatgattggtacattcgcgataggaatgacagaatatgttgttactggattactaacacaattcgctacagacctagatgtttcagtgtccactaccggacttctattaagtatttatgctatcagcgttgctgtattcggtcctatcttacggatgattacagtaaagtactcaccaaaacccttattaattggtttaatatctatatttattataagtaatatcgtcgcagcactagctccaaattttgacgtgctactactatcaagattgctatcagcgaccatgcatgcaccttttttcggtttaaccatgagtcttgctgttgaaatttctaaaccagaaaaaagaacgagtgccattgctgcagttcaaggtgggttaaccatcgctgtaatgctaggtgttccattcggctcgtttgttggagggtattttgattggagacttgttttttggatcattgccttattaggtgcgattaccttaattggtttaattatagttacacctaacattaagccagcagtacaaccgaaacttagaaaagaattaaccgtattaaaaaataaaaatgtattaatgatcattgcggttattgtctttggtttttcaggtgtcttcactgcatatacgtttaaggaacctatgttaagagaacttgctggttttggcgtgacaggtgtcacaatcggactgtttttatttggcttaggagcagttattggcaactttgtatcaggaaggattcagccatctaaattaactgagcgtttaatctttaccttagcagcacttggtgccgtgctatttttatttacatttttattatctgtgccatttctcgcttatgttgcatgttttctctttggagcaggtacttttggaaccactccaattctaaattcaaagattatcctagctgctacagaagcaccagctctatctggtaccatagccgcttctgtatttaatctggcaaattctattggagcaaccttgggaagtctactattaaattcaggattttccttttcacaaatcacatttgttgcagccggaatgatcttattcgggatgttattgatgataataacgcataaaatagaagataaatcattattttctattaccacagataacaactag

SEQ ID NO: 822 - protein, 396 aa, Oceanobacillus iheyensis HTE831
MTEKFSRNTILAIFMIGTFAIGMTEYVVTGLLTQFATDLDVSVSTTGLLLSIYAISVAVFGPILRMITVKYSPKPLLIGLISIFIISNIVAALAPNFDVLLLSRLLSATMHAPFFGLTMSLAVEISKPEKRTSAIAAVQGGLTIAVMLGVPFGSFVGGYFDWRLVFWIIALLGAITLIGLIIVTPNIKPAVQPKLRKELTVLKNKNVLMIIAVIVFGFSGVFTAYTFKEPMLRELAGFGVTGVTIGLFLFGLGAVIGNFVSGRIQPSKLTERLIFTLAALGAVLFLFTFLLSVPFLAYVACFLFGAGTFGTTPILNSKIILAATEAPALSGTIAASVFNLANSIGATLGSLLLNSGFSFSQITFVAAGMILFGMLLMIITHKIEDKSLFSITTDNN

SEQ ID NO: 823 - DNA, 1191 bp, Bifidobacterium longum NCC2705
  CDS (1)..(1191): transl_table=11
atgaagaagagtctgcttgcactggcttcgggcgcgttcattctcggtgccgccgagttcgtgatgatgggcattctgccgcaggccgcggccgccaccggcgtggacatccccaccgcaggccattacatttccgcgtatgcgatcggcgtgtgcttcggcacactgattctggtattcggccgcaaggtgccgccgaaggacctcatcatattgtttatggtgattgccttggtgggcaatctggcttccgcattctccgtcaatgccgccatgctggtcgtcgcacgattcgtcgccggcctgccgcacggcgcattcttcggcacagccacactcatcgccaagactctggcggaggaaggcaaggaggcgcaggccgtatccgtgatggtcaccggacagaccgtggccaatatgctcggcgtaccggcgggcaccttgatggccgagttcctttcctggcgtcttgccttcggcattttggccgcttgggcggcaatgacgattgtgctggcgtcggcgtggattccgtacgttgcaccgatcaaggacgcaggcatcgccggtcagttcaagttcctcacccgccgtggcccgtgggtgattttggccgccgtgttcaccggcaatgccggtgtgttctgctggtggagctacgtctccccttggctgcagaaaaccggcggatggtcgtcttccctggtgccgatgctgatgatgcttgccggctttggtatggtcatcggcggtctgcttggaggtcgtctgaccgaccattggaggcatgccggcgcggccgcaataggtcagtccatctcctgcctcggcttgttgctggtgcttatcactccgggtaatcagccgatgaccgctgtactgacgttctggatcgccatcggattgttctttacttccgctccacagcaattgctgatgaccgaagccggccagggcggcggcgagctgatcgccggcgcggctgtacaggtggcgtttaacttcggcaatgccatcggctcgattgtcggcggcgcgatgctcaccaccttctcgatgaactatcgctataccggcctgggcggtatgccgctggctctgcttgccgtagggctgctggccttctactcgtggcgctgcgaaaccgataccgacgccattcaccgcttgcgcgaaaccaaggtggactga

SEQ ID NO: 824 - protein, 396 aa, Bifidobacterium longum NCC2705
MKKSLLALASGAFILGAAEFVMMGILPQAAAATGVDIPTAGHYISAYAIGVCFGTLILVFGRKVPPKDLIILFMVIALVGNLASAFSVNAAMLVVARFVAGLPHGAFFGTATLIAKTLAEEGKEAQAVSVMVTGQTVANMLGVPAGTLMAEFLSWRLAFGILAAWAAMTIVLASAWIPYVAPIKDAGIAGQFKFLTRRGPWVILAAVFTGNAGVFCWWSYVSPWLQKTGGWSSSLVPMLMMLAGFGMVIGGLLGGRLTDHWRHAGAAAIGQSISCLGLLLVLITPGNQPMTAVLTFWIAIGLFFTSAPQQLLMTEAGQGGGELIAGAAVQVAFNFGNAIGSIVGGAMLTTFSMNYRYTGLGGMPLALLAVGLLAFYSWRCETDTDAIHRLRETKVD

SEQ ID NO: 825 - DNA, 1182 bp, Shigella flexneri 2a str. 301
  CDS (1)..(1182): transl_table=11
atgaaaaaagtcattttatctttggctctgggcacgtttggtttggggatggccgaatttggcattatgagcgtgctcacggagctggcgcataacgtaggaatttcgattcctgctgccgggcatatgatctcgtattatgcactggtggtggtggtcggtgcgccaatcatcgcactcttttccagccgctactcactcaaacatatcttgttgtttctggtggcgttgtgcgtcattggcaacgccatgttcacgctctcttcgtcttacctgatgctcgccattggtcggctggtatccggctttccgcatggcgcattttttggcgtcggagcgatcgtgttatcaaaaattatcaaacccggaaaagtcaccgccgccgtggcggggatggtttccgggatgacagtcgccaatttgctgggcattccgctgggaacgtatttaagtcaggaatgctggcgttacacctttttattgatcgctgtttttaatattgcggtgatggcatcggtctatttttgggtgccagatattcgcgacgaggcgaaaggaaatctgcgcgaacaatttcactttttgcgcagcccggccccgtggttaattttcgccgccacgatgtttggcaacgcaggtgtgtttgcctggttcagctacgtaaagccatacatgatgtttatttccggtttttcggaaacggcgatgacctttattatgatgttagttgggctagggatggtgctgggaaatatgctaagtggcaggatttcaggacgttattcaccactgcgcattgcagcagtgactgactttatcattgtactggcactgctgatgctctttttctgcggcggcatgaaaacaacgtcgcttatttttgcttttatttgttgcgcgggattatttgccctttcagcacctctgcaaatattgttactgcaaaatgccaaaggaggagagttattaggtgccgcaggtgggcaaatagcgtttaacctcggtagcgccgtcggcgcatattgcggaggtatgatgctgacgctggggctggcatataattacgtggcgctgcctgccgccctgctttcgtttgctgcgatgtcatcgttgctgctgtatggtcgctataagcgccagcaagaggcggatagtccggtgctggcgaaaccactggggtag

SEQ ID NO: 826 - protein, 393 aa, Shigella flexneri 2a str. 301
MKKVILSLALGTFGLGMAEFGIMSVLTELAHNVGISIPAAGHMISYYALVVVVGAPIIALFSSRYSLKHILLFLVALCVIGNAMFTLSSSYLMLAIGRLVSGFPHGAFFGVGAIVLSKIIKPGKVTAAVAGMVSGMTVANLLGIPLGTYLSQECWRYTFLLIAVFNIAVMASVYFWVPDIRDEAKGNLREQFHFLRSPAPWLIFAATMFGNAGVFAWFSYVKPYMMFISGFSETAMTFIMMLVGLGMVLGNMLSGRISGRYSPLRIAAVTDFIIVLALLMLFFCGGMKTTSLIFAFICCAGLFALSAPLQILLLQNAKGGELLGAAGGQIAFNLGSAVGAYCGGMMLTLGLAYNYVALPAALLSFAAMSSLLLYGRYKRQQEADSPVLAKPLG

SEQ ID NO: 827 - DNA, 1089 bp, Shigella flexneri 2a str. 301
  CDS (1)..(1089): transl_table=11
atgacaacaaacactgtttcccgcaaagtggcgtggctacgggtcgttacgctggcagtcgccgccttcatcttcaacaccaccgaatttgtccctgttggcctgctctctgacattgcgcaaagttttcacatgcaaaccgctcaggtcggcatcatgttgaccatttacgcatgggtagtagcgctaatgtcattgccttttatgttaatgaccagtcaggttgaacggcgcaaattactgatctgcctgtttgtggtgtttattgccagccacgtactgtcgtttttatcgtggagctttaccgttctggtgatcagtcgcattggtgtggcttttgcacatgcgattttctggtcgattacggcgtctctggcgatccgtatggctccggccgggaagcgggcacaggccttgagtttaattgccaccggtacagcactggcgatggtcttaggtttaccgctcgggcgcattgtggggcagtatttcggctggcgaatgaccttcttcgcgattggtattggggcgcttgttacccttttgtgcctgattaagttacttcccttactgcctagtgagcattccggttcattgaaaagcctcccgctattgttccgccgcccggcattgatgagcatttatttgttaactgtggtggttgtcaccgcccattacacggcatacagctatatcgagccttttgtgcaaaacattgcgggattcagcgccaactttgccacggcattactgttattactcggtggtgcgggcattattggcagcgtgattttcggtaaactgggtaatcaatatgcgtctgcgttggtaagtacggcgattgcgctgttgctggtgtgtctggcactgctgctacctgcggcgaacagtgaaatacacctcggggtgctgagtattttctgggggatcgcgatgatgatcatcgggcttggtatgcaggttaaagtgctggcgctggcaccagatgctaccgacgtcgcgatggcgctattctccggcatatttaatattggaatcggggcgggtgcgttggtaggtaatcaggtgagtttgccctggtcaatgtag

SEQ ID NO: 828 - protein, 362 aa, Shigella flexneri 2a str. 301
MTTNTVSRKVAWLRVVTLAVAAFIFNTTEFVPVGLLSDIAQSFHMQTAQVGIMLTIYAWVVALMSLPFMLMTSQVERRKLLICLFVVFIASHVLSFLSWSFTVLVISRIGVAFAHAIFWSITASLAIRMAPAGKRAQALSLIATGTALAMVLGLPLGRIVGQYFGWRMTFFAIGIGALVTLLCLIKLLPLLPSEHSGSLKSLPLLFRRPALMSIYLLTVVVVTAHYTAYSYIEPFVQNIAGFSANFATALLLLLGGAGIIGSVIFGKLGNQYASALVSTAIALLLVCLALLLPAANSEIHLGVLSIFWGIAMMIIGLGMQVKVLALAPDATDVAMALFSGIFNIGIGAGALVGNQVSLPWSM

SEQ ID NO: 829 - DNA, 1170 bp, Shigella flexneri 2a str. 301
  CDS (1)..(1170): transl_table=11
atgaaaattaactatccgttgctggcgctggcgattggcgcgtttggtatcgggacaacggagttctcgccaatgggcttgttgcccgtcattgcgcgcggtgtggatgtctcgattcccgctgccggaatgttaatcagtgcctatgcagttggcgtaatggtgggcgcgccgctgatgacgcttctactttctcatcgtgcccgccgcagtgcgttgattttcctgatggcaattttcacgctaggcaacgttctttccgccatcgcgccggattatatgaccctgatgctttcacgtattttgaccagcctgaatcacggagcattttttggtttgggttcagtcgtggccgcaagcgtggtgccaaaacataaacaggccagcgcagttgccactatgtttatggggttaaccctggcaaatatcggtggcgtgccggcggcgacctggttgggtgaaaccatcggctggcggatgtcatttctggcaacggcggggctgggagtgatttcaatggtaagtctgttcttctcattacctaaaggtggtacaggggcacgacctgaagtgaaaaaagagctggcggtattaatgcgtccgcaggtgctgtctgcattgctgacgacggtactgggagctggtgcaatgtttaccctctacacctatatctctccggtactgcaaagtattacccacgcaacaccggtgttcgtcacggcaatgctggtgctgattggtgtcggattctctatcggtaactatctcggcggcaaactggcagatcgttcagttaacggcacgttgaaaggctttttgttgctgctgatggtgattatgctggcaatcccgttcctggcccgcaatgagttcggcgcagctattagcatggtggtgtggggcgcagcaacctttgcggttgtacctccgttacagatgcgcgtgatgcatgtcgccagtgaagcgccaggtctgtcttcatcagtcaatattggtgcctttaatcttggaaatgcgctgggagcagctgctggtggtgcggtaatttccgctgggctgggatacagctttgtgccggtgacgggggcgattgtcgcgggactggcattattgctggtgtttatgtcagccagaaaacaacctgaaacagtttgcgttgctaacagctaa

SEQ ID NO: 830 - protein, 389 aa, Shigella flexneri 2a str. 301
MKINYPLLALAIGAFGIGTTEFSPMGLLPVIARGVDVSIPAAGMLISAYAVGVMVGAPLMTLLLSHRARRSALIFLMAIFTLGNVLSAIAPDYMTLMLSRILTSLNHGAFFGLGSVVAASVVPKHKQASAVATMFMGLTLANIGGVPAATWLGETIGWRMSFLATAGLGVISMVSLFFSLPKGGTGARPEVKKELAVLMRPQVLSALLTTVLGAGAMFTLYTYISPVLQSITHATPVFVTAMLVLIGVGFSIGNYLGGKLADRSVNGTLKGFLLLLMVIMLAIPFLARNEFGAAISMVVWGAATFAVVPPLQMRVMHVASEAPGLSSSVNIGAFNLGNALGAAAGGAVISAGLGYSFVPVTGAIVAGLALLLVFMSARKQPETVCVANS

SEQ ID NO: 831 - DNA, 1356 bp, Shigella flexneri 2a str. 301
  CDS (1)..(1356): transl_table=11
gtggataagacgttcacgccgcatccggtaatctttgccctgttccgtttcgatcttaactccagctcaagcaacaccgtaaaagttgcaaaaacgttaaattcgtcacacatttcaatgttaaagtggtcggcttttcccctgaaacatgccacgggtaacaccatgagtgaatttattgccgaaaaccgcggcgcggatgccatcacccgaccgaactggtcagccgttttctcggtggcgttttgtgtcgcctgtctgattatcgttgagtttttgcccgtcagtttgttgacgccaatggcccaggatttaggcatttcggaaggggttgccgggcaatcggtgaccgtgaccgcctttgtggcaatgtttgccagtttgtttattacccagacaattcaggccactgaccgccgctacgttgttattttgtttgccgttttgctgacgctctcctgcttgctggtttcctttgctaactcattcagtttgcttttaatcggtcgtgcctgtctggggctggcgctgggcgggttctgggcgatgtcggcgtcgctgaccatgcgtctggtaccgccgcgtacggtgccgaaggcgctgtcggtgatcttcggcgcggtttctattgcgctggtgattgccgcgccgttgggcagttttttaggcgagcttatcggttggcgcaatgtctttaatgcggcggcggtgatgggcgtgctgtgtattttctggattatcaaatcattgccttcactgccaggcgaaccctcgcatcagaaacaaaatactttccgcttattacaacgtccgggtgtgatggcagggatgatcgccatcttcatgtctttcgccgggcagtttgctttcttcacgtatattcgcccggtgtatatgaacctggcgggattcggcgtggatggcttaacgctggtgctgttgagttttggtatcgccagctttattggtacgtcgctttcgtcgttcattcttaaacgttcggtaaaactggccttagcaggcgcgccgttaatactggctgtgagtgcgttggtactgacgttgtggggaagcgataaaatcgttgctaccggcgtggcgattatctgggggctaacttttgcattggttcccgtcggctggtcaacgtggatcacccgctcgctggccgatcaggcagaaaaagccgggtctattcaggtggcggttattcagcttgctaatacctgtggcgcggcaatcggcggttatgcgctggataatattggtctgacttcgccgttgatgttgtccggcacattgatgttgctgactgcattgttggttactgcaaaggtgaaaatgaagaaatcctga

SEQ ID NO: 832 - protein, 451 aa, Shigella flexneri 2a str. 301
MDKTFTPHPVIFALFRFDLNSSSSNTVKVAKTLNSSHISMLKWSAFPLKHATGNTMSEFIAENRGADAITRPNWSAVFSVAFCVACLIIVEFLPVSLLTPMAQDLGISEGVAGQSVTVTAFVAMFASLFITQTIQATDRRYVVILFAVLLTLSCLLVSFANSFSLLLIGRACLGLALGGFWAMSASLTMRLVPPRTVPKALSVIFGAVSIALVIAAPLGSFLGELIGWRNVFNAAAVMGVLCIFWIIKSLPSLPGEPSHQKQNTFRLLQRPGVMAGMIAIFMSFAGQFAFFTYIRPVYMNLAGFGVDGLTLVLLSFGIASFIGTSLSSFILKRSVKLALAGAPLILAVSALVLTLWGSDKIVATGVAIIWGLTFALVPVGWSTWITRSLADQAEKAGSIQVAVIQLANTCGAAIGGYALDNIGLTSPLMLSGTLMLLTALLVTAKVKMKKS

SEQ ID NO: 833 - DNA, 1269 bp, Corynebacterium efficiens YS-314
  CDS (1)..(1269): transl_table=11
atgcacgactcaggaaactcccccgtcacggtggtcgcccacacagaacccgccggtggtggtaccggtccgcgcctccagcgtcgccgggtgccccgccagacggagatctcctccacgcgccgctacatcgtcatgaccgccctcgccctgggcggtttcggcatcggtgtcaccgagttcgtctccatggggttgctgtcgatgatcgcccaggatttccccatcacggaggaccaggccggtctgatcatcaccctctacgctctcggtgtggtgatcggtgcacccctgatcaccgccttcaccgggcgcattccccggcgtcgcctgctgctcatcctcatggcggcgttcgtcgtgggcaatgcactgtcgatattcgactcctcctacacgatgctgctcgtggcgcgtttcctcgccggtctgccgcacggtgcgtacttctccgtggcgggactctcggccgcctccatggcaccggagggtcagcgcggccgggccgtggcattcgtgggcatgggcctgtcggtggccaccgtcatcggtgtgcccgccgcacagctgctgggcaccagcctcggatggcatgcggcctacgggctggtcaccgccatcggcgtggtgaccctggtgtcgctgtggttcctcatgccgcacatgtcccggatggccgccaccagccccctgaccgaactcggcgcgttgaagaagggccaggtgtggctgacgctggccatcggctccgtcggtttcggcggcatgttcgccgtgtacacctacatctcctggaccatgactgaacaggccgggatgccggactccctgatctgggtggtgctcatggcctacggcgtgggcatggtcatcggcaactatgtcggtggccgactggcggactggaatgtcgaccgcggcatcctgctcgcgctcatctgcatcgtggtggtgctcatcggtttctacttcacctcccaccacccggtggccggcaccatcaacttcggtctggtcggtttcttcggttccaccctggtgccgtccctgcaggtccgcctcatggatgtcgccggccgggcacagaccctggcggcctccctcaaccactccgccctcaatatcggcaacgcggtgggcgcctccatgggtggtgccgtgatcgccgccggatactcctacagcgcacccgccctggccggcgcgctcctggccacggccgccatcggcatctggttccccatggtgtggctgcgccggcggacataa

SEQ ID NO: 834 - protein, 422 aa, Corynebacterium efficiens YS-314
MHDSGNSPVTVVAHTEPAGGGTGPRLQRRRVPRQTEISSTRRYIVMTALALGGFGIGVTEFVSMGLLSMIAQDFPITEDQAGLIITLYALGVVIGAPLITAFTGRIPRRRLLLILMAAFVVGNALSIFDSSYTMLLVARFLAGLPHGAYFSVAGLSAASMAPEGQRGRAVAFVGMGLSVATVIGVPAAQLLGTSLGWHAAYGLVTAIGVVTLVSLWFLMPHMSRMAATSPLTELGALKKGQVWLTLAIGSVGFGGMFAVYTYISWTMTEQAGMPDSLIWVVLMAYGVGMVIGNYVGGRLADWNVDRGILLALICIVVVLIGFYFTSHHPVAGTINFGLVGFFGSTLVPSLQVRLMDVAGRAQTLAASLNHSALNIGNAVGASMGGAVIAAGYSYSAPALAGALLATAAIGIWFPMVWLRRRT

SEQ ID NO: 835 - DNA, 1188 bp, Pseudomonas putida KT2440
  CDS (1)..(1188): transl_table=11
atgactgctcaaacaatgagacccggccgcgtgctcttcgcgttggccattggtgcctttggcatcggcactaccgagttcaccccgatggggctgctgccggtcatcgcccagggcgtggaggtgagcatccccagcgccggcatgctgatcaccgcctatgccattggcgtgatggtcggcgcgccgatcatgaccctgctgttcagccgctttgggaagcgcgctgcgctgatggcgctgatggccatcttcacccttggcaacctgctgtcgtcactgtcgccggactactacaccctgctcgcctcgcgactggtcaccagcctcaaccatggtgcgttcttcggtctgggagccgtggtggcagccagcgtggtgcccaaggagaaacaggccagcgccgtggccaccatgttcatgggcctgacgatcgccaacatcggcggcgtgccggccgccacctggatcggccagcagattggctggcgcatggcatttgccggtaccgccgtactcggcctgctggccatggccgcactgtggtacgccctgcccaagggtgaacgcggcagcgtgccgcatgtgcgcaaggaactggcggtcattgcccgccccagcgtgctgctggcaatggccaccaccgtgctcggtgccggtgccatgttcaccttgtacacctacgtggcgccggtgctggccgaactgaccggtgcctcggacggcttcgtaaccttgggactggtactgatcggggttggcttcacccttggcaacagcctgggtggccgcctggccgactggtcgctggatggcgcggcgaagatcttcctcgccgtgctggcgctgatcatgctggcgatgcccctggtactgggtagccacatcggcgctgccatcgccctgctggtctggggcatgttcaccttcgccgtggtaccgccgctgcaaatgcgcgtcatgactgccgccatcgaggcgccaggcctggcgtcgtcgatcaacgtgggtgcgttcaacctgggtaacgccgtgggcgcggcgctgggtggtgcggttatcagcctgaacctgggctacgccgccgtgccgatggccggaggtgtgctggcagctgcggggctgttgctggtatggctgggcgggcgccacaaggtcgccggcaagaccgcagccgatatggcctga

SEQ ID NO: 836 - protein, 395 aa, Pseudomonas putida KT2440
MTAQTMRPGRVLFALAIGAFGIGTTEFTPMGLLPVIAQGVEVSIPSAGMLITAYAIGVMVGAPIMTLLFSRFGKRAALMALMAIFTLGNLLSSLSPDYYTLLASRLVTSLNHGAFFGLGAVVAASVVPKEKQASAVATMFMGLTIANIGGVPAATWIGQQIGWRMAFAGTAVLGLLAMAALWYALPKGERGSVPHVRKELAVIARPSVLLAMATTVLGAGAMFTLYTYVAPVLAELTGASDGFVTLGLVLIGVGFTLGNSLGGRLADWSLDGAAKIFLAVLALIMLAMPLVLGSHIGAAIALLVWGMFTFAVVPPLQMRVMTAAIEAPGLASSINVGAFNLGNAVGAALGGAVISLNLGYAAVPMAGGVLAAAGLLLVWLGGRHKVAGKTAADMA

SEQ ID NO: 837 - DNA, 1203 bp, Pseudomonas putida KT2440
  CDS (1)..(1203): transl_table=11
gtgtttcgacgtggttgcagaccatcgagatggggatgtcataggcttgctcgggatgctcctggcgcagcggccaggtttccagcttgccgttgctggggaagcgataatgcaggcaggtatgcgccggcgggtctgctcgaccagatcgccgatggcatgcacatcagccaggccatggctgggcaatgggtcacggcgtatgccttgggctcgttactgaccgccatcccgttggtgacgttgacccaaggctggtatcggcgccgggcgctgttgctggcgatcatcggcttcgtgctgttcaacgggctgacggccttgtcgaactccaacacgctgaccctggtgctgcgctttttcacgggggctgcggccggcctggcatggggcctgattgctggccatgcccggcgcatggtgccggtgccgttgcagggccgggccatggcgctggccatgcttgggcagccgattgccttgtcgctcggcttgccgattgcgacatggctgggagcggggctgggctggcgcgcgacgttcgtggtcgtcacgctggtggcgtcgcagctggtggtgtgggtgttgcgatccgtgccggactacccggggcaggctgccggcaagcgcccggcggccatgcaggtattgcgcacgccaggggtgttgatcgtattgctggtgatcctcacctggatccttggccataacattctctacacctatatcgtgccgttgctggcggcggctggcatggctgcggacattggcccggtgctgatggtgtttggtctgtcggcgctggccgggatcggcctggtagggctgctggtcgaccggcacctgcgcaagctggtgttgctgagcctggccggttttgccttggccacgctggcattggggcaggcatcgtcgtggcttgtgtacctgagcatcgccttgtggggaatgacctatggcggcgccccgaccctgctgcagacagcgtgcgccgacgccgcaggccagggtggtgatgtggcgcagtcgatgctggtgacggtgtggaactgcgccattgctctgggcggaatcattggcggattgttgctggctggggccggcgtggcgtggtttggcggggtagtgctggggttgatcgccttggcctggctgctggccgtggccgggcggggaagcggttttgtggcggggaggcgctaa

SEQ ID NO: 838 - protein, 400 aa, Pseudomonas putida KT2440
MFRRGCRPSRWGCHRLARDAPGAAARFPACRCWGSDNAGRYAPAGLLDQIADGMHISQAMAGQWVTAYALGSLLTAIPLVTLTQGWYRRRALLLAIIGFVLFNGLTALSNSNTLTLVLRFFTGAAAGLAWGLIAGHARRMVPVPLQGRAMALAMLGQPIALSLGLPIATWLGAGLGWRATFVVVTLVASQLVVWVLRSVPDYPGQAAGKRPAAMQVLRTPGVLIVLLVILTWILGHNILYTYIVPLLAAAGMAADIGPVLMVFGLSALAGIGLVGLLVDRHLRKLVLLSLAGFALATLALGQASSWLVYLSIALWGMTYGGAPTLLQTACADAAGQGGDVAQSMLVTVWNCAIALGGIIGGLLLAGAGVAWFGGVVLGLIALAWLLAVAGRGSGFVAGRR

SEQ ID NO: 839 - DNA, 1227 bp, Pseudomonas putida KT2440
  CDS (1)..(1227): transl_table=11
ttgtctgcggagaagcggtttccacccatgaacggacccatacccacacacctgccgcccacaacgggcagcggcagctggctgagcgtcatcgccctggccttggcggccttcattttcaacaccaccgagttcgtcccggtggccctgctcagtgacattggccgcagcttcgacatgagcactgcccaggtcggcctgatgctgaccatctacgcctggatcgtggcactggcctcgttgcccatgatgttgctgacccgcaacatcgaacggcggcgtctgctgctgttcgtgttcctggtgttcattgtcagccacttgctgtcctggctttcgcaaagcttcgccatgctgctggtcagccgcatcggcattgccctggcgcatgcggtgttctggtccatcaccgcctcgctggcggtgcgtgtggcgccgccgggccagcaggccaaggcgctgggcctgctggccaccggtactaccctggccatggtcctgggcatcccgctgggccgtgtggtgggcgaggcactgggctggcgtatcacgttcctgagcattgccggggtagcgctagccaccatgctttgcctgatcaaatcgctgccgctgctgcccagccagaactccggttcgttgcgcagcctgccggtcctgttcaagcgcccggcactggtcattacctacttgctggtgacgctggtcattaccgcgcagttcacggcctacagctatatcgagccgttcgccctgcacgtagcgcagatcggcggcgaccgcaccacgctgttgctgctgttgttcggcggtgccggggtttttggttcattgttgttcagccgttacagcgaacgcttcccgcatggcttcctggtaggttcgatcggggtactcgccgcgtgcctgttgctgatgttgccgctgtcgggcaacttctatgtgtttgcagtgctgagcatgttctggggcgtggcaattctcagcttcagcctggcgctgcagtccaagaccctgaagctggcgtccgacgccaccgatgtggccatggcgctgttctcgggtatctacaacatcggcattggcggtggtgcgctgctgggcagtatcgtcagcagccagatggatgtggcggatatcggcctggtgggcggcagcgtggcagtggtcgggctggtactggccgttgccagtacccggcgctttcgcgaggcgttgacacgttga

SEQ ID NO: 840 - protein, 408 aa, Pseudomonas putida KT2440
MSAEKRFPPMNGPIPTHLPPTTGSGSWLSVIALALAAFIFNTTEFVPVALLSDIGRSFDMSTAQVGLMLTIYAWIVALASLPMMLLTRNIERRRLLLFVFLVFIVSHLLSWLSQSFAMLLVSRIGIALAHAVFWSITASLAVRVAPPGQQAKALGLLATGTTLAMVLGIPLGRVVGEALGWRITFLSIAGVALATMLCLIKSLPLLPSQNSGSLRSLPVLFKRPALVITYLLVTLVITAQFTAYSYIEPFALHVAQIGGDRTTLLLLLFGGAGVFGSLLFSRYSERFPHGFLVGSIGVLAACLLLMLPLSGNFYVFAVLSMFWGVAILSFSLALQSKTLKLASDATDVAMALFSGIYNIGIGGGALLGSIVSSQMDVADIGLVGGSVAVVGLVLAVASTRRFREALTR

SEQ ID NO: 841 - DNA, 1176 bp, Pseudomonas putida KT2440
  CDS (1)..(1176): transl_table=11
atgcgtatcaatccaccgcttgtcgcactcgccatcggtgccttcggcatcggcgttacagagtttgcccccatgggcatgttgcccagtatcgctaccgacctcggtgtttccattcctgctgcggggctgctggtcagtgcctatgccatcggcgtgctgatcggcgcgccgctgatgaccctggccacggtgaagatcccgcgccgttacctgttgatcgggctgatggccattttcaccttgggcaacctgatgtcggccctggccagcgactacgccagcctgctggtggcccgcgtggtcacttcactcaaccacggcgccttctttggcatcggctcgatcgtcgcggccagtgtggtgccgcccgagaagcgcgccggggccgtggctgcaatgttcatgggtttgaccctggccaccatcggcggcgtgccgttggcgacctggttgggtgaaatgctgggttggcgcacggcgttctggggtattgccgggcttggcctggtggcgatgaccacactctggtacgcactgcccaatgttgcgtcgcccaagggcgagggtgccatggccgagatccgtgtgctgggccgcaggccggtactggcggccttgttgctgaccgtggtgggctccagcgccatgttcacggtgttcacctacattgcgccgatcctgcagcatgaagcggcggcgtccacccccttcgtgacggccatgctggtgctgttcggtgtcggcctgaccttgggcaacgtgtggggtggcaaggcggcggaccgctcgatcgatcgcactctgatcctgtcactggctgggctgattgccgtgctgctggtgtttccgctggtactggactggccgctgccgaccgccttggcgatcctggtctggggtgcggccagctttgccctggtgccgccgctgcaaatgcgggtcatggaagcggccaaggatgcccccaacctggcctctgcggtgaacattggcgcgttcaacctgggcaatgcgatcggtgcggcgctgggcggcgcagtgatcaatgcggggctgggctacccggcaatttccctggcgggggctgcgatggctgccctggggctggtactggtgctgctgtttgcctggcgtgggcgaggggtggtagcaggggggcaggttgcgctgtag

SEQ ID NO: 842 - protein, 391 aa, Pseudomonas putida KT2440
MRINPPLVALAIGAFGIGVTEFAPMGMLPSIATDLGVSIPAAGLLVSAYAIGVLIGAPLMTLATVKIPRRYLLIGLMAIFTLGNLMSALASDYASLLVARVVTSLNHGAFFGIGSIVAASVVPPEKRAGAVAAMFMGLTLATIGGVPLATWLGEMLGWRTAFWGIAGLGLVAMTTLWYALPNVASPKGEGAMAEIRVLGRRPVLAALLLTVVGSSAMFTVFTYIAPILQHEAAASTPFVTAMLVLFGVGLTLGNVWGGKAADRSIDRTLILSLAGLIAVLLVFPLVLDWPLPTALAILVWGAASFALVPPLQMRVMEAAKDAPNLASAVNIGAFNLGNAIGAALGGAVINAGLGYPAISLAGAAMAALGLVLVLLFAWRGRGVVAGGQVAL

SEQ ID NO: 843 - DNA, 1227 bp, Pseudomonas putida KT2440
  CDS (1)..(1227): transl_table=11
atgccaagcaacagccaggcccctcgcggccttcccgaacacagccaacaaagcgtgacccagcaatggctggcaatcctctcggtggccgtgggcgctttcgccctggtcaccagtgaattcctcccggtgggggtactcaacgatgtggccagcgacctgggcatcagtgcaggccttgccggcctgatggtgacccttcccggcatcatggctgcgttagccgccccgttgatttccgtaggcgtcggcgcgctggaccggcgctacctgctgatcggcctgacgctgatcatgatcatcgccaacgccatcgtggcctatgccggtgacttcaacctgctgttggtcggccgtgtgctactgggtatcagtattggcggcttctgggcgacagccatcgccctcagcggtcgcctggcacctgacggaatgggcgtagccaaagccaactccatcatcatggcgggcgtaaccctggcgacggtagtgggcgtgcctgtcggcacctggctgagtggcctgatgggctggcgcatgacgttcctggtcactgcactggtaggcgtaccggtgctgctggcacaggtgttcctgctgccgcggctgatgccggaaaaggccatccgcatccgcgacctgccagcgttgttcatcaacccgcaagcacgggtcggtttgatcgccgtgttgctgatcggcctggcgcactttgctgcgtacacctatgtcgcaccgttcttcaaacagaatgccggctttgacgggcctacgatcggttcattgttgctgctgtatggcgtggccggcttcatgggcaacatcttcgccggctttgctgccaaccgcagcgtgcggcataccctgatgctggtcgcgctcatgatcgcagtcagcaccgccctgttcccgcacttcgccaccggcatgacgggtgccgccatgctgatcgcactatggggctttgccttcggtgcgttcccggcttgcgccaatatctggatgtttgtcgtggcgcccaaagatgtcgaacgtggcatgccgctgttcgtggccatgttccaggtgatcattgccgtgggctcgttcttcggcgggcaagtcgtggaccatatgggcacggcggtactgctgagcctggccacggcgctggtgggctgtggctttgtcaccgtgctggtgctggggcgcaacgtcagcaacgatctggcggcgcagccaggctga

SEQ ID NO: 844 - protein, 408 aa, Pseudomonas putida KT2440
MPSNSQAPRGLPEHSQQSVTQQWLAILSVAVGAFALVTSEFLPVGVLNDVASDLGISAGLAGLMVTLPGIMAALAAPLISVGVGALDRRYLLIGLTLIMIIANAIVAYAGDFNLLLVGRVLLGISIGGFWATAIALSGRLAPDGMGVAKANSIIMAGVTLATVVGVPVGTWLSGLMGWRMTFLVTALVGVPVLLAQVFLLPRLMPEKAIRIRDLPALFINPQARVGLIAVLLIGLAHFAAYTYVAPFFKQNAGFDGPTIGSLLLLYGVAGFMGNIFAGFAANRSVRHTLMLVALMIAVSTALFPHFATGMTGAAMLIALWGFAFGAFPACANIWMFVVAPKDVERGMPLFVAMFQVIIAVGSFFGGQVVDHMGTAVLLSLATALVGCGFVTVLVLGRNVSNDLAAQPG

SEQ ID NO: 845 - DNA, 1185 bp, Pseudomonas putida KT2440
  CDS (1)..(1185): transl_table=11
atgtcagtccaggaacaccccccgctccccagtaaaaacaccgtcgccaagatggaagccgccatggcactgggcagctttgccatcggcaccggcgaattcgccatcatgggcctgatgcccgacattgccagcaatttgcagttgagcgaaccgcaggtgggccatgccatcagcgcgtatgcgctgggggtaatggttggcgccccgacactggccattctcggtgccaaactgctgcgcaagcacatgctgctgctgttgatgctgctgtatgccgtgggcaacctggccactgcctttgccccctcgttcggtggcctggtcgcatttcgtttcatcagcggcctgccccacggcgcctacttcggcattgccgcagtggtggcctcgagcatggtcgccaaggatcagcgcgcgggggccgttgcccgggtgatgatgggcctgaccttggccatgttgctcggcaacccggttgccaccttcctgggccagtacttcggctggcgttcggcattcgtgctggtcggcgcgatcgccctgtgcaccatcgccctggtctggcgtttcgtgccccagcgccacgacgaaacacgcagcgacccgcgcaaggagctccaggcctttgccctaccacaggtatggatggcgctggccatcgcttcgatcggttttgccggcatgttctgcgtgttcagctacctggcaccgaccatgctgcaagtgacccaggtgtcgccacagtggattccgttcggtctggcggcgttcggcgtgggcggtatcgtcggcaacatcgctggcggcaagctgttcgaccgcctgcagttccgcgccgtgggcttggtactgatgtggtcggtcgccgtgctgctgttctttaccttcgccgcccaggcgctgtggagcctgctgctgggcatcggcctggtgggcaccatgatcgccttggcggcaccgctacagatccgcctcatggacattgcccatgaggcgcctagcctggcagcggcgtccaaccatgcggcgttcaacctggccaatgccctggggccgtggctgggaggcatggcgatcactgccggcatgggctggaccagcaccggatacatcggcgccgcgactgcgctggttggcctgggcatttacctggtggcgcggcggatgaaaggcgggcattga

SEQ ID NO: 846 - protein, 394 aa, Pseudomonas putida KT2440
MSVQEHPPLPSKNTVAKMEAAMALGSFAIGTGEFAIMGLMPDIASNLQLSEPQVGHAISAYALGVMVGAPTLAILGAKLLRKHMLLLLMLLYAVGNLATAFAPSFGGLVAFRFISGLPHGAYFGIAAVVASSMVAKDQRAGAVARVMMGLTLAMLLGNPVATFLGQYFGWRSAFVLVGAIALCTIALVWRFVPQRHDETRSDPRKELQAFALPQVWMALAIASIGFAGMFCVFSYLAPTMLQVTQVSPQWIPFGLAAFGVGGIVGNIAGGKLFDRLQFRAVGLVLMWSVAVLLFFTFAAQALWSLLLGIGLVGTMIALAAPLQIRLMDIAHEAPSLAAASNHAAFNLANALGPWLGGMAITAGMGWTSTGYIGAATALVGLGIYLVARRMKGGH

SEQ ID NO: 847 - DNA, 1269 bp, Escherichia coli CFT073
  CDS (1)..(1269): transl_table=11
ttggcctcgctggtcgttatcctgcaatctatcactttattggctacggtgattggtagccgttctggtggttgtgatggtggtatgaaaaaagttattttatctttggctctgggcacgtttggtttggggatggccgaatttggcattatgggcgtgctcacggagctggcgcataacgtaggaatttcgattcctgccgccgggcatatgatctcgtattatgcgctgggggtggtggtcggtgcgcctataatcgcgcttttttccagccgctactcactcaaacatatcttgttgtttctggtggcgttgtgcgtcattggcaacgccatgttcacgctctcttcgtcttacctgatgctcgccattggtcggctggtttccggctttccgcatggtgcattttttggcgtcggcgcgatcgtgttatcaaaaattatcaaacccggcaaagtcaccgccgccgtggcagggatggtttccgggatgacagtcgccaatttgctgggcattccactgggaacgtatttaagtcaggaatttagttggcgttacacctttttgttgatcgctgtttttaatattgcggtgatggcatcggtctatttttgggtgccggatattcgcgacgaggcgaaaggaaaactacgcgaacaatttcactttttacgcagccctgccccgtggttaattttcgccgccaccatgtttggcaacgcaggtgtatttgcctggttcagctacgtaaagccatacatgatgtttatttccggtttttcggaaacggcaatgacctttattatgatgttagtggggctagggatggtgctggggaatgtgctaagtggccggatttcaggacgttattcaccactgcgcattgcggcagtaactgactttattattgtgctggcactgctgatgctctttttcttcggcggcatgaaaacaacgtcgcttatttttgcatttatttgttgcgcgggattatttgccctttcagcaccactgcaaatattgttactgcaaaatgccaaaggcggagagttattaggtgccgcaggtgggcaaatagcgtttaacctcggtagcgccgtcggcgcatattgcggtggtatgatgctgacgctggggctggcatataattacgtggcgctacctgccgccctgctttcgtttgctgcgatgtcgtcgttgctgctgtatggtcgctataagcgccagcaagcggcggatagtccggtgctggcgaaaccagtggggtag

SEQ ID NO: 848 - protein, 422 aa, Escherichia coli CFT073
MASLVVILQSITLLATVIGSRSGGCDGGMKKVILSLALGTFGLGMAEFGIMGVLTELAHNVGISIPAAGHMISYYALGVVVGAPIIALFSSRYSLKHILLFLVALCVIGNAMFTLSSSYLMLAIGRLVSGFPHGAFFGVGAIVLSKIIKPGKVTAAVAGMVSGMTVANLLGIPLGTYLSQEFSWRYTFLLIAVFNIAVMASVYFWVPDIRDEAKGKLREQFHFLRSPAPWLIFAATMFGNAGVFAWFSYVKPYMMFISGFSETAMTFIMMLVGLGMVLGNVLSGRISGRYSPLRIAAVTDFIIVLALLMLFFFGGMKTTSLIFAFICCAGLFALSAPLQILLLQNAKGGELLGAAGGQIAFNLGSAVGAYCGGMMLTLGLAYNYVALPAALLSFAAMSSLLLYGRYKRQQAADSPVLAKPVG

SEQ ID NO: 849 - DNA, 1170 bp, Escherichia coli CFT073
  CDS (1)..(1170): transl_table=11
atgaaaattaactatccgttgctggcgctggcgattggcgcgtttggtatcgggacaacggagttctcgccaatgggcttgttgcccgtcattgcgcgcggtgtggatgtctcgattcccgctgccggaatgttaatcagtgcttatgcagttggcgtaatggttggcgcgccgctgatgacgcttctactttctcatcgtgcccgccgcagtgcgttgattttcctgatggcgattttcacgcttggcaacgtactttccgccatcgcgccggattatatgaccctgatgctttcacgcattttgaccagcctgaatcacggggcattttttggtttgggttcagtcgtggccgcaagcgtagtgccaaaacataaacaggctagcgcagttgccactatgtttatggggttaaccctggcaaatatcggtggcgtgccggcggcgacctggttgggcgaaaccatcggctggcggatgtcatttctggcaacagcggggctgggcgtgatttcaatggtaagtctgttcctctcattacctaaaggtggcgcaggggcgcgacctgaagtgaaaaaagagctggcggtattaatgcgtccgcaggtgctgtctgcattgctgacgacggtgctgggcgctggtgcaatgtttaccctctacacctatatctctccggtactgcaaagcattacccacgccacaccggtgttcgtcacggcaatgctggtgctgattggtgtcggattctctatcggtaactatctcggcggcaaactggcagatcgttcagttaacggcacgttgaaaggctttttgttgctgctgatggtgattatgctggcaatcccgttcctggcccgcaatgagttcggcgcagctattagcatggtggtgtggggagctgcaacctttgcggtcgtaccgccgttacagatgcgcgtgatgcgtgtcgccagtgaagcgccaggtctgtcttcatcagtcaatattggtgcctttaatcttggaaatgcgctgggagcagctgctggtggtgcggtaatttccgctgggctgggatacagttttgtgccggtgatgggggcgattgtcgcgggactggcattattgctggtgtttatgtcagccagaaaacaacctgaagcagtttgcgttgccaacagctaa

SEQ ID NO: 850 - protein, 389 aa, Escherichia coli CFT073
MKINYPLLALAIGAFGIGTTEFSPMGLLPVIARGVDVSIPAAGMLISAYAVGVMVGAPLMTLLLSHRARRSALIFLMAIFTLGNVLSAIAPDYMTLMLSRILTSLNHGAFFGLGSVVAASVVPKHKQASAVATMFMGLTLANIGGVPAATWLGETIGWRMSFLATAGLGVISMVSLFLSLPKGGAGARPEVKKELAVLMRPQVLSALLTTVLGAGAMFTLYTYISPVLQSITHATPVFVTAMLVLIGVGFSIGNYLGGKLADRSVNGTLKGFLLLLMVIMLAIPFLARNEFGAAISMVVWGAATFAVVPPLQMRVMRVASEAPGLSSSVNIGAFNLGNALGAAAGGAVISAGLGYSFVPVMGAIVAGLALLLVFMSARKQPEAVCVANS

SEQ ID NO: 851 - DNA, 1356 bp, Escherichia coli CFT073
  CDS (1)..(1356): transl_table=11
gtggataagacgttcacaccgcatccggtaatctttgccctgttccgtttcgatcttaactccagctcaagcaacatcgtaaaagttgcaaaaacgttaaatgcatcacacatttcaatgttagactggtcggcttttcccctgaaacatgccacgggtaacaccatgagtgaatttattgctgaaaaccgcggcgcgaatgccatcacccgaccgaactggtcagccgttttctcggtggcgttttgcgtcgcctgtctgattatcgttgagtttttgcctgtcagtttgttgacgccaatggcccaggatttaggcatttcggaaggggttgccgggcaatcggtgaccgtgaccgcctttgtggcgatgtttgccagtttgtttattacccagaccattcaggccactgaccgccgctacgttgtcattctgttcgccgttttgctgacgctttcctgtttgctggtttcctttgccaactcattcagtctgctgttaatcggtcgcgcctgtctggggctggcgctgggcgggttctgggcgatgtcggcgtcgctgaccatgcgtctggtaccgccgcgtacggtgccgaaggcgctgtcggtgatcttcggcgcggtttctattgcgctggtgattgccgcgccgttgggcagttttttaggcgagcttatcggttggcgcaatgtctttaatgcggcggcggcgatgggtgtgctgtgtattttctggattatcaaatcactgccttcgctgccaggtgaaccttcgcatcagaaacaaaatactttccgcttattacaacgtccgggagtgatggccgggatgatcgccatctttatgtcctttgccggacagtttgcttttttcacttatattcgcccagtgtatatgaatctggcgggattcggtgttgatggcttaaccctggtgctgctgagttttggtatcgccagctttgtcgggacatcgctttcgtcgtttattctcaaacgttcggtgaaactggccttagcgggcgcaccgtttgtgctcgccctgagcgcgctggtactgacgctgtggggaagctataaaattgttgctactggtgttgcgattatctgggggctgacctttgctttaattcccgttggttggtcaacgtggatcactcgctcattggccgatcaggcagaaaaggctggatctattcaggtggccgttattcagcttgctaacacctgcggtgcggcaatcggcggttatgcgttggataacattggtctgacttcgccgctgatgttgtccggcacattgatgttgctgactgcattgttggtgactgcaaaggtgaaaatgaagaaatcctga

SEQ ID NO: 852 - protein, 451 aa, Escherichia coli CFT073
MDKTFTPHPVIFALFRFDLNSSSSNIVKVAKTLNASHISMLDWSAFPLKHATGNTMSEFIAENRGANAITRPNWSAVFSVAFCVACLIIVEFLPVSLLTPMAQDLGISEGVAGQSVTVTAFVAMFASLFITQTIQATDRRYVVILFAVLLTLSCLLVSFANSFSLLLIGRACLGLALGGFWAMSASLTMRLVPPRTVPKALSVIFGAVSIALVIAAPLGSFLGELIGWRNVFNAAAAMGVLCIFWIIKSLPSLPGEPSHQKQNTFRLLQRPGVMAGMIAIFMSFAGQFAFFTYIRPVYMNLAGFGVDGLTLVLLSFGIASFVGTSLSSFILKRSVKLALAGAPFVLALSALVLTLWGSYKIVATGVAIIWGLTFALIPVGWSTWITRSLADQAEKAGSIQVAVIQLANTCGAAIGGYALDNIGLTSPLMLSGTLMLLTALLVTAKVKMKKS

SEQ ID NO: 853 - DNA, 1176 bp, Staphylococcus epidermidis ATCC 12228
  CDS (1)..(1176): transl_table=11
atgaaagataataaaatgttgttcattatttttatgataggaacatttacagtaggaatggctgaatatgtagtgacaggattacttacacaaatcgctgacgatatgaaggtttctatttcgagtgcaggtttattaattagtgtttatgctattagtgttgcattgatagggcctttaatgcgaatcataacattgaaagttcacgcccaccgtctgttaccgattttagttgcgatttttataataagtaatttagtgggaatgttagcaccgaattttaatgtattgttattatcaagactcatgtctgcggcaatgcatgcgccattcttcggtgtgtgtatgagtgttgctgcgacagtcgcacctcctgctaaaaaaacacaggccattgcacttgttcaggcaggtttaactattgctgtaatgttaggtgtaccattcggatcatttttaggtggctttgcaaattggagagttgtttttggattcatgattgtgttggcaatcattactatgttaggaatgattaaatttgttccaaatgtttctttaagtgcagaagcaaatattagcaaagaattaacagtgtttaagaatccacacattttaattgtgattgcaattattgtgtttggttactctggtgtgtttactacttatacatttatggagccaatgatacgagatttttctccatttaaaattgtaggtttaactgtttgtttatttatgtttggtctaggcggtgtgatagggaatttaattactggtaatgtaccggaagataaattaacaaaaaatttataccttacatttcttttactatttgtaacaatcatactatttgttactgttattcaaaattcaatattagcattaatcatttgcttcttattcggttttggtacatttggtacaacaccgttacttaatagcaaaattatcttaagtgcaaaagaagcaccacttcttgcaagtacgttagctgcttctattttcaatgttgctaattttcttggtgcaatcattggatctatattattatcaatagggttaccttacattcaaattactttgatatctggtgggattatagtgttgggtatgcttcttaatcttgttaatcaactttatgaaaagaaacatatcacatttaatgaatattcatga

SEQ ID NO: 854 - protein, 391 aa, Staphylococcus epidermidis ATCC 12228
MKDNKMLFIIFMIGTFTVGMAEYVVTGLLTQIADDMKVSISSAGLLISVYAISVALIGPLMRIITLKVHAHRLLPILVAIFIISNLVGMLAPNFNVLLLSRLMSAAMHAPFFGVCMSVAATVAPPAKKTQAIALVQAGLTIAVMLGVPFGSFLGGFANWRVVFGFMIVLAIITMLGMIKFVPNVSLSAEANISKELTVFKNPHILIVIAIIVFGYSGVFTTYTFMEPMIRDFSPFKIVGLTVCLFMFGLGGVIGNLITGNVPEDKLTKNLYLTFLLLFVTIILFVTVIQNSILALIICFLFGFGTFGTTPLLNSKIILSAKEAPLLASTLAASIFNVANFLGAIIGSILLSIGLPYIQITLISGGIIVLGMLLNLVNQLYEKKHITFNEYS

SEQ ID NO: 855 - DNA, 1239 bp, Bradyrhizobium japonicum USDA 110
  CDS (1)..(1239): transl_table=11
atgcttttgctgcagcgcggctatctgcgtggctcgtgccatccattggagtcccgcatgcctcccgccgtccttgcgctcaccgccggtgccttcggcatcggcaccaccgaattcatcatcatgggcctgctgctccaggtcgccgccgacatgcatgtctccgtgccgatcgcgggcctcctcatctccggctatgcgctgggtgtgttcgtcggcgcgccggttctgacgctggcgacgcggcggatgccgcgcaaaaccgtattgctggcgctgatggcgatcttcacgctcggcaatgccgcctgcgcgctggcgccgaactacgaattgctgatggcggcgcgggtgctgacctcgctggcccacggcacgttcttcggcgtgggctcggtcgtggccaccggcctcgtcgccgaggacaagcgcgcctcggcgatcgcgaccatgttcatcggcctcacggtcgcaacgctgctgggcgtgcccttcggcgcctggttcggcctgatgctcggctggcgcgcggcgttctgggcggtaacggtcatcggcgtgatcgcctttgccgtggtcgccgcgttcgtgcccggccatgtcggtaacggcgacaagccgatctcgctggctgaagagctcgcggtgctcggccgtccgcaggtgctgctcggcctcgccatgaccgtgttcggctttgccggcctgttcgtcgtcttcacctatatccagccgatcctgacgcgcttcaccggtttttcggaggaagcggtgtcgccgatcctgctggtgttcggcgcgggtcttgcgatcggcaacgtcgcgggcggcaagctcgccgaccgcggcctggcgcgggccctgatcggcactctcgccgcgctcgccatcgtgctgctcggccttgccgcggtgctgtcggtcaagatccccgcgatcgtgctgatcctgctgctcggcatcgccgccttcgcaaccgtcgcgccgctccagctgcgcgtgctggaagccgccggcccgagcggccgcacgctggcctcgagcctcaacatcgccgcgttcaatctcggcaacgcgctgggggcctgggccggcggtgtcaccatcgatcgcgggctcgacctctccgcgttgccgctggtggcggccggaatcaccgcgatcggcctcgtgctggcgctgtggagcctccagctcgatcgcacggcgaccgcagtcgcggcgtgcccggcggaatag

SEQ ID NO: 856 - protein, 412 aa, Bradyrhizobium japonicum USDA 110
MLLLQRGYLRGSCHPLESRMPPAVLALTAGAFGIGTTEFIIMGLLLQVAADMHVSVPIAGLLISGYALGVFVGAPVLTLATRRMPRKTVLLALMAIFTLGNAACALAPNYELLMAARVLTSLAHGTFFGVGSVVATGLVAEDKRASAIATMFIGLTVATLLGVPFGAWFGLMLGWRAAFWAVTVIGVIAFAVVAAFVPGHVGNGDKPISLAEELAVLGRPQVLLGLAMTVFGFAGLFVVFTYIQPILTRFTGFSEEAVSPILLVFGAGLAIGNVAGGKLADRGLARALIGTLAALAIVLLGLAAVLSVKIPAIVLILLLGIAAFATVAPLQLRVLEAAGPSGRTLASSLNIAAFNLGNALGAWAGGVTIDRGLDLSALPLVAAGITAIGLVLALWSLQLDRTATAVAACPAE

SEQ ID NO: 857 - DNA, 1380 bp, Bradyrhizobium japonicum USDA 110
  CDS (1)..(1380): transl_table=11
gtggcgacgttcgctgggctggttcccgttgacgccaccaatgcaggacacatgtcgatatcgcctcaagcgacctcgctccgcgcgaccgcggcctccgcgccccctcacctcgccatcgtcctgttctcgctcgcgatgggcggctttgcgatcggaaccaccgaattcgcatcgatgagcctgctgccgttcttcgccgccgaccttcgggtcgacgagccgaccgcgggacacgcgatcagtgcctacgcgctcggcgtggtgctgggcgcaccgctgatcgccgtgcttggtgcgcgcttcgcccggcgcacgcagctcctggccctgatggccgtgttcgcgctcggcaatgcgctcacctcgcttgcgccggggtttggctggatgatcgcggcccgttttctcgcagggctgccgcatggcgcctatttcggcatcgccgcgctggtcgcagcctcgctcgttcctcaacatcgccgctcgcgggcgatcggccaggtgatgctcggcctgactggcgccacgatcatcggcgtgcccctggccaatctggtcggccagacggtcggctggcgcgccagcttcggcctcgtgtcgctgctggccctgctcacggtcctgctttgcgccctgttcgcgccgcgcgaccaggccggcaggtcggacccgctgcgagagctcgacgccctcagaagcggccgcgtctggatcacgctggcgatcggcgccatcggcttcggcggcatgttcgccgtctatacctacctcgcaacgacattgatcgaggtcaccaaggtcagccccgcggtgattccgttctttctcgccgtgttcggcgtcggcgccacgctcggcaatctgttcgtgccgcgcttcgcggaccgcgccttgatgccgacggcgggcgtcattctcttgttctcggcggtcgcgctgctggtgtttccgcttgcggccggcaatccctggctgctggcgatcgacatcttcgcgatcggcgccggcgtctcgctcggcgccatcctccagacccggctgatggacgtcgcgggcgacgcgcaggcgctcgccgccgcgctgaaccattcggcgttcaacaccgccaacgcgctcggcccgttcctcggcggccttgccattcgcgaggggctgggctggacctccaccgggcccgtcggcgctgcactcgcgcttctcggcttcctgatctggatcgtcgcctctcgcgacgccggatctgcgccggtccagatcacctcagaactcgacgctgctccgctgaagaacgctgccgcaagaccgtcgccaccgctggcgccggatgaccagagccgttcggcttctcacagggatccggtggcaggtgacgcatga

SEQ ID NO: 858 - protein, 459 aa, Bradyrhizobium japonicum USDA 110
MATFAGLVPVDATNAGHMSISPQATSLRATAASAPPHLAIVLFSLAMGGFAIGTTEFASMSLLPFFAADLRVDEPTAGHAISAYALGVVLGAPLIAVLGARFARRTQLLALMAVFALGNALTSLAPGFGWMIAARFLAGLPHGAYFGIAALVAASLVPQHRRSRAIGQVMLGLTGATIIGVPLANLVGQTVGWRASFGLVSLLALLTVLLCALFAPRDQAGRSDPLRELDALRSGRVWITLAIGAIGFGGMFAVYTYLATTLIEVTKVSPAVIPFFLAVFGVGATLGNLFVPRFADRALMPTAGVILLFSAVALLVFPLAAGNPWLLAIDIFAIGAGVSLGAILQTRLMDVAGDAQALAAALNHSAFNTANALGPFLGGLAIREGLGWTSTGPVGAALALLGFLIWIVASRDAGSAPVQITSELDAAPLKNAAARPSPPLAPDDQSRSASHRDPVAGDA

SEQ ID NO: 859 - DNA, 1170 bp, Bradyrhizobium japonicum USDA 110
  CDS (1)..(1170): transl_table=11
atgcaaaaatcccccgccgccggccgtttcgcgccaaccgccttcatgctcggcaatctcgtcaccggctgctcggtgctggcgccggcggggatgctgccggaattgtcggcggggctcggcatcagcattcacgcggccgggctcctgatcaccttcggcgcgatcacgctgtgcatcggttcgccgctgacggcctggctcacgagccgcatcgaacggcggacgctgcttgcgaccacgctggcggtgctcgccttcggcaatctcgcctcggcgttcgcgcccgactatgcgagcctcctcgtcatccgcctggtgatgctcgcggtcggcgcgctctatacgccgcaggcggccggcacggcggcgctgatcgtgccggcggagcggcgcggcagcacgattgcctatatctttctcggttggtcgctggcggccgccgtcggcctgccgctgatcaccttcatggccagccgctacggctggcgcgcggcctatggcgggatcggcgcgctcggctgcatcagcttcttgttgttgctgctgcgcctgcctgccggactgaagggcacgccggtggacctgaagacctggagcgcggtcggccgcgacaggacggttctgctgctgcttgcgatcaccatgctgcaaatgtccgggcagttcgtggtgttcaccttcatgggcccgctgctcaagaagctgaccggggcggggccggacgcaatcggcatggtgttcggcatctacggcctctgcggtttcctcggcgtcgtgatcgcgacccgcatcgtcgatacctggggtccctatcgcacctcgctgctgttcacctgcctgctgcttgcgggcattgcgggctgggcgctcggcgccggcacgttcgtcctgatggcaggtgccgccgcgatctggggcctcggctttgcctcgaccaattcgatgcagcaggtgcggctggtcgcgaccgcgccgccgcttgcgtccgccaccgtcgcgctcaacacctccgtcctctatatcggccaggcggtcggctccgccatcggcgggctgctgttcgcccacgagctcctgcacccactcggcttcgttgcggtcggcttcgtcgtgctggcgctggtgctggtgatcctgacccggcccgggccggctgccgccgcctga

SEQ ID NO: 860 - protein, 389 aa, Bradyrhizobium japonicum USDA 110
MQKSPAAGRFAPTAFMLGNLVTGCSVLAPAGMLPELSAGLGISIHAAGLLITFGAITLCIGSPLTAWLTSRIERRTLLATTLAVLAFGNLASAFAPDYASLLVIRLVMLAVGALYTPQAAGTAALIVPAERRGSTIAYIFLGWSLAAAVGLPLITFMASRYGWRAAYGGIGALGCISFLLLLLRLPAGLKGTPVDLKTWSAVGRDRTVLLLLAITMLQMSGQFVVFTFMGPLLKKLTGAGPDAIGMVFGIYGLCGFLGVVIATRIVDTWGPYRTSLLFTCLLLAGIAGWALGAGTFVLMAGAAAIWGLGFASTNSMQQVRLVATAPPLASATVALNTSVLYIGQAVGSAIGGLLFAHELLHPLGFVAVGFVVLALVLVILTRPGPAAAA

SEQ ID NO: 861 - DNA, 1170 bp, Bradyrhizobium japonicum USDA 110
  CDS (1)..(1170): transl_table=11
atgagcgtattctggctggccctgggcgccttcgcgatcggcaccgaaggctttgttatcgcagggcttttgccggcgatcgccaccgacctgtcgatttcggtctcggccgccggccaattggtcaccgcctatgccctcacctatgccgtaggctcgccgatcctggcggtggcgctgaacaatatcgaccgccgcactgtgctggctctggcgctgacgaccttcattgccggaaatctcgccgcgatggtggcttccagctaccccctgcttctggcttcccggatgctgatggccctgggctccgggctgtgcatgccgacggcgctcgcggtgtccgtggcggtcgcctcgcctgaaaggcgcggccgcgcggtggcgctggtcacctcgggactgacggttgcgaccgtgatcggcgtcccgctcggcaatctcgtcgggagcctgctcggatggcgcgcgacctttgccatggtcgccctgatcggtgccgtcgcgctcgccggcctcctgctgggcctgccccgcggcctgccgcgcaacaccgcctcgctcggcgagcggctggcggtggcgcgtcacggcaatgtcctggtcgcgcttctgatcacgattctatgggggctcggcggcttcaccgtgttcacctatttcgcggtgccgctgcgcggcctcggcttcgatgcctcgcagatcagccttgcgctgctggtgttcggcggcgccgccgcgatcgggaacatgctcggcggcgtcctggccgaccggctcggcacgctcgccaccgcagcgctcgggctcgccggcatggcgaccgcgctgatcctgcattcgctggtcctcaaattgatgcccggacaggcgcattatgccgtgctgggcacgatcttcctctggggcatctcgggctgggcgttctatccggcgcagatcgccagtatcatccggatcgagccgcaggcctcgatgatcgcgctctcgctcaacgcctcgtcgatgtatctgggcttcgccatcggcggcgccttgggaggcgcggtgctggccacgctgtcgccaaatgacctcggctggatcggcggaacgagcgttgcggcctcgcttctggtgcacctcgcccgtggctggcaggcacggccaaaaccggtcaaaattgccggttga

SEQ ID NO: 862 - protein, 389 aa, Bradyrhizobium japonicum USDA 110
MSVFWLALGAFAIGTEGFVIAGLLPAIATDLSISVSAAGQLVTAYALTYAVGSPILAVALNNIDRRTVLALALTTFIAGNLAAMVASSYPLLLASRMLMALGSGLCMPTALAVSVAVASPERRGRAVALVTSGLTVATVIGVPLGNLVGSLLGWRATFAMVALIGAVALAGLLLGLPRGLPRNTASLGERLAVARHGNVLVALLITILWGLGGFTVFTYFAVPLRGLGFDASQISLALLVFGGAAAIGNMLGGVLADRLGTLATAALGLAGMATALILHSLVLKLMPGQAHYAVLGTIFLWGISGWAFYPAQIASIIRIEPQASMIALSLNASSMYLGFAIGGALGGAVLATLSPNDLGWIGGTSVAASLLVHLARGWQARPKPVKIAG

SEQ ID NO: 863 - DNA, 1299 bp, Lactobacillus plantarum WCFS1
  CDS (1)..(1299): transl_table=11
gtggtatatttctatccgattaacgacagtcgctggtatacttttattcacttgtttctctattgtaaggcccttaaactcctagttgtacctaattcaaaaggagtgagtcctattttcaatcaaatcactatccataaccaacatactgaaaattggcttattattggccttttctgtggggcttttgtgactggtgctgacgcatttattatttcagcactactccccgctatcgctactagtctgcatgtgccgactaacaccgcggcatacggagtcaccgtttacgcactatgttatgccatcggtgcacctttattcggcccattaggtgaccgctttaataaacgttttttgctaatcagaggctgtggcatcttcttactaggaacactactctgtggattagcaaactcattgctaacattctatctttaccgtgccatcgctggcatcggtgcagctttatttgtcccaaacatttgggcttttatcggtacttacttcaatggtcaacgacttaaccaagtcatgggcatcgttatgtcggcactttcattatcaattgctaccggtgtaccactcggtgctttactagcacaactcagtagttggcatatggctttctggggttcagccatgctaaccttgattgcattatcgattttaaccattgccataccttcattaccgagtcagaatgcccagcctgacggttattttacaagttttaaaacattagtccacactcctcacgccatcgctgccctactgattacattaacttggatgactgggttctatggcgtttatacctttttaggtgtttttgcaaccgcgacctttcatttcaacacaatgcaaactggtctcatctttatcacttatggaagtgctaattttgttgcgagtttctttgccggtaaacttatatcattgcttggtaaaaaacagagcgttacaattaatggcttagtttcagctacattagtcttatccttaggcatctggggacaacatttagcagtattgctgattattctggttgtgctcgccttatctcaaggctggggtgtcactgcattaactgcgacaatcgttaatattgtgccatctaatcgttcaaccatcatgtcatttaatagtgcttttttatactatggcttaacgttaggatctgccgctggcggcctgcttttaactaaaattggcttttacgcagtgacgattgcagcggccacggccttattagtcgcagtattgattgcaaatgcacttagccactattcggattag

SEQ ID NO: 864 - protein, 432 aa, Lactobacillus plantarum WCFS1
MVYFYPINDSRWYTFIHLFLYCKALKLLVVPNSKGVSPIFNQITIHNQHTENWLIIGLFCGAFVTGADAFIISALLPAIATSLHVPTNTAAYGVTVYALCYAIGAPLFGPLGDRFNKRFLLIRGCGIFLLGTLLCGLANSLLTFYLYRAIAGIGAALFVPNIWAFIGTYFNGQRLNQVMGIVMSALSLSIATGVPLGALLAQLSSWHMAFWGSAMLTLIALSILTIAIPSLPSQNAQPDGYFTSFKTLVHTPHAIAALLITLTWMTGFYGVYTFLGVFATATFHFNTMQTGLIFITYGSANFVASFFAGKLISLLGKKQSVTINGLVSATLVLSLGIWGQHLAVLLIILVVLALSQGWGVTALTATIVNIVPSNRSTIMSFNSAFLYYGLTLGSAAGGLLLTKIGFYAVTIAAATALLVAVLIANALSHYSD

SEQ ID NO: 865 - DNA, 1206 bp, Lactobacillus plantarum WCFS1
  CDS (1)..(1206): transl_table=11
atgacaaaacagtttaatcccagttggacactttttgcactcgcaatcagtgccttcgccattgggtcaacggaatttattagtgttggtttaatgccactactcgttagcaactttcacatcaacttggcgcaagctgggctgaccgtctcgatctacgccattggtatcatgattggcgcgcccgtcatgacattactcaccggtcggcttaaccgtcaccgcttgatgatgttaattatgattttatttattattggtaacttactcgcagcaagtgccccaacctttggtgtcttacttgcaggccgggtcgtggccgctttggctcacggtatttttatgaccgtcgcctcagtaattgccgctgacgtggtcgcacctgccaaacgggcctcggcgattgccatcatgtttacaggactgactgtcgcaacggttactggtgttccgttgggaacgatgattggtcaattaggcggttggcgctggtcctttatctttattagcatgattggtgtcattggtttgttagctgattactggttaattccacgtaatctgccgttacccagtaaagccacggtccgggggattatccgcgtactcactaatccacaactactgttcgccttactcgtcacggcgctgggatacggtggtaccttcgtagtttacacctacctatcaccactactagaacagcagatgcattggtcagcgagcgctgtcgttttgattctagtcgtttacggcttaatggtcgcccttggtaatacactgggtggtcgttgggccaatgcacggcccttaattgcactattcaagatgttcagtgggttactcatcaccttactcattctaagcgtcaccgggtacagtcactggctagggctattgaccgtcctactgatgggaatctttgccttcatgaacgtccctgggctccaactctatattgttcagttagctgaacagaatacaccacacgatattacgatggcctcagcgttaaatatttccgcttttaacgtcggtatcgcactcggctccggtattggtggtcaagtcacgaccaaccttggcttaggctggacaccgatctttggtgccatcatggttgctgttagcttagtcctattgttaggtctaatttggttagcgcggcccgcaaaaagcaccgaccggcattgcgttcaaaattaa

SEQ ID NO: 866 - protein, 401 aa, Lactobacillus plantarum WCFS1
MTKQFNPSWTLFALAISAFAIGSTEFISVGLMPLLVSNFHINLAQAGLTVSIYAIGIMIGAPVMTLLTGRLNRHRLMMLIMILFIIGNLLAASAPTFGVLLAGRVVAALAHGIFMTVASVIAADVVAPAKRASAIAIMFTGLTVATVTGVPLGTMIGQLGGWRWSFIFISMIGVIGLLADYWLIPRNLPLPSKATVRGIIRVLTNPQLLFALLVTALGYGGTFVVYTYLSPLLEQQMHWSASAVVLILVVYGLMVALGNTLGGRWANARPLIALFKMFSGLLITLLILSVTGYSHWLGLLTVLLMGIFAFMNVPGLQLYIVQLAEQNTPHDITMASALNISAFNVGIALGSGIGGQVTTNLGLGWTPIFGAIMVAVSLVLLLGLIWLARPAKSTDRHCVQN

SEQ ID NO: 867 - DNA, 1134 bp, Tropheryma whipplei str. Twist
  CDS (1)..(1134): transl_table=11
ttgctgttgttgcttgttttgtccgcaggggtttttctgtcggtagtcggagaaatgatccccgcttcagccataaagtatatggctgaagatctgaatgttagcctcggaaaaattgggtttttgataacattgttttcctttgctgtaattctgacagcccccattcttactattatcactaggggcataagtcgcagatctcttatgacgacagtcattatttttctgggcctctttcatgcaagcgctgcgctttttaccggatatgagatggtggcagtggttcgctttctgacaggtgctgttcacggtatgttttggacacttgtcggaagtatagttggccagctatacgcgccacacagtctcgcaagagcgatgtcgattgttcttggaggtggcactgtgtcttatgttattggccttccgttgtcaaacttttttgcatttcagtttggctggaagtcagtggtgattgtcctgggtattatgtttgttctattgggcttgttattcaactttacgctgaaagttcccctacattcggccagaatgggtcctgccaaaaataggaatgtttttaaaagtaaatggatgccgatttgtattttgagtgcctcagttttacttgggcagtttattttttcaagttatgttcctgcgtttttgtcaaagcgatattcgccagagtttgttagtattctcctatttgtatacggattttgtggatgtattggcaatgttctggcaggcgtttttaaacccactcgtaggcgatttatggttatcatcgctacatcattgatttgtattttgcttttctcgtttatggataacgcaattgggcttgctgcgtatgctatttggggtgccatgtttggtgcagtcccggtattgttgactgtctttttgctgagtaatacaagcgataataatcgtgatatcgccaacgcttattacactatgagtttcaacatcgggataggtttgggtgcactattcggcgggctttttctcgatggatttgggttttatgtgcttccacttgcgtcttgtgccgcattactgttgagttttctgttatcactgagaactgtttcagggcgccataatcctgctgataccggctga

SEQ ID NO: 868 - protein, 377 aa, Tropheryma whipplei str. Twist
MLLLLVLSAGVFLSVVGEMIPASAIKYMAEDLNVSLGKIGFLITLFSFAVILTAPILTIITRGISRRSLMTTVIIFLGLFHASAALFTGYEMVAVVRFLTGAVHGMFWTLVGSIVGQLYAPHSLARAMSIVLGGGTVSYVIGLPLSNFFAFQFGWKSVVIVLGIMFVLLGLLFNFTLKVPLHSARMGPAKNRNVFKSKWMPICILSASVLLGQFIFSSYVPAFLSKRYSPEFVSILLFVYGFCGCIGNVLAGVFKPTRRRFMVIIATSLICILLFSFMDNAIGLAAYAIWGAMFGAVPVLLTVFLLSNTSDNNRDIANAYYTMSFNIGIGLGALFGGLFLDGFGFYVLPLASCAALLLSFLLSLRTVSGRHNPADTG

SEQ ID NO: 869 - DNA, 1080 bp, Tropheryma whipplei TW08/27
  CDS (1)..(1080): transl_table=11
atgatccccgcttcagccataaagtatatggctgaagatctgaatgttagcctcggaaaaattgggtttttgataacattgttttcctttgctgtaattctgacagcccccattcttactattattactaggggcataagtcgcagatctcttatgactacagtcattatttttctgggcctctttcatgcaagcgctgcgctttttaccggatatgagatggtggcagtggttcgctttctgacaggtgctgttcacggtatgttttggacacttgtcggaagtatagttggccagctatacgcgccacgcagtctcgcaagagcaatgtcgattgttcttggaggtggcactgtttcttatgttattggccttccgttgtcaaacttttttgcatttcagtttggctggaagtcagtggtgattgtcctgggtattatgtttgttctattgggcttgttattcaactttacgctgaaagttcccctacattcggccagaatgggtcctgccaaaaataggaatgtttttaaaagtaaatggatgccgatttgtattttgagcgcctcagttttacttgggcagtttattttttcaagttatgttcctgcgtttttgtcaaagcgatattcgccagagtttgttagtattctcctatttgtatacggattttgtggatgtattggcaatgttctggcaggtgtttttaaacccactcgtaggcgatttatggttatcatcgctacatcattgatttgtattttgcttttctcgtttatggataacgcaattgggctcgctgcgtatgctatttggggtgccatgtttggtgcagtcccggtattgttgactgtctttttgctgagtaatacaagcgataataatcgtgatatcgccaacgcttattacactatgagtttcaacatcgggataggttcgggtgcactattcggcgggctttttctcgatggatttgggttttatgtgcttccacttgcgtcttgtgccgcattactgttgagttttctgttatcactgagaactgtttcagggcgccataatcctgctgataccggctga

SEQ ID NO: 870 - protein, 359 aa, Tropheryma whipplei TW08/27
MIPASAIKYMAEDLNVSLGKIGFLITLFSFAVILTAPILTIITRGISRRSLMTTVIIFLGLFHASAALFTGYEMVAVVRFLTGAVHGMFWTLVGSIVGQLYAPRSLARAMSIVLGGGTVSYVIGLPLSNFFAFQFGWKSVVIVLGIMFVLLGLLFNFTLKVPLHSARMGPAKNRNVFKSKWMPICILSASVLLGQFIFSSYVPAFLSKRYSPEFVSILLFVYGFCGCIGNVLAGVFKPTRRRFMVIIATSLICILLFSFMDNAIGLAAYAIWGAMFGAVPVLLTVFLLSNTSDNNRDIANAYYTMSFNIGIGSGALFGGLFLDGFGFYVLPLASCAALLLSFLLSLRTVSGRHNPADTG

SEQ ID NO: 871 - DNA, 1209 bp, Pseudomonas syringae pv. tomato str. DC3000
  CDS (1)..(1209): transl_table=11
atgaacgcatttgaatctaccccgcagcagacgacgacggctcacccgcctgcctggggcgccgtgttttccatggccctgtgtgtggtggtgctgattgcgtcggagttcatgccggtcagcctgctgacaccgatcgcgcaggatctcggcatcagccagggccaggccgggcaggcgatttcgatttccggcttttttgccgtattgaccagtctgctgaacacctcgttgaccgggcatcttgaccgcaagcatgtcctgctgggcttcagcctgttgttgctggtgtccggggtgatcgtcacgctggcgtccagcggctgggtattcatgaccggccgtgcattgctcggggtcgccatcggcggcttctggtcgatgtcgacagcgaccgtgatgaaactggtgcccaaagaatccgtcgccaagggcctggcgctgatcaacggcggtaacgccctggcggccaccgtggctgcgccgctgggcagtttcatgggccagtacattggctggcgtggcgcgttttttctggttgtcccgctcgccgcactggctttcgcctggcagtggttgagccttccggcgatgaacaacgcgccgaacagtcgggcgcgtaacccgtttcagctgctgcgcactccacagatcgccattggcatgaccgccatcatgctgctgttcatgggccagttcgccgtcttcacctacttgcgcccgtttctggaagacgtcactggcgttagcgtcaccaccctgtcgctgatgctgctgttgctgggtgccagcgggttgcttgggacttatctgattggcgggctgctgcaaaaacgcatttatgcctgcctgatcgcgattccgctggtgatggccgttcttgccttggcactcaccggcctgggccactcgccgctggccgtcgccgccgtgcttgccgcctgggggctgatcgccacgccagcacctgttgcctggggcctgtggttgagcagagcactgcccgacgatgccgaggcaggcggcgggctaatggtcgcaaccattcagatggcaatcacggcgggtgcgggcatcggcggtgcgctgttcgacaacctcggctggtggagcccgttcgcattcggtggcgtgctgctggcggcttcggccgcgcttgccggggcggcacgacttaacgctcgcactgatcaacaacgccacacgtaa

SEQ ID NO: 872 - protein, 402 aa, Pseudomonas syringae pv. tomato str. DC3000
MNAFESTPQQTTTAHPPAWGAVFSMALCVVVLIASEFMPVSLLTPIAQDLGISQGQAGQAISISGFFAVLTSLLNTSLTGHLDRKHVLLGFSLLLLVSGVIVTLASSGWVFMTGRALLGVAIGGFWSMSTATVMKLVPKESVAKGLALINGGNALAATVAAPLGSFMGQYIGWRGAFFLVVPLAALAFAWQWLSLPAMNNAPNSRARNPFQLLRTPQIAIGMTAIMLLFMGQFAVFTYLRPFLEDVTGVSVTTLSLMLLLLGASGLLGTYLIGGLLQKRIYACLIAIPLVMAVLALALTGLGHSPLAVAAVLAAWGLIATPAPVAWGLWLSRALPDDAEAGGGLMVATIQMAITAGAGIGGALFDNLGWWSPFAFGGVLLAASAALAGAARLNARTDQQRHT

SEQ ID NO: 873 - DNA, 1218 bp, Pseudomonas syringae pv. tomato str. DC3000
  CDS (1)..(1218): transl_table=11
atgccgtctctggaaactgccgcctctggcaccacgagcgaaagctcgaccggtgctggtttgtccatcgcgattctggcgctggccggcttcgtgattgtcaccactgaatttctcatcatcgggctgttgccatcactggcccgcgatctgggaatctccatctcaacggccggcttgctggtcacactgttcgccttcacggtgatgctcttcggcccgccgctgaccgccatgctttcgcacctggaccgtaaacgcacctttatcgtcatcctgctgatcttcgcggcatccaatgcgctggcagcggtgtcgagcaatgtctggatactcgcactggcacgattcatcccggcactggcattgccagtgttctggggcaccgccagcgaaaccgcaagcttgctggccgggcccaagcgcgcgggcaaagccgttgcgcaggtgtacctcggcatctctgccgcaatgctgttcggtattccgctgggcactctgtttgctgacgcagtgggctggcgcggcgcgttctgggcgctgactgtcctgtctgccttgatggccctgctactggcgctgtcgatgccacgtctggaacctaccgccaaggtcggcctcgccgagcaagcgaaaatcctgcgtgacccgctttttctggccaacctgctgctgtccattctgctgttcacggcgatgtttggtgcttacacctacctggcagatacgctggagcgcatcgccggtatcgagtcggctcagacaggctggtggctaatgggcttcggtgcggtcggcctgatcggcaacgcactgggtggtcgttacgtagatagcagcccactgggctcgaccatggtcttcgcgctgctgctggcgctgggcatgacggcgagcgtaccggcagcaggctcgctgccactgctggcggtggtgctcgtggtatgggggattgcccatacggcgttgttcccgatctgtcagatccgggtgatgaaagccgcacctcaggctcaggccctggccggcaccttgaacgtgtcggcggccaatgccggaatcgggctgggctcgattatcggcggccttaccatcgagcatctgggcctgaacgcagtggggtatgtcgccgccatcgtggcattgctggctatcgccgtcgcatggatgaccagcgttcagcaaggccggattgagaaacacaacgtctgcgcgtaa

SEQ ID NO: 874 - protein, 405 aa, Pseudomonas syringae pv. tomato str. DC3000
MPSLETAASGTTSESSTGAGLSIAILALAGFVIVTTEFLIIGLLPSLARDLGISISTAGLLVTLFAFTVMLFGPPLTAMLSHLDRKRTFIVILLIFAASNALAAVSSNVWILALARFIPALALPVFWGTASETASLLAGPKRAGKAVAQVYLGISAAMLFGIPLGTLFADAVGWRGAFWALTVLSALMALLLALSMPRLEPTAKVGLAEQAKILRDPLFLANLLLSILLFTAMFGAYTYLADTLERIAGIESAQTGWWLMGFGAVGLIGNALGGRYVDSSPLGSTMVFALLLALGMTASVPAAGSLPLLAVVLVVWGIAHTALFPICQIRVMKAAPQAQALAGTLNVSAANAGIGLGSIIGGLTIEHLGLNAVGYVAAIVALLAIAVAWMTSVQQGRIEKHNVCA

SEQ ID NO: 875 - DNA, 1155 bp, Pseudomonas syringae pv. tomato str. DC3000
  CDS (1)..(1155): transl_table=11
atgttgttgcccatactgctgttgtcggccgccggtttcaccgtgctgaccacagagttcgttatcgtcggtcttttacccgccattgcccgcgacctggacgtctcggtttcgcaggccgggctgctgctgacgctgtttgcgttcaccgtcgcagcctttggcccgtttctgaccgcgtatttttcgcgcttcgagcgcaagcgtctgtttatcagcatcctcatcctgttcgggctggccaatgcgctggctgcgttggcccctgatattgcggtgatgggcgtcgcgcgcttgattccggcgttaggcctgccggtgttctgggcgctggccagcgaaaccgccgtggacatcgtcggaccggagttcgccgggcgggcgattgcccgcatcggtttcgggattgtctgcgccacggtgttcggcatccccgttggcaccctgatttcggatgcgttcggctggcgcagcgcgttcttcgtgctgtccgggctggcgtttgccaaggcgctgttgctggcggtgtatctgccaaggacggccgcaaagaaaaacccggtttcaatcctcaagcaattcggcattttgcgcagtccgatcatgcaggggcatgtgctgctgtcggttctggtgttcagcggtatgttcacggcctatacctacctggcagacatgctcgagcggctggccgggttcgacggcaatctggtgggctggtgcctgatgggctttggtgcggtcggtttgctcggcaactcgctgggcgggcgcatggtcgaccggcatccgttgatggccagtctggtgttctgcgccttcatggtggtcggcatgactgccgtggtgccgagcattcattcggtatttgccttgccactcgcgctggcggtatggggcatcacccaggcggcgctgtttctggtcagtcacgtgcggctgatcaaggccgcgccccaggcgcctgcgttcgctgcctcgctgaatatcgccggggcgaacctgggcatcggcatcggagcgttcatcggtggcagggtcattgatcatctggggctgggtaacgtcggtttcgccgctgcgggcatcatcgttctggccattgtgctggcgcttttgctgatcaaacgtgatcccggcccgctcgctgcctag

SEQ ID NO: 876 - protein, 384 aa, Pseudomonas syringae pv. tomato str. DC3000
MLLPILLLSAAGFTVLTTEFVIVGLLPAIARDLDVSVSQAGLLLTLFAFTVAAFGPFLTAYFSRFERKRLFISILILFGLANALAALAPDIAVMGVARLIPALGLPVFWALASETAVDIVGPEFAGRAIARIGFGIVCATVFGIPVGTLISDAFGWRSAFFVLSGLAFAKALLLAVYLPRTAAKKNPVSILKQFGILRSPIMQGHVLLSVLVFSGMFTAYTYLADMLERLAGFDGNLVGWCLMGFGAVGLLGNSLGGRMVDRHPLMASLVFCAFMVVGMTAVVPSIHSVFALPLALAVWGITQAALFLVSHVRLIKAAPQAPAFAASLNIAGANLGIGIGAFIGGRVIDHLGLGNVGFAAAGIIVLAIVLALLLIKRDPGPLAA

SEQ ID NO: 877 - DNA, 1128 bp, Pseudomonas syringae pv. tomato str. DC3000
  CDS (1)..(1128): transl_table=11
atgaccgggtttatttgcatcgtgaccgagacgctgcctgcgggtttgctgcccgagatcggcacgggccttggggtatcggcgtcgtttgccgggcagatggtgaccgtttacgcgctagggtcactgctggccgccatcccgctgaccatcgccacgcaaagctggcgccgcaggacggtgttgctgctgacgatcatcggctttctggtgttcaattccgtcacggcgctgtcgtccgattactggctgacgctggtcgcgaggtttttcgccggcgtttctgcgggcctcgcctggagccttatcgcgggttatgcacggcgcatggtggtgccgcaattgcagggccgcgccctggcgatagccatggtgggaacgcccatcgcgttgtcgctgggcgtgcctctgggcacctggctgggcgggtttatgggctggcgcatggcattcggattgatgtcggcgatgaccttgctgttgatcgtctgggtgctggtcaaggtgccggactaccctggccagtcctcgtcacagcgcatggcattgcgtcaggtgttcttcactcctggcgtacgctcggtactgggcgtggtcttcacctggatgctggctcacaacattctttatacctacgtcgcgccctttgtttccggggccggactggcgagtgacgttgattgggtgttgctgacatttggtatcgccgcgctggcgggtatctgggtaacgggacggctggttgatcgccatctgcgcaagaccgtgttggcaagcctcgcaaccttcgcagcggtttcggtttttctgggcgtgttctcaggctctgcaccggctgtctacttgggggtgtttatctgggggctgacgtttggcggcgctgccacgcttctgcaaaccgcgctggccgattcggcaggcgaaggcgctgacgtggcgctttcgatgaacgtggttgtctggaacagcgcaattgccggtggtggtttgttggggggtgttttgcttgggcattggggcgtgggtgtattcccctgggtcttgcttgtgttgtcagtgctgagcctggtgattgcgttgcgtgctcgggttcatggctttgcgggaggtaatcggcttacaaagtaa

SEQ ID NO: 878 - protein, 375 aa, Pseudomonas syringae pv. tomato str. DC3000
MTGFICIVTETLPAGLLPEIGTGLGVSASFAGQMVTVYALGSLLAAIPLTIATQSWRRRTVLLLTIIGFLVFNSVTALSSDYWLTLVARFFAGVSAGLAWSLIAGYARRMVVPQLQGRALAIAMVGTPIALSLGVPLGTWLGGFMGWRMAFGLMSAMTLLLIVWVLVKVPDYPGQSSSQRMALRQVFFTPGVRSVLGVVFTWMLAHNILYTYVAPFVSGAGLASDVDWVLLTFGIAALAGIWVTGRLVDRHLRKTVLASLATFAAVSVFLGVFSGSAPAVYLGVFIWGLTFGGAATLLQTALADSAGEGADVALSMNVVVWNSAIAGGGLLGGVLLGHWGVGVFPWVLLVLSVLSLVIALRARVHGFAGGNRLTK

SEQ ID NO: 879 - DNA, 1200 bp, Pseudomonas syringae pv. tomato str. DC3000
  CDS (1)..(1200): transl_table=11
gtgagtcgctttgaaaccgctggaaacgtcgaaacaaaacccgcttcatggtgggccgtcggcagcgtatcgctcggatcgttcgccaccgtcaccactgaattcctgcctgtagggctgttacccgacattgccgcagacctcggaacccgtgtcagccacgccggcctgatgatggctgttcccggcatccttgcggccatttccgcgccttcctgtatcgccctgtttagccatgtcgaccgcaagcgcctgttgctggggttgctgtcgatactgctggcgtccaacctgatcgtggcattgtcgagtcagttctggctgacccttaccggcagggtattgctcggcttcgcgttgggaggcttctggaccattgccggttcgctcgggccgcgtttgaggcccggcaaggagggcgcgaaggcaaccgcgtacattctcgcgggggtctcgattggcacggtcgcgggtattcccgctggcacactgatcggcgaagctttcggctggcgagctgcgtttgaaacggcagcggtcgttaccgttgccgtgggcctgttgatcgcggcgttgctgcctgcgttgccgggcgagcgctctgccggtatcagccagatgctgtcgctggccggcgagcaaaagatccgccgcatgttcgccgccgcgctattgatctacgtcgggcattttgcggcctacacctaccttgcccccttcgtgcaggacgccgcagacatcagaggccagacactgggattgttgctgtttgcctttggcctcgcagccgtcgccggcaacctggctggcggggcactggctgcccgaaacgcgccgtcctcggtgctgatcatgaccctgctgatgctcgggtcgctgagtgcgctgctggtatttgtcagcaacccgtggctgctctggccggtcattctggtctggggatttgccttcgggatgattccgatcaccacgcaaatatggtgtttcgacgcctcgaacggacgtgtggagggggttcaggcgctgctggtgtgtgtggtgaatctgtcgattggcggcggggcgttcatcggcggactggtgtctgaaggtgcaggctttaccgctgccattgtgactggcgcggtgtgtgccgcgctgtccatgttaacggtagggttctcgctgcgcaggtcaagacaggtcacctgcacagagtga

SEQ ID NO: 880 - protein, 399 aa, Pseudomonas syringae pv. tomato str. DC3000
MSRFETAGNVETKPASWWAVGSVSLGSFATVTTEFLPVGLLPDIAADLGTRVSHAGLMMAVPGILAAISAPSCIALFSHVDRKRLLLGLLSILLASNLIVALSSQFWLTLTGRVLLGFALGGFWTIAGSLGPRLRPGKEGAKATAYILAGVSIGTVAGIPAGTLIGEAFGWRAAFETAAVVTVAVGLLIAALLPALPGERSAGISQMLSLAGEQKIRRMFAAALLIYVGHFAAYTYLAPFVQDAADIRGQTLGLLLFAFGLAAVAGNLAGGALAARNAPSSVLIMTLLMLGSLSALLVFVSNPWLLWPVILVWGFAFGMIPITTQIWCFDASNGRVEGVQALLVCVVNLSIGGGAFIGGLVSEGAGFTAAIVTGAVCAALSMLTVGFSLRRSRQVTCTE

SEQ ID NO: 881 - DNA, 1440 bp, Pseudomonas syringae pv. tomato str. DC3000
  CDS (1)..(1440): transl_table=11
gtgactgaccatagaaggacgaatggcgccatgaacaagctcccgccggaaaacgcgactcaagcggccaatgcctggcgtgttctgttcctgttgtttttggccaatctgttcaactttttcgatcgcaccattccggcaatcatcgttgagcctattcgtctggaatggcacttgagcgattttcaactgggcatgctcggcactgcgttcacactggtctacgccatcgccggcctgccgctggggcgcatggcggataacgggtcgcgcaaaaaactgatgggctgcgggctggcggtctggagcggcttgacggcggtcaatggcatggtcggcagtttctgggcgttcctgctggtacgcatgggcgtcgggataggcgaggccagttatgcgcctgcggccaactcgctgatcggcgacctgtttcctgcccaccggcgtgcacgtgcaatgggcctgttcatgctcggtctgccattgggcttgctgttggcgttctttaccattggtgcgatggtcaaggcgttcgacagctggcgtgcgccatttttcattgcggcggtgcccggtctgttgctggcggtgttgatctttttcatcagggagcccaagcgcggcgctgccgaaaacgtgcgtatgtcgcaagcgaagatcgacaagccgatccgccgcgtgctgtcgatcccgacctttcgctggctggtgctgggcggtctgacctttaattttgcgacctacgcctgcaattcattcatggtgccgatgttgcagcgctacttccttctgccgttgcaggaagcggcggtggcgacagggatcatcgtgggcgttaccggtttgatcggcctgacgctgggcggctggattgccgacaagctgcaccagcgctccgccaatggccggctgctgtttgcgactttcagcatgctggtcgccgcgctggcgacaggctatgcgttgcatgctggacgaatcgagatcggtgtatttgtcggcgttttcagccttggctggctgtttgcctacaacttttacacctgcgtctacaccgcgattcaggacgtggtcgagccacgcctgcgggcaaccgccatggcgttgttctttgccgggctctatctgctcggtggcgggcttgggccggtggtggtcggtctgctgtctgatcacttcgcccactcggcgatgggcgtggcgggtgtcgaggtcatgaacgaaagcttcaaggccatcggcctgcacgacgccatgtacctgatcccggtcgcgctgtttctgaccctgctgtttctgtatcaggcatcgcgctgcttcagccgggatgccgaacggatgacggcgcgcatggtggcggaagaaccagtggcggggttggcggaaggggttgcctactttggccccatcaaagtaggtcgccgaggggcgaaaaggtga

SEQ ID NO: 882 - protein, 479 aa, Pseudomonas syringae pv. tomato str. DC3000
MTDHRRTNGAMNKLPPENATQAANAWRVLFLLFLANLFNFFDRTIPAIIVEPIRLEWHLSDFQLGMLGTAFTLVYAIAGLPLGRMADNGSRKKLMGCGLAVWSGLTAVNGMVGSFWAFLLVRMGVGIGEASYAPAANSLIGDLFPAHRRARAMGLFMLGLPLGLLLAFFTIGAMVKAFDSWRAPFFIAAVPGLLLAVLIFFIREPKRGAAENVRMSQAKIDKPIRRVLSIPTFRWLVLGGLTFNFATYACNSFMVPMLQRYFLLPLQEAAVATGIIVGVTGLIGLTLGGWIADKLHQRSANGRLLFATFSMLVAALATGYALHAGRIEIGVFVGVFSLGWLFAYNFYTCVYTAIQDVVEPRLRATAMALFFAGLYLLGGGLGPVVVGLLSDHFAHSAMGVAGVEVMNESFKAIGLHDAMYLIPVALFLTLLFLYQASRCFSRDAERMTARMVAEEPVAGLAEGVAYFGPIKVGRRGAKR

SEQ ID NO: 883 - DNA, 1173 bp, Pseudomonas syringae pv. tomato str. DC3000
  CDS (1)..(1173): transl_table=11
atgactcaaggccgcagcacgattaaccccagggtctatgcgctgaccttcactgcatttgtaatgctttcctctgaatttatcgtcgcaggcctactgcctcaaattgctacatcgcttgccatcaccattggtgcggcgagtgggctcgtgacagcttttgctttaggcatgggtatcagcgcgcccattattggagtgttagcgcaccgcgcctccaaacgatcccttctgatatctgcgtgtgtggcactgcttctcgggaatgggatttcggcagcgtttaacgattactacatcatcctcgccggtcgtgtactcggtggtatcggtgtcgctgttttctggactaacgccgctctggccgcgaagtcgctgtcgcaaggccgcaatgaaagcctggcgattggtagagtcctggtagggatctcgatcgcgtcggttgtcggcgtcccggtcggcaaactcatcgcagacgctaccaactggcggatggcaatgtggatgatgacagcgctgagcagtgtggctttgctaaccgtgtggatttgggtgaggcctactgaagaatcgcggcagaaagaaaacctgagcgacaccgtccgtgtcgccttgagatccgacgtcgccatgaccttgatcagttcatgcctaatgtttgcgggcgtagcctcggtattcaatttcctggctaccttcatggaaaaggaaactggcttcggcgaaataagcgtgacgctactcctgtgcctctacggcatcgctgacatcgcgagcaatctcattttatccaaacgtgtgaagaacgatcttgagcccctgttcaggcgggtcttgatgacgatggcagccggtatgtgctttctgtctttgtttggcagcctcacctgggcggttccaatcgccgtcatcattgtcgctagcagccacgcaggcgtcagtcttctcatcggtatcgacgtgctacaaagagctggggacgcaggtcagttgatcaatgccataaacgtatcgatgataaatcttggtatcggcataggtgcagcgatcacaggattgcttacagatagagtcggcgtcggcgccgtaggatgggtcggtgcatgcttcattcttctggcacttagtgtgcgctggaagattgagcgctcacaacaaacgcaccacggctga

SEQ ID NO: 884 - protein, 390 aa, Pseudomonas syringae pv. tomato str. DC3000
MTQGRSTINPRVYALTFTAFVMLSSEFIVAGLLPQIATSLAITIGAASGLVTAFALGMGISAPIIGVLAHRASKRSLLISACVALLLGNGISAAFNDYYIILAGRVLGGIGVAVFWTNAALAAKSLSQGRNESLAIGRVLVGISIASVVGVPVGKLIADATNWRMAMWMMTALSSVALLTVWIWVRPTEESRQKENLSDTVRVALRSDVAMTLISSCLMFAGVASVFNFLATFMEKETGFGEISVTLLLCLYGIADIASNLILSKRVKNDLEPLFRRVLMTMAAGMCFLSLFGSLTWAVPIAVIIVASSHAGVSLLIGIDVLQRAGDAGQLINAINVSMINLGIGIGAAITGLLTDRVGVGAVGWVGACFILLALSVRWKIERSQQTHHG

SEQ ID NO: 885 - DNA, 1167 bp, Pseudomonas syringae pv. tomato str. DC3000
  CDS (1)..(1167): transl_table=11
gtgcccctttcgctactcattctggccctgagcgccttcgccatcggcaccactgaattcgtcatcatgggcctgttgcctgacgttgccgccgacctgggcgtttccatccccggcgctggctggctggtgaccggctacgcgctcggcgtggcggttggcgcaccgttcatggccatggccaccgccaaactgccgcgcaaagccgcgctggtcacgctgatgggaattttcatcatcggcaatctgctctgcgcgctggccagtgactacaacgtgctgatgttcgcccgtgtagtgactgcactgtgccacggcgcattcttcggcatcggttcggtcgtggcggcaggactggtgcctgccaaccgtcgcgcatcggcggtggccttgatgttcaccggcctgaccctggccaacgtgctgggcgtgccattgggtaccgcgctgggtcaatacgcaggctggcgctcgaccttctgggcggtcaccgtcatcggcgtgatcgcgctgatcggcctgattcgctacctgccgaccaaccgcaacgaagaaaagctcgacatgcgcgccgaactggctgcactcaaaggtgccggtatctggctgtcgctaaccatgaccgcgctgttttcagcctccatgttcactctgtttacctacatcgccccgctgctcggcgaggtgaccggcgtatcgccccaaggcgtgacctggaccctgctgctgatcggcctgggcctgacagccggtaacgtgatcggcggcaagatggctgaccgccgtgtgtcgacgacgctgattgccgtgttcgtgtcgatggcggttatctcgaccgcgctgagctggaccagcgccgcgctgatcccgactgaaatcacccttttcctctgggccgtcgcagccttcgctgcggtcccggcattgcagatcaacgtggtgaccttcggcaaggccgcacccaatctggtttcaaccttgaacatcggcgccttcaacgtcggcaatgcactgggcgcgtgggtcggtggcagcgttatcgcccacggccttggcctgaccagcgtgccattggccgccgccgtgctggccgtgctggcgctgctgatcacgctgattacttttcgccagaccggcaaccccgatctggcaccggctacacactga

SEQ ID NO: 886 - protein, 388 aa, Pseudomonas syringae pv. tomato str. DC3000
MPLSLLILALSAFAIGTTEFVIMGLLPDVAADLGVSIPGAGWLVTGYALGVAVGAPFMAMATAKLPRKAALVTLMGIFIIGNLLCALASDYNVLMFARVVTALCHGAFFGIGSVVAAGLVPANRRASAVALMFTGLTLANVLGVPLGTALGQYAGWRSTFWAVTVIGVIALIGLIRYLPTNRNEEKLDMRAELAALKGAGIWLSLTMTALFSASMFTLFTYIAPLLGEVTGVSPQGVTWTLLLIGLGLTAGNVIGGKMADRRVSTTLIAVFVSMAVISTALSWTSAALIPTEITLFLWAVAAFAAVPALQINVVTFGKAAPNLVSTLNIGAFNVGNALGAWVGGSVIAHGLGLTSVPLAAAVLAVLALLITLITFRQTGNPDLAPATH

SEQ ID NO: 887 - DNA, 1176 bp, Salmonella enterica subsp. enterica serovar Typhi Ty2
  CDS (1)..(1176): transl_table=11
atgcctctcgctttatttgcactgacaataagtgccttcgctattggcacgactgagttcgtgattgtcggcctggtgccgaccattgcacaacaactggctgtctcgttaccttctgccggaatgctggttttaatctatgcactgggtgtggctattggcgcgccggtgctaaccgctctgaccggacgcctgccgcgtaaacagttactggtcgcgctgatggtcttgtttacggcggggaatttgctggcgtggcaggctccgggctatatgacattaatcgccgcccgtctgctgacgggcctggcgcacggcgtgttcttctcgattggctctaccatcgcgacaagtctggtgccgaaagagaaagcggcttctgctatcgctattatgtttggtggtttaacagtagcgctggtaacaggtgttccgctggggacatttatcggtcagcattttggctggcgtgagaccttccttgcggtatcactgttaggcgtgattgcgctgatgagcagtcaactgctgatccctgccaatattcctggtcgggcggccgccagcattcgtgaccaggtgaaagtactgactcatcctcgtctgctgctgatttacgccgttacggcgctgggctacggcggggtattcacggcattcaccttcctggcgccgatgatgcaggatctggcgggattctctccggcagcagtaagctggatcctactgggttatggcgtatcagtggctatcggcaatatctggggcggtaaactggcggataagcatggtgccgtgccggctctgaaattcattttcgccgcgctgtttgttctgctgatggtcttccaggtgacggcctccacgcagtatgccgcgctggctaccattctggtgatggggatctttgccttcggtaacgtaccggggttgcaggtctacgtggtacagaaagcggaacaattcacgcctaatgccgttgatgtggcgtcaggtctgaacattgcggcgtttaacattggtattgcgctgggttccgtgattggcggacaaacggtggcgcattacggtttggcgcagacgccgtggattggcgccctcattgttctggtggcttttctgctgatgggcgtcagcggacgtcttgataaacctgtgcgcattgctctggagtaa

SEQ ID NO: 888 - protein, 391 aa, Salmonella enterica subsp. enterica serovar Typhi Ty2
MPLALFALTISAFAIGTTEFVIVGLVPTIAQQLAVSLPSAGMLVLIYALGVAIGAPVLTALTGRLPRKQLLVALMVLFTAGNLLAWQAPGYMTLIAARLLTGLAHGVFFSIGSTIATSLVPKEKAASAIAIMFGGLTVALVTGVPLGTFIGQHFGWRETFLAVSLLGVIALMSSQLLIPANIPGRAAASIRDQVKVLTHPRLLLIYAVTALGYGGVFTAFTFLAPMMQDLAGFSPAAVSWILLGYGVSVAIGNIWGGKLADKHGAVPALKFIFAALFVLLMVFQVTASTQYAALATILVMGIFAFGNVPGLQVYVVQKAEQFTPNAVDVASGLNIAAFNIGIALGSVIGGQTVAHYGLAQTPWIGALIVLVAFLLMGVSGRLDKPVRIALE

SEQ ID NO: 889 - DNA, 1206 bp, Bacteroides thetaiotaomicron VPI-5482
  CDS (1)..(1206): transl_table=11
atggaacaaaagaatcaatcaaaacttcattcgggcggtttgctcgtatttatcctcacggtcggtgtgtttggtattataaataccgaaatgggggtagtgggtatcctgcctctaatagccgaaacttttgatgtctcggtgccgcaggcaggttggacggtgagtatctttgcactggtggtagctgcatcggctcctgtcactccgttattgtttttgggagtaaaccggaagaaagtcatgttgctggcattgggattgtttacactgagtaatattatatccatgctcactaccaattttacagtactattggttgcgcggatacttcccgcctttcttcatccggtatatgtttcgatggcttttacagtagcggcggcatcagtcagcaaggaaaaggctccaaaggctgtttcaagggtttttgtcggtgtgtctgccggtatggtgctgggtgttccggtgaccagctttatagctagtgaggtctcattctctatgtcaatgctgtttttcacagttgtaaatgccttggttcttatagctacgattttgtttatcccctccatgccggtaaaggagaaagtatcttatggtgcacaactcagcgtattgaagagaacggtgatgtggaactctatcattgccgtcaccttgattaatggagctatgttcggcttctttagttatatgtcggactatctgaaaacagtgacggaagtatcatacagtgtgattagtgttgtattattggtctatggtctggctaatattgtaggtaacgtacttgccggaaaactattatcgataaatgcgcggcgttcaattattatcatgccttttgcattgctggtttcctatatatgtctctttataacaggagagtggattacagctatggtaatcattattttaattttaggtgtattggcaggtatagcaagtaataatatgcaatatatgatcgcggaagctgctcccgaagctcccgactttgccaacggaatgtttctgacttctgccaatttggggacaacgatcggtacagccgtatgcggagctttcatcacggaaatgggcacacgctattctgtattcggtgcattgtttttcctgattgccagtattgtgtttgtttatttgagagttcgtgtagctcattcacagaaacaagttaaaatgaatatggcaacggaatga

SEQ ID NO: 890 - protein, 401 aa, Bacteroides thetaiotaomicron VPI-5482
MEQKNQSKLHSGGLLVFILTVGVFGIINTEMGVVGILPLIAETFDVSVPQAGWTVSIFALVVAASAPVTPLLFLGVNRKKVMLLALGLFTLSNIISMLTTNFTVLLVARILPAFLHPVYVSMAFTVAAASVSKEKAPKAVSRVFVGVSAGMVLGVPVTSFIASEVSFSMSMLFFTVVNALVLIATILFIPSMPVKEKVSYGAQLSVLKRTVMWNSIIAVTLINGAMFGFFSYMSDYLKTVTEVSYSVISVVLLVYGLANIVGNVLAGKLLSINARRSIIIMPFALLVSYICLFITGEWITAMVIIILILGVLAGIASNNMQYMIAEAAPEAPDFANGMFLTSANLGTTIGTAVCGAFITEMGTRYSVFGALFFLIASIVFVYLRVRVAHSQKQVKMNMATE

SEQ ID NO: 891 - DNA, 1143 bp, Bacteroides thetaiotaomicron VPI-5482
  CDS (1)..(1143): transl_table=11
atgaagaagagtcttattgcattggcattcggtaccctcggattgggtatcgccgagtttgtaatgatgggtatactgcccgatgtagccagagatttaaagattagcatccctgctgccggacatttcatttccgcctacgcactaggcgtttgtgtcggcgcccctgtattgacattagcacgtaaatatccactaaaacatatattgctggtattagtcacgctgattatggtaggtaatatctgtgcggcattatcacctaactactggatgctgcttatctcccgcttcatctccggacttcctcacggagcctatttcggggtcggttctatcgtcgcggaaaggctcgccgataaaggcaagagttcagaagctgtctccatcatgatagccggaatgaccatcgccaacctgttcggcgtaccgctgggaacttctttaagcaccatgctttcgtggcgggctaccttcctgctggtaggtctttggggaatcgtcattctgtattacatctggcgttgggttcctcaggtagaagggctgaaagataccggtttcaaaggacagttccgctttctcaaaactccggctccctggctcattctgggtgctacggcattaggtaatggcggcgtattctgctggtatagctatatcaatccaatgctcactcatatctccggtttctctgccgaaagtatcaccccgctgatgattcttgccggattcggtatggtcatgggaaatctgatcagcgggcggctctccgaccgctacactcccggaaaggtaggaactgccgcacaagcactgatctgcctgatgctattgcttatcttcttcctttctccctacaaatgggcggctgcgctattgatgtgcctctgcaccgcaggactgtttgccgtatccagtccggaacagatattgattatccgtgtagccaaaggaggcgaaatgctcggagctgcctgtgtacaggtagcgttcaatctgggaaatgccatcggagcttatgcaggaggactggcaatcagcggcggctaccgttatcccgccctgacgggtgttccgttcgcattgatcggcttcatccttttcctgatcttttataagaagtatcaagccaaatactaa

SEQ ID NO: 892 - protein, 380 aa, Bacteroides thetaiotaomicron VPI-5482
MKKSLIALAFGTLGLGIAEFVMMGILPDVARDLKISIPAAGHFISAYALGVCVGAPVLTLARKYPLKHILLVLVTLIMVGNICAALSPNYWMLLISRFISGLPHGAYFGVGSIVAERLADKGKSSEAVSIMIAGMTIANLFGVPLGTSLSTMLSWRATFLLVGLWGIVILYYIWRWVPQVEGLKDTGFKGQFRFLKTPAPWLILGATALGNGGVFCWYSYINPMLTHISGFSAESITPLMILAGFGMVMGNLISGRLSDRYTPGKVGTAAQALICLMLLLIFFLSPYKWAAALLMCLCTAGLFAVSSPEQILIIRVAKGGEMLGAACVQVAFNLGNAIGAYAGGLAISGGYRYPALTGVPFALIGFILFLIFYKKYQAKY

SEQ ID NO: 893 - DNA, 1191 bp, Enterococcus faecalis V583
  CDS (1)..(1191): transl_table=11
atggaaaagaaaatttcaccaaatttaacgctctttgcattagctatcaatgctttcgcaatcggttcaacagaatttattagtgtgggtttattaccaatgattgttaaaagttttcatattagtctttcccaagcaggtttgactgtttctttgtacgctttaggtgtgacgattggggcgccgttattaacaattttgacaggaaaatggaatcgtcgctcattaatgctggggattatgcttcttttcattagtgggaatttaattgctgcgtttgcgccaacgtttattattttattggtagggcggatactttctgcattggcgcatggcattttcatgtctgtttcgactgtcatcgccgcagatgttgtgccgccatcacgtcgtgccagcgccattgctattatgtttacgggcttaacggttgcaacagtgactggcgtacctttagggacgtttattgggcaacaaacagcttggcatatgtcctttctttttatagccagtattggcttggtgggactgattgctagttattttttagttcccaaaaatttaccgataccagggaaggttgacataaaaggaatcacgcggatttttacgaacaaacccctcgttttctcttttctaattactgcttttggttatggtggaacgtttgctgcatatacgtacttgtcaccgttattggaaaatttaggcttttcagccaacgcggtagtgattattttagttgtttatggcgtaatggtcgcaattggcaatacagtaggtggtcactgggcaaataaaaaacctttagattcgttagtaaaaatgtttagcttattaattctgtccttagtctttttattcattactgttttaatggataacagtcttctaggcttattagcaagtttgatgttgggcctatttgcctttatgaatgtacctggtttacaactatatgttgtagaattagcggaaaagtatgttccagaagatatcactttggcctcagcttttaatattgcagcctttaatattgggattaccgtcggctcaatgacaggtggggtggtcacagatcatttatcagtaacatatacaccgatttttggtggttttatcgtgctaattgctgtcttgttcgtactttatattcggaagcaagaagaacaaaaaaacaactatctttag

SEQ ID NO: 894 - protein, 396 aa, Enterococcus faecalis V583
MEKKISPNLTLFALAINAFAIGSTEFISVGLLPMIVKSFHISLSQAGLTVSLYALGVTIGAPLLTILTGKWNRRSLMLGIMLLFISGNLIAAFAPTFIILLVGRILSALAHGIFMSVSTVIAADVVPPSRRASAIAIMFTGLTVATVTGVPLGTFIGQQTAWHMSFLFIASIGLVGLIASYFLVPKNLPIPGKVDIKGITRIFTNKPLVFSFLITAFGYGGTFAAYTYLSPLLENLGFSANAVVIILVVYGVMVAIGNTVGGHWANKKPLDSLVKMFSLLILSLVFLFITVLMDNSLLGLLASLMLGLFAFMNVPGLQLYVVELAEKYVPEDITLASAFNIAAFNIGITVGSMTGGVVTDHLSVTYTPIFGGFIVLIAVLFVLYIRKQEEQKNNYL

SEQ ID NO: 895 - DNA, 1209 bp, Streptomyces avermitilis MA-4680
  CDS (1)..(1209): transl_table=11
atgcctctcgcgcttctggccctcgcgatcggggccttcgggatcggaaccaccgaattcgtgatcatgggtgtgctgcccgaggtcgcaggcgacttcggtgtctccatccccaccgccggacttctggtgaccggctacgccctcggcgtggtgttcggcgccccgatcatgaccgcgctcggcaccaaggtgccccgcaagcggatgctgatgctgctgatgggcctgttcgtcctcggcaacctgctctccgccgtcgcccccgtcttcgggctgatgctggtgggacgagtggtcgcctccctcgcccacggcgccttcttcggtatcggctcggtggtcgccgccgagttggtggctcccgagaagaaggccggcgccatctccatgatgttcagcgggctgacggtcgccaatgtcgtcggcgtccccctcggcaccctcatcgggcagtccatcggctggcgggtcaccttcgcggtggtcgccgcgctcggtgtggtcgggctgctgggcgtggccaagctggtgcccgagatgcccaagcccccgggtgtccgtctgcgccacgaactggccgccttcaagaacgtccaggtgctgctcgcgatggcgatgaccgtcctcggcttcggcggcgtgttcgcggccatcacctacatcgcgccgatgatgacgcacgtggccggcttcgcggacggctcggtgacctggctgctggtcctcttcggcctcggcatggtcggcgggaacctcatcggcggcaagttcgcggaccgtgcgctgatgccgatgctctacgtgtcactgggcggcctcgctgtcgtgctcgccctgttcaccgttaccgcgcacaacaaggtcctcgcggcggtcaccatcatgctgatcggtgcccttggcttcgcgaccgtgccgccactgcagaagcgggtcctcgaccatgcgcacggcgcgcccacgctggcctcggccgtgaacatcggcgccttcaacctcggcaacgccctctcggcctggctcggcggcatcgtcatcgcggccggtctgggatacaccgctcccaactgggtcggcgccgttctcgccgcggcggccctggtcctcgccgtcctctcggccgccctggagcgccgtgacacgggccggagcgccgtcgtcgcggacgccgcgcccgcagagcggcagacccccgtccaccactga

SEQ ID NO: 896 - protein, 402 aa, Streptomyces avermitilis MA-4680
MPLALLALAIGAFGIGTTEFVIMGVLPEVAGDFGVSIPTAGLLVTGYALGVVFGAPIMTALGTKVPRKRMLMLLMGLFVLGNLLSAVAPVFGLMLVGRVVASLAHGAFFGIGSVVAAELVAPEKKAGAISMMFSGLTVANVVGVPLGTLIGQSIGWRVTFAVVAALGVVGLLGVAKLVPEMPKPPGVRLRHELAAFKNVQVLLAMAMTVLGFGGVFAAITYIAPMMTHVAGFADGSVTWLLVLFGLGMVGGNLIGGKFADRALMPMLYVSLGGLAVVLALFTVTAHNKVLAAVTIMLIGALGFATVPPLQKRVLDHAHGAPTLASAVNIGAFNLGNALSAWLGGIVIAAGLGYTAPNWVGAVLAAAALVLAVLSAALERRDTGRSAVVADAAPAERQTPVHH

SEQ ID NO: 897 - DNA, 1227 bp, Streptomyces avermitilis MA-4680
  CDS (1)..(1227): transl_table=11
atgcccctcgccctgctggccctcgccgtgggcgccttcggcatcggcacgaccgagttcgtgatcatgggtctgctgcccgacgtcgcggacgacctgcacatatccatccccgccgccggccacctggtctcggcgtacgcgatcggcgtcgtcatcggcgccccgctcctggcggccgtcaccgcccggctgtcccgccgcaaggtcctgatcggtctgatggggctgttcgtggtcggcaacgcgctgtccgccttcgcccccgacgaccactggctcctcgcggcccgcttcctcagcggcctcccgcacggcgcgttcttcggcgtcggcgcggtcgtcgccaccaatctggtcgcgcccgagcgcaaggcccgctcggtctcgctgatgttcctcggcctgacggtcgcgaacgtcgccggtgtgccggtcgccaccctcatgggccagcacctcggctggcgggccaccttcctgggcgtgagcgcgatcggcctggccgccatcgcctcgctggccctgctggtcccgcacgaccacacccacgccacgtccggcggcctgcgcggcgagctgacggccctgcgctcgctgccggtctggctggcgctcggcacgacggtcgccggcttcggcgcgctcttctcggcgtacagctacatcacaccgatgctgacggacgccgccggctacgcccacgggagcgtcaccctgctgctcgccctgttcggcgtgggcgcgacggccggcaacctcgtcggcggccgcctggcggaccactcgctgcgcggcacgctcttcggcggcctcgtgtcgctggtcgtggtgctgtccctgttcccgctcctgatgaccacgcagtggagcgcggccctcggtgtgaccctcctcggcgcggccgcgttcgtcacgggctcgccgctccagctgatggtcatggagaaggcgtcggcggccccgtccctggcgtcctccgccaaccaggcggccttcaacctggccaacgcgggcggcgcctggatcggcggtctcgccctggccgcgggcttcggcgccacctccccggcgctcgctggagccgccctcgcggtgctgggcctggcggtcgcgggcacggcgtacgcggtggaccgccgccgcgcgctcgccgtggcggtcacgacgagtggccggctggtcgccacgcacgttccccagcgcacggagtcggcacaccgctga

SEQ ID NO: 898 - protein, 408 aa, Streptomyces avermitilis MA-4680
MPLALLALAVGAFGIGTTEFVIMGLLPDVADDLHISIPAAGHLVSAYAIGVVIGAPLLAAVTARLSRRKVLIGLMGLFVVGNALSAFAPDDHWLLAARFLSGLPHGAFFGVGAVVATNLVAPERKARSVSLMFLGLTVANVAGVPVATLMGQHLGWRATFLGVSAIGLAAIASLALLVPHDHTHATSGGLRGELTALRSLPVWLALGTTVAGFGALFSAYSYITPMLTDAAGYAHGSVTLLLALFGVGATAGNLVGGRLADHSLRGTLFGGLVSLVVVLSLFPLLMTTQWSAALGVTLLGAAAFVTGSPLQLMVMEKASAAPSLASSANQAAFNLANAGGAWIGGLALAAGFGATSPALAGAALAVLGLAVAGTAYAVDRRRALAVAVTTSGRLVATHVPQRTESAHR

SEQ ID NO: 899 - DNA, 1215 bp, Bacillus cereus ATCC 14579
  CDS (1)..(1215): transl_table=11
ttgaattcatatacagcatcgtcttcagaagttcagacgaatcgaagaagtatatttgcgttgttagcgttagcaattagtgcgttcgggattgggacaactgaatttgttagtgtcggtttattaccatctatttcggaagatttacatgtgtcggttacaacggctggtttaacagtttctttatatgcgttaggcgtagcgtttggggctccagtattaacgtcattaacagctaatatgtcacgaaaaacgttattaatgtggattatgattattttcattattggtaacggaatcgcagcggtagcaacaagcttcactgtattacttattgcgcgaattatttctgcactttcgcatggtgtgtttatgtcaattggttcaacaattgctgcggcacttgtcccagaaaataaacgggctagcgcgattgcgattatgtttactggtgtaacagttgcaactattacaggtgcaccaattggaacatttattggtcaacaatttggctggagaacatcatttttagcaattgtagtaattggaattatcgccttaattgcaaatagtattctcattccatctaatatgaaaaaaggtgcgtctgtatcattccgcgatcaatttaaactgattacgaacggaagactgttactagttttcattattactgcattaggatatgggggaacattcgtaacttttacgtatttatctccgttattacaagaggtaacaggatttaaagcaaatacggttactatcattttattagtgtatggaatcgccattgcgatagggaatgtgattggcggaaaattatcgaatcataatccaattcgagcgctattctacatgttctttattcaagcgattatactatttgttttaacatttacggcaccatttaaggtagctgggttaatcacaattattttaatggggctattcgcatttatgaatgttccagggttacaagtatatgtcgtaatgttagctgaacgatttgtaccgagtgctgtcgatgttgcatcggcaattaatattgcggcgtttaatgctgggattgctcttggtgcttatttaggcggtattgtaacgaactcgttagggttaattcatacagcttgggtaggcggcattatggtagtaggtgctgttattttaacagcatggagcatgacattagaaaaaagagatcaagtaaaataa

SEQ ID NO: 900 - protein, 404 aa, Bacillus cereus ATCC 14579
MNSYTASSSEVQTNRRSIFALLALAISAFGIGTTEFVSVGLLPSISEDLHVSVTTAGLTVSLYALGVAFGAPVLTSLTANMSRKTLLMWIMIIFIIGNGIAAVATSFTVLLIARIISALSHGVFMSIGSTIAAALVPENKRASAIAIMFTGVTVATITGAPIGTFIGQQFGWRTSFLAIVVIGIIALIANSILIPSNMKKGASVSFRDQFKLITNGRLLLVFIITALGYGGTFVTFTYLSPLLQEVTGFKANTVTIILLVYGIAIAIGNVIGGKLSNHNPIRALFYMFFIQAIILFVLTFTAPFKVAGLITIILMGLFAFMNVPGLQVYVVMLAERFVPSAVDVASAINIAAFNAGIALGAYLGGIVTNSLGLIHTAWVGGIMVVGAVILTAWSMTLEKRDQVK

SEQ ID NO: 901 - DNA, 1173 bp, Bacillus cereus ATCC 14579
  CDS (1)..(1173): transl_table=11
ttgaattttcgtgtttatattttagctatcgcggcttttgtagtcggaacggttgagttaattataggaggaacgctcgatttaattgccaatgatttaggagtatctattagcgcagctggtcagcttataacaatattttcggtagtatttgctttgtcaggtccagttttattagctgtgacagggaagtttgaaagaaaaacattgtatgttggagcattatcgattttcttaatcggaaatattatttccgcgtttagtgtgaattacggaatgctaatgttctcaagggttatttgtgcggcaagtggttcattaattattgcgctatcggtaacacttgcttctagtgtagtagaaccgcattttcgtgcgcgtgcaattggaatcatttttatgggaattagtggatcacttgtacttggagtaccgcttggtcttgtactcggaaatgcatacggatggcgtgcaccatttgtattaatttctgtattaacagttatggcaatagcttgtatttcattgttcttaacgaaagtaccaccgacatcggtattatcaataaaagaacaacttgctactttaaaagataaaaaaattgtaagtgcacagttaacatcatttttgtttttaacggggcatttaacattgtatgcatatttaacaccgtttttaaaagatgtcatgcatgttgaagcaaactggataagtgtgttttactttattttcggaatcgcagcagtaattggcggcgggttcggtggatggcttgctgataaatggggatcgaagaaaagtattatctcgattattatcgtatttgcatgtgcaatcttcatactgccattaatgacattctcattcccgctcttcatcattatgatgggactttggagtatgctgagctgggcgatttcaccagcacagcaaaattatttaattgaaattgcaccggaatcagctggtattcagcaaggtttaaataactctgcgcttcatttaggaattgcactcggttcaacagtaggcggagttgttattgaaaaatcatctgttatgtataatgcttgggtaggcggtggctttattatattagcactgctttgcgcgattttctcgattacgagaggacgctctactcagttcgtaaaagaagaatctatcgtttga

SEQ ID NO: 902 - protein, 390 aa, Bacillus cereus ATCC 14579
MNFRVYILAIAAFVVGTVELIIGGTLDLIANDLGVSISAAGQLITIFSVVFALSGPVLLAVTGKFERKTLYVGALSIFLIGNIISAFSVNYGMLMFSRVICAASGSLIIALSVTLASSVVEPHFRARAIGIIFMGISGSLVLGVPLGLVLGNAYGWRAPFVLISVLTVMAIACISLFLTKVPPTSVLSIKEQLATLKDKKIVSAQLTSFLFLTGHLTLYAYLTPFLKDVMHVEANWISVFYFIFGIAAVIGGGFGGWLADKWGSKKSIISIIIVFACAIFILPLMTFSFPLFIIMMGLWSMLSWAISPAQQNYLIEIAPESAGIQQGLNNSALHLGIALGSTVGGVVIEKSSVMYNAWVGGGFIILALLCAIFSITRGRSTQFVKEESIV

SEQ ID NO: 903 - DNA, 1215 bp, Bacillus cereus ATCC 14579
  CDS (1)..(1215): transl_table=11
ttgagttcatatacagtaccatcttcggaagctcagacgagccgaagaagtatgtttgctttattagcgctagcaattagtgcgtttgggattggtacgaccgagtttattagtgttggtttactaccatctatttcaaaagatttaaatgtttcggttacaacagccggtttaacggtttccttatatgcgttaggagcagcggtaggagctcctgttttaacagcgttaacggctagtatgtcgcgaaagacattattaatgtggattatggttattttcattattggtaatggcattgcggcggtagcaacaagcttcactgtattaattattgcaagaattgtatctgcgtttgcacatggtgtgtttatgtcaattggatctacaattgcagctgcaatcgtaccagagaataaacgtgctagcgcaattgcgattatgtttactggattaacagttgcgactattactggtgtgccaattggaacatttatcggtcaacaatttggctggagagcgtcatttatggcgattgttgtaattggaattattgctttcatcgcacacagtatactcgtcccatctaatttaaaaaatggtgtacctgtatcgtttcgtgatcaatttaaattaattaaaaatggaagactattacttgttttcattattactgcacttggatacggcggtacattcgtaacatttacgtatttatctccgttattacaagaagtaacaggatttgaagcaagtactgttactatcattttattagtgtatggaatcgcaattgcgatagggaatatggtcggcggaaaattatcgaatcataatccgattcgagcgctattttacatgttcttgattcaagcgattatattatttgttttaacatttacagcgccatttaaagtagctggattaatcacaattattttcatgggactattcgcatttatgaatgttccggggctacaagtatatgtagttatattggcagagcgctttgttccgagtgcggttgatgttgcttcagcaattaatattgccgcatttaacggagggatcgctttaggttcttatataggtggccttgtaacgaattcattaggattaatccatactgcttgggtaggtggccttatggtagtagccgctgttattttaacagcgtggagcatgacattagaaaaaagagatcaagtaaaataa

SEQ ID NO: 904 - protein, 404 aa, Bacillus cereus ATCC 14579
MSSYTVPSSEAQTSRRSMFALLALAISAFGIGTTEFISVGLLPSISKDLNVSVTTAGLTVSLYALGAAVGAPVLTALTASMSRKTLLMWIMVIFIIGNGIAAVATSFTVLIIARIVSAFAHGVFMSIGSTIAAAIVPENKRASAIAIMFTGLTVATITGVPIGTFIGQQFGWRASFMAIVVIGIIAFIAHSILVPSNLKNGVPVSFRDQFKLIKNGRLLLVFIITALGYGGTFVTFTYLSPLLQEVTGFEASTVTIILLVYGIAIAIGNMVGGKLSNHNPIRALFYMFLIQAIILFVLTFTAPFKVAGLITIIFMGLFAFMNVPGLQVYVVILAERFVPSAVDVASAINIAAFNGGIALGSYIGGLVTNSLGLIHTAWVGGLMVVAAVILTAWSMTLEKRDQVK

SEQ ID NO: 905 - DNA, 1182 bp, Shigella flexneri 2a str. 2457T
  CDS (1)..(1182): transl_table=11
atgaaaaaagtcattttatctttggctctgggcacgtttggtttggggatggccgaatttggcattatgagcgtgctcacggagctggcgcataacgtaggaatttcgattcctgctgccgggcatatgatctcgtattatgcactggtggtggtggtcggtgcgccaatcatcgcactcttttccagccgctactcactcaaacatatcttgttgtttctggtggcgttgtgcgtcattggcaacgccatgttcacgctctcttcgtcttacctgatgctcgccattggtcggctggtatccggctttccgcatggcgcattttttggcgtcggagcgatcgtgttatcaaaaattatcaaacccggaaaagtcaccgccgccgtggcggggatggtttccgggatgacagtcgccaatttgctgggcattccgctgggaacgtatttaagtcaggaatgctggcgttacacctttttattgatcgctgtttttaatattgcggtgatggcatcggtctatttttgggtgccagatattcgcgacgaggcgaaaggaaatctgcgcgaacaatttcactttttgcgcagcccggccccgtggttaattttcgccgccacgatgtttggcaacgcaggtgtgtttgcctggttcagctacgtaaagccatacatgatgtttatttccggtttttcggaaacggcgatgacctttattatgatgttagttgggctagggatggtgctgggaaatatgctaagtggcaggatttcaggacgttattcaccactgcgcattgcagcagtgactgactttatcattgtactggcactgctgatgctctttttctgcggcggcatgaaaacaacgtcgcttatttttgcttttatttgttgcgcgggattatttgccctttcagcacctctgcaaatattgttactgcaaaatgccaaaggaggagagttattaggtgccgcaggtgggcaaatagcgtttaacctcggtagcgccgtcggcgcatattgcggaggtatgatgctgacgctggggctggcatataattacgtggcgctgcctgccgccctgctttcgtttgctgcgatgtcatcgttgctgctgtatggtcgctataagcgccagcaagcggcggatagtccggtgctggcgaaaccactggggtag

SEQ ID NO: 906 - protein, 393 aa, Shigella flexneri 2a str. 2457T
MKKVILSLALGTFGLGMAEFGIMSVLTELAHNVGISIPAAGHMISYYALVVVVGAPIIALFSSRYSLKHILLFLVALCVIGNAMFTLSSSYLMLAIGRLVSGFPHGAFFGVGAIVLSKIIKPGKVTAAVAGMVSGMTVANLLGIPLGTYLSQECWRYTFLLIAVFNIAVMASVYFWVPDIRDEAKGNLREQFHFLRSPAPWLIFAATMFGNAGVFAWFSYVKPYMMFISGFSETAMTFIMMLVGLGMVLGNMLSGRISGRYSPLRIAAVTDFIIVLALLMLFFCGGMKTTSLIFAFICCAGLFALSAPLQILLLQNAKGGELLGAAGGQIAFNLGSAVGAYCGGMMLTLGLAYNYVALPAALLSFAAMSSLLLYGRYKRQQAADSPVLAKPLG

SEQ ID NO: 907 - DNA, 1173 bp, Helicobacter hepaticus ATCC 51449
  CDS (1)..(1173): transl_table=11
atgaacaaatttgctttgaatgcaacaagcaaaacgattttagttttggctcttagctctttttgtatgggagttacagaatttattattgcaggtgttttacaagatgtaaaggcatattttggtgtagattctaatcaggcaggattgcttacgactatgtatgcagtgggtgtagtaattggcgcaccacttttaagcattcctctaagtggatttaatcgtaaattgcagcttttgcttaatcttggtgtgtttgctttggcaaattttgtgatttatatcagtgataattttatactcaatgtgattgcacgatttatcgcaggcacacaacacggagtgttttttgttattgctacacttacggctattcaagtttcttccaaggaaaaagaatctcgcaatctcgcccttatggtgtccggattgacgattgcacttgtaagtggcgttcctttggggacatttattgggcagatttttggctttaaatctattttcttgcttatttgcctttgcacacttattgcttttattagcgcaattgcttttatgccaagccatttgcaaggctgcaaaacgcatataaacgcactttttaaggcttttttacatattccattacttaaagcctatgcaattacgatatgcacttgtggtggggcatttgtactttatacttatgtaacagatttactcacacaaaaaagccattttaatgaggcgagcattgtatatattttgttactttatggcatatttgcaattttagggaatctctttggcggtaggcttgcagacaataaaggctcaagacgcgctttacaaatcgtgctctttttacaaattattttttacgctcttgtgagtgtgagcgcccattcacaagtgtttgttgtgattaatttagcgattatgggttttttatcttttgcctcaatcccagcgctcaaagtgaatgcaatgaatatggcacgtaaatacacgccagattctatggatagttcagtaagtgtcaatgaagcagcctttaatgtaggcattgcattggcaaatcaaattggtggcttagtcgttgttgcaccatttttgggtgttagttttaatcctctttttgcttcgctttttgcacttcctgcatttattttagtgctacgtaagatggaataa

SEQ ID NO: 908 - protein, 390 aa, Helicobacter hepaticus ATCC 51449
MNKFALNATSKTILVLALSSFCMGVTEFIIAGVLQDVKAYFGVDSNQAGLLTTMYAVGVVIGAPLLSIPLSGFNRKLQLLLNLGVFALANFVIYISDNFILNVIARFIAGTQHGVFFVIATLTAIQVSSKEKESRNLALMVSGLTIALVSGVPLGTFIGQIFGFKSIFLLICLCTLIAFISAIAFMPSHLQGCKTHINALFKAFLHIPLLKAYAITICTCGGAFVLYTYVTDLLTQKSHFNEASIVYILLLYGIFAILGNLFGGRLADNKGSRRALQIVLFLQIIFYALVSVSAHSQVFVVINLAIMGFLSFASIPALKVNAMNMARKYTPDSMDSSVSVNEAAFNVGIALANQIGGLVVVAPFLGVSFNPLFASLFALPAFILVLRKME

SEQ ID NO: 909 - DNA, 1167 bp, Helicobacter hepaticus ATCC 51449
  CDS (1)..(1167): transl_table=11
atgataaaaacaaatcctcttttgcttcctacgctaatgcttggtgtatttgcgcttttgagtatggagcttggaatgatgggtgtgctgcctatcgtggcggaagtctataatgtgagtgtcgcagacgcggggtgggttgtgagtatttttgcactcattgttgcgcttgtcgcaccgattttacccccgcttttgacgaagtatgacgcgaaaaaagttttgctattttgcctgcttatctttagcgttagctcgtttttggcagccttttgcacaaattttattgtgttgcttatcttgcgtgcaattccagcattttttcaccctatcttttgcgcctttgcctttagtatggcagcggattctgtcccacacaacgaatccccaaaggcaatcgcaaagatttttatcgctgtctctgcgggtatgacgcttggggtgccgcttactagctttatcgcaagcaatacaagccttgaaatgtcttttatcttttttggtgcgcttaacgctctaagcctccttgccacacttttatttatcccaaatcaaaagcaagagcaaaaagctccacaaaacgagcaattcaaggtattagcaaagcccatagtgtgggtttctgtcattgttgtaatgctcctaaatggagcaatgtttggcttttatagctatatgagtgagtttttgctccatttcacgcaggtttcttttaatctcattagcgcgcttttgcttatctatgggctaagcaatgtcatcggcaatttcattgcgggtaaaagccttgtgagtgcgcccaatgcgactttaagaatcgtgcctttaagcctcattgtgttatataacgcactcttttttggtgggggcaatgtttggggtgcaagtgtgattctcatcattcttggcatctttgcggggattggtaataatatggcgcaatttgtcgtaacctcgcctatcccagaggcaaaggaactcgcaaatggacttttcatcagtgctgcaaatatcggtatcacgcttggcacttcgctttgtgggctgtttatctcactcaatggctcacgctttgcagttttagcggcagtgtgcttggtggttttaagcattatatttttaatgcttagagggcagattctcataaaaagcaaggagacaaagtga

SEQ ID NO: 910 - protein, 388 aa, Helicobacter hepaticus ATCC 51449
MIKTNPLLLPTLMLGVFALLSMELGMMGVLPIVAEVYNVSVADAGWVVSIFALIVALVAPILPPLLTKYDAKKVLLFCLLIFSVSSFLAAFCTNFIVLLILRAIPAFFHPIFCAFAFSMAADSVPHNESPKAIAKIFIAVSAGMTLGVPLTSFIASNTSLEMSFIFFGALNALSLLATLLFIPNQKQEQKAPQNEQFKVLAKPIVWVSVIVVMLLNGAMFGFYSYMSEFLLHFTQVSFNLISALLLIYGLSNVIGNFIAGKSLVSAPNATLRIVPLSLIVLYNALFFGGGNVWGASVILIILGIFAGIGNNMAQFVVTSPIPEAKELANGLFISAANIGITLGTSLCGLFISLNGSRFAVLAAVCLVVLSIIFLMLRGQILIKSKETK

SEQ ID NO: 911 - DNA, 1176 bp, Corynebacterium striatum
  CDS (1)..(1176): transl_table=11
atgccttttgccctctacatgcttgccctggcggtcttcgtcatgggcacttcagaattcatgctcgcgggattgctccccgcgatcgcgaccgaacttgacgtctcggtcggcactgcgggcctgctgacctccgcattcgcagtcggtatggtcgtcggcgcgccagtgatggcggcattcgctcgccgttggccaccgcggctcacattgatcgtttgccttctcgtgttcgcgggaagccacgtcatcggagcgatgacaccagtgttctctctcctgctcatcacccgggtgctcagcgctctcgcaaacgcaggattcctcgccgtagcactgagcacggccactaccctcgtgccagcgaaccagaaggggcgtgcactgtcgatcctgctctccggcacgacgatcgcaaccgtcgtgggcgtccccgccggggcactgctcggcacagcgctgggctggcgaacgacgttctgggcgatcgccatcctctgtattcccgcggccgttggagtcattcgtggcgtcacgaacaatgttggtcggagcgagactagcgcgacctcaccaaggctccgtgtcgagctcagccagttggcgacgccgcggctcatcctggccatggcactcggagcgctgatcaacggagggacctttgcggcattcaccttcctggcacccatcgtgaccgagaccgcgggcttggccgaagcgtgggtgtccgtcgcgctggtgatgttcggcatcggatcgttccttggcgtcacgatcgcaggacgactatcagatcaacgacctggcctcgtgctcgcagtcggcggaccgctattgctgacaggctggatcgtgttggcagtggtcgcatctcatcccgttgcgcttatcgtcctcgtcctcgttcagggattcctgtcgttcggcgtcggcagtactctgatcacgcgtgtgctgtatgcagcatcgggtgcgccaacgatgggcggttcgtacgcaaccgcagcattgaatatcggagctgcagcggggcccgtgcttggtgcgctcgggctcgcgaccgggctggggctgctcgcgccggtttgggtcgcttcggtgctgacagcgatcgctctcgtcatcatgcttctcaccagacgcgcgcttacgaagaccgcggcggaggccaattga

SEQ ID NO: 912 - protein, 391 aa, Corynebacterium striatum
MPFALYMLALAVFVMGTSEFMLAGLLPAIATELDVSVGTAGLLTSAFAVGMVVGAPVMAAFARRWPPRLTLIVCLLVFAGSHVIGAMTPVFSLLLITRVLSALANAGFLAVALSTATTLVPANQKGRALSILLSGTTIATVVGVPAGALLGTALGWRTTFWAIAILCIPAAVGVIRGVTNNVGRSETSATSPRLRVELSQLATPRLILAMALGALINGGTFAAFTFLAPIVTETAGLAEAWVSVALVMFGIGSFLGVTIAGRLSDQRPGLVLAVGGPLLLTGWIVLAVVASHPVALIVLVLVQGFLSFGVGSTLITRVLYAASGAPTMGGSYATAALNIGAAAGPVLGALGLATGLGLLAPVWVASVLTAIALVIMLLTRRALTKTAAEAN

SEQ ID NO: 913 - DNA, 1203 bp, Bordetella pertussis Tohama I
  CDS (1)..(1203): transl_table=11
atgcctatcgcattatgggcgctggccgccggcgcctttggaatcggcacgaccgagttcgtcatcatggggctgctgcccgaggtcggcgccgacctgggcgtgtcgatcccgcaggccgggctgctggtgaccggctacgccctcggcgtggtggtcggcgcgccgccggtcgccatcctgaccgcgcggctgccgcgcaagacgctgctgctcggcctgatgctgatcttcacgctgggcaacctggcctgcgcgctggcgccaggctacggcgccctgatggccgcccgcgtgctgacgtcgctggcccacggcgcgttcttcggcgtgggctcggtcgtcgcgaccagcctggtgcggcccgacaagcaggcctcggccatcgcgctgatgttcaccggactgacgctggccaacgtgctgggcgtgcccttcggcacctggctgggccaggcatggggctggcgcgccacgttctgggccgtgaccgcggtcgggatcgccgcgatggcggccatcatgtactgggtgccggccagccgcggccagcaccaggccgacctggccggagaactgcgcgcgctggcccgccctcaggtgctgctgggctttgccatgacggtcctgggctttggcggcgtattcaccaccttcacctacatcgcgcccatcctcaccggcgtcagcggcatcgcggccgcggccgtatcgcccatcctgctgctgttcggggtggggctggtggccggcaatacgctgggcggcaggctggccgaccggcgcctgatgcccacgctggtgggcagcctggcggtgttggcggcggtgctggccgctttcgcatggaccgcgcaccactcgatcgcggccgtggccacggtggcgctgctgggcgcggcggccttcgccaccgtgccgccgctgcaaatgcgtgtgctgcagcaggccggcggcgcacccaacctggcctcggccttcaatatcgcggccttcaacctgggcaatgccgctggcgcctggctgggcggactgaccatcgaccacggccccggcctggccgccacgccgctggtggcggcggcggtgaccggcggcggcctggccctggcgctgctgagctggagccgcgatcggcgcaacgacgcgaatcagcgcgcgccggcgctggccgcgcgggcctgtgaatcaggacagatgtga

SEQ ID NO: 914 - protein, 400 aa, Bordetella pertussis Tohama I
MPIALWALAAGAFGIGTTEFVIMGLLPEVGADLGVSIPQAGLLVTGYALGVVVGAPPVAILTARLPRKTLLLGLMLIFTLGNLACALAPGYGALMAARVLTSLAHGAFFGVGSVVATSLVRPDKQASAIALMFTGLTLANVLGVPFGTWLGQAWGWRATFWAVTAVGIAAMAAIMYWVPASRGQHQADLAGELRALARPQVLLGFAMTVLGFGGVFTTFTYIAPILTGVSGIAAAAVSPILLLFGVGLVAGNTLGGRLADRRLMPTLVGSLAVLAAVLAAFAWTAHHSIAAVATVALLGAAAFATVPPLQMRVLQQAGGAPNLASAFNIAAFNLGNAAGAWLGGLTIDHGPGLAATPLVAAAVTGGGLALALLSWSRDRRNDANQRAPALAARACESGQM

SEQ ID NO: 915 - DNA, 1182 bp, Bordetella pertussis Tohama I
  CDS (1)..(1182): transl_table=11
atgttgttgcccatcattctgctgtccgcggcaggctttaccattctgaccacggaattcctgatcgtcggcctgctgccgcccctggcgcgcgacctgcaggtcaccgtgtcgcaggccggcctgctggtgtcgctgttcgccttcacggtggccgccgccggcccggtgctgaccgccctgctggccaatctcgaacgcaagcgcctgttcgtctgggtgctggtgctgttcggcctggccaatgccctggccgccgtctcgcccaacatctgggtcatggcgttcgcccgcttcgtgcccgccctggcgctgcccgtgttctggtcgctggccagcgccaccgccgtcgagctggtcggccccgcctatgccgggcgcgccatatccatcatcggcttcggcatcgtcgccgccaccgtcctgggcattcccatcggcgtgctggtttccgacgccttcggctggcgcgccgccttcgcggtgctgaccgccgtggcctgggccaaggccctgctgctggcctactttcccaaaccgaggacggggcgccagaaccagcgcctgagcacccaactgcgcatcctgcgcgaccccaggctgctgggccatgtgatgctgtccctgcttgtcttcaccggcatgttcaccgcctacacctacctggccgacatgctcgagcacctggccggcttcgacggcaaggtcgtgggctggaccatgatggccttcggcggcgccggcatattgggcaactggctcggcggacgcctggtcgaccgcagcccgctgggcgccaccatcctgttcagcctgatcatgaccgccggcctgctgttcgtcgcccaggtcatgcaggcgccgtactggctggcgctcgcgctggcgctgtggggcgtcgcccaggccgcgctgctgacggtctgccacgtgcgcgtcatcaaggccgccccgcaggcgccggccttcgccgcgtcgttgaacatctcgggcgccaacatcggcatcggcctgggcgcagccgtgggcggccacttcatcgacagccgcggcctggcgtccctgggcacggtcgccgccgtcatcgtcctcgcggcggtgggcctggccatcgcgctggtgctgtcgcggcgcccgtccacgccccgcccggcggcgcccgcgccgggcatcgaaccatga

SEQ ID NO: 916 - protein, 393 aa, Bordetella pertussis Tohama I
MLLPIILLSAAGFTILTTEFLIVGLLPPLARDLQVTVSQAGLLVSLFAFTVAAAGPVLTALLANLERKRLFVWVLVLFGLANALAAVSPNIWVMAFARFVPALALPVFWSLASATAVELVGPAYAGRAISIIGFGIVAATVLGIPIGVLVSDAFGWRAAFAVLTAVAWAKALLLAYFPKPRTGRQNQRLSTQLRILRDPRLLGHVMLSLLVFTGMFTAYTYLADMLEHLAGFDGKVVGWTMMAFGGAGILGNWLGGRLVDRSPLGATILFSLIMTAGLLFVAQVMQAPYWLALALALWGVAQAALLTVCHVRVIKAAPQAPAFAASLNISGANIGIGLGAAVGGHFIDSRGLASLGTVAAVIVLAAVGLAIALVLSRRPSTPRPAAPAPGIEP

SEQ ID NO: 917 - DNA, 1164 bp, Bordetella parapertussis 12822
  CDS (1)..(1164): transl_table=11
atgaaatcctcggccgcattgtttgccctggccaccggcgcattcgccatcggcaccacggagttcacgccgatggggctgctgcccgtcatcgccgacggtgtgcaggtaagcattcccagcgcgggcatgctgatctcggcctacgcggtgggcgtgatgctcggagcgccggtcatgaccctgctgtttgcccgtttcggcaagcgcgcggccctgatgccgctgatgctgatcttcaccgtcggcaacctgctctcggcgttcgcgccgagctactcgaccctgctgctgtcgcgcctgatcaccagcctcaaccatggcgccttcttcggcatcggggccgtggtggcggccagcctggtgccgcgcgaaaagcaggccagcgccatcgcggccatgttcatgggcctgaccctggccaatatcggcggcgtgccggtggcgacctggatcgggcagcaggtgggctggcggcttgccttcggcgggacggcggccctgggcctggtcaccatcgccgcgctgtggctggcgctgcccaagggcgagcccggcaagcgtccggacgtgcgccgcgagctgggggtgctcacgcgccccgaggtcctgctggccatgggcaccacggtgctgggcgcgggcgccatgttcgcgctctacacctatgtggcgccggtcctggccgacctgacccacgccagccccaacttcgtggccttcgccctggtgttgatcggcatcggcttcacgctgggcaatacgctgggcggccgcctggccgactggtcgctcgacggcgccaccaagctgatcctggggctgctcgcggtcatcatggccgtgctgccgctgctgctgaccacccatgcgggcgcggccatcgggctggtggtgtgggcggccgcggccttcggcatcgttccgccggtgcagatgcgggtcatgcaggcggcggcccaggcgccgggcctggcctcgtcggtcaacgtcggcgcgttcaacctgggcaacgcgctgggcgcggcgctgggcggcgcggccatcggccagggcctgggctatgcatccgtgcccctggtcggcgcggcgctggccgccggcggcctgggcctggtttggctgggcaatgccggccgccgccgggtggcgcagggcgcctga

SEQ ID NO: 918 - protein, 387 aa, Bordetella parapertussis 12822
MKSSAALFALATGAFAIGTTEFTPMGLLPVIADGVQVSIPSAGMLISAYAVGVMLGAPVMTLLFARFGKRAALMPLMLIFTVGNLLSAFAPSYSTLLLSRLITSLNHGAFFGIGAVVAASLVPREKQASAIAAMFMGLTLANIGGVPVATWIGQQVGWRLAFGGTAALGLVTIAALWLALPKGEPGKRPDVRRELGVLTRPEVLLAMGTTVLGAGAMFALYTYVAPVLADLTHASPNFVAFALVLIGIGFTLGNTLGGRLADWSLDGATKLILGLLAVIMAVLPLLLTTHAGAAIGLVVWAAAAFGIVPPVQMRVMQAAAQAPGLASSVNVGAFNLGNALGAALGGAAIGQGLGYASVPLVGAALAAGGLGLVWLGNAGRRRVAQGA

SEQ ID NO: 919 - DNA, 1188 bp, Bordetella parapertussis 12822
  CDS (1)..(1188): transl_table=11
atgttgttgcccatcattctgctgtccgcggcaggctttaccattctgaccacggaattcctgatcgtcggcctgctgccgcccctggcgcgcgacctgcaggtcaccgtgtcgcaggccggcctgctggtatcgctgttcgccttcacggtggccgccgccggcccggtgctgaccgccctgctggccaatctcgagcgcaagcgcctgttcgtctgggtgctggtgctgttcggcctggccaatgccctggccgccgtctcgcccaacatctgggtcatggcgttcgcccgcttcgtgcccgccctggcgctgcccgtgttctggtcgctggccagcgccaccgccgtcgagctggtcggccccgcctatgcggggcgcgccatatccatcatcggcttcggcatcgtcgccgccaccgtcctgggcattcccatcggcgtgctgatttccgacgccttcggctggcgcgccgccttcgcggtgctgaccgccgtggcctgggccaaggccctgctgctgctgctggcctactttcccaaacccaggacggggcgccagaaccagcgcctgagcacccagctgcgcatcctgcgcgaccccaggctgctgggccatgtgatgctgtccctgcttgtcttcaccggcatgttcaccgcctacacctacctggccgacatgctcgagcgcctggccggcttcgacggcaaggtcgtgggctggaccatgatggccttcggcggcgccggcatattgggcaactggctcggcgggcgcctggtcgaccgcagcccgctgggcgccaccatcctgttcagcctgatcatgaccgccggcctgctgttcgtcgcccaggccatgcaggcgccgtactggctggcgctcgcgctggcgctgtggagcgtcgcccaggccgcgctgctgacggtctgccacgtgcgcgtcatcaaggccgccccgcaggcgccggccttcgccgcgtcgttgaacatctcgggcgccaacatcggcatcggcctgggcgcagccgtgggcggccacttcatcgacagccgcggcctggcgtccctgggcacggtcgccgccgtcatcgtcctcgcggcggtgggcctggccatcgcgctggtgctgtcgcggcgcccgtccacgccccacccggcggcgcccgcgccgggcgtcgaaccatga

SEQ ID NO: 920 - protein, 395 aa, Bordetella parapertussis 12822
MLLPIILLSAAGFTILTTEFLIVGLLPPLARDLQVTVSQAGLLVSLFAFTVAAAGPVLTALLANLERKRLFVWVLVLFGLANALAAVSPNIWVMAFARFVPALALPVFWSLASATAVELVGPAYAGRAISIIGFGIVAATVLGIPIGVLISDAFGWRAAFAVLTAVAWAKALLLLLAYFPKPRTGRQNQRLSTQLRILRDPRLLGHVMLSLLVFTGMFTAYTYLADMLERLAGFDGKVVGWTMMAFGGAGILGNWLGGRLVDRSPLGATILFSLIMTAGLLFVAQAMQAPYWLALALALWSVAQAALLTVCHVRVIKAAPQAPAFAASLNISGANIGIGLGAAVGGHFIDSRGLASLGTVAAVIVLAAVGLAIALVLSRRPSTPHPAAPAPGVEP

SEQ ID NO: 921 - DNA, 1227 bp, Bordetella bronchiseptica RB50
  CDS (1)..(1227): transl_table=11
atggccacccccctcatcgacggccccgaaaacgccgacacctccgaccacttccaacagaagccgacgtcctggaacggcgtcttcgccatgtcggtttgcgccttcgcgctgatcgcctcggaattcctgcccgtcagcctgctgactcccatggcccgcgacctggacgtcaccgaaggcatgaccggccagggcatctccatctccggcgccttcgccgtactcaccagcctgttcatctcgacgctggccggcagcctgaatcgcaaaacgctgctgctgatcctgacgctggcaatgggcgtgtccggcgccatcgtcgccctggctccgaactacttcatctacatgctgggccgcgccctgatcggcgtggtcgtcggcggcttctggtccatgtcggccgccaccgccatcagaatggtgccgacgcgcgacgtgccgcgcgccctggccatcgtcaacggcggcaacgcgctcgccaccgtcgtggccgccccgatgggcgcctatctcggcaccgtcgtcggctggcgcggcgccttcctgtgcctggtgccggtgtcgctgatcgcattggcctggcaatggaaaacgctgccctccatgcccgctgccgcacgcgcgcccggcgccggcaatgccttcaaggtgctcaccctcttcaggcatccgggcgtcgccgtgggcatgctggccagcagcctgctgttcatggggcagttctcgctcttcacctacgtgcgccccttcctggaaatcgtcaccggcgtacatggcgccacgatctccctgattcttctcgccatcggtgcggcaggtttcataggcacggcgctcatcggccgggtcctgcagcggcgtttctaccaaacgctgatcgtcatcccgctattgatggccgcgaccgccctggccctgatcgtcttcggcgacgtgatcggtatcgtcgtcgcgctgctcgccctgtggggcctgaccggtacgtcggcccccgtaggctggtgggcctggatcgccaaggtgttccccgaagacgccgaagccggcggcggtttgttcgtcgccgtcgtccagctatcgattgcgctgggctccaccgtgggcggcctgctgttcgaccgcagcggctaccagagcgccttcgtcatgagcgccgtgttgctgacggtctgcgccatgctgaccgccctgaccgcgcgcaaactggccgcgcacgcatga

SEQ ID NO: 922 - protein, 408 aa, Bordetella bronchiseptica RB50
MATPLIDGPENADTSDHFQQKPTSWNGVFAMSVCAFALIASEFLPVSLLTPMARDLDVTEGMTGQGISISGAFAVLTSLFISTLAGSLNRKTLLLILTLAMGVSGAIVALAPNYFIYMLGRALIGVVVGGFWSMSAATAIRMVPTRDVPRALAIVNGGNALATVVAAPMGAYLGTVVGWRGAFLCLVPVSLIALAWQWKTLPSMPAAARAPGAGNAFKVLTLFRHPGVAVGMLASSLLFMGQFSLFTYVRPFLEIVTGVHGATISLILLAIGAAGFIGTALIGRVLQRRFYQTLIVIPLLMAATALALIVFGDVIGIVVALLALWGLTGTSAPVGWWAWIAKVFPEDAEAGGGLFVAVVQLSIALGSTVGGLLFDRSGYQSAFVMSAVLLTVCAMLTALTARKLAAHA

SEQ ID NO: 923 - DNA, 1164 bp, Bordetella bronchiseptica RB50
  CDS (1)..(1164): transl_table=11
atgaaatcctcggccgcattgtttgccctggccaccggcgcattcgccatcggcaccacggagttcacgccgatggggctgctgcccgtcatcgccgacggtgtgcaggtaagcattcccagcgcgggcatgctgatctcggcctacgcggtgggcgtgatgctcggagcgccggtcatgaccctgctgtttgcccgtttcggcaagcgcgcggccctgatgtcgctgatgctgatcttcaccgtcggcaacctgctctcggcgttcgcgccgagctactcgaccctgttgctgtcgcgcctgatcaccagcctcaaccatggcgccttcttcggcatcggggccgtggtggcggccagcctggtgccgcgcgaaaagcaggccagcgccatcgcggccatgttcatgggcctgaccctggccaatatcggcggcgtgccggtggcgacctggatcgggcagcaggtgggctggcggcttgccttcggcgggacggcggccctgggcctggtcaccatcgccgcgctgtggctggcgctgcccaagggcgagcccggcaagcgtccggacgtgcgccgcgagctgggggtgctcacgcgcccggaggtcctgctggccatgggcaccacggtgctgggcgcgggcgccatgttcgcgctctacacctatgtggcgccggtcctggccgacctgacccacgccagccccaacttcgtggccttcgccctggtgctgatcggcatcggcttcacgctgggcaatacgctgggcggccgcctggccgactggtcgctcgacggcgccaccaagctgatcctggggctgctcgcggtcatcatggccgtgctgccgctgctgctgaccacccatgcgggcgcggccatcgggctggtggtgtgggcggccgcggccttcggcatcgttccgccggtgcagatgcgggtcatgcaggcggcggcccaggcgccgggcctggcctcgtcggtcaacgtcggcgcgttcaacctgggcaacgcgctgggcgcggcgctgggcggcgcggccatcggccagggcctgggctatgcatccgtgcccctggtcggcgcggcgctggccgccggcggcctgggcctggtctggctgggcaatgccggccgccgccgggtggcgcagggcgcctga

SEQ ID NO: 924 - protein, 387 aa, Bordetella bronchiseptica RB50
MKSSAALFALATGAFAIGTTEFTPMGLLPVIADGVQVSIPSAGMLISAYAVGVMLGAPVMTLLFARFGKRAALMSLMLIFTVGNLLSAFAPSYSTLLLSRLITSLNHGAFFGIGAVVAASLVPREKQASAIAAMFMGLTLANIGGVPVATWIGQQVGWRLAFGGTAALGLVTIAALWLALPKGEPGKRPDVRRELGVLTRPEVLLAMGTTVLGAGAMFALYTYVAPVLADLTHASPNFVAFALVLIGIGFTLGNTLGGRLADWSLDGATKLILGLLAVIMAVLPLLLTTHAGAAIGLVVWAAAAFGIVPPVQMRVMQAAAQAPGLASSVNVGAFNLGNALGAALGGAAIGQGLGYASVPLVGAALAAGGLGLVWLGNAGRRRVAQGA

SEQ ID NO: 925 - DNA, 1185 bp, Bordetella bronchiseptica RB50
  CDS (1)..(1185): transl_table=11
atgttgttgcccatcattctgctgtccgcggcaggctttaccattctgaccacggaattcctgatcgtcggcctgctgccgcccctggcgcgcgacctgcaggtcaccgtgtcgcaggccggcctgctggtatcgctgttcgccttcacggtggccgccgccggcccggtgctgaccgccctgctggccaatctcgaacgcaagcgcctgttcgtctgggtgctggtgctgttcggcctggccaatgccctggccgccgtctcgcccaacatctgggtcatggcgttcgcccgcttcgtgcccgccctggcgctgcccgtgttctggtcgctggccagcgccaccgccgtcgagctggtcggccccgcctatgcggggcgcgccatatccatcatcggcttcggcatcgtcgccgccaccgtcctgggcattcccatcggcgtgctgatttccgacgccttcggctggcgcgccgccttcgcggtgctgaccgccgtggcctgggccaaggccctgctgctgctggcctactttcccaaacccaggacggggcgccagaaccagcgcctgagcacccagctgcgcatcctgcgcgaccccaggctgctgggccatgtgatgctgtccctgcttgtcttcaccggcatgttcaccgcctacacctacctggccgacatgctcgagcgcctggccggcttcgacggcaagatcgtgggctggaccatgatggccttcggcggcgccggcatattgggcaactggctcggcgggcgcctggtcgaccgcagcccgctgggcgccaccatcctgttcagcctgatcatgaccgccggcctgctgttcgtcgcccaggccatgcaggcgccgtactggctggcgctcgcgctggcgctgtggggcgtcgcccaggccgcgctgctgacggtctgccacgtgcgcgtcatcaaggccgccccgcaggcgccggccttcgccgcgtcgttgaacatctcgggcgccaacatcggcatcggcctgggcgcagccgtgggcggccacttcatcgacagccgcggcctggcgtccctgggcacggtcgccgccgtcatcgtcctcgcggcggtgggcctggccatcgcgctggtgctgtcgcggcgcccgtccacgccccacccggcggcgcccgcgccgggcgtcgaaccatga

SEQ ID NO: 926 - protein, 394 aa, Bordetella bronchiseptica RB50
MLLPIILLSAAGFTILTTEFLIVGLLPPLARDLQVTVSQAGLLVSLFAFTVAAAGPVLTALLANLERKRLFVWVLVLFGLANALAAVSPNIWVMAFARFVPALALPVFWSLASATAVELVGPAYAGRAISIIGFGIVAATVLGIPIGVLISDAFGWRAAFAVLTAVAWAKALLLLAYFPKPRTGRQNQRLSTQLRILRDPRLLGHVMLSLLVFTGMFTAYTYLADMLERLAGFDGKIVGWTMMAFGGAGILGNWLGGRLVDRSPLGATILFSLIMTAGLLFVAQAMQAPYWLALALALWGVAQAALLTVCHVRVIKAAPQAPAFAASLNISGANIGIGLGAAVGGHFIDSRGLASLGTVAAVIVLAAVGLAIALVLSRRPSTPHPAAPAPGVEP

SEQ ID NO: 927 - DNA, 1173 bp, Chromobacterium violaceum ATCC 12472
  CDS (1)..(1173): transl_table=11
ctgcccgccgccatctacctgctcagcctgtgcattttcgcgatggccacctcggaattcatggtggccggcatgatgccgtcgctggcggcggctttccacgcgtcgctggccgatgtcggcaatctggtatccgccttcgccgccagcgtggtcgtcggcgggcccttgctgacctggcggctgcgtgcggtccggcgcaagccggcgctgttgggcctgctggcggtgttcctgatcggccagctgatcggcgcgatggccgacggctatccgcagatgctggcctcgcgcatcgtctgcggcatcgcgcaatcggccttcttcggcgtggcgctggccctggccggcgagctggtgggcatggaccgcatcgcccgcgccgccggcctggtgctgaacggcctgatgttggcttcggtggccggcctgccgatggcgacgctgctggaccggcactggggctggcggccggcgttctggctggtggcggcgctggtggggctggcgatgctgggcatcgccgccgcggtcccggccggggcaaggcccgtccgccaggatgccggcgcggagtggcgcgcgctgcggcggccatcgctgtggctggcttatctgagcagcggtttgatcataggggcggtgttcgccgtcttcacttatctcgcgccgctgttcctgcgcgtcagcggtttttccccggccatggtgccgctgctgttcggcgtctatggcgcggccaccgtgcttggcaacctggtgaccggccgcctggccgaccgccatacccggcgggtgctgcagggcggcatcctgacgctgctgctggcgatgacggccttggcgctgggcgcgcaatggcaggcgctgacgctggcggcggtgtgcctgctggggctggccggcctgccgatgaatccggcgatggtggcgcgggtggtgcgcgccggcggcagcgggccgatggtgaacagcctgcacatggcggtggtgaacctgggactgatgttcggcgcctgggccggcgggctgtgcctggacgccggctggggcctgcgcgcgcccttgtggctgggcgcggggttggccttgctggcttggctcagtttgagcttggataggcgcggcgacagctggcaagccaaggctcgtccggcggatgtgtcggtttga

SEQ ID NO: 928 - protein, 390 aa, Chromobacterium violaceum ATCC 12472
MPAAIYLLSLCIFAMATSEFMVAGMMPSLAAAFHASLADVGNLVSAFAASVVVGGPLLTWRLRAVRRKPALLGLLAVFLIGQLIGAMADGYPQMLASRIVCGIAQSAFFGVALALAGELVGMDRIARAAGLVLNGLMLASVAGLPMATLLDRHWGWRPAFWLVAALVGLAMLGIAAAVPAGARPVRQDAGAEWRALRRPSLWLAYLSSGLIIGAVFAVFTYLAPLFLRVSGFSPAMVPLLFGVYGAATVLGNLVTGRLADRHTRRVLQGGILTLLLAMTALALGAQWQALTLAAVCLLGLAGLPMNPAMVARVVRAGGSGPMVNSLHMAVVNLGLMFGAWAGGLCLDAGWGLRAPLWLGAGLALLAWLSLSLDRRGDSWQAKARPADVSV

SEQ ID NO: 929 - DNA, 1176 bp, Chromobacterium violaceum ATCC 12472
  CDS (1)..(1176): transl_table=11
atgcctgcttcccgcctcttcactccagcgctgttgacgctggcggtggccgccttcgccatcggcaccgcagaattcatcatcatgggcttgctgcccctcatcgccgccgatttgcatgtcggcctgccgcgcgccggctatctggtggccggctacgcgctgggcgtggtggccggcggcccgctgctggcgggcctgatcgcccgccaggacgaaaaacgcgcgctgagcgcgctgatggccatcttcatcgccggcaacctggcctgcttgctggcatccagcctgtggccgcttttgctggcgcgcatattcacagccctctgccacgccagcttcatcggcgcggcggcggtgatggcggctcgcctggccccgcccggcatggccggccgggcgatggcgctgatgttcagcggcatgacgctggccaatgtgctgggcgtgccggccggcacgtggctcgggcaaacagccggttggcgcgcgaccttcgccgcagtggcggcgctaggcttgatcactctgttgctgatccgctggctgttgccgacgcgctccggcgagcgcggcagcgccgaaacgccagcgcgtttgccgggtcgggtctggctggcgctgctcgccagcgcgctggccgccgccagcatgttcgcctttttcacctacctggtgccgacgctgatccagttcggcggcctgcctcctgagcactccagcgcggctctgttgttatgcggcgcgggcctggtggcgggaggctggataggcggaaggctggcggacgggaaactggtcagggcgctgatcctgacgctggtcttgctatgcggcaacctggccgctttccacctgctggctgcgcgcctgcccatcgcgttggcgctgatgacgctatggggcggccaggccttcgccctgtgcatgctgctgcaagcactggcgatacggctggcgggagaggccacatcgcgggcatccgctttcaatgtcggcgccttcaatctgggcaatgcgctgggcgcttggctggcgggtttgctactcggtcacggcggaaccttggcgcaaaccagtctactggccgcagggttggcggcgctgactttactgccggtgctgtttgtttggcgcaagaaagccgtcgacgcatcctcgcttgtccgcgcatga

SEQ ID NO: 930 - protein, 391 aa, Chromobacterium violaceum ATCC 12472
MPASRLFTPALLTLAVAAFAIGTAEFIIMGLLPLIAADLHVGLPRAGYLVAGYALGVVAGGPLLAGLIARQDEKRALSALMAIFIAGNLACLLASSLWPLLLARIFTALCHASFIGAAAVMAARLAPPGMAGRAMALMFSGMTLANVLGVPAGTWLGQTAGWRATFAAVAALGLITLLLIRWLLPTRSGERGSAETPARLPGRVWLALLASALAAASMFAFFTYLVPTLIQFGGLPPEHSSAALLLCGAGLVAGGWIGGRLADGKLVRALILTLVLLCGNLAAFHLLAARLPIALALMTLWGGQAFALCMLLQALAIRLAGEATSRASAFNVGAFNLGNALGAWLAGLLLGHGGTLAQTSLLAAGLAALTLLPVLFVWRKKAVDASSLVRA

SEQ ID NO: 931 - DNA, 1194 bp, Chromobacterium violaceum ATCC 12472
  CDS (1)..(1194): transl_table=11
atgcccctcgcactatgggcgctgacgctcagcgccttcgccatcggcaccacggaattcgtcatcgtcggcctgatcccctccctctccgccagcctcgcggtgccgctgccgtcggcgggcctcctggtcagcctgtacgcgctgggcgtcgctgtcggcgcgccgctgctgaccgcgctgaccggccgcctgccgcgcaagctgctgctgctcggcctgatggcgctgttcaccgccggcaacctggtggcctggcaggcgcccggctaccaggcgctgatcgccgcccgcgtgctgaccggcctggcgcacggcgtgttcttctcgatcggttccacgctggccgccggcctggtgccgaaggagaaaggcgccagtgcgatcgcgctgatgttctccggcctgacggtggcgctggtgaccggcgtgccgctcggcactttcattggccagcatttcggctggcaggccacctttctcgccgtcgcggcgctgggcgcgctggcctttgtcggcagcctgatcctggtgccgtccaagctgcccaagccggcgccggcctcgctgtccagccagctggcggtgctggcccagccgcggctgctgctggtgtacgcgatgacggcgctgggctacggcggctccttcaccgccttcaccttcctcgcgccgatgctggagaacgtgacgggcttcgcgccgggcgcggtggcgctgatcatgctgctgtacggcgcgtcggtcgccgtcggcaatatctggggcggccggctggccgaccgcagggggccggtggccgcgctgaagatcatcttcgcgggcctgtcgctggtattgctggccttgagcttcaccgccgtatccaaatggctggtggcgctgacggtgctggcctggggcgcggtggccttcggcaacgtggccggcctgcagctctacgtggtgcagctggccagggcgcgggtgccgcaggcggtggacgtggcctccggactcaacatcgccgccttcaacgtcggcatcgccggcggcgcctggctgggcggccacgtggtggccagcctgggcttgatggccacgccgtgggtgggcgcagccatcgtgctcggggcctggctgttgacggcctggtcgggtaggctggatgccgcccatgcctcgggcatgacggtctccgccgaccgcatctga

SEQ ID NO: 932 - protein, 397 aa, Chromobacterium violaceum ATCC 12472
MPLALWALTLSAFAIGTTEFVIVGLIPSLSASLAVPLPSAGLLVSLYALGVAVGAPLLTALTGRLPRKLLLLGLMALFTAGNLVAWQAPGYQALIAARVLTGLAHGVFFSIGSTLAAGLVPKEKGASAIALMFSGLTVALVTGVPLGTFIGQHFGWQATFLAVAALGALAFVGSLILVPSKLPKPAPASLSSQLAVLAQPRLLLVYAMTALGYGGSFTAFTFLAPMLENVTGFAPGAVALIMLLYGASVAVGNIWGGRLADRRGPVAALKIIFAGLSLVLLALSFTAVSKWLVALTVLAWGAVAFGNVAGLQLYVVQLARARVPQAVDVASGLNIAAFNVGIAGGAWLGGHVVASLGLMATPWVGAAIVLGAWLLTAWSGRLDAAHASGMTVSADRI

SEQ ID NO: 933 - DNA, 1200 bp, Photorhabdus luminescens subsp. laumondii TTO1
  CDS (1)..(1200): transl_table=11
atgattaaagaaaaaactgccactcatgcgggcagtaccaattttcctttcgttgctctactcgcgttagcaatgacgggattccttgcactgctcacagagacattcccggcgggcattctatcccaaataagtgacagcttggccgtttctgaagcattagctggtcaattcgttacactctacgcaattggctcacttgtcgctgcgattccactgacgacagcaacacaaggttggcgccgtcgccgattactcttgatggcacttacgggtttgttagtctttaatacgctcaccgcgttaacgtctaactatatagtggcacttgcggccagacttctttcaggcatggcaggcggcttaatctggggaatgttggttggctatgcccgacggatggtacccgatcatttaaaaggacgtgcattggctgtagccggtgtcggggcaccactggcactctctcttggcgtgccattaggaacattcattggtggaattgttggctggcgtacaacttttggtttgatgtctattctaacattggtcgttatcgcatgggtcatgttgaaagtccctgactacccaggacggactgccgaaaaacgtataccgatcaaaaaagttatcatgatccctggagtacgaccggtattaagcgttcttgtttgttgggtactggctcacagtattctttatacctatgtattgccttttgtgacacaggcggggcttgctaccaggattgatcttgtgttgttagcctttggtgtggcgtcgttgcttggaatatggatgacagggctgttaattgacaagatgttacgttcgttggtactgataagtcttgccctatttacattcgcctctctcatacttggtgttatcggtactcttcctgtctttgtttttcttgccgtgatcttatgggggctaaccttcggcggtgccgctgccctacttcaaactgcattggccgaatctgccggggaaggtgcagacgttgctcagtcgattcttgttaccttatggaatttagccattgcagccgggggcattattggcgggatattacttgaaacacttggtgccagctcgttcccgtggaccttacttgttctgttagtgctagctttgttgatcgtctggaattcaggcaactatggcttccctcataaaggaatcaaaggtaagtga

SEQ ID NO: 934 - protein, 399 aa, Photorhabdus luminescens subsp. laumondii TTO1
MIKEKTATHAGSTNFPFVALLALAMTGFLALLTETFPAGILSQISDSLAVSEALAGQFVTLYAIGSLVAAIPLTTATQGWRRRRLLLMALTGLLVFNTLTALTSNYIVALAARLLSGMAGGLIWGMLVGYARRMVPDHLKGRALAVAGVGAPLALSLGVPLGTFIGGIVGWRTTFGLMSILTLVVIAWVMLKVPDYPGRTAEKRIPIKKVIMIPGVRPVLSVLVCWVLAHSILYTYVLPFVTQAGLATRIDLVLLAFGVASLLGIWMTGLLIDKMLRSLVLISLALFTFASLILGVIGTLPVFVFLAVILWGLTFGGAAALLQTALAESAGEGADVAQSILVTLWNLAIAAGGIIGGILLETLGASSFPWTLLVLLVLALLIVWNSGNYGFPHKGIKGK

SEQ ID NO: 935 - DNA, 1239 bp, Photorhabdus luminescens subsp. laumondii TTO1
  CDS (1)..(1239): transl_table=11
gtgccagaattatttcatcataattccggccaaatgctgagcattcccatgtcaaatacagcaattaaaccaaatcctatttcttctatttctctcattttgttatctactgcttgtggttttgctgtagcgaatatttattataaccaaccattattgccaacaattgggacaagttttaacgttaatggttcaatatccggctggatcgcgacactaactcagattggctatgcggcggggcttctcttttttgggccgcttggagatacgataagccgtcgcaaactgattttctgcctgttaatcggcaatataatcagccttattttatgtgccacagcaccaaattttacatgtcttctgacaagtagcctgattgtggggataacttctatttcagcacaaatcattattcctgccgtatctggttgggtaataccagaaaagcgtggccaagcggtaggcagtctgatgagtggccttttcgccggagcactacttgccagggcattaagtggtgcagtcggagagtatttcggctggcgtgaaatgtttatattggccgctttaatcgatatctgcctattttttctgatctggtttgtgttgccagaaatagaaacaccacacacgatgacttacggccaacttcttatttcactcggtaaattggtaaagcaacaaccccttttgcgtgaagctgcattatccggttttttactgttcgccgcttttaatacgctgtgggggtcgctggccttattactttcccaaccaccttacggatgggggagtgatatcgcaggtctttttggtttgatgggtattgtgggaatgctagcttcacccataataggttcgttgacagatcgcttcggcgggagaacgattgttgccacaggcgctttattagtgacactggccttgtgcctaattagcggcacgagccacaatattctatttttattcgcgggtattattctgttagatcttggcagcagagcgggtttagtggcaaatcaaacacggttatatacattattacctgaggctcgcagccgactaaataccgtatttatgacctgttatttcgctggcggcgcaataggttcctctttgggagctgtcgccgcttggcatttttcttggtatggtgtcgctttcagcggcggaggatgcgcattattagccgcgctatgggttctatttaatccaaatagccgcaagcaaatatga

SEQ ID NO: 936 - protein, 412 aa, Photorhabdus luminescens subsp. laumondii TTO1
MPELFHHNSGQMLSIPMSNTAIKPNPISSISLILLSTACGFAVANIYYNQPLLPTIGTSFNVNGSISGWIATLTQIGYAAGLLFFGPLGDTISRRKLIFCLLIGNIISLILCATAPNFTCLLTSSLIVGITSISAQIIIPAVSGWVIPEKRGQAVGSLMSGLFAGALLARALSGAVGEYFGWREMFILAALIDICLFFLIWFVLPEIETPHTMTYGQLLISLGKLVKQQPLLREAALSGFLLFAAFNTLWGSLALLLSQPPYGWGSDIAGLFGLMGIVGMLASPIIGSLTDRFGGRTIVATGALLVTLALCLISGTSHNILFLFAGIILLDLGSRAGLVANQTRLYTLLPEARSRLNTVFMTCYFAGGAIGSSLGAVAAWHFSWYGVAFSGGGCALLAALWVLFNPNSRKQI

SEQ ID NO: 937 - DNA, 1281 bp, Corynebacterium diphtheriae NCTC 13129
  CDS (1)..(1281): transl_table=11
atgggggacgctcatcagggaaacatgcaaacgctgttaaggtatctcgtcgtgcttgtcaaccacctcaataaaagaaaacctgtaccccgccaaacagagatcactcatcgccaccgactcatcgccatgttggcgttggcgctcggcggatttggtatcggtgttaccgaatttgtctccatgggattgctcagccttatcgctgaggacttcaacgtggcggagtccactgccggtcacgtgattaccgcctatgcgatgggcgtggtcgtcggtgcgcctgtcatcaccgcttttaccggaatgattccgcgccgacgtctactgatcttgttgatgattgcctttacaatcggcaacgcgttgacagtatttaccacttcttatcctgtgctgatggctgcacgctttttagctggcttgccgcatggtgcgtttttctcagtagcgggccttgccgtggcgtcgatggcccctgaagggcaacgcggccgtgctctcgcttttgtcggcatgggattgcccgtagcgacggtggtcggtgtacccgctgtccaagctctgggatttgctaccacgtggaaagccgcgtacgtggtggtcaccatcatcggtgctattaccttggcattgttgtggacgctcatgccgcatatgtccaagatgaaaccgacgagcccactcacagaactcggtgcgttaaagaacggtcaagtttgggcgtcactgctgatcggttcggtgggctttggtggcatgtttgctgtgtacacctatatctcttggacgatgacgcagcgcgcgggtttgcctgaggcgctcatgtggatcgtgctgatggcctatggacttggcatgattgcgggcaattttatcggcggacgcctctccgactggagtgtggaatacggaattcttactgctcttatctgcattgtgctcactttggtgagtttctacttcaccagtgcctatgcgtggatcgccatcatcaactttgctctggtggggctttccggttcgatgctcatcccgtctcttcagatccgacttatggacgttgccggtcgtgcccagaccctagctgctgcacttaaccactctgcgcttaacatcgcgaatgcttgtggcgcactgcttggtggcgtagtgatcagcgcaggatatagctattctgctcctgctcttgcaggcgctgctttaggttgtgccgccatcatcatttggatcccagcgcatatcacgcgcagcaaacaagaacgcaaacagcacagctag

SEQ ID NO: 938 - protein, 426 aa, Corynebacterium diphtheriae NCTC 13129
MGDAHQGNMQTLLRYLVVLVNHLNKRKPVPRQTEITHRHRLIAMLALALGGFGIGVTEFVSMGLLSLIAEDFNVAESTAGHVITAYAMGVVVGAPVITAFTGMIPRRRLLILLMIAFTIGNALTVFTTSYPVLMAARFLAGLPHGAFFSVAGLAVASMAPEGQRGRALAFVGMGLPVATVVGVPAVQALGFATTWKAAYVVVTIIGAITLALLWTLMPHMSKMKPTSPLTELGALKNGQVWASLLIGSVGFGGMFAVYTYISWTMTQRAGLPEALMWIVLMAYGLGMIAGNFIGGRLSDWSVEYGILTALICIVLTLVSFYFTSAYAWIAIINFALVGLSGSMLIPSLQIRLMDVAGRAQTLAAALNHSALNIANACGALLGGVVISAGYSYSAPALAGAALGCAAIIIWIPAHITRSKQERKQHS

SEQ ID NO: 939 - DNA, 1119 bp, Rhodopseudomonas palustris CGA009
  CDS (1)..(1119): transl_table=11
atgctcggcaatttcgtcaccggaacctcggttctggcaccggccggtatgttgccggatctggcggccgggctcggggtgacgatccgcgacgccgggctactgatcaccttcggggcgatcgtgctgtgcatcggctcgccgctcaccgcctggctgaccagccggatcgatcgccggctgctgctgacgacgacgctcgcggtgctggcgctcggcaatctcgcctccgcctttgcgccgaactatgcggtgctgctggtgctgcggctggcgatgctgtcggtcggcgcgctgtacacgccgcaggccgccggcgcggtggcgctgatcgtgccgcctgaaagccgcggcggcaccatggcctatgtgtttctcggctggtcgcttgcggtggcgctcggcgtgccgctggtcaccttcgcggccgatcatgccggctggcgcggtgcctatctcaccgtcggcagcatcggcctgatcagcttcatcctgctgtggctgcggctgccgagcggcctgacagcggcgccggtgagcctgcgcacctgggccgccgtggggcgcaaccggcgcatcctgacgctgctcggggtgtcgtcgctgcagacctccgggcagttcgtggtgttcaccttcttcgggccgctgctcaccgggctgaccggcgccgggccgcgcgagatcgctttggtgttcgcgatctacggcgtctgcggcttcgtcggcaacgtgatcgccagccgcatcgtcgacggctggggtgcgtaccgcacctcggcgctgttcaccgcgctgatgctggccggcatagccggctggaccttcgcggccgggcacttcgcagtgatggcggcggcggtggcggtgtgggggctcggctttgcggcgtcgaactcgatgcagcaggtccggctggtcacggccgatccgatgctcgccggcgcaacggtgtcgctcaatacctcggtgctgtatgtcggccaggcgatcggctcggcgctcggtggcacgctgttcgccgccgggttgctgcacgtcaacggctacgtctctactgctgtgctgactcttgcgctgtgcatggtggtggttgcgacccgcgaccgcaacgcttga

SEQ ID NO: 940 - protein, 372 aa, Rhodopseudomonas palustris CGA009
MLGNFVTGTSVLAPAGMLPDLAAGLGVTIRDAGLLITFGAIVLCIGSPLTAWLTSRIDRRLLLTTTLAVLALGNLASAFAPNYAVLLVLRLAMLSVGALYTPQAAGAVALIVPPESRGGTMAYVFLGWSLAVALGVPLVTFAADHAGWRGAYLTVGSIGLISFILLWLRLPSGLTAAPVSLRTWAAVGRNRRILTLLGVSSLQTSGQFVVFTFFGPLLTGLTGAGPREIALVFAIYGVCGFVGNVIASRIVDGWGAYRTSALFTALMLAGIAGWTFAAGHFAVMAAAVAVWGLGFAASNSMQQVRLVTADPMLAGATVSLNTSVLYVGQAIGSALGGTLFAAGLLHVNGYVSTAVLTLALCMVVVATRDRNA

SEQ ID NO: 941 - DNA, 1245 bp, Mycobacterium avium subsp. paratuberculosis K-10
  CDS (1)..(1245): transl_table=11
atgactgtgatgactgccgaaaccgccaacgcagccgcgcggacgtggaccccacggatcgcggctcagctcgccattctcgccgccgcggccttcacctatgtcaccgccgagatcctgccggtcggcgcgctgcccgcaatcgcccgcaatctgcaggtcagcctggtcctggtgggcaccctgctgtcctggtatgcgctggtggcggccctgaccacgatcccgctggtgcgctggaccgcgcacctgccgcgccgccgggtgctggtggcgagcctgacctgcctgaccgcctcccagctgatctcggcgctggcgcccaacttcgcggtgctggccgccgggcgggtgctgtgcgcgatcacccacggcctgttgtggtcggtgatcgcgccgatcgccacccggctggtgccgcccagccacgccgggcgcgccaccatgtcgatctacgtcggcaccagcctggcgctggtggtgggcagcccgctgaccgcggcgctgagcctgatgtggggctggcggctggccgtcgtgtgcgtcaccgtcgcggccgccgtcgtcaccgtcgcggcccggctgatgctgccggagatggtgctcaccgagcatcagctggcgcatgtcgggccccgctcgcggcaccaccgcaacggccggctgatcaccgtgagcctgctggccatggtggcggtgaccggccatttcgtgtcctacaccttcatcgtcgagatcatccgcaacgtggtcggggtgcgcgggccgaccctggcctgggtgctggccgcctacgggctggccgggctgctgtcggtgccgctggtcgcgcggccgctggaccaccggcccaagagtgcggtgatcctgtgcatgacgggtttgacggccgccttcgcggtgctgaccgcgctggcgttcggcggcccgaccggggcgacgaccgcgctgatcgggactgccgccatcgtgctgtggggagcgatggccaccgcggtgtcgccgatgatgcagtcggccgcgatgcgcaacggggccgacgacccggacggcgcctcggggctgtacgtgacggccttccaggtgggcatcatggccgggtcgctgctgggcgggctgctctatgagcgcagcgtcatcctgatgctgagcgcttccggggtgctgatggcggtggcgctggtcggcatcgccgccaaccggcggatgctggacgttgccccgacaagctcacgcgattcataa

SEQ ID NO: 942 - protein, 414 aa, Mycobacterium avium subsp. paratuberculosis K-10
MTVMTAETANAAARTWTPRIAAQLAILAAAAFTYVTAEILPVGALPAIARNLQVSLVLVGTLLSWYALVAALTTIPLVRWTAHLPRRRVLVASLTCLTASQLISALAPNFAVLAAGRVLCAITHGLLWSVIAPIATRLVPPSHAGRATMSIYVGTSLALVVGSPLTAALSLMWGWRLAVVCVTVAAAVVTVAARLMLPEMVLTEHQLAHVGPRSRHHRNGRLITVSLLAMVAVTGHFVSYTFIVEIIRNVVGVRGPTLAWVLAAYGLAGLLSVPLVARPLDHRPKSAVILCMTGLTAAFAVLTALAFGGPTGATTALIGTAAIVLWGAMATAVSPMMQSAAMRNGADDPDGASGLYVTAFQVGIMAGSLLGGLLYERSVILMLSASGVLMAVALVGIAANRRMLDVAPTSSRDS

SEQ ID NO: 943 - DNA, 1182 bp, Bdellovibrio bacteriovorus HD100
  CDS (1)..(1182): transl_table=11
atgaacacaaattctctcaaatcctggcttcccactgtcagcatcagtctggccagtttcatattcgtgaccagcgagtttattcctgtgggtctgctcccagagatttctgcaggtcttgggaaaagcgaagccttcaccggcctgctgatgaccatctatgcctggattgtcgcgacaatgtccctgccaatgacggtcgtcagctcccactgggatcgccgccggctgatgctgatcctgttgggaacgttcgtcgtggcaaacctggcctcgggcctggcggcaagctttggcatgctgctggtctgccggatcatcgtggcttttgcccatgcggtgttttggtccattgcgatccccctggcgatccgcctgggcccggccgggggacgagccaaagctttatcgataattgcaatgggagcctctctgggaaatatcctggggatccctttgggcactttcctggggcagagctttggctggcgcatggccttttctttgatcgcgctggtggccttcgtcatttacgttattctgtatcgcatgctcccctccttaccaagccagagcatcaccacgtttaaaaatgtgccttcattgttcaagcgaaaatccctggtgctggtttacctgatgacggctctgaccgtgaccgggcacttcaccgcgtttacatacatcaaaccgttcctgctggcggtgggtggaatttcaacggatttcgtcgtggttttgctattggtgtttggtgcttctggagttttcggcagcatcctgggcagcaagattatttacaaacatccgaaaaatgcactgtggatatcactcgggatcgttttctcaagcctgctgttgatgacactggccgtgcattcacaaatctggctcatggcgctggcatttgtctggggaacagccctgacccttctgtgcctgatattccagtccgctgttttaaaggaagcccctgatgtgcaggatgtggcaatgtcgctgtactctggcattttcaatatcggcattggcggaggagccctgcttggcagcatttcctccacgaaccatatcgggtctgtcggctatgtcggggccatctttgtgctggcttcactgatgctttccgcgaaattccagatctcggaacttaagcacaccgaaggcgctgtgggacattaa

SEQ ID NO: 944 - protein, 393 aa, Bdellovibrio bacteriovorus HD100
MNTNSLKSWLPTVSISLASFIFVTSEFIPVGLLPEISAGLGKSEAFTGLLMTIYAWIVATMSLPMTVVSSHWDRRRLMLILLGTFVVANLASGLAASFGMLLVCRIIVAFAHAVFWSIAIPLAIRLGPAGGRAKALSIIAMGASLGNILGIPLGTFLGQSFGWRMAFSLIALVAFVIYVILYRMLPSLPSQSITTFKNVPSLFKRKSLVLVYLMTALTVTGHFTAFTYIKPFLLAVGGISTDFVVVLLLVFGASGVFGSILGSKIIYKHPKNALWISLGIVFSSLLLMTLAVHSQIWLMALAFVWGTALTLLCLIFQSAVLKEAPDVQDVAMSLYSGIFNIGIGGGALLGSISSTNHIGSVGYVGAIFVLASLMLSAKFQISELKHTEGAVGH

SEQ ID NO: 945 - DNA, 1194 bp, Bdellovibrio bacteriovorus HD100
  CDS (1)..(1194): transl_table=11
atgaaagccgcttcttcatggagcggcatctgggccctgacgcttggagtgtcagggcttatgatcgccgaattccttccagcaggtcttttgacatctttggcaagcgacttaagaatttctgaaggggccgccggacaagctgtcaccgcaacgtcgatctttgccgttatcgcaagtttattggttgcctacttgacccgcaaatacaatcgccgaaccgttctgctatggctatcgagctgcatggctatttccagtctggtcgtggccgccgcaccaaatctgccggtacttcttgccgggagagcctttttgggaatcgctctaggaggattctggtctatgtccaccgccatcgctattcgacttgtccctgctgagtccgttcccaaagccctttccattatatttggcggagcctcttttgccgccctgcttgccgcgcccctaggaagctttcttggagatttcatcggctggaggaacgtttttactttagccgcccttatgggggctgtcgcatttatttggcaatacgtggctttgccatccctatcaccgacaggcgaagtcaaactgcgcaccacttgggatgttttaaaaatccccaatatgcttgtgggtctagttgctatcaatcttgccttcggtggccgctttgcttcactgacttacatgaaacccttcctggaacaaatcaccatgctaaagtcatcaggggtttctttgtcgtttctgatctttgatttggctttctttttaggaacccttatcgccggtcggcttattacaagaagccttcgctatggtctgactttcgcgccactcgttcttgcagcttcatcgttggggcttattgcattcgggtcccaagtcgtaccgaccgttctgcttcttatcattttcggtgccgccttcgcacccattcctgtagcatggtccacatggactgctaacaccgcaccagaaagcacagaaactgccggtggtctttatgtcgcatctgttcagctgtcagccgcggttggcgccatgcttggcggtgtcgcatttgacagtatcggatccaaaggagttttttggatgagcggtctttcttgggggctatctgccttggtggtttttctttttattggtagcgccctggagcaaataagaggcgcaaagggggagcaatggcaaggtcattga

SEQ ID NO: 946 - protein, 397 aa, Bdellovibrio bacteriovorus HD100
MKAASSWSGIWALTLGVSGLMIAEFLPAGLLTSLASDLRISEGAAGQAVTATSIFAVIASLLVAYLTRKYNRRTVLLWLSSCMAISSLVVAAAPNLPVLLAGRAFLGIALGGFWSMSTAIAIRLVPAESVPKALSIIFGGASFAALLAAPLGSFLGDFIGWRNVFTLAALMGAVAFIWQYVALPSLSPTGEVKLRTTWDVLKIPNMLVGLVAINLAFGGRFASLTYMKPFLEQITMLKSSGVSLSFLIFDLAFFLGTLIAGRLITRSLRYGLTFAPLVLAASSLGLIAFGSQVVPTVLLLIIFGAAFAPIPVAWSTWTANTAPESTETAGGLYVASVQLSAAVGAMLGGVAFDSIGSKGVFWMSGLSWGLSALVVFLFIGSALEQIRGAKGEQWQGH

SEQ ID NO: 947 - DNA, 1197 bp, Bacillus cereus ATCC 10987
  CDS (1)..(1197): transl_table=11
atggagttaaagtcaatgatacgcattttggcaattgtagctttttttgttggattagattcattattagtggcacctttattaccagtaattacagaaacaattagtattcctgatggaagtggagggttattaattactatttatgcactttgttatggaataactgcacctgtacttggaacgatgtctgatagagttggaaggaaacgtatgatcataataggatttactattttctctatttctacattttgtacgggattagcgaagagttttgaaattcttttattatttcgcggcctaacaggtttatctggtgcgatgattatgccaagtgtttttgcattagtagttgataaagttacatatgagtcaagaggaaaagcgatgggaacgattatgggagcaatggtaggttcgacagtcatcggagtacctataggtgcatttttatctgaagtaggaaattggcaatggacattttatagtataggactattaactttatttcttacattactagttaatcgcatattaagaaatgaaaaacagagaaacaatgtgcatgtttctatagcgaaaacgttaagtgcgccacttaaaatggttttagtaaatgtttcagttttatttgcattattagcaacgtttctatggacaattggattacacggcatgttttcgtacataggtgtttattatgggaataattttggcctttccgttggtgaaataggtgttgtaatctttttggcgggagttggtagtgtagctggtaacattttgggtgggaagttagctgataaaataggaaagaagaatgttatatccattgcgagtattgtaacctcaataagtgtaatattattctcgctttccatagaaaatctagtaattgcaattactttacatatcatttggagtttatttattggatttggccaagcatcattaacggcactaatttcagaattaaaaccagatgtgcgggggactgtgatggcattaaatagctctgccatgtatattgggatgactattgcttctggcttagcgtcgcttaccgtaagtaatggatttccgttttcttctttaggaataatgtgtgcaattgctagtttactcgtccttccgattatatttgttctagttaaaggaaaagcattatctaataaaaagaagatgactatataa

SEQ ID NO: 948 - protein, 398 aa, Bacillus cereus ATCC 10987
MELKSMIRILAIVAFFVGLDSLLVAPLLPVITETISIPDGSGGLLITIYALCYGITAPVLGTMSDRVGRKRMIIIGFTIFSISTFCTGLAKSFEILLLFRGLTGLSGAMIMPSVFALVVDKVTYESRGKAMGTIMGAMVGSTVIGVPIGAFLSEVGNWQWTFYSIGLLTLFLTLLVNRILRNEKQRNNVHVSIAKTLSAPLKMVLVNVSVLFALLATFLWTIGLHGMFSYIGVYYGNNFGLSVGEIGVVIFLAGVGSVAGNILGGKLADKIGKKNVISIASIVTSISVILFSLSIENLVIAITLHIIWSLFIGFGQASLTALISELKPDVRGTVMALNSSAMYIGMTIASGLASLTVSNGFPFSSLGIMCAIASLLVLPIIFVLVKGKALSNKKKMTI

SEQ ID NO: 949 - DNA, 1245 bp, Bacillus cereus ATCC 10987
  CDS (1)..(1245): transl_table=11
ttgtacttgtgttcaacttctattttggttactatagtcgtagtaaccaaaatagaaagcgtggggaaagacttgaattttcgtgtgtatattttagctatcgcggctttcgtagtcggaacggttgagctaattataggaggaacgcttgatttagttgccaatgatttaggagtatctattagtgcagctggtcagcttatcacaatattttcagtagtatttgctttatcaggtcctgttttattagcattaacagggaaatttgaaagaaaagcattgtatgttggggcattatcgattttcttaatcggaaatattatttcagcatgtagtgtgaattatgggatgttaatgttctcaagggtgatttgtgcggcgagtggttcgcttattattgcactgtcagtaacactcgcttctagcgttgtagaaccgcattttcgtgcgcgtgcaattggaatcattttcatggggattagtgggtcacttgtacttggagtaccgcttggccttgtgctcggaaatgcatatggatggcgtgcaccatttgtgctcatttcaatcttaacagtgatggcaatcgcttgtatttcattattcttaacgaaagtaccaccgacatcggtagtatcaataagagagcaaattgctacgttaaaagataaaaaaatcgtcagtgcacagttaacgtcgttcttatttttaacgggtcatttaacactatatgcatatttaacaccatttttaaaagatgttatgcatgtggaagcgaattggattagtgtattttacttcatcttcggaatcgcagcagtaattgggggcggcttcggaggctggcttgctgataaatggggatcgaagaaaagtattatctcaattattatcgtatttgcgtgtgcaatcttcctattgccgatgatgacattctcattcccgctgttcattattatgatgggactttggagcatgctgagctgggctatttcaccagcacaacaaaattatttaattgaaattgcaccggaatcagctggtattcagcaaagtttaaataactctgcccttcacttagggattgcgctcggttcaacagtaggtggagttgttattgaaaaatcatctgttatatataacgcttgggtagggggcggctttattatattagcgctactttgtgcgattttctcgattacgagaggacgttctactcagtttgcaaaagaagaatctatcgtttga

SEQ ID NO: 950 - protein, 414 aa, Bacillus cereus ATCC 10987
MYLCSTSILVTIVVVTKIESVGKDLNFRVYILAIAAFVVGTVELIIGGTLDLVANDLGVSISAAGQLITIFSVVFALSGPVLLALTGKFERKALYVGALSIFLIGNIISACSVNYGMLMFSRVICAASGSLIIALSVTLASSVVEPHFRARAIGIIFMGISGSLVLGVPLGLVLGNAYGWRAPFVLISILTVMAIACISLFLTKVPPTSVVSIREQIATLKDKKIVSAQLTSFLFLTGHLTLYAYLTPFLKDVMHVEANWISVFYFIFGIAAVIGGGFGGWLADKWGSKKSIISIIIVFACAIFLLPMMTFSFPLFIIMMGLWSMLSWAISPAQQNYLIEIAPESAGIQQSLNNSALHLGIALGSTVGGVVIEKSSVIYNAWVGGGFIILALLCAIFSITRGRSTQFAKEESIV

SEQ ID NO: 951 - DNA, 1185 bp, Bacillus cereus ATCC 10987
  CDS (1)..(1185): transl_table=11
atgcagacgaatcgaagaagtatgtttgctttattagcactagccattagtgcgtttggaattggtacaaccgaatttattagtgtcggtttattaccatctatttcagaggatttacatgtttctgttacaacagcgggtttaaccgtttctttatatgcgttaggagtagcgttcggtgccccggtattaacgtcagtaacagctagtatgtcgcgaaagacattattaatgtggattatgattattttcattattggtaatggaattgcggcagtggcaacaagctttactgtgttacttatcgcaagggttgtatctgcgtttgcacacggcgtttttatgtcgataggatcgacaattgcggctgcgcttgtacctgagaataaacgtgcaagtgcaattgcatttatgtttactggtttaacggttgcgaccattacaggtgtgccaattggaacatttatcggtcagcaatttggatggagagcatcgtttatggtaattgtggcaattggaatcgttgccttaatcgctaacagtatgctcattccttctaatttaaaaaaaggtacgtctgtatcatttcgcgatcagtttaacctgattacgaatggaagactattacttgtatttatcattactgcattagggtacgggggaacattcgtaacatttacgtatttatcgccgctattacaagaagtgacaggatttaaagcaagtaccgttacaattattttgttagtgtacggaattgcaattgcgattgggaatatggttggcgggaaattatcaaatcataatccgattcgagcgttattttacatgttctttattcaagcaattgtattatttgttttaacatttacagcgccgtttcaagtcgctggattcatcacaattatttttatgggactattcgcatttatgaatgttccaggactacaagtgtatgtcgttatattggctgaacgatttgtacctagcgctgttgatgtggcatccgcgattaacattgcggcatttaacgctggaatcgctctcggtgcttatttaggtggtattgtaacgaactcgttaggattaattcatacagcttgggtaggcggtgtgatggtagtaggtgctgttattttaacggcgtggagtatgactttagaaaaaagagatcaagtgaaatag

SEQ ID NO: 952 - protein, 394 aa, Bacillus cereus ATCC 10987
MQTNRRSMFALLALAISAFGIGTTEFISVGLLPSISEDLHVSVTTAGLTVSLYALGVAFGAPVLTSVTASMSRKTLLMWIMIIFIIGNGIAAVATSFTVLLIARVVSAFAHGVFMSIGSTIAAALVPENKRASAIAFMFTGLTVATITGVPIGTFIGQQFGWRASFMVIVAIGIVALIANSMLIPSNLKKGTSVSFRDQFNLITNGRLLLVFIITALGYGGTFVTFTYLSPLLQEVTGFKASTVTIILLVYGIAIAIGNMVGGKLSNHNPIRALFYMFFIQAIVLFVLTFTAPFQVAGFITIIFMGLFAFMNVPGLQVYVVILAERFVPSAVDVASAINIAAFNAGIALGAYLGGIVTNSLGLIHTAWVGGVMVVGAVILTAWSMTLEKRDQVK

SEQ ID NO: 953 - DNA, 1215 bp, Methanococcus maripaludis S2
  CDS (1)..(1215): transl_table=11
atggaagaaaatacaactaatcaaataattaacgataataaatcagcttggggagctatctgggcaatgtccctttgtgcaatggttttggttgcatcagaatttatgccagtaagtcttttaacccccatagctacagacttacaaattactgaaggaactgctggacagtccatttctatttctggcgtatttgcactaattaccagtctttttttaactcaaataattggtaataaagatagaagacatgttttactttttttcaccgcgttaactggaatatctggtgtactggtggcttttgctcctgattccacaatgttaatgattggacgtgcacttttggggatgtgtattggcggattttggtcaatgtctgctgcaacagttatgcgtattgtttcagcttcatctgtaccaaaagcgcttgcgattcttaacggaggaactgcgttatcaactacggtagctgccccaatgggaagtttccttggaggtattattggatggagaggcgcatttttcatgatagttccgcttgcattcatcgcatttatctggcagtacaaaagtattcctaaacttcccaaagaaaattcaaatgaacaaaaagaaaaatttggaagcgtatttggactattaaaaaactggaaagttgcattgggcatgatttcagtcatgctttttttcatgggacaatctgccctatttacgtaccttcgcccatttcttgaaatggtaacaaaagtaaatgtggaaaccctatctcttgtattactgtctatgggcatttttggattaataggaacgtttataatcgagatcatgttaaaaaagcgcctttatagcttaattataataattccctttttaatggcgataactgcagtattgatgctttcctttggaacttcactggcagcagtatttgttttgattagtatttggggatttcttgcaacttctgccccagttgcctggtggacgtggcttagcaggatccttccaactcgagcagaagctggagggggtttaatggttgcaattattcagctcgccattactctaggtgcagcctttggcggtgttttctttgatacagcaggttaccaaagtacattcatgttcagcgctttaattttaggcattgcaaccatcatggcatgcataacaggttttcatgtttacaggattaataaaaataaaaattaa

SEQ ID NO: 954 - protein, 404 aa, Methanococcus maripaludis S2
MEENTTNQIINDNKSAWGAIWAMSLCAMVLVASEFMPVSLLTPIATDLQITEGTAGQSISISGVFALITSLFLTQIIGNKDRRHVLLFFTALTGISGVLVAFAPDSTMLMIGRALLGMCIGGFWSMSAATVMRIVSASSVPKALAILNGGTALSTTVAAPMGSFLGGIIGWRGAFFMIVPLAFIAFIWQYKSIPKLPKENSNEQKEKFGSVFGLLKNWKVALGMISVMLFFMGQSALFTYLRPFLEMVTKVNVETLSLVLLSMGIFGLIGTFIIEIMLKKRLYSLIIIIPFLMAITAVLMLSFGTSLAAVFVLISIWGFLATSAPVAWWTWLSRILPTRAEAGGGLMVAIIQLAITLGAAFGGVFFDTAGYQSTFMFSALILGIATIMACITGFHVYRINKNKN

SEQ ID NO: 955 - DNA, 1161 bp, Listeria monocytogenes str. 4b F2365
  CDS (1)..(1161): transl_table=11
atgaaaaaagtaaatcctaatttgacacttttggcgctagcgattagtgcgtttgggattggttcaacagaatttattagtgtgggactgcttccgctgatttcttctagtatgggtgtgtcgattagtacggctggtttaactgtatcgatatatgcgcttggtgtgatggttggagcgccggttttaacaactatgacggcgaagatgaatcgtaaaaatttgttattattagtcatgctcgtgtttctgatagggaatcttgtctcggcatttgctgtgagttttggaatgctccttactgggcgtgttgttgcggcgtttgcgcatggggtgtttatgtcgattgcttctgttatcgctgccgatgtggttcatccgagcaaacgagctagtgcgattgcggtgatgtttacagggttgacggtggcgactgtgacaggggtgccgcttgggacgtttatcgggcaactatttggttggcggatgtcattcctgtttattgttgcgattggcgtgattgcgattattgctaattttttcctcgttccgaaaaacttatccaatggaaaaagtatttcatttaaagcgattggacaattattagttaataaaaaaatcgtgatggtgttactcatgacagcgtttggctatggtggtacttttgtggtttatacgtatttgtcgccgatgtttagcggaatgggctattctacaagcatgattgttattttacttattgtgtatggtgtgatggttgcgattgggaatacgattggtgggcattttgcgaatgagcgcccggctaaggcactgttcgtgatgtttagtttgcaagggattacgttattattacttcaatttacatcgaccaacgcgatttttggattaatgactattatgttgatgggattttttgcctttatgaatgtgtctggtttgcagttatatgtcgtgcaattggcagagcggtatttgccagaaacggtgagcatggcttcggcgcttaatatttcagcttttaatgttgggatagcagtaggtgcatttattggcggattagttacggaatatattggtttgggttataccccgattgttggatttttaatggttttcatcgcaattattttaactttctatatgaaaaaagataaatag

SEQ ID NO: 956 - protein, 386 aa, Listeria monocytogenes str. 4b F2365
MKKVNPNLTLLALAISAFGIGSTEFISVGLLPLISSSMGVSISTAGLTVSIYALGVMVGAPVLTTMTAKMNRKNLLLLVMLVFLIGNLVSAFAVSFGMLLTGRVVAAFAHGVFMSIASVIAADVVHPSKRASAIAVMFTGLTVATVTGVPLGTFIGQLFGWRMSFLFIVAIGVIAIIANFFLVPKNLSNGKSISFKAIGQLLVNKKIVMVLLMTAFGYGGTFVVYTYLSPMFSGMGYSTSMIVILLIVYGVMVAIGNTIGGHFANERPAKALFVMFSLQGITLLLLQFTSTNAIFGLMTIMLMGFFAFMNVSGLQLYVVQLAERYLPETVSMASALNISAFNVGIAVGAFIGGLVTEYIGLGYTPIVGFLMVFIAIILTFYMKKDK

SEQ ID NO: 957 - DNA, 1215 bp, Bacillus anthracis str. 'Ames Ancestor'
  CDS (1)..(1215): transl_table=11
ttgaattcatatacagcatcgtcttcagaagttcagacgaatcgaagaagtatatttgcgttattagcgctagcaattagtgcgttcgggattgggacaactgaatttgttagtgtcggtttattaccatctatttcgaaagatttacatgtgtcggtgacaacagctggtttaacagtttctttatatgcgttaggagtagcatttggtgctccagtattaacgtcgttaacagctaatatgtcacgaaaaacgttattaatgtggattatgattattttcattattggtaacggaattgcggctgtcgcaacaagcttcactgtattacttattgcgcgaattgtgtctgcactttcgcatggtgtgtttatgtcaattggttcaacgattgctgcggcactcgtaccagaaaataaacgtgctagcgcgattgcgattatgtttactggcgtaacagtcgcaactattacaggtgcaccaattggaacatttatcggtcaacaatttggctggagaacatcatttttagcaattgtagtcattggaattattgctttaatcgcaaatagtattctcattccatctaatatgaaaaaaggtacgtctgtatcattccgcgatcaatttaaactggttacgaacggaagactgttacttgttttcattattactgcacttggatacggcggtacattcgtaacatttacgtatttatctccgttattacaagaagtaacaggatttaaagctaatacggttacgatcattttattagtatatggaatcgctattgcaatagggaatgtgattggcgggaaattatcgaatcataatccaattcgagcgctattttacatgttctttattcaagcgattatattatttgttttaacatttacagcgccatttaaagtagctgggttaattacaattattttcatgggactattcgcatttatgaatgttccagggttacaagtatatgtcgtaatgttagctgaacgatttgtaccgagtgctgtcgatgttgcatcggcaattaatattgcggcttttaatgctgggattgctcttggtgcttatttaggtggtattgtaacgaattcgttagggttaattcatacggcttgggtaggcggcattatggtagtaggtgctgttattttaacagcatggagtatgtcattagaaaaacgagatcaagtaaaataa

SEQ ID NO: 958 - protein, 404 aa, Bacillus anthracis str. 'Ames Ancestor'
MNSYTASSSEVQTNRRSIFALLALAISAFGIGTTEFVSVGLLPSISKDLHVSVTTAGLTVSLYALGVAFGAPVLTSLTANMSRKTLLMWIMIIFIIGNGIAAVATSFTVLLIARIVSALSHGVFMSIGSTIAAALVPENKRASAIAIMFTGVTVATITGAPIGTFIGQQFGWRTSFLAIVVIGIIALIANSILIPSNMKKGTSVSFRDQFKLVTNGRLLLVFIITALGYGGTFVTFTYLSPLLQEVTGFKANTVTIILLVYGIAIAIGNVIGGKLSNHNPIRALFYMFFIQAIILFVLTFTAPFKVAGLITIIFMGLFAFMNVPGLQVYVVMLAERFVPSAVDVASAINIAAFNAGIALGAYLGGIVTNSLGLIHTAWVGGIMVVGAVILTAWSMSLEKRDQVK

SEQ ID NO: 959 - DNA, 1245 bp, Bacillus anthracis str. 'Ames Ancestor'
  CDS (1)..(1245): transl_table=11
ttgtacttgtgttcaacttctattttggttactatagtcgtagtaaccaaaatagaaagcgtggggaaagacttgaattttcgtgtgtatattttagctatcgcggctttcgtagtcggaacagttgagctaattataggaggaacgcttgatttagttgccaatgatttaggagtatctattagtgcagctggtcagcttatcacaatattttcagtagtatttgctttatcaggtcctgttttattagcattaacagggaagtttgaaagaaaaacattgtatgttggggcattatcaattttcttaatcggaaatattatttcagcatgtagtgtgaattacggcatgttaatgttctcaagggtgatttgtgcggcgagtggttcgcttattattgcactgtcagtaacacttgcttctagcgttgtagaaccgcattttcgtgcgcgtgcaattggaattattttcatggggattagtggatcacttgtacttggagtaccgcttggccttgtactcggaaatgcatatggatggcgtgcaccatttgtactcatttcaatcttaacagttatggcaatcgcttgtatttcattattcttaacgaaagtaccaccgacatcggtattatcaataagagaacaaattgctacgttaaaagataaaaaaatcgtaagtgcacagttaacatcattcttatttttaacgggccatttaacactatatgcatatttaacacctttcttaaaagatgtgatgcatgtggaagcgaattggattagtgtattttacttcatcttcggaatcgcagcagtaattgggggcggcttcggaggctggcttgctgataaatggggatcgaagaaaagtattatttcaattattatcgtatttgcgtgtgcgatcttcctattgccattaatgacattctcgttcccgctgttcattattatgatgggaatttggagtatgctgagctgggctatttcgccagcacaacaaaattatttgattgaaattgcaccagaatcagctggtattcagcaaagtttaaataactctgcccttcacttagggattgcgctcggttcaacagtaggcggagttgttattgagaaatcgtctgttatatataatgcttgggtaggaggcggctttattatattagcgctgctttgtgcgattttctcgattacgagaggacgttctactcagtttgcaaaagaagaatctatcgtttga

SEQ ID NO: 960 - protein, 414 aa, Bacillus anthracis str. 'Ames Ancestor'
MYLCSTSILVTIVVVTKIESVGKDLNFRVYILAIAAFVVGTVELIIGGTLDLVANDLGVSISAAGQLITIFSVVFALSGPVLLALTGKFERKTLYVGALSIFLIGNIISACSVNYGMLMFSRVICAASGSLIIALSVTLASSVVEPHFRARAIGIIFMGISGSLVLGVPLGLVLGNAYGWRAPFVLISILTVMAIACISLFLTKVPPTSVLSIREQIATLKDKKIVSAQLTSFLFLTGHLTLYAYLTPFLKDVMHVEANWISVFYFIFGIAAVIGGGFGGWLADKWGSKKSIISIIIVFACAIFLLPLMTFSFPLFIIMMGIWSMLSWAISPAQQNYLIEIAPESAGIQQSLNNSALHLGIALGSTVGGVVIEKSSVIYNAWVGGGFIILALLCAIFSITRGRSTQFAKEESIV

SEQ ID NO: 961 - DNA, 1416 bp, Pseudomonas syringae pv. maculicola
  CDS (1)..(1416): transl_table=11
gtgactgaatctggatatggaaggacgaatgacgccatgaataagctcccgctggaaaacgcgactcaagcggccaatgcctggcgcgtgctgttcctgttgtttttggccaacctgttcaactttttcgatcgtaccattccggcaatcatcgttgagcccattcgtctggaatggcacttgagcgacttccagctgggcatgctcggcactgcgttcacgctggtctacgccattgccggcctgccgctggggcgcatggcggataacggttcgcgtaaaaagctgatgggctgcgggctggcggtctggagcggcttgacggcggtcaacggcatggtcggcagtttctggacgttcctgctggtgcgcatgggcgtcgggataggcgaggccagttatgcgcctgcggccaactcgctgattggcgatttgttccctgcccaccggcgcgcacgggccatgggcctgttcatgctgggtctgccgttgggcttgctgctggcgttctttaccatcggtgcgatggtaaaggcgttcgacagctggcgtgcgccattcttcattgcggcggtgcccggtctgttgctggccgtgttgttttttttcatcagggagcccaagcgcggcgctgccgaaagcgtgcgcatgtcggaagctaagatcgacaagccgatccaccgggtgatgtcgatcccgacctttcggtggctggtgctggccggtctgaccttcaactttgcgacctacgcctgcaattcatttatggtgccgatgctgcagcgttacttccttttgccgttgcaggaagctgcggttgcgacgggggtcatcgtgggcgtgaccggattgatcggcctgacgctgggcggctggattgccgacaagctgcaccagcgttccgccaattggcggttactgtttgcgaccttcagcatgctggtcgccgcgctggcgacaggctatgcgctgcatgcaggacgaatcgagatcggcgtatttgtaggcgttttcagccttggctggctgtttgcctacaacttttacacctgcgcctataccgcgatacaggacgtggtcgagcctcgcctgcgggcaaccgccatggcattgttctttgccgggctctatctgctgggcggcgggcttgggccggtggtggtcggcctgctctctgatcacttcgcctactcggcgatggcggtggcgggtgtcgatgtcatgaacgaaagcttcaaagccatcggcctgcacgacgccatgtacctgatcccggtcgcgctgtttctgaccttgctgtttttgtatcaggcatcgcgctgcttcagccgggatgcagagcggatgacggcgcgcatggtggctgaagagccagtggcagggttggcggaacgggttgtggtgaccaagcagtaa

SEQ ID NO: 962 - protein, 471 aa, Pseudomonas syringae pv. maculicola
MTESGYGRTNDAMNKLPLENATQAANAWRVLFLLFLANLFNFFDRTIPAIIVEPIRLEWHLSDFQLGMLGTAFTLVYAIAGLPLGRMADNGSRKKLMGCGLAVWSGLTAVNGMVGSFWTFLLVRMGVGIGEASYAPAANSLIGDLFPAHRRARAMGLFMLGLPLGLLLAFFTIGAMVKAFDSWRAPFFIAAVPGLLLAVLFFFIREPKRGAAESVRMSEAKIDKPIHRVMSIPTFRWLVLAGLTFNFATYACNSFMVPMLQRYFLLPLQEAAVATGVIVGVTGLIGLTLGGWIADKLHQRSANWRLLFATFSMLVAALATGYALHAGRIEIGVFVGVFSLGWLFAYNFYTCAYTAIQDVVEPRLRATAMALFFAGLYLLGGGLGPVVVGLLSDHFAYSAMAVAGVDVMNESFKAIGLHDAMYLIPVALFLTLLFLYQASRCFSRDAERMTARMVAEEPVAGLAERVVVTKQ

SEQ ID NO: 963 - DNA, 1248 bp, Bacillus anthracis str. Sterne
  CDS (1)..(1248): transl_table=11
atgataggaattatagggaagaggggaaatcaattgaattcatatacagcatcgtcttcagaagttcagacgaatcgaagaagtatatttgcgttattagcgctagcaattagtgcgttcgggattgggacaactgaatttgttagtgtcggtttattaccatctatttcgaaagatttacatgtgtcggtgacaacagctggtttaacagtttctttatatgcgttaggagtagcatttggtgctccagtattaacgtcgttaacagctaatatgtcacgaaaaacgttattaatgtggattatgattattttcattattggtaacggaattgcggctgtcgcaacaagcttcactgtattacttattgcgcgaattgtgtctgcactttcgcatggtgtgtttatgtcaattggttcaacgattgctgcggcactcgtaccagaaaataaacgtgctagcgcgattgcgattatgtttactggcgtaacagtcgcaactattacaggtgcaccaattggaacatttatcggtcaacaatttggctggagaacatcatttttagcaattgtagtcattggaattattgctttaatcgcaaatagtattctcattccatctaatatgaaaaaaggtacgtctgtatcattccgcgatcaatttaaactggttacgaacggaagactgttacttgttttcattattactgcacttggatacggcggtacattcgtaacatttacgtatttatctccgttattacaagaagtaacaggatttaaagctaatacggttacgatcattttattagtatatggaatcgctattgcaatagggaatgtgattggcgggaaattatcgaatcataatccaattcgagcgctattttacatgttctttattcaagcgattatattatttgttttaacatttacagcgccatttaaagtagctgggttaattacaattattttcatgggactattcgcatttatgaatgttccagggttacaagtatatgtcgtaatgttagctgaacgatttgtaccgagtgctgtcgatgttgcatcggcaattaatattgcggcttttaatgctgggattgctcttggtgcttatttaggtggtattgtaacgaattcgttagggttaattcatacggcttgggtaggcggcattatggtagtaggtgctgttattttaacagcatggagtatgtcattagaaaaacgagatcaagtaaaataa

SEQ ID NO: 964 - protein, 415 aa, Bacillus anthracis str. Sterne
MIGIIGKRGNQLNSYTASSSEVQTNRRSIFALLALAISAFGIGTTEFVSVGLLPSISKDLHVSVTTAGLTVSLYALGVAFGAPVLTSLTANMSRKTLLMWIMIIFIIGNGIAAVATSFTVLLIARIVSALSHGVFMSIGSTIAAALVPENKRASAIAIMFTGVTVATITGAPIGTFIGQQFGWRTSFLAIVVIGIIALIANSILIPSNMKKGTSVSFRDQFKLVTNGRLLLVFIITALGYGGTFVTFTYLSPLLQEVTGFKANTVTIILLVYGIAIAIGNVIGGKLSNHNPIRALFYMFFIQAIILFVLTFTAPFKVAGLITIIFMGLFAFMNVPGLQVYVVMLAERFVPSAVDVASAINIAAFNAGIALGAYLGGIVTNSLGLIHTAWVGGIMVVGAVILTAWSMSLEKRDQVK

SEQ ID NO: 965 - DNA, 1173 bp, Bacillus anthracis str. Sterne
  CDS (1)..(1173): transl_table=11
ttgaattttcgtgtgtatattttagctatcgcggctttcgtagtcggaacagttgagctaattataggaggaacgcttgatttagttgccaatgatttaggagtatctattagtgcagctggtcagcttatcacaatattttcagtagtatttgctttatcaggtcctgttttattagcattaacagggaagtttgaaagaaaaacattgtatgttggggcattatcaattttcttaatcggaaatattatttcagcatgtagtgtgaattacggcatgttaatgttctcaagggtgatttgtgcggcgagtggttcgcttattattgcactgtcagtaacacttgcttctagcgttgtagaaccgcattttcgtgcgcgtgcaattggaattattttcatggggattagtggatcacttgtacttggagtaccgcttggccttgtactcggaaatgcatatggatggcgtgcaccatttgtactcatttcaatcttaacagttatggcaatcgcttgtatttcattattcttaacgaaagtaccaccgacatcggtattatcaataagagaacaaattgctacgttaaaagataaaaaaatcgtaagtgcacagttaacatcattcttatttttaacgggccatttaacactatatgcatatttaacacctttcttaaaagatgtgatgcatgtggaagcgaattggattagtgtattttacttcatcttcggaatcgcagcagtaattgggggcggcttcggaggctggcttgctgataaatggggatcgaagaaaagtattatttcaattattatcgtatttgcgtgtgcgatcttcctattgccattaatgacattctcgttcccgctgttcattattatgatgggaatttggagtatgctgagctgggctatttcgccagcacaacaaaattatttgattgaaattgcaccagaatcagctggtattcagcaaagtttaaataactctgcccttcacttagggattgcgctcggttcaacagtaggcggagttgttattgagaaatcgtctgttatatataatgcttgggtaggaggcggctttattatattagcgctgctttgtgcgattttctcgattacgagaggacgttctactcagtttgcaaaagaagaatctatcgtttga

SEQ ID NO: 966 - protein, 390 aa, Bacillus anthracis str. Sterne
MNFRVYILAIAAFVVGTVELIIGGTLDLVANDLGVSISAAGQLITIFSVVFALSGPVLLALTGKFERKTLYVGALSIFLIGNIISACSVNYGMLMFSRVICAASGSLIIALSVTLASSVVEPHFRARAIGIIFMGISGSLVLGVPLGLVLGNAYGWRAPFVLISILTVMAIACISLFLTKVPPTSVLSIREQIATLKDKKIVSAQLTSFLFLTGHLTLYAYLTPFLKDVMHVEANWISVFYFIFGIAAVIGGGFGGWLADKWGSKKSIISIIIVFACAIFLLPLMTFSFPLFIIMMGIWSMLSWAISPAQQNYLIEIAPESAGIQQSLNNSALHLGIALGSTVGGVVIEKSSVIYNAWVGGGFIILALLCAIFSITRGRSTQFAKEESIV

SEQ ID NO: 967 - DNA, 1215 bp, Bacillus anthracis str. Sterne
  CDS (1)..(1215): transl_table=11
ttgagttcatatacagtaccatcttcggaagttcagacgaatcgacgaagtatgtttgctttattagcactagcaattagtgcatttggaattgggacgaccgagtttattagtgtcggtttattaccatctatttcaaaagatttaaatgtttcggttacaacagctggtttaactgtttccctatatgcattaggtgcggcagtaggagctcctgttttaacagcgttaacggctagtatgtcgagaaagacattattaatgtggattatggttattttcattattggtaatgggatcgcggcagtagcaacaagtttcactatattaattatcgcaaggattgtatctgcgtttgcacatggtgtgtttatgtcgataggatctacaattgcggccgcaatcgtcccagagaataaacgtgctagcgccattgcgattatgtttactggattaacagttgcgactattacaggtgtgccaattggaacgtttatcggtcaacaatttggctggagagcgtcatttatggcgattgtcgtaattggaattattgcttttatcgcaaacagcatactagtcccatctaatttaaaaaatggtgtacctgtatcgtttcgtgatcaatttaaattaattaaaaatggaagactattacttgtcttcattattactgcacttggatatggcggtacattcgtaacatttacgtatttatcaccactattacaagaagtaacaggatttgaagcaagtacggttacgatcattttattagtgtatggaattgccattgcgatagggaatatggttggcggaaaattatcgaatcataatccgattcgagcgctattttacatgttcttaattcaagcgattatattatttgttttaacatttacagcgccatttaaggtagctggattaatcacaattattttcatgggactattcgcatttatgaatgttccggggctacaagtatatgtagttatattggcagagcgctttgttccgagtgcggtggatgttgcttcagcaattaatattgccgcatttaacggaggaatcgctttaggttcttatataggtggccttgtaacgaattcgttaggattaatccatactgcttgggtaggcggccttatggtagtagccgctgttattttaacagcgtggagcatgacattagaaaaaagagatcaagtaaaataa

SEQ ID NO: 968 - protein, 404 aa, Bacillus anthracis str. Sterne
MSSYTVPSSEVQTNRRSMFALLALAISAFGIGTTEFISVGLLPSISKDLNVSVTTAGLTVSLYALGAAVGAPVLTALTASMSRKTLLMWIMVIFIIGNGIAAVATSFTILIIARIVSAFAHGVFMSIGSTIAAAIVPENKRASAIAIMFTGLTVATITGVPIGTFIGQQFGWRASFMAIVVIGIIAFIANSILVPSNLKNGVPVSFRDQFKLIKNGRLLLVFIITALGYGGTFVTFTYLSPLLQEVTGFEASTVTIILLVYGIAIAIGNMVGGKLSNHNPIRALFYMFLIQAIILFVLTFTAPFKVAGLITIIFMGLFAFMNVPGLQVYVVILAERFVPSAVDVASAINIAAFNGGIALGSYIGGLVTNSLGLIHTAWVGGLMVVAAVILTAWSMTLEKRDQVK

SEQ ID NO: 969 - DNA, 1191 bp, Bartonella henselae str. Houston-1
  CDS (1)..(1191): transl_table=11
atgaagttttctcataaacaaaacgttcttgcatcggagattgatgtgagaacacggcgtttggcaattttagctcttgcggtgggaagttttgctattggtacggcagagtttgttgcaatggggctacagccggagatggcacgaaattcatctgttgatattcctacagcgggtcaatatatttctgcttatgcattgggggttgtgattggagcccctgttttggctgttgcgacagctccgttctcacgcaaaactgctttaataggattgatgtttttttatgcgctggcaaatattgccactgcttttttttctgattttagcatattaggaacattgcgctttcttagtggtcttccccatggcatctattttggtcttgcgactctggtggcagcttcaatggtggaaatgaatgaacgctccaaagctgttgggtctgttatgcttggtttaacaatagcaactgttttgggggcaccaggtgcaacttggattggacagattgttggttggcagattgcttttattcttgtaggtgctctttctttattgtgttgtttactgattggggtgttcttacctgctgttttaaatgctcaaaaaacaagtcctctacgcgaactttgtgtattaaagcaaaagcaggtgtggtttctcttgatgatggtttcggttggagcatcaggattattttctgtttttacttatattaagtcaacattaatgcatatttccggtgtttcgcttgattgggtaccatttattatgccgttagttggattggggatggtggtaggtaatcttttgggacctaaattggcagtaaaaattggtatttcaccattgatatttttttctatgctttggagcacatttgtttttttctttttatctcatgctccattaaccgcagcattaggatgctttttggttggtacttcttttgcagctatgccttctatacaaacaaaaatcatgaatgttgctttccatggacagattttagcgggagcattgatgcaatctgcttttaatattgccaatgctcttggagcggaatctggagcatgggttttgaagttgggctatagttatgaatacactgctgttctggggggtattttaaccctctgtggattattaattttttgctttttatggtatatggaaaagcgtaattaa

SEQ ID NO: 970 - protein, 396 aa, Bartonella henselae str. Houston-1
MKFSHKQNVLASEIDVRTRRLAILALAVGSFAIGTAEFVAMGLQPEMARNSSVDIPTAGQYISAYALGVVIGAPVLAVATAPFSRKTALIGLMFFYALANIATAFFSDFSILGTLRFLSGLPHGIYFGLATLVAASMVEMNERSKAVGSVMLGLTIATVLGAPGATWIGQIVGWQIAFILVGALSLLCCLLIGVFLPAVLNAQKTSPLRELCVLKQKQVWFLLMMVSVGASGLFSVFTYIKSTLMHISGVSLDWVPFIMPLVGLGMVVGNLLGPKLAVKIGISPLIFFSMLWSTFVFFFLSHAPLTAALGCFLVGTSFAAMPSIQTKIMNVAFHGQILAGALMQSAFNIANALGAESGAWVLKLGYSYEYTAVLGGILTLCGLLIFCFLWYMEKRN

SEQ ID NO: 971 - DNA, 1197 bp, Bacillus thuringiensis serovar konkukian str. 97-27
  CDS (1)..(1197): transl_table=11
atggagttaaagtcaatgatacgtattttggcaattgtagctttttttgttggattagattcattattagtcgcacctttattaccagtaattacagaaacaattagtatccctgatgggagtggagggttattaattactatttatgcactttgttatggaataactgcacccgtatttggaatgatgtctgatagagttggaaggaaacgtatgattataatagggtttattattttttctatttctacattttgtacgggattagcgaagaattttgaaattcttttattatttcgcggtctaacaggtttatctggtgcaatgattatgccaagtatttttgcattagtaggagataaagttacatatgaatcaagaggaaaagcgatggggacgattatgggagcaatggtaggttcgacagtcattggagtacctataggcgcatttttatctgaagtaggagattggcaatggacattttatagtataggactattaactttatttcttacattactagttaattacatattagaagatgaaaaaccacgaaatgaggtgcatgtttctataacgaaaacggtaggtgcatcattgaaaatggctttagtaaatatatcagttttatttgcattattagcgacgtttctatggacaattggattacacggaatgttttcatacataggtgtttattatggaaataattttgggctttccgttggtgaaataggtattgtaatctttttggcgggagttggtagtgtagctggtaatattttgggtggaaaattagctgataaaatagggaaaaagaatattgtatccattgccagtattgtagccgcaattagtgtaatggtattctcgttttccatagaaaatctagtaattgcaattactatacatataatttggagtttatttattgggtttggtcaagcatcattaacggcactaatttcagaattaaaaccagctgtgcgagggactgttatggcattaaatagctctgccatgtatattgggatgactattgcttctggtatagcgtcacttgctgtaagtaatggctttccgtttttttctttaggaataatatgtgcaattgctagtttacttgtccttccaatcgtatttgttctagttaaagaaaaagcaccatctaataaaaagaagatgactatataa

SEQ ID NO: 972 - protein, 398 aa, Bacillus thuringiensis serovar konkukian str. 97-27
MELKSMIRILAIVAFFVGLDSLLVAPLLPVITETISIPDGSGGLLITIYALCYGITAPVFGMMSDRVGRKRMIIIGFIIFSISTFCTGLAKNFEILLLFRGLTGLSGAMIMPSIFALVGDKVTYESRGKAMGTIMGAMVGSTVIGVPIGAFLSEVGDWQWTFYSIGLLTLFLTLLVNYILEDEKPRNEVHVSITKTVGASLKMALVNISVLFALLATFLWTIGLHGMFSYIGVYYGNNFGLSVGEIGIVIFLAGVGSVAGNILGGKLADKIGKKNIVSIASIVAAISVMVFSFSIENLVIAITIHIIWSLFIGFGQASLTALISELKPAVRGTVMALNSSAMYIGMTIASGIASLAVSNGFPFFSLGIICAIASLLVLPIVFVLVKEKAPSNKKKMTI

SEQ ID NO: 973 - DNA, 1173 bp, Bacillus thuringiensis serovar konkukian str. 97-27
  CDS (1)..(1173): transl_table=11
ttgaattttcgtgtgtatattttagctatcgcggctttcgtagtcggaacagttgagctaattataggaggaacgctcgatttagttgccaatgatttaggagtatctattagtgcagctggtcagcttatcacaatattttcagtagtatttgctttatcaggtcctgttttattagcattaacagggaagtttgaaagaaaaacattgtatgttggggcattatcaatttttttaatcggaaatattatttcagcatgtagtgtgaattacggaatgttaatgttctcaagggtgatttgtgcagcgagtggttcgcttattattgcactgtcagtaacacttgcttctagcgttgtagaaccgcattttcgtgcgcgtgcaattggaatcattttcatggggattagtggatcacttgtacttggagtaccgcttggccttgtactcggaaatgcatacggatggcgtgcaccatttgtactcatttcgatcttaacagttatggcaatcgcttgtatttcattattcttaacgaaagtaccaccgacatcagtattatcaataagagaacaaattgctacgttaaaagataaaaaaattgtcagtgcacagttaacatcatttttatttttaacgggccatttaacactatatgcatatttaacacctttcttaaaagatgtgatgcatgtggaagcgaattggattagtgtattttacttcatcttcggaattgcagcagtaattggtggcggcttcggaggctggcttgcggataaatggggatcgaagaaaagtattatttcaattattatcgtatttgcgtgtgcgatcttcctattgccattaatgacattctcattcccgctgttcattattatgatgggactttggagtatgctgagctgggctatttcaccagcacaacaaaactatttaattgaaattgcaccggaatcagctggtattcagcaaagtttaaataactctgcccttcacttaggaattgcgctcggttcaacagtaggtggagttgttattgagaaatcgtctgttatatataatgcttgggtaggtggcggctttattatattagcgctactttgtgcaattttctcgattacgagaggacgttctactcagtttacgaaggaagaatctatcgtttga

SEQ ID NO: 974 - protein, 390 aa, Bacillus thuringiensis serovar konkukian str. 97-27
MNFRVYILAIAAFVVGTVELIIGGTLDLVANDLGVSISAAGQLITIFSVVFALSGPVLLALTGKFERKTLYVGALSIFLIGNIISACSVNYGMLMFSRVICAASGSLIIALSVTLASSVVEPHFRARAIGIIFMGISGSLVLGVPLGLVLGNAYGWRAPFVLISILTVMAIACISLFLTKVPPTSVLSIREQIATLKDKKIVSAQLTSFLFLTGHLTLYAYLTPFLKDVMHVEANWISVFYFIFGIAAVIGGGFGGWLADKWGSKKSIISIIIVFACAIFLLPLMTFSFPLFIIMMGLWSMLSWAISPAQQNYLIEIAPESAGIQQSLNNSALHLGIALGSTVGGVVIEKSSVIYNAWVGGGFIILALLCAIFSITRGRSTQFTKEESIV

SEQ ID NO: 975 - DNA, 1149 bp, Staphylococcus aureus subsp. aureus MRSA252
  CDS (1)..(1149): transl_table=11
atgtcaaatattaaaattgtaactttgattggctttttcacaatgtttattgttggtgtttcagacttaattgttgtaggaatgttaaatgaaatgagtaaagaatttcatgtaagtaatgctttaataggtcagttggtaacattgtatgctgttgctttttcaattctaagccctctcttaacaaaggtaactagtcaaattaatgacaaaaaattattagtatcctgtttaatactttttattattttcagcatgcttacaactgtaatgaccaattatttctttctatgtattgttagaatctttatggcgggcatcgcttcattaatcactgtaaaattaatgtctactggagcaaatattgttccagtagaatacaaagcatcagttatcgctaacatatacgtaggctttagtgcagcaaatatacttggtatacccataggtacattaattgcttcccattacaattggaagattccgttttatatcattgcgattatcacttttttatgtctactaggtattatgttatttatcccgaataaatcacattatagtattaataatcattctaaataccaattagtaaatttcagaggcacattaatcatgttgggctttttattaatcatgatgatatctaatagcatgttatttacatatatagagcctttagtaaaaagtaaaggtcatagcatctggatagtaagtttgtgtttatttttctcaggtattgcaggtgttttaggttcaaaattaggaaataatttaactgaaaagaaaggctataggattgctggaaatatcattataattgtctatattatttctattatgagcatcttattgactggacaaaatgtcatacttttaattttatctatatttacatggaatttatttcattggggaacaaatccaacagttcaatatgctttacttaaatttttaaaaggcgatccaagtcaaatattgagctatgatatttcaatattaaatttaggaatcggattaggatcattaattggtggtatattattttctatcgataatcagttcaacttatcaattgttgttgctatgatattagcaatggtttcatctatattattaaaaacagctgttcatacagagaaaaattaa

SEQ ID NO: 976 - protein, 382 aa, Staphylococcus aureus subsp. aureus MRSA252
MSNIKIVTLIGFFTMFIVGVSDLIVVGMLNEMSKEFHVSNALIGQLVTLYAVAFSILSPLLTKVTSQINDKKLLVSCLILFIIFSMLTTVMTNYFFLCIVRIFMAGIASLITVKLMSTGANIVPVEYKASVIANIYVGFSAANILGIPIGTLIASHYNWKIPFYIIAIITFLCLLGIMLFIPNKSHYSINNHSKYQLVNFRGTLIMLGFLLIMMISNSMLFTYIEPLVKSKGHSIWIVSLCLFFSGIAGVLGSKLGNNLTEKKGYRIAGNIIIIVYIISIMSILLTGQNVILLILSIFTWNLFHWGTNPTVQYALLKFLKGDPSQILSYDISILNLGIGLGSLIGGILFSIDNQFNLSIVVAMILAMVSSILLKTAVHTEKN

SEQ ID NO: 977 - DNA, 1188 bp, Staphylococcus aureus subsp. aureus MSSA476
  CDS (1)..(1188): transl_table=11
atgtcaatcatgcgactatttacattcattttaagtatttttatcgtaggaatggttgaaatgatggttgcaggaattatgaacttgatgagtcaggacttacatgtatcagaagctgtcgttggtcaattagtgacaatgtacgctttaacatttgcgatatgtggacctattctggttaaattaacgaaccgtttttcatcaaggcctgtattattatggacattacttatatttatcattggtaatggcattattgctgtagcgccaaatttttcaatattagtagttggtagaattatctcatctgcagcagcagcactaattatcgtaaaagtattagctattacagcgatgttatcagcacctaaaaatcgtggtaaaatgattggacttgtctatacagggtttagtggggccaatgtttttggtgtaccaattggaacggttatcggcgatttagtaggttggcgctatacatttctattcttaattattgtgagtattattgttggcttcttgatgatgatctatttaccgaaggatcaggaaatacaacgaggccctgtgaatcatgagacaccatctcatgaaaatcatgttacttcgaaaatattaagacctgctgaagtagcaaaatatttaattattacgtttttagtattgattgcaaactcagtgacattcgtctttataaatccacttattttatctaatggtcatgatatgtcattcgtttcattagcacttctagtaaatggaatcgctggcgttattggaacatcattgggtggtatattctccgataaaattacaagtaagcgttggttaatgatttctgtttctatttttatcgttatgatgttacttatgaatttaatcttacctggttcaggtctattgttagcaggactatttatttggaatatcatgcaatggagtactaatccagcagtgcaaagcggtgtgattcaacatgttgaaggcgacacaagccaagtaatgagttggaacatgtctagtttaaacgctggtattggtgttggcggcattattggaggcttggtcatgacacatgtttctgttcaagctatcacgtatacgagtgccatcattggcgcattaggattaatcgttgttttcacattgaaaaataatcattatgctaaaacatttaaatcatcataa

SEQ ID NO: 978 - protein, 395 aa, Staphylococcus aureus subsp. aureus MSSA476
MSIMRLFTFILSIFIVGMVEMMVAGIMNLMSQDLHVSEAVVGQLVTMYALTFAICGPILVKLTNRFSSRPVLLWTLLIFIIGNGIIAVAPNFSILVVGRIISSAAAALIIVKVLAITAMLSAPKNRGKMIGLVYTGFSGANVFGVPIGTVIGDLVGWRYTFLFLIIVSIIVGFLMMIYLPKDQEIQRGPVNHETPSHENHVTSKILRPAEVAKYLIITFLVLIANSVTFVFINPLILSNGHDMSFVSLALLVNGIAGVIGTSLGGIFSDKITSKRWLMISVSIFIVMMLLMNLILPGSGLLLAGLFIWNIMQWSTNPAVQSGVIQHVEGDTSQVMSWNMSSLNAGIGVGGIIGGLVMTHVSVQAITYTSAIIGALGLIVVFTLKNNHYAKTFKSS

SEQ ID NO: 979 - DNA, 1206 bp, Acinetobacter sp. ADP1
  CDS (1)..(1206): transl_table=11
atgaatctttctgaggctcagcccgttcgccccagtcaaggcagctggtttgccattcttgccgtttcaattgctgcatttgcactggtcaccagtgaattcttacctattggtgtactgaatgatgtcgccaatgatctgaaaatctctgtaggaacagcaggcctgattattaccttgccaggtgtaatggccgcacttgccgctcctctgcttcctgtcgcctttaaacaacttgatcgccgctatgtcttattgtttttaaccgccgtgatggtcattgccaatgcgattactgcttttgccagtgattttactcttctactgattagtcgcatgatcttgggtatttcaattggtggcttctgggcaacggcgattgctttaagtggcaagcttgcacctgtacatttacctatcgccaaagccacagcagttgtgatggctggtgtcactttcgcaacggtacttggtgtaccaataggtacatggttaagtgagttctatggatggcgcagtgcctttggtattacggctatcattgggtttgtggtgtttctgctacagcttcgctatttgccaaaactgattccagaatcctcaattcgattacacgatttacctgcgctgttacgtgtacccaaagcacgaagtggcatgctgattattttattgatcgggctggcacatttttgtgcgtatagttatctggcaccttttttcaaaaatgtggccggatttaatggtacgaccattagcagtctgttattgctgtatggtattgcaggtatctttggaaacgcattcgcaggttatagtggtaatttcaatattcgttatacactggcatttgtcggcttgtgttttgcagtggtcttctttagctttccagtctttgctgttcacgaggcaggtgctattgtactcaccgctttatgggggtttgccttcggagccttcccaacatcggccaatatctggatgtttgtacatgcacctcaggctgttgaaaaaggaatgccattatttgtaggactgtttcaagtcatgattgcgacaggctcattgctcgggggctatatcgtcgatcatttcaatgaaaacattttaatttacggtgtgctgaattttattatactggcgttgattagtgtttttacgctggcaaaaggtttaaataatcctaagcttacttgtgaatcataa

SEQ ID NO: 980 - protein, 401 aa, Acinetobacter sp. ADP1
MNLSEAQPVRPSQGSWFAILAVSIAAFALVTSEFLPIGVLNDVANDLKISVGTAGLIITLPGVMAALAAPLLPVAFKQLDRRYVLLFLTAVMVIANAITAFASDFTLLLISRMILGISIGGFWATAIALSGKLAPVHLPIAKATAVVMAGVTFATVLGVPIGTWLSEFYGWRSAFGITAIIGFVVFLLQLRYLPKLIPESSIRLHDLPALLRVPKARSGMLIILLIGLAHFCAYSYLAPFFKNVAGFNGTTISSLLLLYGIAGIFGNAFAGYSGNFNIRYTLAFVGLCFAVVFFSFPVFAVHEAGAIVLTALWGFAFGAFPTSANIWMFVHAPQAVEKGMPLFVGLFQVMIATGSLLGGYIVDHFNENILIYGVLNFIILALISVFTLAKGLNNPKLTCES

SEQ ID NO: 981 - DNA, 1212 bp, Acinetobacter sp. ADP1
  CDS (1)..(1212): transl_table=11
atgtcttcttcatcaaatacatcggttcctcccatccgacagtatcccctatttcttattattttagcacttgctacaggtggtttttgtattggtacaaccgagtttgtggccatgggtctcattcaggaaattgcagccgatttacatattagcgttccacaagcaggacatttcatcagtgcctatgctttaggtgtagttattggtgccccggtgattgcgatcttgggcgcacgcgtgccgcgcaaatcattacttctaggattaatgctgttttatggcgttgccaatgctttgacagccttagcgaaaacaccagaaatggttctgatatcacgtttcattgctggtttcccacacggggcatattttggtgtagctgcactggttgccgcagaactggctggccctaaaaaacgtgcatcagcagttgcacaagtgatgatgggattgaccgtagcaactgttttaggcgttccacttgcaacctggattggtcaacaatttggctggcgagcaggttttgaattttctgctgcaattgcttttattactttaatttcggtggctatttttgttccgcacattgcagtcagaacaacagccagtataaaaaccgaactggctggtcttaaaaatatcaatatgtggctgacattggctgtaggtgcaattggttttggtggcatgttttctgtatatagctatgtatcacctattcttacagaatataccaaagtcaatattgatatcgtcccgattgcattggccatttggggtattggcatggtcattggtggcttggtcgctggatggttggcagataaaaatttaaatagaactctagttggtgtcctgatcagttctgcacttgcgtttattcttgccagctttcttatgagtaatatttataccgccatagcaggcctatttttaattggtattacggtgatggggcttggtggcggcttacaaatgcgtctcatggatgttgctggcgatgctcaaggcgtagctgcttccctcaatcattctgcatttaacattgccaatgcactcggtgcattcttgggtggctgggtattgagccatcaaatgggatggattgcgccaatctgggtaggctttgttttaagcctcggagggttgattattttactgattgcctttgctgtcgagaaaaaaacttcgtcaaatcaatgcgcttaa

SEQ ID NO: 982 - protein, 403 aa, Acinetobacter sp. ADP1
MSSSSNTSVPPIRQYPLFLIILALATGGFCIGTTEFVAMGLIQEIAADLHISVPQAGHFISAYALGVVIGAPVIAILGARVPRKSLLLGLMLFYGVANALTALAKTPEMVLISRFIAGFPHGAYFGVAALVAAELAGPKKRASAVAQVMMGLTVATVLGVPLATWIGQQFGWRAGFEFSAAIAFITLISVAIFVPHIAVRTTASIKTELAGLKNINMWLTLAVGAIGFGGMFSVYSYVSPILTEYTKVNIDIVPIALAIWGIGMVIGGLVAGWLADKNLNRTLVGVLISSALAFILASFLMSNIYTAIAGLFLIGITVMGLGGGLQMRLMDVAGDAQGVAASLNHSAFNIANALGAFLGGWVLSHQMGWIAPIWVGFVLSLGGLIILLIAFAVEKKTSSNQCA

SEQ ID NO: 983 - DNA, 1152 bp, Acinetobacter sp. ADP1
  CDS (1)..(1152): transl_table=11
atgtctttaaaattatggatagctttgattgttttaagcctgagtagctttgccattgtcacaaccgaattagcgccgataggtttactttccgccttggcacatgacttgaatcaaagcgaagccatcactggactgattgtgacgggatatggctgggtggcggctatctcggcgctatgctcgatcgttttactaattcggtttccacgaaaaatggtcttaatggccatgctgctgattttggcaatttcgaatatcatcgtggcctatagttcatcctttaatatgattttttctgcgcgtattgtcggtgcaattgcgcacggtagcttttgggccttgattggagctgttgcttatagtctggttccgaaacataaactgggtttggctacatcaattattttttcaggtgtttcagttgcgagtattttgggtgtacctctggcgagttatctgactcaactgagtagctggcggttggcgtttgaatttctgggccttttatctttcattatttgtattttaattctactttttgttcctaaaattccagatcaagcccctttagcatcaggcttttttaaaaaagtgctccagcattcgactttaaatcgtttatttattctgacagcactgatcatttcttcacattttgctgcatttacatttattgaaccctttctgagtcaaatcgcacatcttgcatcgggtcagatcacattacttcttcttgtttttggttcggcaggtttggtggggaatatccttgctggaaaattcatggatcaacatttacagacaatcatcttggtcagtttagtattcatttcggggagcgtgtttgcctttggatatttgggagatcaggttacttttagcattgcggtcacctttttggcgttgtggggtgtttcgattgcaactatatttgtaggattacaaacttgggttttaaagcaggcaggtgatttggcaggtgcagcctcggcaatctatgttgcagtttttaatgccagtattggtctgggtgcactaatggggagcttcatgctgcaatatgccacgcttaatcgggcatttgaagtcattgcaatctttctaatttttagtctttatcttctgcaaaaatttaaccgaacgcattaa

SEQ ID NO: 984 - protein, 383 aa, Acinetobacter sp. ADP1
MSLKLWIALIVLSLSSFAIVTTELAPIGLLSALAHDLNQSEAITGLIVTGYGWVAAISALCSIVLLIRFPRKMVLMAMLLILAISNIIVAYSSSFNMIFSARIVGAIAHGSFWALIGAVAYSLVPKHKLGLATSIIFSGVSVASILGVPLASYLTQLSSWRLAFEFLGLLSFIICILILLFVPKIPDQAPLASGFFKKVLQHSTLNRLFILTALIISSHFAAFTFIEPFLSQIAHLASGQITLLLLVFGSAGLVGNILAGKFMDQHLQTIILVSLVFISGSVFAFGYLGDQVTFSIAVTFLALWGVSIATIFVGLQTWVLKQAGDLAGAASAIYVAVFNASIGLGALMGSFMLQYATLNRAFEVIAIFLIFSLYLLQKFNRTH

SEQ ID NO: 985 - DNA, 1176 bp, Acinetobacter sp. ADP1
  CDS (1)..(1176): transl_table=11
atgaaaactaactttccgctactggccttggcaattggtgcttttgccattggcaccacagagttttcacccatgggattgctgcccaatattgcgcatgatctcaatatcagtattcctaccgcgggcatgctaatcacaggttatgccttaggcgtgatgctgggtgcgccgattatgaccttatggtttggtcatttttcacggcgcaaagccctgatactgctcatgacactgtttactgttggcaatctgctggctgcggtcgcacccaattactggagcctaatggcagcacgtctgatcaccagcctaaatcacggtgcattttttgggatcggatctgtggtagctgccagcgtggtgcccgtacataagcaggccagtgcggttgccagtatgtttatgggtctcaccattgccaatattggtggggtaccattggcaacatggctcggtcaggttattggctggcgtatgactttctttgccatttcgggcttaggcttacttaccatgtggtcactgtatcaagctttgccacaaggttcggcaggacaacgcacagatgtcaaagctgagcttaaagtcttgtcgcgcatacctgtgctcatggcactcatgactacggtactgggtgccagtgccatgtttaccctgtatacctacattgcacccagtttgactgcatttactcatgcctccccgatgtttattacatttatgctggtacttattggcatcgggttttcaattggaaatcatttgggtgggaaatttgcagatctctcactcaacaaaaccttgatcggatttttatcgcttctcattctgatcatgctcgccttcccttggctggctcaaagccatcttggtgctgccattgcactggtaatttgggggatcgccacctttggactggtgccacccgtgcaaatgcgggtcatgaaaattgcacatgaagcgccaggactggcctcatctattaatgtcggcgcttttaatttgggtaatgcagtcggtgccgcagttggtggtttagtactcagccttaatctgggctatgcagcagtatcttttgcaggtgctggtttagcaggattcggcttattgctggtgttattacagatgcgcttaagccatttagtgtctggcaaacagcaatgttatcattaa

SEQ ID NO: 986 - protein, 391 aa, Acinetobacter sp. ADP1
MKTNFPLLALAIGAFAIGTTEFSPMGLLPNIAHDLNISIPTAGMLITGYALGVMLGAPIMTLWFGHFSRRKALILLMTLFTVGNLLAAVAPNYWSLMAARLITSLNHGAFFGIGSVVAASVVPVHKQASAVASMFMGLTIANIGGVPLATWLGQVIGWRMTFFAISGLGLLTMWSLYQALPQGSAGQRTDVKAELKVLSRIPVLMALMTTVLGASAMFTLYTYIAPSLTAFTHASPMFITFMLVLIGIGFSIGNHLGGKFADLSLNKTLIGFLSLLILIMLAFPWLAQSHLGAAIALVIWGIATFGLVPPVQMRVMKIAHEAPGLASSINVGAFNLGNAVGAAVGGLVLSLNLGYAAVSFAGAGLAGFGLLLVLLQMRLSHLVSGKQQCYH

SEQ ID NO: 987 - DNA, 1197 bp, Erwinia carotovora subsp. atroseptica SCRI1043
  CDS (1)..(1197): transl_table=11
atgaatacgtcttcatctatcctcactgggcctacggcacagtatccttggctggccgtcgtctccataggccttgcaactttctctgttgtcacgacggaaatgcttccagtcggtctgctaaccccgattgccgacacactaagtacctctaccggaaccgcaggcctgatgatctcactccctgcactgttggccgcattattcgccccactggtggtgatcgcatccggtggcatggatagacgcaggattttatgcggtctgctggcgctactggttatcgccaacatcgcctcggcactggcaccagacatcggctggatgctggcagcacgtgttcttgtcggcttctgtatgggcggcatctgggcgattgccggaggtctggctgcacgactcgttcccgagcctgccatcggtctggcaacatccattatctttggcggcgtcgccgcggcgtccgtgctgggtgtaccgctaggtgccctgatcggtgatgtcgccggatggcgctgggctttcggctgcatggccgtgcttagcgggctagtgctgatgctccatctcgcggtcattcctgcgctacccgtcgccggttcagccaccgtgcgccagttcggcgagcaactgaccaaccgtaagttgcaagtcggactgattctgacgctgttactggtggcagggcatttcattgcctttaccttcgtgcgcccgctgttgctatcggtgtcaggattcgatgcgcagtggattagcgcattgctgttcgcctatggcgttgcgggcatcgttggcaattttctggtaggtatgatcgcggcacagcgtacggctttagccttgatggcgattgctctggggctgttgttgaccccgatattgttcctgaccatcgggggctcgcatatcggcggcggcatggcgttgctggtctgggggctagcctacggcggtgtatccgttggtttgatgacatggatgatgaaggccgcaccgcgcgccgtggagatggcttccgcgctgtatgttggcgttttcaatgttggtatcgcacttgggtcctgggtcggcggccagatagtagatggctcaggcccaatcgcaacactgtggctggcaggtggattcgcggcggtcgccttgctgttatccctgaacatccggttgactgaacggaggaggatcgtcgaatga

SEQ ID NO: 988 - protein, 398 aa, Erwinia carotovora subsp. atroseptica SCRI1043
MNTSSSILTGPTAQYPWLAVVSIGLATFSVVTTEMLPVGLLTPIADTLSTSTGTAGLMISLPALLAALFAPLVVIASGGMDRRRILCGLLALLVIANIASALAPDIGWMLAARVLVGFCMGGIWAIAGGLAARLVPEPAIGLATSIIFGGVAAASVLGVPLGALIGDVAGWRWAFGCMAVLSGLVLMLHLAVIPALPVAGSATVRQFGEQLTNRKLQVGLILTLLLVAGHFIAFTFVRPLLLSVSGFDAQWISALLFAYGVAGIVGNFLVGMIAAQRTALALMAIALGLLLTPILFLTIGGSHIGGGMALLVWGLAYGGVSVGLMTWMMKAAPRAVEMASALYVGVFNVGIALGSWVGGQIVDGSGPIATLWLAGGFAAVALLLSLNIRLTERRRIVE

SEQ ID NO: 989 - DNA, 1173 bp, Erwinia carotovora subsp. atroseptica SCRI1043
  CDS (1)..(1173): transl_table=11
gtggccagaacacaggatatgctgaaaaagcaaagagtacgtctgctggagatcgcacttgcacttggtggctttgcattaggggcgactgaattcgcatcaatgggcctgcttcctgatatcgcccgttcttctggcataacggaaacacgtgccgctggtgtaatcagtgcttatgctctcggcgctatagtcggtgccccccttctaacattgttgggtgcaaagttgtcgcgacgaagtttactgctattaacgatgacgctagtaataattggtaattttgctaccgttttttctactagttttagcagccttttcttcgcacgcttcctaagcggcattcctcatggtgcatatttcggcgtagctgggtttgttgttgcctcttctgtccccctgcatcaaagagccagagcaataagtcgttttatgttaggcgtgacgttatcaattgttgtcggtactccctcagcaacattcatcggtcaggtatttgggtggcgatgggcgttcgttatggtctgcatacttgccatgttaactctgatcatgatcgccctctttcttccccccaatccaaatgagaaacgtagcgcaccacagattgagttacaggcaatgatgaatattcaagtttggcttacgttgggaattgcggctgttgggtttgcaggtatgttctgcgtatatagctatcttgcgccagcgctaaccaacattaccaaactatctcctcacggggtgccattgatgctggtgttatttggcattggtacggtcgtgggtaacgtaattggtggtcgactatgtgaccgctttggttttgattctgtgggcataattttagcagggagtgctgtttgtatgttcatttacccatctgcaatgcacgggactttatacgcagctatatcaattcttttggtaggttgtctcatggctctcgcacctgctctgcaaattcgacttctggaagtagcaagtagtgccccttctctagccgcagcgtctaatcatgctgcgttcaacatcgccaatgcggttggtccatggctaggcggaatcgcgatctccgcagggtatggatggacctcaacaggatatatcggtgcagcaatggcgataggcgggctaggtatttggtatatttcgcgccgtcttggcacataa

SEQ ID NO: 990 - protein, 390 aa, Erwinia carotovora subsp. atroseptica SCRI1043
MARTQDMLKKQRVRLLEIALALGGFALGATEFASMGLLPDIARSSGITETRAAGVISAYALGAIVGAPLLTLLGAKLSRRSLLLLTMTLVIIGNFATVFSTSFSSLFFARFLSGIPHGAYFGVAGFVVASSVPLHQRARAISRFMLGVTLSIVVGTPSATFIGQVFGWRWAFVMVCILAMLTLIMIALFLPPNPNEKRSAPQIELQAMMNIQVWLTLGIAAVGFAGMFCVYSYLAPALTNITKLSPHGVPLMLVLFGIGTVVGNVIGGRLCDRFGFDSVGIILAGSAVCMFIYPSAMHGTLYAAISILLVGCLMALAPALQIRLLEVASSAPSLAAASNHAAFNIANAVGPWLGGIAISAGYGWTSTGYIGAAMAIGGLGIWYISRRLGT

SEQ ID NO: 991 - DNA, 1191 bp, Erwinia carotovora subsp. atroseptica SCRI1043
  CDS (1)..(1191): transl_table=11
atgaaaaaacatacgcaaaatgatgaggctgatagcctgcctgtttttgctttactggcactggccatgacgggtttcatctgtatattgaccgaaacaatcccagcgggtcttttgcctggcataagttctggccttaatatatcaccatccgttgccgggcagatggtaaccgcttatgcagcgggttcacttctggccgccattcccctgactatcatgacccaggcatggtccagacgtctggttttgcttactacggtgggcggctttctgctcttcaacagcctgacggctttatctgatagcgttgctgtcattatgtgcgcccgctttcttgccggtgcagctgcagggctggcatggagtttaattgcgggctatgcaagaagaatggttgctccttcacttcagggacgggctcttacgctggcaatgattggtacccctgtcgcactttcccttggcgtgcctgcaggaacctggctgggggatcttctggggtggcgtctgaccttcgccgttatgtccggattatccgtggcactgatggcctggatcattctggctgttcctgattatccagggcaggcaacccggcaaaaaatgcgtctcacttctgtcctgttgatccccggtatccgtcctattctgggagtggttttgacctggatgcttgcgcacaatattttgtatacctatatcgcccctttcctgtcccaggcagggctttcatcaagcgtggatattgttctgctggtttttggcctggctgcgatggtcgggattttcatcaccggtagggtgatagactccggcctgcgtattgccgtgcttctttcactttcagtattcgcccttgtttcgatcatctttggtatttctgccacatcccccgccgtgatttatcccggaatagcagtctggggcctgacgttcggaggcgctgcgacattactgcaaacagcactggcagatacggcgggtgagcatgctgatattgcgctttcaatgaatgtggtgacctggaatagcgctatcgctcttggtggccttacaggcgggcttctgctcagacatgaaggagccagttctttaccctgggccctacttgctctgttaatcgttgctctgattattgcctttcgtgccaggaaccatggattcccagcgggggagcgctcatcgtaa

SEQ ID NO: 992 - protein, 396 aa, Erwinia carotovora subsp. atroseptica SCRI1043
MKKHTQNDEADSLPVFALLALAMTGFICILTETIPAGLLPGISSGLNISPSVAGQMVTAYAAGSLLAAIPLTIMTQAWSRRLVLLTTVGGFLLFNSLTALSDSVAVIMCARFLAGAAAGLAWSLIAGYARRMVAPSLQGRALTLAMIGTPVALSLGVPAGTWLGDLLGWRLTFAVMSGLSVALMAWIILAVPDYPGQATRQKMRLTSVLLIPGIRPILGVVLTWMLAHNILYTYIAPFLSQAGLSSSVDIVLLVFGLAAMVGIFITGRVIDSGLRIAVLLSLSVFALVSIIFGISATSPAVIYPGIAVWGLTFGGAATLLQTALADTAGEHADIALSMNVVTWNSAIALGGLTGGLLLRHEGASSLPWALLALLIVALIIAFRARNHGFPAGERSS

SEQ ID NO: 993 - DNA, 1233 bp, Erwinia carotovora subsp. atroseptica SCRI1043
  CDS (1)..(1233): transl_table=11
ttgagtgcaaatcgaatccaaactccgtctctccccgtgtcaaagctcctcgctcttgcgacagccgcgtttctgaccttattgactgagatcatgccagcagggctcctcagttcgatcgctatgggtctggacgtttccgaaagtctggctggtcagttcattaccgcgtttgctctgggggcgcttttatccgcgattcccgctacggcactgacgcggggaatgcggcgtaaacctctgttgcttgtagcaattagcggatttgctgtcgttaatgcagtgaccgcattttcggacaactatgttttatcactggccgcccgctttgttgctggtctgtttggcggcgtggtctggtcgatgcttgccgggtacgcatctcgtatggttccccgttggttactcgggcgtgcaatcgctattgtcggtgcgggctctacggctgcgttggttctcggcgtaccaattggcggccttctcgggtcagcgatcggctggcagggggcgtttggattagtgtcgattattgcggtgctcctcgtcgtctggatcgcgatttttgctcccgattttccgggtgaatcggctgatcagcggctatcgctacctcaggttgcctccaagcgtggcgtaggggcgacgcttgcattgatcctcacttatatcgtcacgcacaacattctttatatttacatcgaacctttcctcgtcgcttcagccatgggggactggctcaacggggtactgtttattttcggggctggtgcggtttttggccttgtgctgtcaggcatcatcgtcgatgggaacctcaagcgtctcggtcctgccgaagtgctgttattcgctgcggcgaccctccttctgggcctttggcccgatgtacaggtcattctggttctggcagtctttatgtggggaatgtctttcgggggattctctgttgtcacgcaaacggcgatgacccatctttcgtctgatgccgtggacgtcgcacagtcgatgtctactacatcgtggaacaccgccgtcgcttctggaggcgtcatcggcggattgctcctcagcaacgcaggcccgggcgcatttccgtgggtgatgatcgggctattgacgctatcattcatcgttgtgattctgggcgttaaccgcgcgctgatagccgctaagcccgcgcagtccgtatccaccaaaagcgattccttgatttcgagtaaccaacatttatga

SEQ ID NO: 994 - protein, 410 aa, Erwinia carotovora subsp. atroseptica SCRI1043
MSANRIQTPSLPVSKLLALATAAFLTLLTEIMPAGLLSSIAMGLDVSESLAGQFITAFALGALLSAIPATALTRGMRRKPLLLVAISGFAVVNAVTAFSDNYVLSLAARFVAGLFGGVVWSMLAGYASRMVPRWLLGRAIAIVGAGSTAALVLGVPIGGLLGSAIGWQGAFGLVSIIAVLLVVWIAIFAPDFPGESADQRLSLPQVASKRGVGATLALILTYIVTHNILYIYIEPFLVASAMGDWLNGVLFIFGAGAVFGLVLSGIIVDGNLKRLGPAEVLLFAAATLLLGLWPDVQVILVLAVFMWGMSFGGFSVVTQTAMTHLSSDAVDVAQSMSTTSWNTAVASGGVIGGLLLSNAGPGAFPWVMIGLLTLSFIVVILGVNRALIAAKPAQSVSTKSDSLISSNQHL

SEQ ID NO: 995 - DNA, 1188 bp, Erwinia carotovora subsp. atroseptica SCRI1043
  CDS (1)..(1188): transl_table=11
atgacccgttctccccgttcgaccgcctggttacgcgtcgtcagcctttctctggcggcattcatttttaacaccgctgaatttgcccctgttgcgttactgtcagacatcgctgccagtttttccatgagcgctgcgcaggttgggctgatcatcacgatttatgcctgggtagttgggctgatgtcgctgccctgcatgctgctgtccagtgatatggaacgacgtagcctgctgatcaaaatctttatcctgttcgccatcagtaatgtgctgtccggcctcgcctggaattattgggtgctgatcatggcccgtatcggcgtggcgctgtctcatgcggtgttctggtcgattacggcatcgttggtggtgcgtctggcgcctgcggataaaaaagcacaggcgttgagcctgctggcgaccggaacggcgctggcgctggtgctagggttaccgctggggcgtgtggtcgggcagtatctgggctggcgcgtgacgtttgtccttattggcctgatcgctgcggtgattatggtgggcctgatgaagctcctgcctgtgttgccgagcagcaattccggttcgttgaagagtttacctctcttgcttaagcgtccggcgttgctgtgtgtgtacggcctgacggtcatgatcgtgacggcgcattttaccgcctacagttacatcgagccgtttatcctgaaagtggcgttgttgagtgaaaacttcacgaccatcctgttactgatttttggcggtgccggaatcattggcagcatgttgtttagccgctacagcagcaagtatcctgccggcttcctgattgtgtcgttcgcgtttctggcggtgtgtttgctgctattgctacctttgtcattcagcggatggagcttgtcgacgctgtgcatcgtctggggtatcgccattatggcgctaagtctgggcatgcaggtcaaggtattgacgttggcatcggatgcaactgatgtagcgatggcactctattcggggatctataacatcgggatcggcggcggcgcgctactcggtaatcaggttattacccatttgggcctgcccgacatcggctacatgggtgcagcgatggcgatactggcgacggtgtgctgtatttttacgtttgttcgctattcccatgtgctaaaaacatcattaacgaactga

SEQ ID NO: 996 - protein, 395 aa, Erwinia carotovora subsp. atroseptica SCRI1043
MTRSPRSTAWLRVVSLSLAAFIFNTAEFAPVALLSDIAASFSMSAAQVGLIITIYAWVVGLMSLPCMLLSSDMERRSLLIKIFILFAISNVLSGLAWNYWVLIMARIGVALSHAVFWSITASLVVRLAPADKKAQALSLLATGTALALVLGLPLGRVVGQYLGWRVTFVLIGLIAAVIMVGLMKLLPVLPSSNSGSLKSLPLLLKRPALLCVYGLTVMIVTAHFTAYSYIEPFILKVALLSENFTTILLLIFGGAGIIGSMLFSRYSSKYPAGFLIVSFAFLAVCLLLLLPLSFSGWSLSTLCIVWGIAIMALSLGMQVKVLTLASDATDVAMALYSGIYNIGIGGGALLGNQVITHLGLPDIGYMGAAMAILATVCCIFTFVRYSHVLKTSLTN

SEQ ID NO: 997 - DNA, 1161 bp, Yersinia pseudotuberculosis IP 32953
  CDS (1)..(1161): transl_table=11
atgcctgttgcactactggcgttggcgttgtgtgcttttgctattggtactactgaatttgtcattatggggttattgccccaggtagcgggtgatttgcacatatcgattccaactgcgggctggttgatcagtggttatgcgctaggcgtggcaattggcgcgcccatcatggcagtgctgaccgcgaaattaccgcgcaagaagacactgttactgttaatggtgatttttatcatcggtaacctgatgtgtgccttggcatacagttatgacttcctgatgttcgcgcgagtgatcaccgcgttgtgtcatggggccttttttggtatcggcgcggtggtcgccgcaaatctggtggcaccaaaccggcgggcctcggcggtggcactgatgtttacggggctgacgctggcgaatgtattgggtgtcccactggggaccgctctaggtcaggcttttggctggcgttcgacattttgggtggtatcggtcatcggtttgttctcgttggcagccctgtatagcaagttgccctcctccagcgaggaagcaccgactgagcttcgtaaggagattgccgctttgcgtggcggtggaatttggctctccttactgatgaccgtattttttgccgcagccatgtttgcgctctttacctacatcgcccccattttgacggaggtcacacaggtttctgagcatggcgtcagttggacgttactgctaatgggggttggcttgacgctcggtaatatcgtcgggggcaggctagctgactggcgtttatcggtcagtttaaccatgacattcttgttgatcgcggtattttctgccctgtttagttggaccagttattcactgttggcggcggaagtgacactgtttttgtggtcagccgccgcattttctgcagtgcctgcgttgcaaattaatgtcgtcgcttatggcaagaaagcccctaatctggtgtcaacgctgaatattgcggcctttaatgtgggtaacgccttaggggcgtgggtcgggggggttgtgattgccaaagggcttggtttgacggcggtgccgctggccgccgcggcactggcggtcatggggttgttgctgtgtctgtttacgttttcccgcgcgcgtactattgggaataaaatggcttag

SEQ ID NO: 998 - protein, 386 aa, Yersinia pseudotuberculosis IP 32953
MPVALLALALCAFAIGTTEFVIMGLLPQVAGDLHISIPTAGWLISGYALGVAIGAPIMAVLTAKLPRKKTLLLLMVIFIIGNLMCALAYSYDFLMFARVITALCHGAFFGIGAVVAANLVAPNRRASAVALMFTGLTLANVLGVPLGTALGQAFGWRSTFWVVSVIGLFSLAALYSKLPSSSEEAPTELRKEIAALRGGGIWLSLLMTVFFAAAMFALFTYIAPILTEVTQVSEHGVSWTLLLMGVGLTLGNIVGGRLADWRLSVSLTMTFLLIAVFSALFSWTSYSLLAAEVTLFLWSAAAFSAVPALQINVVAYGKKAPNLVSTLNIAAFNVGNALGAWVGGVVIAKGLGLTAVPLAAAALAVMGLLLCLFTFSRARTIGNKMA

SEQ ID NO: 999 - DNA, 1173 bp, Bacillus licheniformis ATCC 14580
  CDS (1)..(1173): transl_table=11
atgtttagcacttggaaaatttatcttttagcaatcatcagttttttggtagggacctcagagtacatcatttccggtattttggatcagatcgcccacacactcgggataactttagctgcagcggggcagctcattacgatcttttcactggtgtatgctgttttcaccccggtcctgatggcgttgacggcaagtatggataggcgcaagttaatgatgtatgctctcggtttgtttgtgataggaaatattttggcttttaccctgcctggttatggttggtttgttgcagcgcgtgtcgttatggctttgggggcaggcatggttgtggtcacggccttaacgattgccgccaagatcgcaccggcgggtaagcagggcagtgcaattgctacagtcgtcatggggtttaccgcttctttgattataggtgttccactcggaagaatgacggcagaagcattagggtggaagtctgtatttgggggaattgctttattgggattcatcgcaatgattgttctattcttaacattgccgcatactgaaggcgataagcccgtccctttgcttcagcagctttcccttttaaagaaacggaaagtagcgatggggttatcggtcacttttttctggctcggaggatattccgttgcatatacttatctgtctccttaccttctgaccgtttcagggatcagcggcaatttgctcagcggcgttttgcttatatttggaatcgccagcttggttggatcgaagtttggcggatatagcactgataaatggggagttccttttacgctcgttggcgggatggcgctgcatatcatcgcactgattttgctgtcgcttgtcacccattcctatgtcggagtactgttgattctcatattatggtcgttcgccgcatggtctaccggcccgacgcagcaatatcacttagcgacgcttgaacccgaattgtcaggtgtattgctcggcatcaatcaatcgatgatgcaattcgccatggccgcaggtgcaggaatcggagggatttttgtagaaaaagtgtcgctggcttctattacgtggtttggggcattgggggttatgattgcgattgttgttgttttgacgaccttcagttcacggaaagcagcacatgtaagagaaatcagttcataa

SEQ ID NO: 1000 - protein, 390 aa, Bacillus licheniformis ATCC 14580
MFSTWKIYLLAIISFLVGTSEYIISGILDQIAHTLGITLAAAGQLITIFSLVYAVFTPVLMALTASMDRRKLMMYALGLFVIGNILAFTLPGYGWFVAARVVMALGAGMVVVTALTIAAKIAPAGKQGSAIATVVMGFTASLIIGVPLGRMTAEALGWKSVFGGIALLGFIAMIVLFLTLPHTEGDKPVPLLQQLSLLKKRKVAMGLSVTFFWLGGYSVAYTYLSPYLLTVSGISGNLLSGVLLIFGIASLVGSKFGGYSTDKWGVPFTLVGGMALHIIALILLSLVTHSYVGVLLILILWSFAAWSTGPTQQYHLATLEPELSGVLLGINQSMMQFAMAAGAGIGGIFVEKVSLASITWFGALGVMIAIVVVLTTFSSRKAAHVREISS

SEQ ID NO: 1001 - DNA, 1119 bp, Bacillus licheniformis ATCC 14580
  CDS (1)..(1119): transl_table=11
atgaaaaaaacactgcacgctccagtcaaactgatcatcgcaatttttatgatttgtacattttccatcggctttacagagtacgtcgttatgggtatattgacttccatttcaaaggatctctctgttccgatttcgtctaccggcctattggtaacggcatatgcgggaagcgtctgtctgacggggccgatcgtcaccatattttcggtaaaaatgccgcgcaaaccggtattgatcggcttgatgagtgtgtttgtactgtcgaatgcgctcagtttcctggcgccgaacttcaccattttgttggtctcaagaatcctatccgcatccattcatggtgcattttttgcaacgacaatggtgttcgtcagcgaaatggcaccgcccgaaaaacgggccgccgctgccgcttcaatgaacggcggcttgaccatcgccctgatgctcggcgtcccgtttggttcttatttaggcgatcttttcaactggcggatcgtttttctgatgatcgcatgcctcggattgatcggcctcgccggcatttggctgacggtgccgcacagaaaaccgaaagttgtccctaaattgatccatgaatgggatgtgtttaaaaataaacaagtccttttttcttttgctatcacgatctttggctattcgggcgtattcatcgcctacacgtttattgaaccgatgctgcggcattctgccggtttcgacagtctcggcattacagccgcccttttcgcctacgggtttggcggggtcgtcggcaatttctacgccggaaaggtgccgtttcacctgttaacccgctccatgatcggggtgatgatcgcgctcatggcgatccttgcggcctttccttttgtcagcggacatcctgccggcgccatcatcgtgacgtttttattcggagccggcgcgttcgcgttcggaacggtgccccttttgcaaacaaaggtcgtggctgcgtctgaacacggaacaacgatcgccacctccgtcagcatcgctgcatttaacttggccaacgcgctcggggcttggatcggcggactcattcttaatgcatcagagtctacacataccttgccacaggcggtgcgcttatga

SEQ ID NO: 1002 - protein, 372 aa, Bacillus licheniformis ATCC 14580
MKKTLHAPVKLIIAIFMICTFSIGFTEYVVMGILTSISKDLSVPISSTGLLVTAYAGSVCLTGPIVTIFSVKMPRKPVLIGLMSVFVLSNALSFLAPNFTILLVSRILSASIHGAFFATTMVFVSEMAPPEKRAAAAASMNGGLTIALMLGVPFGSYLGDLFNWRIVFLMIACLGLIGLAGIWLTVPHRKPKVVPKLIHEWDVFKNKQVLFSFAITIFGYSGVFIAYTFIEPMLRHSAGFDSLGITAALFAYGFGGVVGNFYAGKVPFHLLTRSMIGVMIALMAILAAFPFVSGHPAGAIIVTFLFGAGAFAFGTVPLLQTKVVAASEHGTTIATSVSIAAFNLANALGAWIGGLILNASESTHTLPQAVRL

SEQ ID NO: 1003 - DNA, 1203 bp, Bacillus cereus E33L
  CDS (1)..(1203): transl_table=11
ttgtatatggagttaaagtcaatgatacgtattttggcaattgtagctttttttgttggattagattcattattagtcgcacctttattaccagtaattacagaaacaattagtatccctgatgggagtggagggttattaattactatttatgcactttgttatggaataactgcacccgtatttggaatgatgtctgatagagttggaaggaaacgtatgattataatagggtttattattttttctatttctacattttgtacgggattagcgaagaattttgaaattcttttattatttcgcggtctaacaggtttatctggtgcgatgattatgccaagtatttttgcattagtaggagataaagttacatatgagtcaagaggaaaagcgatgggaacgattatgggagcaatgataggttcaacagtcattggagtacctataggcgcatttttatctgaaataggaaattggcaatggacattttatagtataggacttttaactttatttctgacattactaattaatcacatattaagaaatgaaaaagagagagatgatgtgcatgtttctttaacggaaacggtggatgcaccattgaaaatgactgtagtaaatatatcagttttatttgcattattagcaacgtttttatggacaattggattacatggcatgttttcatacataggtgtttattatgagaataattttggaatttccgttggtaaaataggtatagtaatctttttggcaggagttggtagtgtagctggtaatattttaggtggaaagttagctgataaaataggaaagaagaatgttatagtcattgcgagtattgtatcttcaattagtgtaatgttattctcgctttccacaggaaatctagtaattgcaattattgtacatattatttggagtttatttattggatttggacaagcatcattaacggcactaatttcagaattaaaaccagctgtgcgagggactgtaatggcattaaatagctctgccatgtatattgggatgactattgcttctggcgtagcgtcacttgccataagtaatggatttccgttttcttctttaggaacaatctgtgcaattgctagtttacttgtccttccaatcatatttgttctagttaaagaaaaagcattatctaataaaaagaagatgactatttaa

SEQ ID NO: 1004 - protein, 400 aa, Bacillus cereus E33L
MYMELKSMIRILAIVAFFVGLDSLLVAPLLPVITETISIPDGSGGLLITIYALCYGITAPVFGMMSDRVGRKRMIIIGFIIFSISTFCTGLAKNFEILLLFRGLTGLSGAMIMPSIFALVGDKVTYESRGKAMGTIMGAMIGSTVIGVPIGAFLSEIGNWQWTFYSIGLLTLFLTLLINHILRNEKERDDVHVSLTETVDAPLKMTVVNISVLFALLATFLWTIGLHGMFSYIGVYYENNFGISVGKIGIVIFLAGVGSVAGNILGGKLADKIGKKNVIVIASIVSSISVMLFSLSTGNLVIAIIVHIIWSLFIGFGQASLTALISELKPAVRGTVMALNSSAMYIGMTIASGVASLAISNGFPFSSLGTICAIASLLVLPIIFVLVKEKALSNKKKMTI

SEQ ID NO: 1005 - DNA, 1248 bp, Bacillus cereus E33L
  CDS (1)..(1248): transl_table=11
atgataggaattatagggaagagggggaatcaattgaattcatatacagcatcgtcttcagaagttcagacgaatcgaagaagtatatttgcgttattagcgctagcaattagtgcgttcgggattggtacaacggaatttgttagtgtcggtttattaccatctatttcggaagatttacatgtgtcggtgacaacagctggtttaacagtttctttatatgcgttaggcgtagcatttggtgctccagtattaacgtcgttaacagctaatatgtcacgaaaaacgttattaatgtggattatgattattttcattattggtaacggaattgcagctgtcgcaacaagctttactgtattacttattgcgcgaattgtttctgcactttcgcatggtgtgtttatgtcaattggttcaacgattgctgcggcactcgtaccagaaaataaacgtgctagcgcgattgccattatgtttactggtgttacagtcgcaactattacaggtgcaccaattggaacatttattggtcaacaatttggctggagaacatcatttttagcaattgtggtaattggaattattgccttaatcgcaaatagtattctcattccatctaatatgaaaaaaggtacgtctgtatcattccgcgatcagttcaaattgattacgaacggaagactgttactagttttcatcattactgcattaggatatgggggaacattcgtaacatttacgtatttatctccgttattacaagaagtaacagggtttaaagctaatacggttactatcattttattagtatatggaatcgctattgcaatagggaatgtgattggcgggaaattatcgaatcataatccaattcgagcgctattttacatgttctttattcaagcgattatattatttgttttaacatttacagcgccatttaaagtagctgggttaattacaattatttttatgggactattcgcatttatgaatgttccagggttacaagtatatgtcgtaatgttagctgaacgatttgtaccgagtgctgtcgatgttgcatcggcaattaatattgcggcgtttaatgctgggattgctcttggtgcttatttaggcggtatggtaacgaattcgttagggttaattcatacagcttgggtaggcggcattatggtagtaggtgctgttattttaacagcgtggagtatgagattagaaaaacgagatcaagtaaaataa

SEQ ID NO: 1006 - protein, 415 aa, Bacillus cereus E33L
MIGIIGKRGNQLNSYTASSSEVQTNRRSIFALLALAISAFGIGTTEFVSVGLLPSISEDLHVSVTTAGLTVSLYALGVAFGAPVLTSLTANMSRKTLLMWIMIIFIIGNGIAAVATSFTVLLIARIVSALSHGVFMSIGSTIAAALVPENKRASAIAIMFTGVTVATITGAPIGTFIGQQFGWRTSFLAIVVIGIIALIANSILIPSNMKKGTSVSFRDQFKLITNGRLLLVFIITALGYGGTFVTFTYLSPLLQEVTGFKANTVTIILLVYGIAIAIGNVIGGKLSNHNPIRALFYMFFIQAIILFVLTFTAPFKVAGLITIIFMGLFAFMNVPGLQVYVVMLAERFVPSAVDVASAINIAAFNAGIALGAYLGGMVTNSLGLIHTAWVGGIMVVGAVILTAWSMRLEKRDQVK

SEQ ID NO: 1007 - DNA, 1185 bp, Bacillus cereus E33L
  CDS (1)..(1185): transl_table=11
gtggggaaagacttgaattttcgtgtgtatattttagctatcgcggctttcgtagtcggaacggttgagctaattataggaggaacgcttgatttagttgccgatgatttaggagtatctattagtgcagctggtcagcttatcacaatattttcagtagtatttgctttatcaggtcctgttttattagcattaacagggaaatttgaaagaaaaacattgtatgttggggcattatcaattttcttaatcggaaatattatttcagcatttagtgtgaattacgggatgttaatgttctcaagggtgatttgtgcggcgagtggttcgcttattattgcactgtcagtaacacttgcttctagcgttgtagaaccgcattttcgtgcgcgtgcaattggaatcattttcatggggattagtggatcacttgtacttggagtaccgcttggacttgtactcggaaatgcatacggatggcgtgcaccatttgtactcatttcgatcttaacagttatggcaatcgcttgtatttcattattcttaacgaaagtaccaccgacatcagtattatcaataagagaacaaattgctacgttaaaagataaaaaaatcgtaagtgcacagttaacatcattcttatttttaacgggtcatttaacactatatgcatatttaacaccatttttaaaagatgtgatgcatgtggaagcgaattggattagtgtattttacttcatcttcggaatcgcagcagtaattggcggcggattcggaggatggcttgcggataaatggggatcgaagaaaagtattatttcaattattattgtatttgcgtgtgcgatcttcctattgccattaatgacattctcattcccgctgttcattattatgatgggactttggagtatgctgagctgggctatttcaccagcgcaacaaaactatttgattgaaattgcaccagaatcagctggtattcagcaaagtttaaataactctgctcttcacttagggattgcgctcggttcaacagtaggcggagttgttattgagaaatcatctgttatatataatgcttgggtaggcggcggctttattatattagcgttgctttgtgcgattttctcgattacgagaggacgttctgctcggtttgcgaaggaggaatctatcgtttga

SEQ ID NO: 1008 - protein, 394 aa, Bacillus cereus E33L
MGKDLNFRVYILAIAAFVVGTVELIIGGTLDLVADDLGVSISAAGQLITIFSVVFALSGPVLLALTGKFERKTLYVGALSIFLIGNIISAFSVNYGMLMFSRVICAASGSLIIALSVTLASSVVEPHFRARAIGIIFMGISGSLVLGVPLGLVLGNAYGWRAPFVLISILTVMAIACISLFLTKVPPTSVLSIREQIATLKDKKIVSAQLTSFLFLTGHLTLYAYLTPFLKDVMHVEANWISVFYFIFGIAAVIGGGFGGWLADKWGSKKSIISIIIVFACAIFLLPLMTFSFPLFIIMMGLWSMLSWAISPAQQNYLIEIAPESAGIQQSLNNSALHLGIALGSTVGGVVIEKSSVIYNAWVGGGFIILALLCAIFSITRGRSARFAKEESIV

SEQ ID NO: 1009 - DNA, 1215 bp, Bacillus cereus E33L
  CDS (1)..(1215): transl_table=11
ttgagttcatatacagtaccatcttcggaagttcagacgaatcgaagaagtatgtttgctttattagcactagcaattagtgcatttggaattgggacgaccgagtttattagtgtcggtttattaccatctatttcaaaagatttaaatgtttcggttacaacagctggtttaactgtttccctatatgcgttaggggcggcagtaggagctcctgttttaacagcgttaacggctagtatgtcgagaaagacattattaatgtggattatggttattttcattattggtaatgggatcgcggcagtagcaacaagtttcactatattaattatcgcaaggattgtatctgcttttgcacatggtgtgtttatgtcgataggatctacaattgcagccgcaatcgtcccagagaataaacgtgctagcgccattgcgattatgtttactggattaacagttgcgactattacaggtgtgccaattggaacgtttatcggtcaacaatttggctggagagcgtcatttatggcgattgtcgtaattggaattattgcttttatcgcaaacagcatactagtcccatctaatttaaaaaatggtgtacctgtatcgtttcgtgatcaatttaaattaattaaaaatggaagactattacttgttttcattattactgcacttggatatggcggtacattcgtaacatttacgtatttatcacctctattacaagaggtaacaggatttgaagcaagtaccgttaccatcattttattagtgtatggaattgccattgcgatagggaatatggtcggcggaaaattatcgaatcataatccgattcgagcgctattttacatgttctttattcaagcgattatattatttgttttaacatttacagcgccatttaaagtagctggattaatcacaattattttcatgggactattcgcatttatgaatgttccggggctacaagtatatgtagttatattggcagagcgctttgttccgagtgcggttgatgttgcttcagcaattaatattgccgcatttaacggaggaatcgctttaggttcttatataggtggccttgtaacgaattcgttaggattaatccatactgcttgggtaggtggtcttatggtagtagccgctgttattttaacagcgtggagtatggcattagaaaaaagagatcaagtaaaataa

SEQ ID NO: 1010 - protein, 404 aa, Bacillus cereus E33L
MSSYTVPSSEVQTNRRSMFALLALAISAFGIGTTEFISVGLLPSISKDLNVSVTTAGLTVSLYALGAAVGAPVLTALTASMSRKTLLMWIMVIFIIGNGIAAVATSFTILIIARIVSAFAHGVFMSIGSTIAAAIVPENKRASAIAIMFTGLTVATITGVPIGTFIGQQFGWRASFMAIVVIGIIAFIANSILVPSNLKNGVPVSFRDQFKLIKNGRLLLVFIITALGYGGTFVTFTYLSPLLQEVTGFEASTVTIILLVYGIAIAIGNMVGGKLSNHNPIRALFYMFFIQAIILFVLTFTAPFKVAGLITIIFMGLFAFMNVPGLQVYVVILAERFVPSAVDVASAINIAAFNGGIALGSYIGGLVTNSLGLIHTAWVGGLMVVAAVILTAWSMALEKRDQVK

SEQ ID NO: 1011 - DNA, 1194 bp, Mannheimia succiniciproducens MBEL55E
  CDS (1)..(1194): transl_table=11
atgctaaatagaaaactggttaatcgtgttgaatatttccgtgtgattgttatggcgtttgccgcattcgtatttaataccacggaatttgtgccggtggcattacttagtgatatagccgatagtttccaaatgccggtctcaaacacggggctgatgattactatctatgcctggattgtttccttatgttctttaccgtgtatgctgatgacggcaaggctggaacgtcgccgtttactaatcagtctgtttattttatttattgcgagtcatattctttccgcatttgcttggaattatgaagtgctattgatcgctcgtgccggagtagcgttaacgcattctattttttggtcgattacagctgccttaactattcgtattgcaccgaaaaataagaaaacccaagctttaggtctattagcgttaggatcctccctggcaatggtattggggctgcctttagggcggattatcggtcaggcattcggctggcgtacaacattcactttaattggtgtttttgccgcgctgattttaattttaattgttcgcttattgccaaaaattccgagtcaaaacgccggttcattaaaaagtttaccggtacttgctcgccggccaatgctgattacactgtatattttcactattttagtgatttctgcgcattttaccgcttatagttatattgaaccttttatgattcaaatcggccgggtttcggctaataaggcaactgccgtgttgttgattttcggtgtgtccggcgtggttgccagtgttttgttcagccggctttatcgtattgcgccaattaagtttttactgagttccgtagctattttaactttggcattgatttgtttatacggggttagcggcatatccggtgcgatattcgcattggttttcatttggggcgttgcaatttcggcactcagtctggcaatgcagatgaaggtactgcaactagctccggacgctactgatgtggcaacagccatttattcgggcatttataatatcggtatcggcggcggcgccttaattggtaatcaggttatgcaacatttaggtttggcaaatatcggttatgtgggggcggttctcggtgcggtaagtattatttggtttattctgatgtttttaaaattcagtcgggttcctctcaatattgttaatcagtaa

SEQ ID NO: 1012 - protein, 397 aa, Mannheimia succiniciproducens MBEL55E
MLNRKLVNRVEYFRVIVMAFAAFVFNTTEFVPVALLSDIADSFQMPVSNTGLMITIYAWIVSLCSLPCMLMTARLERRRLLISLFILFIASHILSAFAWNYEVLLIARAGVALTHSIFWSITAALTIRIAPKNKKTQALGLLALGSSLAMVLGLPLGRIIGQAFGWRTTFTLIGVFAALILILIVRLLPKIPSQNAGSLKSLPVLARRPMLITLYIFTILVISAHFTAYSYIEPFMIQIGRVSANKATAVLLIFGVSGVVASVLFSRLYRIAPIKFLLSSVAILTLALICLYGVSGISGAIFALVFIWGVAISALSLAMQMKVLQLAPDATDVATAIYSGIYNIGIGGGALIGNQVMQHLGLANIGYVGAVLGAVSIIWFILMFLKFSRVPLNIVNQ

SEQ ID NO: 1013 - DNA, 1305 bp, Bacillus licheniformis ATCC 14580
  CDS (1)..(1305): transl_table=11
atgatatgtaccataatatcattagccggcagccatttgctataccttaaaaaagaaaggagaaaaagaatgacctctgttcatgataaaaaacgcagtatattagcgcttttagccttggcggccagcgcatttgccatcggcacgaccgaattcatcagcgtggggcttctgcctttaattgctgaagacatgaatatttcggtgacgacggcaggactgaccgtatcattatacgcactgggcgtaacagtcggcgcacctgttctgacgtctgtcacatccagtatgccgagaaaagcgctgctgctggtgattatgctcatttttatgatcggcaacgggcttgcggcatgtgccggaagcatcggtgttttattaaccgcccgcgtgatttcggcgttttctcatggcgtatttatgtcaatcggttcaacgattgcggcaagcctagtcccggcggataaaagagccggagcgatatcgatcatgtttaccgggctgacgattgcaatgattaccggagttcccatcggcacgttcctcggtcagcagttcggctggcggattgcttttgcggcgatcgtcgctgtcggcgcactggcgtttatcgccaacagcttacttgttccgggcgatttgccgaaaggcgtccgaacgtctttcaagagccagttgaagcttgtgaccaatgggcggctgctgcttttattcatcattacggcgcttggttatggagggacatttgttgtctttacgtatttatccccgctgcttcagcatgtgacgggctttaaacaggaagctgttgccgtcattttgcttgcttacggcattgccgtcgcgctcggaaatattatcggaggtaaagcggccaacaaaaaaccgcttactgcattattctatatgttcatcgcccaggcggctgtgcttctcatcttaacggcggctgctccttatcaggcagcgggctttatcgtcatcatgctgatgggatttttagccttcatgaatgtccccgggctccagtcctatgtggtgattctggctgaacggtttgttccaggggcggttgatgtcgcatcagctgtcaatattgcggcgttcaacgtcggtatagcgatcggttcttatacaggaggcgccatcacacaatcgatcggattgattcacactccatgggtgggagctttgatggtgctcggcgccgtcgtgctgacaggctggagcagggcgctggaacgaaatgatcaaaaacaaaatgatcaaaaacaaaatcaagctttaaaggaaaactgcgcatga

SEQ ID NO: 1014 - protein, 434 aa, Bacillus licheniformis ATCC 14580
MICTIISLAGSHLLYLKKERRKRMTSVHDKKRSILALLALAASAFAIGTTEFISVGLLPLIAEDMNISVTTAGLTVSLYALGVTVGAPVLTSVTSSMPRKALLLVIMLIFMIGNGLAACAGSIGVLLTARVISAFSHGVFMSIGSTIAASLVPADKRAGAISIMFTGLTIAMITGVPIGTFLGQQFGWRIAFAAIVAVGALAFIANSLLVPGDLPKGVRTSFKSQLKLVTNGRLLLLFIITALGYGGTFVVFTYLSPLLQHVTGFKQEAVAVILLAYGIAVALGNIIGGKAANKKPLTALFYMFIAQAAVLLILTAAAPYQAAGFIVIMLMGFLAFMNVPGLQSYVVILAERFVPGAVDVASAVNIAAFNVGIAIGSYTGGAITQSIGLIHTPWVGALMVLGAVVLTGWSRALERNDQKQNDQKQNQALKENCA

SEQ ID NO: 1015 - DNA, 1149 bp, Legionella pneumophila subsp. pneumophila str. Philadelphia 1
  CDS (1)..(1149): transl_table=11
atgaataaaagcctgatttttttagcaataggcatgtttacagtaggttgcaatacatttctaattgctggtctgcttcctcaaataggcgaaacgctcgagcagtcggttgcggtaactgggcaaggagtgagtctattcagtttgacttatcttttttcagcgccacttttttctctgattttggttaatcagccggtaaagcgtatgattcagcttgcgcttactgtcttcatgcttggcaatttaataacgctactttctgaaaatatcgtgctgtttttaattggaagatctctggcgggagcaggaaccgggatttttacgccgttatgtatcagcattgccattcattttaccaggccatctgccaaaggacgaattttaagttttatctggagtgctaacagtgcgggtgtagtatttggcgttcctgccggactttacttatcctccttgtttcattggcagttatcgattgccagtcttattattttaagtttgcttgcattgattggtttttcaatgcaaaacattgatataaaactacccaaaccttcgccatttggaggcaggcttcgtcttctgatcgagccaaaaacgctatcggtaattggaattacttgctttaccgctttggcaagtttgggattatactcgtatgtcaccctgattcaatcaggatcccctaattcgctcagtatgacgctattgagttggggactgggtggatttataggaagctcactgattggggtgtttatcgatcgaacgggtaaaccaagggttattatggccttaattttggttggcctcatgtttgctctgattgccataccattcaccaggaatctgccttacctgggattaatccctttttttatgtggggtgcttgcggatgggctatagtgactccccagcaacacattttatatgaattacatgaaaatcagggaactatccttgccgctatcaattcatcggccttgggcttggggtcagctttgggaacgttgcttggcggcttattgatttcctctggattcaggggaatctatcttcctttttctgctgccactttattgtttttcgtattgataattcagctgatagtaattaacacttcacataaggtaaataacatatga

SEQ ID NO: 1016 - protein, 382 aa, Legionella pneumophila subsp. pneumophila str. Philadelphia 1
MNKSLIFLAIGMFTVGCNTFLIAGLLPQIGETLEQSVAVTGQGVSLFSLTYLFSAPLFSLILVNQPVKRMIQLALTVFMLGNLITLLSENIVLFLIGRSLAGAGTGIFTPLCISIAIHFTRPSAKGRILSFIWSANSAGVVFGVPAGLYLSSLFHWQLSIASLIILSLLALIGFSMQNIDIKLPKPSPFGGRLRLLIEPKTLSVIGITCFTALASLGLYSYVTLIQSGSPNSLSMTLLSWGLGGFIGSSLIGVFIDRTGKPRVIMALILVGLMFALIAIPFTRNLPYLGLIPFFMWGACGWAIVTPQQHILYELHENQGTILAAINSSALGLGSALGTLLGGLLISSGFRGIYLPFSAATLLFFVLIIQLIVINTSHKVNNI

SEQ ID NO: 1017 - DNA, 1173 bp, Burkholderia mallei ATCC 23344
  CDS (1)..(1173): transl_table=11
atgcctctaccgttactcgcgctcgcgatcagcgcgttcgccatcggcaccaccgagttcgtcatcatgggcctgttgcccgacatcgcgcgcgagctcgccgtcacgctgccgtccgccggccttctcgtgagcggctacgcgctcggcgtcgccgcgggcgcgccgctgctcgccgtgctgacgagccgcatgccgcgcaaggccgcgttgcagctgctgatggcgatcttcatcgccggcaacgtgctgtgcgcgctcgcgcagagctacgggatgctgatggtcgcgcgcgtcgtcacgtcgttcgcgcacggttcgtttttcggcatcggcgcggtggtcgccgcatcgctcgtgagcgccgacaagcgcgcgagcgcgatcgcgctgatgttcacggggctcacgctcgcgaacgtgctcggcgtgccgttcggtaccttcgtcggccagacgctcggctggcgcgcgacgttctggatcgtcgcggcgctcggtgtcgcgtcgttcgccggcgtcgccgcgctcgtgccgaaacggcgcgacgcggcgggcgcggcgcttagccgcgagctgcgcgtgctcaggcagccgcaggtgtggctcgcgctcgcgatgacggtgctcggtttcggcggcgtattcgtcgtgttcacctacatcgcgccgattctcgaggatgtgacgggcttcgcgccgcgtgcggtgtcgctcgtgctcgtgctgttcggcgccgggctcacgatcggcaacacgatcggcggccggctcgcggaccgcgcgctgatgccttcgctggtcgcgattctcgtcgcgctgatcgccgtgatggcggcgttcgcgaagacgagccacatgcccgccgcggccgccgtcaccgtatttgtctgggggatcgctgcttttgcgacggttcctccgctacagtcgcgggtcgtcgagaaggccgcgcatgcgccgaatctcgcgtcgacgctgaacatcggggcgttcaacgtcggcaatgcgggcggcgcgtggctgggcggcgtcgcgctgtcgcacggggtgccgctcgacgcgctgccttgggtggcggccgtcgtcacgctcgccgcgctcgccgtcacggcgctcgccgcgcggctcgatacgcgcgtctcatcgggcgcggctacagcggcgcaatga

SEQ ID NO: 1018 - protein, 390 aa, Burkholderia mallei ATCC 23344
MPLPLLALAISAFAIGTTEFVIMGLLPDIARELAVTLPSAGLLVSGYALGVAAGAPLLAVLTSRMPRKAALQLLMAIFIAGNVLCALAQSYGMLMVARVVTSFAHGSFFGIGAVVAASLVSADKRASAIALMFTGLTLANVLGVPFGTFVGQTLGWRATFWIVAALGVASFAGVAALVPKRRDAAGAALSRELRVLRQPQVWLALAMTVLGFGGVFVVFTYIAPILEDVTGFAPRAVSLVLVLFGAGLTIGNTIGGRLADRALMPSLVAILVALIAVMAAFAKTSHMPAAAAVTVFVWGIAAFATVPPLQSRVVEKAAHAPNLASTLNIGAFNVGNAGGAWLGGVALSHGVPLDALPWVAAVVTLAALAVTALAARLDTRVSSGAATAAQ

SEQ ID NO: 1019 - DNA, 1212 bp, Burkholderia mallei ATCC 23344
  CDS (1)..(1212): transl_table=11
atgagcgattgcacgacgcggcccgccggcttcgcgcggccgtcgcgcgaagccgcgcgcctgccgctcgcgggattgctcgcgctcgcgacggccggcttcatcacgatcgtgaccgaggcgctgcccgccgggctgctgccgctgatggggcgcgacctgcgcgtgtccgatgcgctcgtcggccagctcgtcacagtctatgcggcgggctcgatcgtcgcggcgatgccgctcgtcgcggcgacgcgcggcatgcgcaggcggccgctgctgctcgccgcgctcgcgggcttcgtcgtcgcgaacacggcgacggccgcgtcgccgtactacgcgcccgtgctcgtcgcgcgctgcgtcgcgggcgtctcggcggggctcctgtgggcgctgctcgcgggctacgcgagccggatggtcgacgcgcggcagcgcggccgcgcgatcgcgatcgcgatgctcggcgcgccggtggcgatgtcggtcggcattccgctcggcacggcgctcggcgccgcgctcggctggcgcgcgacgttcgccggcgtgacggcgctcacgctcgcgctgatcgcgtgggtgcgcgcgagcctgcccgatgcgccggggcggccctcgggcgagcggctgccggtcgcccgcgtgctgcggatgccgggcgtgctgcccgtgctggcggtgatgttcgcgtacgtgctcgcgcacaacatcctctacacgtacatcgcgccgtttctcgcgagcgccgggatgggcacgcgcatcgacgcgacgctgttcgcgttcggcgcggcgtcgttcgcgggcatcggtctcacgggcgtgtggatcggcaacgggctgcggcggctcgcgctcgcgagcatcgcgcttttcgcgctcgcgtccgtgctgctcggcgtggcgagcggctcgcccgcggtcgtctatgcgagcgtcgccgtgtgggggctcacgttcggcggcgcggcgacggtcttccagaccgcgtcggcgaacgcggcgggcgaggcggcggacgtcgcgcaatcgatgatcgtcacggtgtggaatctcgcgatcgcggccggcggtgtcgcgggcggcgtgctgctcgagcggttcggcgcgggcgcgatgccgtgggcgctcgtcgcgctgctcgtgcccgcgtggctcggcgcgtggcgcgcgcggcgccacggcttcccggcggcccgcgcgccgtga

SEQ ID NO: 1020 - protein, 403 aa, Burkholderia mallei ATCC 23344
MSDCTTRPAGFARPSREAARLPLAGLLALATAGFITIVTEALPAGLLPLMGRDLRVSDALVGQLVTVYAAGSIVAAMPLVAATRGMRRRPLLLAALAGFVVANTATAASPYYAPVLVARCVAGVSAGLLWALLAGYASRMVDARQRGRAIAIAMLGAPVAMSVGIPLGTALGAALGWRATFAGVTALTLALIAWVRASLPDAPGRPSGERLPVARVLRMPGVLPVLAVMFAYVLAHNILYTYIAPFLASAGMGTRIDATLFAFGAASFAGIGLTGVWIGNGLRRLALASIALFALASVLLGVASGSPAVVYASVAVWGLTFGGAATVFQTASANAAGEAADVAQSMIVTVWNLAIAAGGVAGGVLLERFGAGAMPWALVALLVPAWLGAWRARRHGFPAARAP

SEQ ID NO: 1021 - DNA, 1170 bp, Burkholderia mallei ATCC 23344
  CDS (1)..(1170): transl_table=11
atgccactgcctctgtttgcccttgccgttgccgcgtttggcatcggtaccaccgagttcgtcatcatggggctcctgccgaatgtcgcgcgcgatctgggcgtgtcgattccggcggcgggcatgctcgtgtccggctatgcgctcggcgtgacgatcggcgcgccgatcctcgccgtcgtcaccgcgaaaatgccgcgcaaggcgacgctgctcgcgctgatcggcgtgttcatcgtcggtaatctgttttgcgcgatcgcgcccggctacgcgacgctgatggtcgcgcgcgtcgtcaccgcgttctgccacggcgcgttcttcggcatcggctcggtggtcgcgagcaacctcgtcgcgccgaacaagcgcgcgcaggcgatcgcgctgatgttcaccggcctcacgctcgcgaacgtgctcggcgtgccgctcggcaccgcgctcggccaggcgctcggctggcgcgcgacgttctgggccgtcaccggcatcggcgcgctcgccgcggcggcgctcgccttctgcgtgccgaagcgcctcgagatgcccgcggccggcatcgcgcgcgagttcggcgtgctgcgcaacccgcaggtgctgatggtgctcggcatcagcgtgctcgcgtcggcgagcctcttcaccgtgttcacgtacatcgcgccgatcctcgaggacgtgacgggcttcacgccgcacgacgtcacgctcgtgctgctgctgttcggcctcgggctgacggtcggcggcaccgtcggcggcaagctcgccgactggcggcggatgccgtcgctcgtcgcgacgctcgcgtcgatcggcgtcgtgctcgccgcgttcgcgggcacgatgcgcacaccgctgcccgcgctcgtgacgattttcgtgtggggcgtgctcgcgttcgcgatcgtgccgccgctgcagatcctgatcgtcgatcgcgcgagccacgcgccgaatctcgcgtcgacgctcaaccagggcgcgttcaatctcggcaacgcgctcggcgcgtggctcggcggcaccgcgatccacgcgggcgtgccgctcgcgaaactgccgtgggcgggcgccgcgctcgcgatggccgcgctcgcgctcacgctgtggtccgcatcgctcgagcggcgtgcggttccggggccggccggatgcgcgtga

SEQ ID NO: 1022 - protein, 389 aa, Burkholderia mallei ATCC 23344
MPLPLFALAVAAFGIGTTEFVIMGLLPNVARDLGVSIPAAGMLVSGYALGVTIGAPILAVVTAKMPRKATLLALIGVFIVGNLFCAIAPGYATLMVARVVTAFCHGAFFGIGSVVASNLVAPNKRAQAIALMFTGLTLANVLGVPLGTALGQALGWRATFWAVTGIGALAAAALAFCVPKRLEMPAAGIAREFGVLRNPQVLMVLGISVLASASLFTVFTYIAPILEDVTGFTPHDVTLVLLLFGLGLTVGGTVGGKLADWRRMPSLVATLASIGVVLAAFAGTMRTPLPALVTIFVWGVLAFAIVPPLQILIVDRASHAPNLASTLNQGAFNLGNALGAWLGGTAIHAGVPLAKLPWAGAALAMAALALTLWSASLERRAVPGPAGCA

SEQ ID NO: 1023 - DNA, 1173 bp, Burkholderia pseudomallei K96243
  CDS (1)..(1173): transl_table=11
atgcctctaccgttactcgcgctcgcgatcagcgcgttcgccatcggcaccaccgagttcgtcatcatgggcctgttgcccgacatcgcgcgcgagctcgccgtcacgctgccgtccgccggccttctcgtgagcggctacgcgctcggcgtcgccgcgggcgcgccgctgctcgccgtgctgacgagccgcatgccgcgcaaggtcgcgttgcagctgctgatggcgatcttcatcgccggcaacgtgctgtgcgcgctcgcgcagagctacgggatgctgatggtcgcgcgcgtcgtcacgtcgttcgcgcacggttcgtttttcggcatcggcgcggtggtcgcggcatcgctcgtgagcgccgacaagcgcgcgagcgcgatcgcgctgatgttcacggggctcacgctcgcgaacgtgctcggcgtgccgttcggtaccttcgtcggccagacgctcggctggcgcgcgacgttctggatcgtcgcggcgctcggtgtcgcgtcgttcgccggcgtcgccgcgctcgtgccgaaacggcgcgacgcggcgggcgcggcgcttagccgcgagctgcgcgtgctcaggcagccgcaggtgtggctcgcgctggcgatgacggtgctcggtttcggcggcgtattcgtcgtgttcacctacatcgcgccgattctcgaggatgtgacgggcttcgcgccgcgtgcggtgtcgctcgtgctcgtgctgttcggcgccgggctcacgatcggcaacacgatcggcggccggctcgcggaccgcgcgctgatgccttcgctggtcgcgattctcgtcgcgctgatcgccgtgatggcggtgttcgcgaagacgagccacatgcccgccgcggccgccgtcaccgtatttgtctgggggatcgctgcttttgcgacggttcctccgctacagtcgcgggtcgtcgagaaggccgcgcatgcgccgaatctcgcgtcgacgctgaacatcggggcgttcaacgtcggcaatgcgggcggcgcgtggctgggcggcgtcgcgctgtcgcacggggtgccgctcgacgcgctgccttgggtggcggccgtcgtcacgctcgccgcgctcgccgtcacggcgctcgccgcgcggctcgatacgcgcgtctcatcgggcgcggctacagcggcgcaatga

SEQ ID NO: 1024 - protein, 390 aa, Burkholderia pseudomallei K96243
MPLPLLALAISAFAIGTTEFVIMGLLPDIARELAVTLPSAGLLVSGYALGVAAGAPLLAVLTSRMPRKVALQLLMAIFIAGNVLCALAQSYGMLMVARVVTSFAHGSFFGIGAVVAASLVSADKRASAIALMFTGLTLANVLGVPFGTFVGQTLGWRATFWIVAALGVASFAGVAALVPKRRDAAGAALSRELRVLRQPQVWLALAMTVLGFGGVFVVFTYIAPILEDVTGFAPRAVSLVLVLFGAGLTIGNTIGGRLADRALMPSLVAILVALIAVMAVFAKTSHMPAAAAVTVFVWGIAAFATVPPLQSRVVEKAAHAPNLASTLNIGAFNVGNAGGAWLGGVALSHGVPLDALPWVAAVVTLAALAVTALAARLDTRVSSGAATAAQ

SEQ ID NO: 1025 - DNA, 1212 bp, Burkholderia pseudomallei K96243
  CDS (1)..(1212): transl_table=11
atgagcgattgcacgacgcggcccgccggcttcgcgcggccgtcgcgcgaagccgcgcgcctgccgctcgcgggattgctcgcgctcgcgacggccggcttcatcacgatcgtgaccgaggcgctgcccgccgggctgctgccgctgatggggcgcgacctgcgcgtgtccgatgcgctcgtcggccagctcgtcacagtctatgcggcgggctcgatcgtcgcggcgattccgctcgtcgcggcgacgcgcggcatgcgcaggcggccgctgctgctcgccgcgctcgcgggcttcgtcgtcgcgaacacggcgacggccgcgtcgccgtactacgcgcccgtgctcgtcgcgcgctgcgtcgcgggcgtctcggcggggctcctgtgggcgctgctcgcgggctacgcgagccggatggtcgacgcgcggcagcgcggccgcgcgatcgcgatcgcgatgctcggcgcgccggtggcgatgtcggtcggcattccgctcggcacggcgctcggcgccgcgctcggctggcgcgcgacgttcgccggcgtgacggcgctcacgctcgcgctgatcgcgtgggtgcgcgcgagcctgcccgatgcgccggggcggccctcgggcgagcggctgccggtcgcccgcgtgctgcggatgccgggcgtgctgcccgtgctggcggtgatgttcgcgtacgtgctcgcgcacaacatcctctacacgtacatcgcgccgtttctcgcgagcgccgggatgggcgcgcgcatcgacgcgacgctattcgcgttcggcgcggcgtcgttcgcgggcatcggtctcacgggcgtgtggatcggcaacgggctgcggcggctcgcgctcgcgagcatcgcgcttttcgcgctcgcgtccgtgctgctcggcgtggcgagcggctcgcccgcggtcgtctatgcgagcgtcgccgtgtgggggctcacgttcggcggcgcggcgacggtcttccagaccgcgtcggcgaacgcggcgggcgaggcggcggacgtcgcgcaatcgatgatcgtcacggtgtggaatctcgcgatcgcggccggcggcgtcgcgggcggcgtgctgctcgagcggttcggcgcgggcgcgatgccgtgggcgctcgtcgcgctgctcgtgcccgcgtggttcggcgcgtggcgcgcgcggcgccacggcttcccggcggcccgcgcgccgtga

SEQ ID NO: 1026 - protein, 403 aa, Burkholderia pseudomallei K96243
MSDCTTRPAGFARPSREAARLPLAGLLALATAGFITIVTEALPAGLLPLMGRDLRVSDALVGQLVTVYAAGSIVAAIPLVAATRGMRRRPLLLAALAGFVVANTATAASPYYAPVLVARCVAGVSAGLLWALLAGYASRMVDARQRGRAIAIAMLGAPVAMSVGIPLGTALGAALGWRATFAGVTALTLALIAWVRASLPDAPGRPSGERLPVARVLRMPGVLPVLAVMFAYVLAHNILYTYIAPFLASAGMGARIDATLFAFGAASFAGIGLTGVWIGNGLRRLALASIALFALASVLLGVASGSPAVVYASVAVWGLTFGGAATVFQTASANAAGEAADVAQSMIVTVWNLAIAAGGVAGGVLLERFGAGAMPWALVALLVPAWFGAWRARRHGFPAARAP

SEQ ID NO: 1027 - DNA, 1170 bp, Burkholderia pseudomallei K96243
  CDS (1)..(1170): transl_table=11
atgccactgcctctgtttgcccttgccgttgccgcgtttggcatcggtaccaccgagttcgtcatcatggggctcctgccgaatgtcgcgcgcgatctgggcgtgtcgattccggcggcgggcatgctcgtgtccggctatgcgctcggcgtgacgatcggcgcgccgatcctcgccgtcgtcaccgcgaaaatgccgcgcaaggcggcgctgctcgcgctgatcggcgtgttcatcgtcggtaatctgttttgcgcgatcgcgcccggctacgcgacgctgatggtcgcgcgcgtcgtcaccgcgttctgccacggcgcgttcttcggcatcggctcggtggtcgcgagcaacctcgtcgcgccgaacaagcgcgcgcaggcgatcgcgctgatgttcaccggcctcacgctcgcgaacgtgctcggcgtgccgctcggcaccgcgctcggccaggcgttcggctggcgcgcgacgttctgggccgtcaccggcatcggcgcgctcgccgcggcggcgctcgccttctgcgtgccgaagcgcctcgagatgcccgcggccggcatcgcgcgcgagttcggcgtgctgcgcaacccgcaggtgctgatggtgctcggcatcagcgtgctcgcgtcggcgagcctcttcaccgtgttcacgtacatcgcgccgatcctcgaggacgtgacgggcttcacgccgcacgacgtcacgctcgtgctgctgctgttcggcctcgggctgacggtcggcggcaccgtcggcggcaagctcgccgactggcggcggataccgtcgctcgtcgcgacgctcgcgtcgatcggcgtcgtgctcgccgcgttcgcgggcacgatgcgcacaccgctgcccgcgctcgtgacgattttcgtgtggggcgtgctcgcgttcgcgatcgtgccgccgctgcagatcctgatcgtcgatcgcgcgagccacgcgccgaatctcgcgtcgacgctcaaccagggcgcgttcaatctcggcaacgcgctcggcgcgtggctcggcggcaccgcgatccacgcgggcgtgccgctcgcgaaactgccgtgggcgggcgccgcgctcgcgatggccgcgctcgcgctcacgctgtggtccgcatcgctcgagcggcgtgcggttccggggccggccggatgcgcgtga

SEQ ID NO: 1028 - protein, 389 aa, Burkholderia pseudomallei K96243
MPLPLFALAVAAFGIGTTEFVIMGLLPNVARDLGVSIPAAGMLVSGYALGVTIGAPILAVVTAKMPRKAALLALIGVFIVGNLFCAIAPGYATLMVARVVTAFCHGAFFGIGSVVASNLVAPNKRAQAIALMFTGLTLANVLGVPLGTALGQAFGWRATFWAVTGIGALAAAALAFCVPKRLEMPAAGIAREFGVLRNPQVLMVLGISVLASASLFTVFTYIAPILEDVTGFTPHDVTLVLLLFGLGLTVGGTVGGKLADWRRIPSLVATLASIGVVLAAFAGTMRTPLPALVTIFVWGVLAFAIVPPLQILIVDRASHAPNLASTLNQGAFNLGNALGAWLGGTAIHAGVPLAKLPWAGAALAMAALALTLWSASLERRAVPGPAGCA

SEQ ID NO: 1029 - DNA, 1332 bp, Nocardia farcinica IFM 10152
  CDS (1)..(1332): transl_table=11
atgccggttgccggtcggttacatggacacgtgacgagtcccgcgaccatcgcccccgtccgttccgactccccgcgcaccgagtggcacgtgcccgccatgctggcactggcgctcggtggtttcggcatcggcaccaccgaattcgtcaccatgggcctgttgcccgacatcgccgtggccatgcacgtctccgagccgaccgccgggcacgcggtgtcggcctacgcgctcggcgtcgtggtcggtgcgccgctgctggccgcgctgtgcgcgcgggtaccgcgcaaacgtctgctggtggccctgatggtggccttcaccctcggcaatctcgccaccgtgctcgcgccgaccttccacaccctggtcgtggcgcgcttcgtcgccggcctgccgcacggcgcgtacttcggcgtcgcctcgctggccgcggcctcgctcgcgccggtcggccggcgggcgaaggcggtcgccgcggtgatgctcggcctcagtgccgcgaacgtcgtcggcgtgcccgcggccacctggctcggccagcacttcggttggcgcgacgccttcgtggtggtggcgctgatcggcgcggcgacggtggcggcgctgctgcgcttcgtgcccgaactcaccgggttggtgatcaccaacccgctcaccgaactcggcgcgctgcgcaggacgcaggtgctggccactctcgccgtcggcgcgatcggcttcggcggcatgttcgccgtctacacctacatcgcgaccaccttgaccgacgtggcgggcatggccgcgggcgcggtgccgttggtgctggcgctgttcggcctcggcatggtggcgggcaacgtcgccggcggcgtgctggccgatcgcggcgtggaccgttcgatcttcgtcgcgatggtgacgatggcggtcgtgctcgcggccttcgccgccgccgcgcaccacccggtgaccgccgcgatcggcgcgttcctcgtcggtgcctcgggcgccgcgctggcgccgggcctgcagacccgcctgatggacgtggccgccgacgcgcagaccctcgccgccgccctcaaccacgccgcgctcaacatcgccaacgcggcgggtgcctggctgggcggtctggtgatcgccgcgggcttcggctacaccgcgcccgcgttggtcggcgcgggcctggcggtgacgggcgtgctgctgttcaccgtgacggtgtgggcccgcccgccgcggcgcgccggcggcgcagtgaccgacaggcgcatcgacacagacacatcgacatcggacgcactgacatacagctctgtatgtaaccgtagaatcgccggatga

SEQ ID NO: 1030 - protein, 443 aa, Nocardia farcinica IFM 10152
MPVAGRLHGHVTSPATIAPVRSDSPRTEWHVPAMLALALGGFGIGTTEFVTMGLLPDIAVAMHVSEPTAGHAVSAYALGVVVGAPLLAALCARVPRKRLLVALMVAFTLGNLATVLAPTFHTLVVARFVAGLPHGAYFGVASLAAASLAPVGRRAKAVAAVMLGLSAANVVGVPAATWLGQHFGWRDAFVVVALIGAATVAALLRFVPELTGLVITNPLTELGALRRTQVLATLAVGAIGFGGMFAVYTYIATTLTDVAGMAAGAVPLVLALFGLGMVAGNVAGGVLADRGVDRSIFVAMVTMAVVLAAFAAAAHHPVTAAIGAFLVGASGAALAPGLQTRLMDVAADAQTLAAALNHAALNIANAAGAWLGGLVIAAGFGYTAPALVGAGLAVTGVLLFTVTVWARPPRRAGGAVTDRRIDTDTSTSDALTYSSVCNRRIAG

SEQ ID NO: 1031 - DNA, 1194 bp, Nocardia farcinica IFM 10152
  CDS (1)..(1194): transl_table=11
atgccacccgccgtctacgtcctcggcctggccatcttcgcccagggcacctccgaactcctgctcgccgggctgctcaccgaggtgtccgccgatctcgccatcggcattccgcgggcgggcctgctcatctcggcgttcgcgctcggcatgctcgtcggcgcaccggtgcttgcagtcgccacactgcggctgccgcgccgcgacaccctgctcgccttcctcgcgatcttcgtggccgcccacgtcgtcggcgcgctcaccgccgactacgcggtgctgttcggcacccgcgtggtggccgcgttcgtctacgcgggcttctgggcgctctcggccgccaccgtcgtggacctggtgcccgccgccgcgcgcgggcgggccatgagcatcgtggcgggcgggctcaccgtcgccaccatcgtcgggctgcccgccggcaccgtgatcggccagcagctcggctggcgggcggcgttctgggcggtggccgccctctcggccgcggccgcgatcggcgtcctcgcggtggtgccgtcggcgcggcccgccgccgaaccgcggctgcgccgggagctgcgggcgatggcgcagccgcggctgtggctggcctacggctcgaccgcgctgtccaccggatcggtgttcgccgtgttcggctacctcggcgcggcgctgaccgatcacaccggcctgccggcgaactgggtgcccgcggtgctcgcgctctacggcgtgggcgggctgctcgggatcaccctgggcggccgcaccgccgatgcccaccccttcgccaccctgtacgtgggcggtgcgggcatgaccgccaccgcggcggcgctggcgctcgcgctcgaccacgccgcggtcgtcgtcgcgctggcgttcctgctcggcgcgttcggcttcgccaccaacccggcactgaacacccgggtgttcggcgtggccgcgtcggcgccgaccctggccgcggccaccaacttctcggccttcaacgtcggcatcaccgtcggaccgtggatcggcgggctcgccctcggggcgggactggggtacccggcggtggcgtggctcggcgccgcgctgggggtggccatgatcgcgaccgtcgggtgggcggatgtgctggagcgcaaagccgttcacccggccgcgccgaccgccgacccgctgccggaaccggtcggatga

SEQ ID NO: 1032 - protein, 397 aa, Nocardia farcinica IFM 10152
MPPAVYVLGLAIFAQGTSELLLAGLLTEVSADLAIGIPRAGLLISAFALGMLVGAPVLAVATLRLPRRDTLLAFLAIFVAAHVVGALTADYAVLFGTRVVAAFVYAGFWALSAATVVDLVPAAARGRAMSIVAGGLTVATIVGLPAGTVIGQQLGWRAAFWAVAALSAAAAIGVLAVVPSARPAAEPRLRRELRAMAQPRLWLAYGSTALSTGSVFAVFGYLGAALTDHTGLPANWVPAVLALYGVGGLLGITLGGRTADAHPFATLYVGGAGMTATAAALALALDHAAVVVALAFLLGAFGFATNPALNTRVFGVAASAPTLAAATNFSAFNVGITVGPWIGGLALGAGLGYPAVAWLGAALGVAMIATVGWADVLERKAVHPAAPTADPLPEPVG

SEQ ID NO: 1033 - DNA, 1176 bp, Nocardia farcinica IFM 10152
  CDS (1)..(1176): transl_table=11
atgccccccaccctgtacctgctcgccctggccgtcttcgccatgggcacgtcggaattcatgctcgccgggctgctgccggccatcgccgccgacctgggcgtcccgctcggcgcggccgggatggcgacctcggcgttcgccgtcgggatggtcgtcggcgcgcccctgacggccgccttcgcgcgccggtggcccccacgccgcggcttgccggcgttcgtgctggtcttcgcggtggtccacgtggcaggcgcgctcgccgaccacctgtgggtcctggtggtgacccgggtcgccgccgccttcgcgtacgcggggttcctggccgtggcgctggccaccgcggtcacgctcgtgcctgccgaacggaccgggcgcgccctggcggtgctgctgtcggggacgacactggcgaccgtcgccggggtgcccggtggcgcggtgctcggtggactgctgggctggcgtgtcacgttctgggcggtcgcggtgctgtgcctgcccgcggccgtcggcatcgccacggcgaagacgctgcggcgacccgacgccggttcgcgagccgagcgccccgccgcgctcgcactgcgcgccgagatcgcccagctcgcccgaccgcggctgctgtcggcgatgacgacggccgcactggtgaacgcgggcaccttcggcgcgttcaccttcctcgcaccgctgatcaccggtccggttggcctgtcgcaacggtggattccggtggcgctcatgctgttcggcctcggttcctggctcggcgtcaccgcggccggacgcctcgccgaccggtggccggggcaggtcgtggcggtcggcggcccgctggcactcctcggctggctcgcgaccgcggcgaccacccacccggccaccctgctggtcctcgtcgccgtgcagggcgcactgtccttcgccgtcggcagcaccctcgtcgcccgcgtgctgggtgaggcgacgggggcgccgacgatgggtggcgcctacgccaccgcggcgctcaacctcggcgcggcgctcggcccgatcgccgcggcggccacgctgggtaccgggccggccgaacgcgctccgttcgtggcggccgcggtcgcggtcgccctggcgctggcgaccgcgtcggcgaccagggtgcgcgccgcggtcccggtgaaccgctga

SEQ ID NO: 1034 - protein, 391 aa, Nocardia farcinica IFM 10152
MPPTLYLLALAVFAMGTSEFMLAGLLPAIAADLGVPLGAAGMATSAFAVGMVVGAPLTAAFARRWPPRRGLPAFVLVFAVVHVAGALADHLWVLVVTRVAAAFAYAGFLAVALATAVTLVPAERTGRALAVLLSGTTLATVAGVPGGAVLGGLLGWRVTFWAVAVLCLPAAVGIATAKTLRRPDAGSRAERPAALALRAEIAQLARPRLLSAMTTAALVNAGTFGAFTFLAPLITGPVGLSQRWIPVALMLFGLGSWLGVTAAGRLADRWPGQVVAVGGPLALLGWLATAATTHPATLLVLVAVQGALSFAVGSTLVARVLGEATGAPTMGGAYATAALNLGAALGPIAAAATLGTGPAERAPFVAAAVAVALALATASATRVRAAVPVNR

SEQ ID NO: 1035 - DNA, 1209 bp, Nocardia farcinica IFM 10152
  CDS (1)..(1209): transl_table=11
atgcccatcgggcttgtcgctctcgcgatcgggagcttcggaatcgggctcaccgagttcgtgatcatgggattgttgcccgaggtcgccgccgacttcggggtcaccgaggccgcggccggatggctgatctccggctacgcgctgagcgtggtggtcggtgcgctcgggctcacggccgccaccacccggctgccgcgcaaagcggtactgctcgggctgctcgggctgttcatcctcggcaacgcgctctcggcgctcgcgccgacctacgagacgatgatggccggacgcgtggtggccgcactgtgccacggcgcgttcttcggcatcggtgcggtggtcgccgcgagcctggtcgcccccgcgaagaaggccggtgcggtggccgtcatgttcaccggcctcaccgtcgccaacgtgctcggcgtcccgttcggcaccttcctcggccaggaacacggctggcgggcgacgttctgggccatcaccgccatcggggtgctcgcgctgatcggcatcgcggtgctggtgcccgccacggcgggagcgcgggcggcgggcgcggcgccggggttgcgcgccgaactgcgcgccttcacctccgggcaggtgtggttgtcgctgatcgtcacggtgctcggctacggcggcatgttcggcgcgttcacctatatcgcctacacgctcaccgaggtcagcgggttcgccgcgagcaccgtgccgtggctgctggtgctgttcgggctcgggctgttcgtgggcaactgggcgggtgggcggctggccgaccggtccctggacggcaccctgctcggcttcgtcgccgccctgaccgtcgtgctggtggtgttcgcgtcggtcgccgcccatccggtgccgaccgtcgcggcgctgatcctgatgggcggcttcagtttcgggaccgtacccggcttgcagacgcgcatcatgcactacgccgccggcgcgccgacgctggcctccggggcgaacatcggcgccttcaatctcggtaacgcgctgggcgcctgggccggcggtctggcgatcagcgcgggcttcggctacacctcgccgatctgggtcggcgccgggatcaccctggcggcgctggcggtgatggggttcgccgcctcgaccgcgcggcgagccagggccgacgcggtcaccgcgccgcgggcggtcgaggtgcccgtcgcggggtga

SEQ ID NO: 1036 - protein, 402 aa, Nocardia farcinica IFM 10152
MPIGLVALAIGSFGIGLTEFVIMGLLPEVAADFGVTEAAAGWLISGYALSVVVGALGLTAATTRLPRKAVLLGLLGLFILGNALSALAPTYETMMAGRVVAALCHGAFFGIGAVVAASLVAPAKKAGAVAVMFTGLTVANVLGVPFGTFLGQEHGWRATFWAITAIGVLALIGIAVLVPATAGARAAGAAPGLRAELRAFTSGQVWLSLIVTVLGYGGMFGAFTYIAYTLTEVSGFAASTVPWLLVLFGLGLFVGNWAGGRLADRSLDGTLLGFVAALTVVLVVFASVAAHPVPTVAALILMGGFSFGTVPGLQTRIMHYAAGAPTLASGANIGAFNLGNALGAWAGGLAISAGFGYTSPIWVGAGITLAALAVMGFAASTARRARADAVTAPRAVEVPVAG

SEQ ID NO: 1037 - DNA, 1191 bp, Nocardia farcinica IFM 10152
  CDS (1)..(1191): transl_table=11
atgacagaccttcgacagacaccccaggacaccggccgtccggtccgcggctggctcggcgtcgccgccgtcaccggcgccaccttcaccgtcgtgacctccgagatgctgccggtcggcctgctcaccccgatgagtgccgacctgcgggtcagcgagggcgtcggcgggctcaccctcaccatcaccgggctggtggccgcggtcgcggcgccgctgctgaccccggccctggggcgcgtcgaccggaagaccgtgtgggcggtgctgttgacggtgctgaccgtcggcaatctcgccgcggcgctggcgcccggcttcgcggtcatggtggccgcgcgggtgctggtcggcatcgggatgggcggggtgtggtcgatcgcggcgggcacggccgtgcggctggtgcccgagtcccaggccgcgcgcgcgacgacgctggtgttcagcggtgtcgcggtcgcctcggtgctcggcatccccgcgggcacctacgcgggcgcgctgatggggtggcgggcggcgttcctggcggccgtggcggtgggcgtgctgctcctggtcgaggccgcgatcctgctgccaccgctgccgccggtccgcgtcaccggattcgtcgagtcgctggggctgctgcgccttccggcactgcgcaccggactgatcgcggtggcgctgctggtgaccggtcatttcgccgcctacacctacatccgccccgcgctcgagcagctcaccggcgccggctccgccaccgtcggtaccgtgctgctgctgttcggcatcgcgggcgtggcgggcaatttcaccgccggcgccagggcggcgcgggccccgcgcacgaccctgcgggtcctggccgccatcctggccgccgccgcgacactgaccccgctgctcggcacggccgtgccgacggccgccgccctgatcgcggtgtggggtctggcctacggcggtgtgtcggtgaccgcccagaactgggtcttcgccgccgctcccgaccaccgggaggcgtcctcggccctgttcgtcggggtgttcaacggtgccatcgccgcgggcgccttcctcggcggtgtcctcgccgaccggctcggggtcaccgcatcgctgctgatcggtggcgcggcggcggccgcggcggcactggtgagcgccaccggccgcgcgcgcaccgcgcaaatctga

SEQ ID NO: 1038 - protein, 396 aa, Nocardia farcinica IFM 10152
MTDLRQTPQDTGRPVRGWLGVAAVTGATFTVVTSEMLPVGLLTPMSADLRVSEGVGGLTLTITGLVAAVAAPLLTPALGRVDRKTVWAVLLTVLTVGNLAAALAPGFAVMVAARVLVGIGMGGVWSIAAGTAVRLVPESQAARATTLVFSGVAVASVLGIPAGTYAGALMGWRAAFLAAVAVGVLLLVEAAILLPPLPPVRVTGFVESLGLLRLPALRTGLIAVALLVTGHFAAYTYIRPALEQLTGAGSATVGTVLLLFGIAGVAGNFTAGARAARAPRTTLRVLAAILAAAATLTPLLGTAVPTAAALIAVWGLAYGGVSVTAQNWVFAAAPDHREASSALFVGVFNGAIAAGAFLGGVLADRLGVTASLLIGGAAAAAAALVSATGRARTAQI

SEQ ID NO: 1039 - DNA, 1179 bp, Nocardia farcinica IFM 10152
  CDS (1)..(1179): transl_table=11
atgccggtgtggctcgccgtgctggccgtggccgcgctcgtcttctacaccgacgactacgtcatcgccggggtgctgccggagatcgccgccgacctggatgtcaccgtcggtaccgcgggccggttggtcaccgtcttctccctcaccctggccgtggcggcgccgctggcggcgctggtgacggcgcgctgcgcgccacgcgcgctgttggcgggtgcggcggtcgtgttcgtcgcggccaacgcgctggccgcggtgacgcccgcgttcgaggccctgctcgccgcccgggtgctcgccgccctggccgccgcggccgcgacgccgacgctgttcggactcaccgcccgcctggcgccgccacaacggctcggccgataccttgcggtggtggggctgggcgtcaccggcgcgatcgccgtcggcgttcccctgggcacctggatcggggcggcgttgggctggcgggccaccttcggtgccatggccctggccggcttctgcgtggcggtcggggtggcggccgcggtcccaccggtggacgcgacgaccgcgcggccgcgcgagcagctgcgcgcgctggccgccgcgccggtgtggcttggcctggcgggcaatgtcgtgctgatgtccgggtcgatgatgctgctgacctacctggcgccgttcgtcgccggactcgccaccgccgacaccgccgcccgcgccgccctgttcgccgtctcgggattcgcgggcatggcgggcctgtggctgggcgggcacggcaccgaccgctggggcgcggaccgtgcgctgctgatcggggtgggggtgttcgtcgcggcgatgctcgccttcaccggtctctggccgctgcgccccgtaccggtggcgctgctgtatccgctggcgctgctgtgggccggggcggcgttctggaattcccccgccgtccaggcccggctacaccggctggccggaccggccgccaccccggcgctggcggccaacacctccgggacctacctgggtgtggcggtcggcgcgactctcggcggcgcggtcgtcgacgcggccgggccgggagcgctgccgccgatcgcggccgccgccggactcgtcgcgctcacggtgttcggtctggccgcccgcgcggcacgggaaccactgcgtgccagcgctgtccgggactga

SEQ ID NO: 1040 - protein, 392 aa, Nocardia farcinica IFM 10152
MPVWLAVLAVAALVFYTDDYVIAGVLPEIAADLDVTVGTAGRLVTVFSLTLAVAAPLAALVTARCAPRALLAGAAVVFVAANALAAVTPAFEALLAARVLAALAAAAATPTLFGLTARLAPPQRLGRYLAVVGLGVTGAIAVGVPLGTWIGAALGWRATFGAMALAGFCVAVGVAAAVPPVDATTARPREQLRALAAAPVWLGLAGNVVLMSGSMMLLTYLAPFVAGLATADTAARAALFAVSGFAGMAGLWLGGHGTDRWGADRALLIGVGVFVAAMLAFTGLWPLRPVPVALLYPLALLWAGAAFWNSPAVQARLHRLAGPAATPALAANTSGTYLGVAVGATLGGAVVDAAGPGALPPIAAAAGLVALTVFGLAARAAREPLRASAVRD

SEQ ID NO: 1041 - DNA, 1149 bp, Legionella pneumophila str. Paris
  CDS (1)..(1149): transl_table=11
atgaagaaaagcctgatttttttagcaataggtatgtttacagtaggttgcaatacctttctgattgctggtttgcttcctcaaataggcgaaacgctcgggcagccggttgcagtaactgggcaaggagtgagtctattcagtttgacttatcttctctcagcgccacttttttctctgatttttgttaatcagccggtaaagcgtatggttcagcttgcgcttactgtcttcatgtttggcaatttaataacgctactttctgaaaatatcgtgctgtttttaattggaagatctctggcgggagcaggaaccgggatttttacgccgttatgtatcagcattgccgttcattttgccagcccatctgccaaaggacgaattttaagttttatctggagtgctaacagtgcgggtgtagtgtttggcgttcctgccggactttacttatcctccttgtttcattggcagttatcgattgccagtcttattattttaagtttgcttgcattgattggtttttcaatgcaaaacattgatataaaactacccaaaccttcgccatttggaggcaggcttcgtcttctggtcgagccaaaaacgctatcggtaattggaattacttgctttaccgccttggcaagtttgggactatactcgtatgtcaccctgattcaatcaggatcccctaattcgctcagtatgacgctattgagttggggactgggaggatttataggaagctcactgattggggtgtttatcgatcgaacgggtaaaccacgggttattatggccttaattttggttggcctcatgtttgctctgattgccataccattcaccaggaatctgccttacctgggattaatccctttttttatgtggggtgcttgcggatgggctatagtgactccccagcaacacattttatatgaattacatgaaaatcagggaattatccttgccgccatcaattcatcggccttgggcttggggtcagctttgggaacgttgcttggcggcttattgatttcctctggattcaggggaatctatcttcctttttctgctgccactttattgtttttcgtattgataattcagctgatagtaattaacacttcacataaggtaaataacatatga

SEQ ID NO: 1042 - protein, 382 aa, Legionella pneumophila str. Paris
MKKSLIFLAIGMFTVGCNTFLIAGLLPQIGETLGQPVAVTGQGVSLFSLTYLLSAPLFSLIFVNQPVKRMVQLALTVFMFGNLITLLSENIVLFLIGRSLAGAGTGIFTPLCISIAVHFASPSAKGRILSFIWSANSAGVVFGVPAGLYLSSLFHWQLSIASLIILSLLALIGFSMQNIDIKLPKPSPFGGRLRLLVEPKTLSVIGITCFTALASLGLYSYVTLIQSGSPNSLSMTLLSWGLGGFIGSSLIGVFIDRTGKPRVIMALILVGLMFALIAIPFTRNLPYLGLIPFFMWGACGWAIVTPQQHILYELHENQGIILAAINSSALGLGSALGTLLGGLLISSGFRGIYLPFSAATLLFFVLIIQLIVINTSHKVNNI

SEQ ID NO: 1043 - DNA, 1149 bp, Legionella pneumophila str. Lens
  CDS (1)..(1149): transl_table=11
atgaagaaaagcctgatttttttagcaataggcatgtttacagtaggttgcaatacatttctgattgctggtctgcttcctcaaataggcgaaacgcttgggcagccggttgcggtaactgggcaaggagtgagtctattcagtttgacttatcttttttcagcgccacttttttctctgatttttgttaatcagccggtaaagcgtatggttcagcttgcgcttactgtcttcatgcttggcaatttaataactctactttctgaaaatatcgtgctgtttttaattggaagatctctggcgggagcaggaaccgggatttttacgccgttatgtatcagcattgccattcattttgccagcccatctgccaaaggacgaattttaagttttatctggagtgctaacagtgcgggtgtagtatttggcgttcctgccggactttacttatcctccttgtttaattggcagttatcgattgtcagtcttattattttaagtttgcttgcattgattggtttttcaatgcaaaacattgatataaaactacccaaaccttcgccatttggaggcaggcttcgtcttctggtcgagccaaaaacgctatcggtaattggaattacttgctttactgccttggcaagtttgggactatactcgtatgtcaccctgattcaatcaggatcccctaattcgctcagtatgacgctattgagttggggactgggaggatttataggaagctcactgattggggtgtttatcgatcgaacgggtaaaccacgggttattatggccttaattttggttggcctcatgtttgctctgattgccataccattcaccaggaatctgccttacctgggattaatccctttttttatgtggggtgcctgcggatgggctatagtgactccccagcaacacattttatatgaattacatgaaaatcagggaactatccttgccgcgatcaattcatcagccttgggcttggggtcagctttgggaacgttgtttggcggcttattgatttcctctggattcaggggaatctatcttcctttttctgctgccactttattgtttttcgtattgataattcagctgatagtaattaacacttcacataaggtaaataacatatga

SEQ ID NO: 1044 - protein, 382 aa, Legionella pneumophila str. Lens
MKKSLIFLAIGMFTVGCNTFLIAGLLPQIGETLGQPVAVTGQGVSLFSLTYLFSAPLFSLIFVNQPVKRMVQLALTVFMLGNLITLLSENIVLFLIGRSLAGAGTGIFTPLCISIAIHFASPSAKGRILSFIWSANSAGVVFGVPAGLYLSSLFNWQLSIVSLIILSLLALIGFSMQNIDIKLPKPSPFGGRLRLLVEPKTLSVIGITCFTALASLGLYSYVTLIQSGSPNSLSMTLLSWGLGGFIGSSLIGVFIDRTGKPRVIMALILVGLMFALIAIPFTRNLPYLGLIPFFMWGACGWAIVTPQQHILYELHENQGTILAAINSSALGLGSALGTLFGGLLISSGFRGIYLPFSAATLLFFVLIIQLIVINTSHKVNNI

SEQ ID NO: 1045 - DNA, 1185 bp, Photobacterium profundum SS9
  CDS (1)..(1185): transl_table=11
atgaataaagaaaaaatgccgtttcaggtctggattttaacactcgcagcattcgccatcggcaccgctgagtttgttattgcgggtattcttcctcagatagcaacgtcactctctattactgaaggtcaggctggttacttaatcagtgcttacgcattagccattgttatcggcggtccaatcttaaccatttatttagcccgttttaataagaaagttgtactaacaggattaatggcactgtttattatcggtaatatactgtcagcgttggcacccacctataacttactattggttagccgcgttattgcaggtcttgtgcaaggtccattttatggcattggcgctgttgtcgcgaccaatttggtatcagagaaaatggcaggtcgtgctgttgggcagatgttcgcaggtctgactcttgctaatgtactgggtgttcctgctggcacgtggatcagcttgcagttcggatggcacaacacattctttactgtagccgcattcggtgctgtcgcaatggtttcaattctaacgtctatcaaatcaacgggtcatggtgaagcaaagaacattaaaacccagcttatggccttcaaaaatccaatgctattaattagcttagcgattaccgctttatcatggtctggcttcatgacgctatatggctaccttgctcctatcgctatgcacacgacgggttacggtgaagaagccgttacttggatcctcgttattgttggagctggtttaatcattggtaatatactgggtggtcgttcttccgacaaaaatcttggcaaagcctccatgttctgggctgttgcaatgattatctcactggttgccgtcggtctggtcgttgataacaagattttgtttgtagtcgccgcttttatattcggtattgcatcgtttgcaaacgtacccgcaatgcaacttcgagtgatgaatcatggtggtgaaggtcaggagcttgccgcaaccgcgaacatttcagcctttaacttagcaaatgcgtttggtggattcctcggcggcatggtgcttgatagccaactcggcgctggcatgatccctttcgcggcagtcattgttccaataattggcttactgtttatcgctaaagtaaacaaacgtgaaaaaacacaaggtaaattagcaaccgactttaactaa

SEQ ID NO: 1046 - protein, 394 aa, Photobacterium profundum SS9
MNKEKMPFQVWILTLAAFAIGTAEFVIAGILPQIATSLSITEGQAGYLISAYALAIVIGGPILTIYLARFNKKVVLTGLMALFIIGNILSALAPTYNLLLVSRVIAGLVQGPFYGIGAVVATNLVSEKMAGRAVGQMFAGLTLANVLGVPAGTWISLQFGWHNTFFTVAAFGAVAMVSILTSIKSTGHGEAKNIKTQLMAFKNPMLLISLAITALSWSGFMTLYGYLAPIAMHTTGYGEEAVTWILVIVGAGLIIGNILGGRSSDKNLGKASMFWAVAMIISLVAVGLVVDNKILFVVAAFIFGIASFANVPAMQLRVMNHGGEGQELAATANISAFNLANAFGGFLGGMVLDSQLGAGMIPFAAVIVPIIGLLFIAKVNKREKTQGKLATDFN

SEQ ID NO: 1047 - DNA, 1173 bp, Salmonella enterica subsp. enterica serovar Paratyphi A str. ATCC
  CDS (1)..(1173): transl_table=11
atgaaaaaagttattttttctttggcgctgggtacgttcggactggggatggccgagtttggcattatgggcgtgctgacggagctggcacgcgatgtcgggataacgattcccgccgccgggcatatgatctcgttttacgccttcggcgtcgtgctgggcgcgcctgtaatggcgctcttttccagccgcttttcgcttaaacatatactgctgtttctggtcatgctgtgcgtgatgggcaatgccatatttaccttttcctcgtcatatctgatgctcgccgtcggcagactggtttccggctttccgcacggcgccttttttggcgtcggcgccattgtcctgtcaaagattatccgccccgggaaggtcaccgccgccgtcgcgggtatggtttcagggatgacggtggcgaatctggtgggcattccgttcggcacttacctgagccaggaatttagctggcgctacacctttttattgatcgcggttttcaacatcgccgtgctcaccgcgattttcttctgggtgccggatattcgcgacaaagcccaaggcagcctgcacgagcagttccacttcttgcgtagccccgcgccgtggctcattttcgccgccacgatgttcggcaatgcgggcgtttttgcctggttcagctatatcaagccatttatgatgtacatctccggtttttcggagacgagcatgacgtttattatgatgctggtcgggctggggatggtgttaggcaatctgttaagcggcaaactctccggtagatatacgccgctgcgcatcgcggtagtgactgacctcgttatcgtgctctctctcatggcgctctttttcttcagcggatacaaaacggcatcgctgactttcgcgtttatctgctgcgctggtctgtttgcgctctctgcgccgctgcaaatcctgctgctgcaaaacgccaaaggcggcgaactgctgggcgcggcgggaggacaaatcgcgtttaatctcggtagcgcgattggcgcctggtgcggcgggctgatgctgacgctaggttttgcgtaccactacgtggcgcttcccgccgccctgctctcgttttccgccatgtcgtcgttgctggtatacggacgtctaaaacacaagcagccatcggtcacgccggttgccggatga

SEQ ID NO: 1048 - protein, 390 aa, Salmonella enterica subsp. enterica serovar Paratyphi A str. ATCC
MKKVIFSLALGTFGLGMAEFGIMGVLTELARDVGITIPAAGHMISFYAFGVVLGAPVMALFSSRFSLKHILLFLVMLCVMGNAIFTFSSSYLMLAVGRLVSGFPHGAFFGVGAIVLSKIIRPGKVTAAVAGMVSGMTVANLVGIPFGTYLSQEFSWRYTFLLIAVFNIAVLTAIFFWVPDIRDKAQGSLHEQFHFLRSPAPWLIFAATMFGNAGVFAWFSYIKPFMMYISGFSETSMTFIMMLVGLGMVLGNLLSGKLSGRYTPLRIAVVTDLVIVLSLMALFFFSGYKTASLTFAFICCAGLFALSAPLQILLLQNAKGGELLGAAGGQIAFNLGSAIGAWCGGLMLTLGFAYHYVALPAALLSFSAMSSLLVYGRLKHKQPSVTPVAG

SEQ ID NO: 1049 - DNA, 1176 bp, Salmonella enterica subsp. enterica serovar Paratyphi A str. ATCC
  CDS (1)..(1176): transl_table=11
atgcctctcgctttatttgcactgacaataagtgctttcgttatcggtacgactgagtttgtgattgtcggcctggtgccgaccattgctcaacaactggctatctcgttaccttccgccggaatgctggtttcaatctatgcgctgggtgtggctattggcgcgccggtgctaaccgcgctgaccggacgcctgccgcgtaaacagttactggtcgcgctgatggtcttgtttacggcggggaatttgctggcatggcaggcaccgggctatatgacattaatcgtcgcccgtctgctgacgggcctggcgcacggcgtgttcttctcgattggatctaccatcgcgacaagtctggtgccaaaagagaaagcggcttctgcgatcgctattatgtttggtggtttaacggtagctctggtcacgggcgtgccgctgggaacatttatcggtcagcattttggctggcgtgagaccttccttgcggtatcactgttaggtgtgattgcgctgatgagcagtcaactgctgatcccggccaacattcccggtcgggcggccgccagcattcgtgaccaggtgaaagtactggctcatcctcgtctgttgctgatttacgccgttacggcgcttggctacggcggggtattcacggcattcaccttcctggcgccgatgatgcaggatctggcgggattctccccggcagcagtaagctggatcctactgggttatggcgtatctgtggctatcggcaatatctggggcggtaaactggcggataagcatggtgccgtgccggcgctgaaattcattttcgccgcgctgtttgttctgcttatggtcttccaggtgacggcctccacgcagtatgccgcgctggctaccatcctagtgatgggggtctttgccttcggtaacgtaccggggttgcaggtctacgtggtacagaaagcggaacaattcacgcctaatgcggtagatgtggcgtcaggtctgaacattgcggcgtttaacattggtattgcgctgggctccgtgattggcgggcaaacggtggagcattacggtttggcgcagacgccgtggattggcgccctcattgttctggtggctttcctgctgatgggtgtcagcggacgtcttgataaacctgtacgcattgctctggagtaa

SEQ ID NO: 1050 - protein, 391 aa, Salmonella enterica subsp. enterica serovar Paratyphi A str. ATCC
MPLALFALTISAFVIGTTEFVIVGLVPTIAQQLAISLPSAGMLVSIYALGVAIGAPVLTALTGRLPRKQLLVALMVLFTAGNLLAWQAPGYMTLIVARLLTGLAHGVFFSIGSTIATSLVPKEKAASAIAIMFGGLTVALVTGVPLGTFIGQHFGWRETFLAVSLLGVIALMSSQLLIPANIPGRAAASIRDQVKVLAHPRLLLIYAVTALGYGGVFTAFTFLAPMMQDLAGFSPAAVSWILLGYGVSVAIGNIWGGKLADKHGAVPALKFIFAALFVLLMVFQVTASTQYAALATILVMGVFAFGNVPGLQVYVVQKAEQFTPNAVDVASGLNIAAFNIGIALGSVIGGQTVEHYGLAQTPWIGALIVLVAFLLMGVSGRLDKPVRIALE

SEQ ID NO: 1051 - DNA, 1194 bp, Salmonella enterica subsp. enterica serovar Paratyphi A str. ATCC
  CDS (1)..(1194): transl_table=11
atgaatgaaaatatcgcagaaaaattccgcgctgatggggttgccaggcctaactggtcagccgtttttgccgtggcgttttgtgtcgcctgcctgattaccgttgagtttttgcccgttagtctgttgacgccgatggcgcaggatctggggatctccgagggcgtcgctggtcagtcggtcaccgttacggcgtttgtcgcgatgttttccagcctgttcattacccagattattcaggcgaccgacaggcgttatatcgttattctgttcgccgttttgctgacggcttcttgtctgatggtctcctttgccaacagctttacgctgctattgctgggccgcgcctgtcttgggttggcgctgggcggattctgggcgatatcggcgtcgctgaccatgcgactggttcccgcgcgtaccgtgccgaaagcgctgtcggtgatttttggcgcggtctccatcgcgttagtgatcgccgcgccgctgggcagctttttgggcggtattattggctggcgtaatgtctttaacgccgctgcggtgatgggcgtactgtgcgtcatctgggtggtgaaatcactgccgtcgctgccgggcgaaccttctcaccagaaacagaatatgtttagcctgttgcaacgccctggcgtgatggccgggatgatcgccatctttatgtcttttgccgggcagttcgctttctttacctatattcgcccggtctatatgaatctggcgggctttgacgttgatggtctgacgctggtgttgctaagttttggtattgccagcttcgttggcacttctttctcctcctacgtactgaaacgttcggtaaaactggcgctggccggtgcgccgctgctactggcgctgagcgcgctgacgctcattgtgtggggaagcgacaaaaccgtggcggcggcaatagcgattatctgggggctggcgtttgcgctggtgccggtgggatggtcaacgtggatcactcgttcccttgccgatcaggcggaaaaagccggttccatccaggtcgcggtgattcaactggcaaatacctgtggcgcggcagtgggcggttatgcgctcgacaatttcgggctgctttcgccgctggcgctttccggcggtctgatgctgttgacggcgttagtcgtggcggcgaaagtccgtattacgccaatgagttga

SEQ ID NO: 1052 - protein, 397 aa, Salmonella enterica subsp. enterica serovar Paratyphi A str. ATCC
MNENIAEKFRADGVARPNWSAVFAVAFCVACLITVEFLPVSLLTPMAQDLGISEGVAGQSVTVTAFVAMFSSLFITQIIQATDRRYIVILFAVLLTASCLMVSFANSFTLLLLGRACLGLALGGFWAISASLTMRLVPARTVPKALSVIFGAVSIALVIAAPLGSFLGGIIGWRNVFNAAAVMGVLCVIWVVKSLPSLPGEPSHQKQNMFSLLQRPGVMAGMIAIFMSFAGQFAFFTYIRPVYMNLAGFDVDGLTLVLLSFGIASFVGTSFSSYVLKRSVKLALAGAPLLLALSALTLIVWGSDKTVAAAIAIIWGLAFALVPVGWSTWITRSLADQAEKAGSIQVAVIQLANTCGAAVGGYALDNFGLLSPLALSGGLMLLTALVVAAKVRITPMS

SEQ ID NO: 1053 - DNA, 1182 bp, Idiomarina loihiensis L2TR
  CDS (1)..(1182): transl_table=11
atgcagttctcaaaaatacaagttctactggccatttttgcaatggcaattggaagctttgccattggtattggtgagtttgtcattatggggctgctgcccgacgtcgctgcagactttaataccgacacccgggaaacaggccacttaatcagtctttatgcgcttggtgtggttatcggagctccgcttattaccattttatttgccaggctgccacgcaaacctatgttacttgcactaatgctggcattttctctgggcaacttcgccagtgcctcagcagacaattacacattacttcaggtgttacgtttcttaactggcctgcctcacggtgcttatttcgggattgcctgtttggttgcggccgatatggttcgtaaaaatcaacgtggtatggcagtaactatggtgatgatgggactcacggtagctatcctggtcggaaaccctttagccacctggttagggcagcttattgactggcgcaccgtatatcataccgtgggagctctaggcttactggcctttgtcatgattttcattgtggtacccaaacacccgaatgaaaagaaaacttctgcccgtggagagatgcaggcattacaaaaccctcaagtctggctgactttagccataggggccattggcttcggcggcatgtttgcggtactgagctacatagctccaacactaataaacgccaccggcttggattctcactggatacctgttgctttatttatctacggactgggatccttggcgggtagtttggtcggcggctgggctgccgacagaaatctgaaattaaccattggcggttctctggtatggtcggcaattgtgctggcaatttttcccttaacactgcagagtctctggacggtgatgcctatggtgttattacttggtagttccgccgcgctggttccggctctgcaggtacgtttaatggacgttgccggagaagcccagactttagcagcatcgttaaaccactccgcttttaatgcggctaacgccttaggtgcctggctgggtggtcttgctattatttctccacttagttggcagggaaccggctgggttgggtgcgcgctgtcgctggccggtctgctactcttttgggttactaaaaagcacagtcgcagaacacccaacatagttagtctttag

SEQ ID NO: 1054 - protein, 393 aa, Idiomarina loihiensis L2TR
MQFSKIQVLLAIFAMAIGSFAIGIGEFVIMGLLPDVAADFNTDTRETGHLISLYALGVVIGAPLITILFARLPRKPMLLALMLAFSLGNFASASADNYTLLQVLRFLTGLPHGAYFGIACLVAADMVRKNQRGMAVTMVMMGLTVAILVGNPLATWLGQLIDWRTVYHTVGALGLLAFVMIFIVVPKHPNEKKTSARGEMQALQNPQVWLTLAIGAIGFGGMFAVLSYIAPTLINATGLDSHWIPVALFIYGLGSLAGSLVGGWAADRNLKLTIGGSLVWSAIVLAIFPLTLQSLWTVMPMVLLLGSSAALVPALQVRLMDVAGEAQTLAASLNHSAFNAANALGAWLGGLAIISPLSWQGTGWVGCALSLAGLLLFWVTKKHSRRTPNIVSL

SEQ ID NO: 1055 - DNA, 1230 bp, Zymomonas mobilis subsp. mobilis ZM4
  CDS (1)..(1230): transl_table=11
gtgtttgaggagctgccaacagaacggcagatcaaatgctgttttatagggagtgacgttgcgttgcctattgcgcttttagccttggccatcggtgcttttggtttggggacgaccgagaccatcgtgatgggcattttgcccgagctttctgataatctgcatgtctctatcgcgaaagcaggcctcctcgtctcgggatatgccattggcgtgacaatcgcatcgcctcttatggccattataaccaatcgctattcgcggcggcaaacgttgcttttgatgatggccatttttgttgtcggtaatatctgtagtgctctggctccgaactataacctgctgatggctagtcggtttttgacatcgctctcgcatgggactttctatggcgccgcttcgattgtcgcttgtcagcttgtccctccccaaaagagagccgaggcgctttctatcgtttatatcgggctgactttagcgatggtgctaggggttccgcttggcacattggtagcgcaatttacgtcttggcgggtttctttctggttgattggtggcgttggtagcttggcatggatcagcatctggtatttaatcccacatgataaccagaccaacacaagcattcgtctttatgaccaattccgctctctaacgcatccgatggtcattctgatgatgctggtgtcgatgtgtacctctgccggtatgttcgggctttttacctatatcacgccttttctagaaatcaggactggactttcggcacatgctaccgattgggttttgttattgattggcgcgggtctttgcttgggtaatcttttgggcggacgcttggctgactggaaaatgctgccttcctgcggtggccttttagcgatgacgattatcatccaactattattgatttcgggaagcctccatgtctggagttgcatattgttgcttttcttctggggtgtttttatctacgccccgatggctccgctacaatcttatgttgtaacatgtgcagaatctgcccccaatattgctgccgctgttaatcaaagctcttttaatctgggcaatgctataggatcttggtcgggtagcttgttggttggaactttaccttcaacctatggaaaattgccgattttagcatccgcttttctggctgctggcgttctcttggtctgtctttccggctatctccagtcacaaaaaatcaaagaaaagctttga

SEQ ID NO: 1056 - protein, 409 aa, Zymomonas mobilis subsp. mobilis ZM4
MFEELPTERQIKCCFIGSDVALPIALLALAIGAFGLGTTETIVMGILPELSDNLHVSIAKAGLLVSGYAIGVTIASPLMAIITNRYSRRQTLLLMMAIFVVGNICSALAPNYNLLMASRFLTSLSHGTFYGAASIVACQLVPPQKRAEALSIVYIGLTLAMVLGVPLGTLVAQFTSWRVSFWLIGGVGSLAWISIWYLIPHDNQTNTSIRLYDQFRSLTHPMVILMMLVSMCTSAGMFGLFTYITPFLEIRTGLSAHATDWVLLLIGAGLCLGNLLGGRLADWKMLPSCGGLLAMTIIIQLLLISGSLHVWSCILLLFFWGVFIYAPMAPLQSYVVTCAESAPNIAAAVNQSSFNLGNAIGSWSGSLLVGTLPSTYGKLPILASAFLAAGVLLVCLSGYLQSQKIKEKL

SEQ ID NO: 1057 - DNA, 1221 bp, Zymomonas mobilis subsp. mobilis ZM4
  CDS (1)..(1221): transl_table=11
atgaataaaacatctccatatatcgaaaatatcctgaataataaaaagggtgtttcatcatggagtgctgttttggctatgtcccttggggcatttgcactggtttcatctgagtttatgcccgttagtcttttgacgccggtcgctaaggcgcttcagatcagtgaaggtcaggcagggcaagctatttctatttcaggtgtttttgctgttctcacaagtcttttgatgccttcttttacgaaaggcttcaaccgtaaaagtcttttactcggcctgactgccatgatgattttctctggtttggtggtctcttttgcgccgaattatcttatttttatggtcgggagagccttgatcggtgttgtcatcggtggcttttggtcgatgtcggtagctattgccatgaggcttgtcgagaaacatcatgtgccgcgtgccttggcgatttttaacggtggcaatgccttagcaaccgttgttgcagcccctgcaggcagttttttaggcggtttgatcggttggagaggagcctttttctgcattatccccatcgccttggctgtctttatctggctaatttttagcctgccctctttgcccgatgaaaataaagccgaacgcggaaccgttctttctattttgaaatatcctgtcgtggcgacaggcatgatggccgtcagcttgttctttatggggcaatttactttattcacctatgtccggccatttcttgaaaccataacgcatacggatatttcgaccctgtcgcttattctgctgatgatgggactggccggttttattggcacgatactgatcggcacctttttaaagcgggggacttatccgatcctgattggcacgcctctctttatgtcggttttggctatcctgcttattctgtttggaaaatcggcctttttcgcagcggctattctgatgctatggggattttttgcgacctccgcccctgttgggtggtggacatggctcgctcaaactttaccccaaaaagcagaagtcggaggcggtctaatggtggcagtcatccaattggctatcacgcttggcgcgacctgtggcggagttattttcgatacaaaaggctatcaagccactttcattaccagtgcttttatcttggtgattgcctctcttttcgcctttttgactgctgggatcagacgaaaagacaaagccgcatcaatgaaaccataa

SEQ ID NO: 1058 - protein, 406 aa, Zymomonas mobilis subsp. mobilis ZM4
MNKTSPYIENILNNKKGVSSWSAVLAMSLGAFALVSSEFMPVSLLTPVAKALQISEGQAGQAISISGVFAVLTSLLMPSFTKGFNRKSLLLGLTAMMIFSGLVVSFAPNYLIFMVGRALIGVVIGGFWSMSVAIAMRLVEKHHVPRALAIFNGGNALATVVAAPAGSFLGGLIGWRGAFFCIIPIALAVFIWLIFSLPSLPDENKAERGTVLSILKYPVVATGMMAVSLFFMGQFTLFTYVRPFLETITHTDISTLSLILLMMGLAGFIGTILIGTFLKRGTYPILIGTPLFMSVLAILLILFGKSAFFAAAILMLWGFFATSAPVGWWTWLAQTLPQKAEVGGGLMVAVIQLAITLGATCGGVIFDTKGYQATFITSAFILVIASLFAFLTAGIRRKDKAASMKP

SEQ ID NO: 1059 - DNA, 1188 bp, Silicibacter pomeroyi DSS-3
  CDS (1)..(1188): transl_table=11
atgtctcaatattctcaacgtgccacctggcgcgcctggctggctattgccgcgctcggcacgggcagcttctcgatcgtgacggcagaactggcgccgatcgggcttttatcccagatcgggggagatctcggcgtctcgaccgccaaggtggggctgatcgtgacgctctatgcctggatcgccgccgcggcggctctggcgtcggccatctggctcggcggtctgccacggcgcccgctgcttgtcgggctgatggcggttctggcggcctcaggatttgccacctcctattctggctccttcgccgggctgatgagcgcacggattatcggtgctgtcgcccacggggctttctgggccatgatcggcacgcttggggcgcagatcgtgcctgcgcgccaggtcggcgtggcgacgtcgatcatcttcggaggcgtctcggttgccagcgtgctgggcgttccgcttgccaacctggtcggcaccagcgaaggctggcgcagctcgttcctgatcatcggctggctttcgctggcagtcgccttggccgtattggtcaccgtacccgcagtgcagggcaccggcaggatcggaacccaggccctgtttcgcattctgtcgaaccgccgcttccaacgcatttttcttgcgacgctctttgccgtcaccgcccacttcatggcatttacctatgtcgaaccgtttctggcgaacgctagtgcgataccggtccgggcgatcgcaccgctcttgttcacctttggggcggcaggcatcgcggccaatatgctgaccgccgccctgatcgacaactggctcaagcgcattgtgacgctgtctttgttgctggccgctgccgctcttggcgttctggcccttttcggacctcagctcgacctctacggtgcggggctggcgctgatcgtctggggtggctcgatctcggccatactggttggtttgcagacctgggttctgaaggaagccggcgcagatgccttgcaggcttcggccatctatgtcgcccttttcaatggcgcgatcgggttgggcgcagcgataggcgccgccttgcttggtgtgacaagcctgccgggcctgttcctgtgctcggcgctccttatcggtattggcatcgtcagcgttatctctttggccgaaccgcaaatgtcgcctgctgaatga

SEQ ID NO: 1060 - protein, 395 aa, Silicibacter pomeroyi DSS-3
MSQYSQRATWRAWLAIAALGTGSFSIVTAELAPIGLLSQIGGDLGVSTAKVGLIVTLYAWIAAAAALASAIWLGGLPRRPLLVGLMAVLAASGFATSYSGSFAGLMSARIIGAVAHGAFWAMIGTLGAQIVPARQVGVATSIIFGGVSVASVLGVPLANLVGTSEGWRSSFLIIGWLSLAVALAVLVTVPAVQGTGRIGTQALFRILSNRRFQRIFLATLFAVTAHFMAFTYVEPFLANASAIPVRAIAPLLFTFGAAGIAANMLTAALIDNWLKRIVTLSLLLAAAALGVLALFGPQLDLYGAGLALIVWGGSISAILVGLQTWVLKEAGADALQASAIYVALFNGAIGLGAAIGAALLGVTSLPGLFLCSALLIGIGIVSVISLAEPQMSPAE

SEQ ID NO: 1061 - DNA, 1185 bp, Bacillus clausii KSM-K16
  CDS (1)..(1185): transl_table=11
atgaagagcgcatggaaagtttacgttctagccttgattagctttttagttggaacatccaattacgtcatttctgggatattagaccggatcgcagagacgttaggaataagcgttgcgacagcaggccagcttattacggtttattccctggcctatgcggtcgttacacctatattgatggcgctgacggccaagatggaccggcgcaagctccttctttattcgctaggtctctttattgccgcaaatttgctgacatatatattgtccggcttcggtcttttcattgccgcgagaatcattacggcaataggcgccggggtagtcaccgttaacgcgctcagcatcgccgccaaaatcgctccgtccggcaagcaggccagcgccatcgctaacgttactatgggcattaccgcatcgctcatcatcggcgtcccgctcggcagaatggtagcctcggcttttggctggaaagcgatatttttggtcatcgcaattgtcgggaccatctccatgcttgtcatagctgcagtttttccacgtatgaagggcgacaaacctgttccactaatcaaccaatttgctttgttaaaaaaacctcaggttctggtagctttagcgattacgttcttctggttgggaggatattccctcgcctatacttacatcaccccttttctgctagaggtgactcatataaatgaatcattgataagtgcagctctgtttgtgttcggcattgccagtttaattggttcaaaagtcggtggctacagtacggataaacgtggcatcaaattcacgcttatttcagggatggtgcttcacgtcatttcgttgcttttgctagccttagtcgggcaatcggtcatcgccgtatttgccattttgatcctctggtcttttgccgcctggtcatccgcacctgcgcagcaatttaacctggtctcgcttgttcctgaatcctcaggagtaatgttgagcttgaacagttccatgatgcagctttccatggctgttggcgcaggaatgggtgggctgatcgttaaccgtatttctttggcatccattacttggttcggggtactcggcgtacttgtcgccatcattgccgtgtttgttttgttcagcacggggctacggtattcggcggcgcagtcagcggataaaaaactgcagtga

SEQ ID NO: 1062 - protein, 394 aa, Bacillus clausii KSM-K16
MKSAWKVYVLALISFLVGTSNYVISGILDRIAETLGISVATAGQLITVYSLAYAVVTPILMALTAKMDRRKLLLYSLGLFIAANLLTYILSGFGLFIAARIITAIGAGVVTVNALSIAAKIAPSGKQASAIANVTMGITASLIIGVPLGRMVASAFGWKAIFLVIAIVGTISMLVIAAVFPRMKGDKPVPLINQFALLKKPQVLVALAITFFWLGGYSLAYTYITPFLLEVTHINESLISAALFVFGIASLIGSKVGGYSTDKRGIKFTLISGMVLHVISLLLLALVGQSVIAVFAILILWSFAAWSSAPAQQFNLVSLVPESSGVMLSLNSSMMQLSMAVGAGMGGLIVNRISLASITWFGVLGVLVAIIAVFVLFSTGLRYSAAQSADKKLQ

SEQ ID NO: 1063 - DNA, 1221 bp, Bacillus clausii KSM-K16
  CDS (1)..(1221): transl_table=11
gtgaatgcattgtctaacacgtggaaagtctatttattggctttagttacttttttagtaggtacatcagagtacgttatttctggcatcttagataaaatctcgaatacaatgggtatttccgttacttctgcggggcagttagtcacgattttttcctttgtatacgccattggtaccccgatcctgatggcgttgactgctaaggtggaaagacaaaaactgctggtttgggcgctaggtatcttcgtaattgggaatgtactgtcattcgttttgcctggctatgcatcgtttctcgcagctcgcgtcatcatggctctaggcgcgggaatggtcgtggtaactgctttggacatcgccgcgaagattgctgctccaggcaaacaagcaagcgcgattgctaccgtggtcatgggctttacggcttccttgattatcggcgtgcctctaggacgtatcgttgcagcacagtttggatggaaagctgtttttggtatattggcactggccggtctggtggctatgttcgttctgtacgtcatcatccctcgaattcaaggggataaaccgattccattgtccaaacaacttgcccttttgaaaaaaggaaacgtagcgctagggcttgcgattacctttttctggctcggcggatactcgattgcctacacctacatttcaccgtatctacttgatgttgccggattgaaagaagggatgctgagtggagtgctgttggcgttcggcatcgctagcctgctcggatccaaattcggcggtttcagcacggataaatggggggtattcccgacactgtcaggggggatgctcttgcacgtcatagcgctgcttctcctctctttaacggttacctatacgcatgcatggctgccgattgtcatcctcttgattttgtggtcgtttgcggcatggtcttccggtccaacgcaacaagtcaatctagttcggattgaaccgaattattctggaatcatgctaagtctgaaccaatccatgatgcagttgtccatggctgcgggtgctgcaatcggaggcgtcatggttgaccgagtgtctctatcatccattacatgggtcggagtggttggagtcgctattgcgatcgtaatagtgacgttcttgagggcgcgaatgagtgccggtagtcaaggtatcggagagagtatctggatgaagtttaaaaaggcatgcaattaa

SEQ ID NO: 1064 - protein, 406 aa, Bacillus clausii KSM-K16
MNALSNTWKVYLLALVTFLVGTSEYVISGILDKISNTMGISVTSAGQLVTIFSFVYAIGTPILMALTAKVERQKLLVWALGIFVIGNVLSFVLPGYASFLAARVIMALGAGMVVVTALDIAAKIAAPGKQASAIATVVMGFTASLIIGVPLGRIVAAQFGWKAVFGILALAGLVAMFVLYVIIPRIQGDKPIPLSKQLALLKKGNVALGLAITFFWLGGYSIAYTYISPYLLDVAGLKEGMLSGVLLAFGIASLLGSKFGGFSTDKWGVFPTLSGGMLLHVIALLLLSLTVTYTHAWLPIVILLILWSFAAWSSGPTQQVNLVRIEPNYSGIMLSLNQSMMQLSMAAGAAIGGVMVDRVSLSSITWVGVVGVAIAIVIVTFLRARMSAGSQGIGESIWMKFKKACN

SEQ ID NO: 1065 - DNA, 1200 bp, Campylobacter jejuni RM1221
  CDS (1)..(1200): transl_table=11
atgcaaaattacaaaaaagctctttttgcactagctcttagtgctttttgtatgggcgtaactgaatttgttatggcaggagttttggttgatgttgaagcgtattttagcgtagatgcaaaaaccgcgggctatcttacaaccttatatgctataggtgttgttataggtgctcctcttatcaccatacctttaagtcgttttcatagacatacacaacttttaatcaatcttggaatttttgctctagcaaatttcatcatcttttttagccaaaatttctatcttactgtttttgcacgctttatagcaggaacacaacatggggtattttttgtcattgccaccttagctgtaagtgctataactccagatgataaaaaatcaagtgctctagctataatggtcacagggcttactgtagccttagttactggagtgccgcttggaacttttatagggcattattttggctttaaatttatctttttactcatttttatcattacaagtctagcattttttggagtatggcatatgatgcccaaaaatttacatcctagcccaaccagtcttaaaaatctaatccctgctttttctcatcaaaatttgttaaaaacttatactataaccatttgtagttgtggggctcaatttgttctttatacttatttgcaaaaaatacttgtagaaataagcggttttaaagtccaagatacagcttatatcttgcttttatatggaatttgtgcaatttgtgggaatttatggggcggaaaaatagtagataaaaaaggtgctattttttctttgcgtcttattttaagcatacaagttctagtatttttaagtgtatttctcaccatgcattctaaaattttaatcatttttagcgtagctttgataggattttttgccttttcaaccatacctgcactaaaaatgcttagcattactaaagctaaacgccatacctataaagtcatagacagtacagtaagtgtgaatgaagcagcttttaatgtaggcatagctttagcaagttttttaggtgggattgttttagcaagattgggtatagaatttaatgctttattttcagcactttttgtaagccctgctttgatttttgccttgctttttgccaaagataaattaaattataaaaaatttcaaagaaaaagttttacaaaggtataa

SEQ ID NO: 1066 - protein, 399 aa, Campylobacter jejuni RM1221
MQNYKKALFALALSAFCMGVTEFVMAGVLVDVEAYFSVDAKTAGYLTTLYAIGVVIGAPLITIPLSRFHRHTQLLINLGIFALANFIIFFSQNFYLTVFARFIAGTQHGVFFVIATLAVSAITPDDKKSSALAIMVTGLTVALVTGVPLGTFIGHYFGFKFIFLLIFIITSLAFFGVWHMMPKNLHPSPTSLKNLIPAFSHQNLLKTYTITICSCGAQFVLYTYLQKILVEISGFKVQDTAYILLLYGICAICGNLWGGKIVDKKGAIFSLRLILSIQVLVFLSVFLTMHSKILIIFSVALIGFFAFSTIPALKMLSITKAKRHTYKVIDSTVSVNEAAFNVGIALASFLGGIVLARLGIEFNALFSALFVSPALIFALLFAKDKLNYKKFQRKSFTKV

SEQ ID NO: 1067 - DNA, 1176 bp, Campylobacter jejuni RM1221
  CDS (1)..(1176): transl_table=11
atgaaaaatttaaataaagcttcaagtactcaaattattctagtattttgtttaggggtatttgggattttgagcacagaactagggatgatgggtataattcctattgtttctcaaaatttcagtgtaagtatttcagatgcgggttggtgtgcgagtatttttgcactcgtgataactttttgcgcccctattgtccccctgctttgtgcaaatttcaatcctaaaaaacttatgcttatttgtttagctgtgtttatcttaagctcgttaacttctgcttttgtgagtgaattttggcaattgcttattttaagagctattcctgctttttttcatcctatttatatagctcttgctctaagtatggttgcaaatttggtcgaagataagaaagaaattccaaaagctacagctaagatttttgcagcagttagtgctggaatggttttgggtgtacctatgactagttattttggtggaaattttagttttaaaatggcaatgttattttttgtatttttaaataccttatcttttatagcaactttattttttgttcctgattttaaaaaagtaaattctgtaaaaataagcaaacaattgcttattttaagatacccacttttatggattagcatactttgtgttatttgtataaatgctggaatttggggtttttactcttatttttctgatttcttacatagtgtaggaaagatgaattttactttaattagtattgtattggctatttatggtttttcaaatattataggcaattatatagccggaaagacccttgttaaaaacgcaaattttactttgattttaacacctttaattatgataggattttatattttactttttagtttttatagtgaaattatacttataatatttgcctttatattaggaattttagcaggtgtgatgaataacggcacgcattttatgataagttatccctttccaaaggctgctaattttagcaatggactttttataagcgtggccaatataggattaagcaccggaactgctatttgtggacttgtgatttctttgagcgatacgcgttatattatcgtaaatactattgttttgttgattttaggaattatcatgatttttgtaagaagtaggatagaaaaaatgaaattaagattttaa

SEQ ID NO: 1068 - protein, 391 aa, Campylobacter jejuni RM1221
MKNLNKASSTQIILVFCLGVFGILSTELGMMGIIPIVSQNFSVSISDAGWCASIFALVITFCAPIVPLLCANFNPKKLMLICLAVFILSSLTSAFVSEFWQLLILRAIPAFFHPIYIALALSMVANLVEDKKEIPKATAKIFAAVSAGMVLGVPMTSYFGGNFSFKMAMLFFVFLNTLSFIATLFFVPDFKKVNSVKISKQLLILRYPLLWISILCVICINAGIWGFYSYFSDFLHSVGKMNFTLISIVLAIYGFSNIIGNYIAGKTLVKNANFTLILTPLIMIGFYILLFSFYSEIILIIFAFILGILAGVMNNGTHFMISYPFPKAANFSNGLFISVANIGLSTGTAICGLVISLSDTRYIIVNTIVLLILGIIMIFVRSRIEKMKLRF

SEQ ID NO: 1069 - DNA, 1179 bp, Staphylococcus epidermidis RP62A
  CDS (1)..(1179): transl_table=11
atgactgtcgcacgcacaacaacatttatattaagtgttttcatcgtaggtatggttgagatgatggttgcaggtattatgaatttaatgagtcaagatcttcatgtttctgaagcggtggttgggcaactggtaacgttgtacgcgcttacctttgcgatatgtggtccgttattagtgaagttgactcatcggttttcttcgcgatcagtattattatggacgttaattgtctttatcttcgggaatggtatgattgccattgcgccacattttggaataatagttgtaggacgtattttatcttctgccgcagcttcactcattattgtgaaagttttagcactcacagcgatgctcacatcagcaaaaaacagaggtaaaatgattggtattgtttatacaggttttagtggagcgaatgtctttggtgttcccatcggtacagtgattggcgactgggtaggatggcgatttacatttttattcattattattgtaagtgtatttgttggtgttttaatgttaatatatctaccaaaagaagatgaattgtcacatccaaatcaaacacctcgttcatctagtattgaatcacaaactggctcaagcgtcataagacctcgtgaggtttttaaatatctgatgattacatttttagtgctggttgctaattctgtaacattcgtgtttattaatccattaattttatccaatggacatgaaatgtcttttgtgtctttagcactacttgttaatggtgtagcaggtgtgattggtacttcattaggcggtgttttatctgataagtttactagtaagcgttggttaataatttcgatttcaatatttataataatgatgataattcttaacttattattaccaggaacaggattattattagttggcttatttatgtggaatttaatgcagtggagtacaaatccagctattcaaagcggtattattgaacacgtcgaaggagatacaagccaagtgatgagttggaatatgtcgagtctcaatgccggtattggcgttggcggaatcgtaggtggactcgttatgacacatttatcagtggaatatgttacttatactagtgcattgataggtttaattagtcttatcattgtattcactttaaaaaatagacattatgctaaaaatttatga

SEQ ID NO: 1070 - protein, 392 aa, Staphylococcus epidermidis RP62A
MTVARTTTFILSVFIVGMVEMMVAGIMNLMSQDLHVSEAVVGQLVTLYALTFAICGPLLVKLTHRFSSRSVLLWTLIVFIFGNGMIAIAPHFGIIVVGRILSSAAASLIIVKVLALTAMLTSAKNRGKMIGIVYTGFSGANVFGVPIGTVIGDWVGWRFTFLFIIIVSVFVGVLMLIYLPKEDELSHPNQTPRSSSIESQTGSSVIRPREVFKYLMITFLVLVANSVTFVFINPLILSNGHEMSFVSLALLVNGVAGVIGTSLGGVLSDKFTSKRWLIISISIFIIMMIILNLLLPGTGLLLVGLFMWNLMQWSTNPAIQSGIIEHVEGDTSQVMSWNMSSLNAGIGVGGIVGGLVMTHLSVEYVTYTSALIGLISLIIVFTLKNRHYAKNL

SEQ ID NO: 1071 - DNA, 1140 bp, Staphylococcus epidermidis RP62A
  CDS (1)..(1140): transl_table=11
atgaaaaaaatatggattttaactataggtatgtttgccttaggtatggatgcttatatagtagcaggattaataccttcaataagtaaaagttttaataaaagtagctctgctattgggcaaggagtaacagtttttacattgtttttctctatctctgcccccattttttcaacaatattagctaaatccccagttaaaaaaatactaataatagcattcagtatatttactttagccaatattataaccgcaatatctatgaactacatgctatatatcgtatcaagagcaatcgctggtttaggagctggcgtatcctcaccaattgcaataagtgcaagcaatcatttagtctccgaaaagcataaaggaaaagcaatcgcttttacagtaggcggaatgagtgtaggaactgttataggagttcctctcggactagaaattgccaacatttctaattggcgatttgcaatgttggttattattgtcattagttttattgcattaataagcatatctatattgatgcctaaatttaaaatagaagctcctccaaatttaaaagatcgttttcaattatttttaaacaagcatgtactaagagttatttcggttacattatgcgctgccattgctagtttaggtttgtatacttatttagccgatattattaaaacaaatacagatacaaaaaatttaactcattaccttacagcgtggggaataggcggattaataggaagttttggtataggatttattatagatagatttaaaaatacaagatttgttatgctaattattttaattttactagcattaagttttggtttaattcctatttctattaacttgcctatattaggtttaattccctttattttatggggagctatgggatgggctacacaagctcctcaacaacatatattattgaaaaaacatcctgaatatggaggctctgctgtcgctttaaatagttctattaattatttaggcagtgctatgggatcagcaatcggaggaattattttatttaatgctaatagtacaaatgtactaatatatagtgctttaggaattactattattggtattttattacaattactaaatttatccctagaaaaaaattaa

SEQ ID NO: 1072 - protein, 379 aa, Staphylococcus epidermidis RP62A
MKKIWILTIGMFALGMDAYIVAGLIPSISKSFNKSSSAIGQGVTVFTLFFSISAPIFSTILAKSPVKKILIIAFSIFTLANIITAISMNYMLYIVSRAIAGLGAGVSSPIAISASNHLVSEKHKGKAIAFTVGGMSVGTVIGVPLGLEIANISNWRFAMLVIIVISFIALISISILMPKFKIEAPPNLKDRFQLFLNKHVLRVISVTLCAAIASLGLYTYLADIIKTNTDTKNLTHYLTAWGIGGLIGSFGIGFIIDRFKNTRFVMLIILILLALSFGLIPISINLPILGLIPFILWGAMGWATQAPQQHILLKKHPEYGGSAVALNSSINYLGSAMGSAIGGIILFNANSTNVLIYSALGITIIGILLQLLNLSLEKN

SEQ ID NO: 1073 - DNA, 1176 bp, Staphylococcus epidermidis RP62A
  CDS (1)..(1176): transl_table=11
atgaaagataataaaatgttgttcattatttttatgataggaacatttacagtaggaatggctgaatatgtagtgacaggattacttacacaaatcgctgacgatatgaaggtttctatttcgagtgcaggtttattaattagtgtttatgctattagtgttgcattgatagggcctttaatgcgaatcataacattgaaagttcacgcccaccgtctgttaccgattttagtagcgatttttataataagtaatttagtgggaatgttagcaccgaattttaatgtattgttattatcaagactcatgtctgcggcaatgcatgcgccattcttcggtgtgtgtatgagtgttgctgcgacagtcgcacctcctgctaaaaaaacacaggccattgcacttgttcaggcaggtttaactattgctgtaatgttaggtgtaccattcggatcatttttaggtggctttgcaaattggagagttgtttttggatttatgattgtgttggcaatcattactatgttaggaatgattaaatttgttccaaatgtttctttaagtgcagaagcaaatattagcaaagaattaacagtgtttaagaatccacacattttaattgtgattgcaattattgtgtttggttactctggtgtgtttactacttatacatttatggagccaatgatacgagatttttctccatttaaaattgtaggtttaactgtttgtttatttatgtttggtctaggcggtgtgatagggaatttaattactggtaatgtaccggaagataaattaacaaaaaatttataccttacatttcttttactatttgtaacaatcatactatttgttactgttattcaaaattcaatattagcattaatcatttgcttcttattcggttttggtacatttggtacaaccccgttacttaatagcaaaattatcttaagtggaaaagaagcaccacttcttgcaagtacgttagcagcttctattttcaatgttgctaattttcttggtgcaataattggatctatattattatcaatagggttaccttacattcaaattactttgatatctggtggaattatagtgttgggtatgcttcttaatcttgttaatcaactttatgaaaagaaacatatcacatttaatgaatattcatga

SEQ ID NO: 1074 - protein, 391 aa, Staphylococcus epidermidis RP62A
MKDNKMLFIIFMIGTFTVGMAEYVVTGLLTQIADDMKVSISSAGLLISVYAISVALIGPLMRIITLKVHAHRLLPILVAIFIISNLVGMLAPNFNVLLLSRLMSAAMHAPFFGVCMSVAATVAPPAKKTQAIALVQAGLTIAVMLGVPFGSFLGGFANWRVVFGFMIVLAIITMLGMIKFVPNVSLSAEANISKELTVFKNPHILIVIAIIVFGYSGVFTTYTFMEPMIRDFSPFKIVGLTVCLFMFGLGGVIGNLITGNVPEDKLTKNLYLTFLLLFVTIILFVTVIQNSILALIICFLFGFGTFGTTPLLNSKIILSGKEAPLLASTLAASIFNVANFLGAIIGSILLSIGLPYIQITLISGGIIVLGMLLNLVNQLYEKKHITFNEYS

SEQ ID NO: 1075 - DNA, 1182 bp, Gluconobacter oxydans 621H
  CDS (1)..(1182): transl_table=11
gtgttcaaaacgctctccggtccggtgatcgcaggcctctgcgccctgttcgcctcgaccttcattgcggtgacgaccgaggtcgcgccggttggtctgctgatcgacatggccaaatccttcaacattacggaaggtcacgccgggctggccgtcagcgcctatgcgctgctcgtcgcattcggggccgtgcccatcacgatcgccacgagccgcatggaccgcaaaatgctcatgctgctgtgcctggccggatacgtcacctccaacctgatttccgccatggcgccgaacttcgccatcgtctgcgcaggacgcgcccttggcggcctgtcccatgcgctgatgatgtccattgcggccgcctatgccgcccatctggtgcccgaacgcatgacggggcgcgccatttcctttgtcttcggcggcacgtcgctggggtcggttctgggcgttccgggcgcggccgcgatcagccatttcgcaagctggcgggtggcactttacgttattgccgggcttgcggccctcctgacgatcttcatcgcgctctatctgccgcccgttcgcggggcggacaccaaggcgctcaaggtcccgaccatccgctccccgcaggccgcgcgcattttcggcgtcgtgatcggcgtgaacgccgtgttcttcttcgcccataacctgctctacacctatgtctcaccgcttctgctggcgcatggcctgccggagcatctgctgagtgtcgcgctgctcattacgggtggcgtcagtattttcggtctgtggggtgcggggcaggtcgtggaccgttggccggcagccggactgttcggcggcggcctggccatgctcacgggcatgatcctggtttacggacacctgatttccgcatggccgagcgtcggcgccgtggggctgtggtgcatgggttatgccgccatcattcccttcgtcatgtcgggcgcgatccgtgcgcgggcgaccagcgcggatgtggcgggcgcggccatcaacagcagcagcaatttcggcattcttctgggctccgccatcggtggccatcttctgagcacgctgggctttgcggtgctgtgcccggcctccgtcgtgatcgcactgggcggcatcctgctggcagccttcaatcccgcggcgtttccccgccgcctccagcaggactga

SEQ ID NO: 1076 - protein, 393 aa, Gluconobacter oxydans 621H
MFKTLSGPVIAGLCALFASTFIAVTTEVAPVGLLIDMAKSFNITEGHAGLAVSAYALLVAFGAVPITIATSRMDRKMLMLLCLAGYVTSNLISAMAPNFAIVCAGRALGGLSHALMMSIAAAYAAHLVPERMTGRAISFVFGGTSLGSVLGVPGAAAISHFASWRVALYVIAGLAALLTIFIALYLPPVRGADTKALKVPTIRSPQAARIFGVVIGVNAVFFFAHNLLYTYVSPLLLAHGLPEHLLSVALLITGGVSIFGLWGAGQVVDRWPAAGLFGGGLAMLTGMILVYGHLISAWPSVGAVGLWCMGYAAIIPFVMSGAIRARATSADVAGAAINSSSNFGILLGSAIGGHLLSTLGFAVLCPASVVIALGGILLAAFNPAAFPRRLQQD

SEQ ID NO: 1077 - DNA, 1215 bp, Gluconobacter oxydans 621H
  CDS (1)..(1215): transl_table=11
atggactccatcgaacctctcgacgtcgagcgggtgcgcccaccccacggtgtcggaccggccatgctgtccctcatgctggcaactttcaccatcggaaccggcgaattcgccatgatgggactgctgcctgaattctcccattccctgaacatcaccatttcgcaggcaagctgggcgatctcggcctatgcaatgggcgttgtcatcggcgctccgctgattgcgatcatcggtgcacgcctgccccgccgcacgcttctgctctgcctgctgtgcctgttcatcgcgggcaatatcggcagcattctcatgccgggctttgccggtatcgaactcatgcgcttcatcacgggcctgcctcacggggccttctttggcgtttcggcgctgattggcgcgtcgatggtcgaacgggcccggcgtgggcgggccgtcgggcaggtgctgtcgggcatcatgatctcgacggtgatcggctcaccgctgtcgacctatgccgccaaccatgtgggctggcgcgtggcttacggcagcatcgccgcactgggcgtgctgtgttttgcagggatctggttcttcgcgccacgtgacaggccacatccgggcgcaagcgcactgtccgaactcggcgcattcaagcgaccacaggttctgctgacgctgctgaccagtgcagtcgggtttggtggtctgttcgggatctacaccttcctgacgaccggcctgacgcaggtgacgcatctgccgggctggcttgtcgcggtctatcaggtcgtgtggggacttggcatggtggcgggcaatgcgctcggcggcaccatggcggatcgcagcattgaccggacggtgatcgtctcactgacggcaagcatcgtcttcatgctggggttctggcttctgctgccctcgccctacgccatgctgccgctcacgttccttgtcccggccgggatcattatgctctccccagcccttcagacgcgcctgatggaagttgccggagacgcgcagacgctggcggcctcactgaatcattcagccttcaatctggccaacgcctttggcgcctggctgggcgccgtactggtcagctccgggtttggactgggatcggttggctggggtggagccgtgttctcggctctgggtctgctgatctatttcatcacgatctggcagggacgggcttgcgcatcacacgcagcagcctga

SEQ ID NO: 1078 - protein, 404 aa, Gluconobacter oxydans 621H
MDSIEPLDVERVRPPHGVGPAMLSLMLATFTIGTGEFAMMGLLPEFSHSLNITISQASWAISAYAMGVVIGAPLIAIIGARLPRRTLLLCLLCLFIAGNIGSILMPGFAGIELMRFITGLPHGAFFGVSALIGASMVERARRGRAVGQVLSGIMISTVIGSPLSTYAANHVGWRVAYGSIAALGVLCFAGIWFFAPRDRPHPGASALSELGAFKRPQVLLTLLTSAVGFGGLFGIYTFLTTGLTQVTHLPGWLVAVYQVVWGLGMVAGNALGGTMADRSIDRTVIVSLTASIVFMLGFWLLLPSPYAMLPLTFLVPAGIIMLSPALQTRLMEVAGDAQTLAASLNHSAFNLANAFGAWLGAVLVSSGFGLGSVGWGGAVFSALGLLIYFITIWQGRACASHAAA

SEQ ID NO: 1079 - DNA, 1167 bp, Gluconobacter oxydans 621H
  CDS (1)..(1167): transl_table=11
ttgaaactggcagcgaaatcgccaccaaaccggcccctgctgtcgctcgccgttggcgcctttgccatcggcacgacagaatttaccccgatgggccttctgcccgtcatcgcccatggtcttcaggtcagcgttcccaaggccggcggcctggtgacggcctatgcgatgggcgtgatgatcggcgcgcccgtcattacgctcctgatggcgcggttccggcgcaagctggccctgatcctgctgatggggctgtatgtggcggggaacctgctctccgccatttccaacagctatgaactgctgtttgcggcccgtgtcctgaccagtctggcgcatggtgcgtttttcgggcttggtgcggttgaagcctcgctgtcggtggcgccttcccggcgggcgagtgcggtggcgtccatgttcatggggctgacgatcgccaacatcatcggtgttccggcggcaacctggctggggctgaatttcggctggcacagcgcctttggcgtgacggcaatgctggggcttgtgaccatgctggccgtgcagtttgcgctgccagcccgcgaggtcggtccggcgccggaagtcggtcgcgaactgcgggtgctcgtgaagggcaatgtgcttctggcactgctgacgaccgcaatcggggcaggggcgatgttcgtcctctacacctatatcgcgccgatccttgagcacatcacccatgcgagcccgacggtcattaccgtggcgctgatgctgacgggtgtcgggttctccatcggcaatgccgtgggtggacggagtgcggatcgctcgctggacggaagcctgctggtctttttcccgatccttggcgtcatcatgctgatcttcccctggatggcgcagaccgtgccgggcgcgctgtttgcgtcgcttttgtggggggcctccacgttttcgctgatgcccgcgcttcagatgcgggtgatgcaggccgcgcatgatgcgccggctctggcgtcgtccatgaatattggggcgttcaatcttggaaacgccattggcgcggccttgggagggatcgcgctgtccatggggttgggctacagcggtgtttccgttatcggaacggctctggccctggtcggggtcggtcttgttcttctgtcacgaaaggtggctcctccatga

SEQ ID NO: 1080 - protein, 388 aa, Gluconobacter oxydans 621H
MKLAAKSPPNRPLLSLAVGAFAIGTTEFTPMGLLPVIAHGLQVSVPKAGGLVTAYAMGVMIGAPVITLLMARFRRKLALILLMGLYVAGNLLSAISNSYELLFAARVLTSLAHGAFFGLGAVEASLSVAPSRRASAVASMFMGLTIANIIGVPAATWLGLNFGWHSAFGVTAMLGLVTMLAVQFALPAREVGPAPEVGRELRVLVKGNVLLALLTTAIGAGAMFVLYTYIAPILEHITHASPTVITVALMLTGVGFSIGNAVGGRSADRSLDGSLLVFFPILGVIMLIFPWMAQTVPGALFASLLWGASTFSLMPALQMRVMQAAHDAPALASSMNIGAFNLGNAIGAALGGIALSMGLGYSGVSVIGTALALVGVGLVLLSRKVAPP

SEQ ID NO: 1081 - DNA, 1212 bp, Xanthomonas oryzae pv. oryzae KACC10331
  CDS (1)..(1212): transl_table=11
atgaccgataccgatctttcttcgccacgcgtgtcccggcgcgattacgtgctgattctgcttgcgctggcgatgggcggctttgcgatcggcatcagcgaattctccaccatgggcctgatgacgcagattgcgcagggcttgcagatcagcgagccgcaggtcggccacgtcatcagcgcgtatgccctgggcgttgtggtcggtgcgcccttgctggcgattctgggggcgcgctggccgcggcgcaccttgttgctgctgttgatggtgttctatgcgctgggcaatgtggccagcgcattggcaccgagctactacaccatgctgctgtgccgctttatcgccgggctgccgcatggcgcgtacttcggcgttgcgtcgctggtagccgcatcgatcagcccacccaatcaacgtgccactgcagtggggcgggtcttgttggggttgagcgtcgcgttgctggtgggcaatccgctggcgacctggctggggcaaatcgtgagctggcgctgggcctatgcatcggtctcggtgattgcgctgggcacggtcgccgctgtggcgattctgctgcctccgcagcccgacgagccgcgtcagcagccgctgcgcgaattgcgtgcgttcaatcagccgcaggtgtggctggcattggcgatcggcgcggtgggtttttccggcatgttctgcgtcttcagttaccttgcgccgacgttgactgcggtgaccggcgtgaccgcagcgcgcattccgctggcgatggtggcgtttggtgtgggcggggtgctgggaagcatcctgggcggttggttgttcgaccgcatgcagttctgcgcggtgccggtgttgctggtgtggtcggtgatggtgatgttgacgtttccgctggccgcgcagtcagacatatgggtgttcgtttccatcgtggcggtcggcaccatgggcgccttggcgcctgccttgcagacacgtttgatggacgtggcggcagaagcgcagaccctggctgcagcctccaaccatgcagcattcaatacggccaatgcattgggtccatggctgggtggcatggcgatcacggcaggctggggctggacctccaccggctacgttggcgcggccaccgcgctcggcgggttgctggtctacgcactggcggtgtggcaggagcgtcgccagcagcgctcggtcttggcgaattgctga

SEQ ID NO: 1082 - protein, 403 aa, Xanthomonas oryzae pv. oryzae KACC10331
MTDTDLSSPRVSRRDYVLILLALAMGGFAIGISEFSTMGLMTQIAQGLQISEPQVGHVISAYALGVVVGAPLLAILGARWPRRTLLLLLMVFYALGNVASALAPSYYTMLLCRFIAGLPHGAYFGVASLVAASISPPNQRATAVGRVLLGLSVALLVGNPLATWLGQIVSWRWAYASVSVIALGTVAAVAILLPPQPDEPRQQPLRELRAFNQPQVWLALAIGAVGFSGMFCVFSYLAPTLTAVTGVTAARIPLAMVAFGVGGVLGSILGGWLFDRMQFCAVPVLLVWSVMVMLTFPLAAQSDIWVFVSIVAVGTMGALAPALQTRLMDVAAEAQTLAAASNHAAFNTANALGPWLGGMAITAGWGWTSTGYVGAATALGGLLVYALAVWQERRQQRSVLANC

SEQ ID NO: 1083 - DNA, 1176 bp, Salmonella enterica subsp. enterica serovar Choleraesuis str
  CDS (1)..(1176): transl_table=11
atgcctctcgctttatttgcactgactataagtgccttcgctattggcacgactgagtttgtgattatcggcctggtgccgaccattgctcaacaactggctatctcgttaccttccgccggaatgctggtttcaatctatgcgctgggtgtggctattggcgcgccggtgctaaccgcgctgaccggacgcctgccgcgtaaacagttactggtcgcgctgatggtcttgtttacggcggggaatttgctggcatggcaggcaccgggctatatgacattaatcgtcgcccgtctgctgacgggcctggcgcacggcgtgttcttctcgattggatctaccatcgcgacacgtctggtgccaaaagagaaagcggcttctgcgatcgctattatgtttggtggtttaacggtagcgctggtcacgggcgttccgctgggcacatttatcggtcagcattttggctggcgtgagaccttccttgcggtatcactgttaggcgtgattgcgctgatgagcagtcaactgctgatccctgccaatattcccggtcgggcggccgccagcattcgtgaccaggtgaaagtactgactcatcctcgtctgttgctgatttacgccgttacggcgctgggctacggcggggtattcacggcattcaccttcctggcgctaatgatgcaggatctggcgggattctccccggcagcggtaagctggatcttactggggtatggcgtatcagtggctatcggcaatatctggggcggtaaactggcagataagcatggtgccgtgccggcgttgaaattcattttcgccgtgctgtttgttctgctgatggtcttccaggtgacggcctccacgcagtatgtcgcgctggctaccattctggtgatgggggtctttgccttcggtaacgtaccggggttgcaggtctacgtggtacagaaagcggaacaattcacgcctaatgcagtagatgtggcgtcaggtctgaacattgcggcgtttaacattggtattgcgctgggttccgtgattggcggacaaacggtggcgcattacggtttggcgcagacgccgtggattggcgccctcattgttctggtggctttcctgctggtgggcgtcagcggacgtcttgataaacctgtacgcattgctctggagtaa

SEQ ID NO: 1084 - protein, 391 aa, Salmonella enterica subsp. enterica serovar Choleraesuis str
MPLALFALTISAFAIGTTEFVIIGLVPTIAQQLAISLPSAGMLVSIYALGVAIGAPVLTALTGRLPRKQLLVALMVLFTAGNLLAWQAPGYMTLIVARLLTGLAHGVFFSIGSTIATRLVPKEKAASAIAIMFGGLTVALVTGVPLGTFIGQHFGWRETFLAVSLLGVIALMSSQLLIPANIPGRAAASIRDQVKVLTHPRLLLIYAVTALGYGGVFTAFTFLALMMQDLAGFSPAAVSWILLGYGVSVAIGNIWGGKLADKHGAVPALKFIFAVLFVLLMVFQVTASTQYVALATILVMGVFAFGNVPGLQVYVVQKAEQFTPNAVDVASGLNIAAFNIGIALGSVIGGQTVAHYGLAQTPWIGALIVLVAFLLVGVSGRLDKPVRIALE

SEQ ID NO: 1085 - DNA, 1173 bp, Salmonella enterica subsp. enterica serovar Choleraesuis str
  CDS (1)..(1173): transl_table=11
atgaaaaaagttattttttctttggcgctgggtacgttcggactggggatggccgagtttagcattatgggcgtgctgacggagctggcacgcgatgtcgggataacgattcccgccgccgggcatatgatctcgttttacgccttcggcgtcgtgctgggcgcgcctgttatggcgctcttttccagccgcttttcgcttaaacatatactgctgtttctggtcacgctgtgcgtgatgggcaatgccatatttaccttttcctcgtcatatctgatgctcgccgtcggcagactggtttccggctttccgcacggcgccttttttggcgtcggcgccattgtcctgtcaaagattatccgccccgggaaagtcaccgccgccgtcgcgggtatggtttcaggaatgacggtggcgaatctggtgggcattccggtcggcacttacctgagccaggaatttagctggcgctacacctttttattgatcgcggttttcaacatcgctgtgctcaccgcaattttcttctgggtgccggatatccgtgacaaagcccaaggcagcctgcgcgaacagtttcacttcttgcgtagccccgcgccgtggctcattttcgccgccacgatgttcggcaatgcgggcgtttttgcctggttcagctatatcaagccatttatgatgtacatctccggtttttcggagacgagcatgacgtttattatgatgctggtcgggctggggatggtgttaggcaatctgttaagcggcaaactctccggcagatatactccgctgcgcatcgcggtagtgactgacctcgttatcgtgctctctctcatggcgctctttttcttcagcggatacaaaacggcatcgctgactttcgcgtttatctgctgtgctggtctgtttgcgctctctgcgccgctgcaaatcctgctgctgcaaaacgccaaaggcggcgaactgctgggcgcggcgggaggacaaatcgcgtttaatctcggtagcgcgattggcgcctggtgcggcgggctgatgctgacgctaggttttgcgtaccactacgtggcgcttcccgccgccctgctctcgttttccgccatgtcgtcgttgctggtatacggacgtctaaaacacaagcagccatcggtcacgccggttgccggatga

SEQ ID NO: 1086 - protein, 390 aa, Salmonella enterica subsp. enterica serovar Choleraesuis str
MKKVIFSLALGTFGLGMAEFSIMGVLTELARDVGITIPAAGHMISFYAFGVVLGAPVMALFSSRFSLKHILLFLVTLCVMGNAIFTFSSSYLMLAVGRLVSGFPHGAFFGVGAIVLSKIIRPGKVTAAVAGMVSGMTVANLVGIPVGTYLSQEFSWRYTFLLIAVFNIAVLTAIFFWVPDIRDKAQGSLREQFHFLRSPAPWLIFAATMFGNAGVFAWFSYIKPFMMYISGFSETSMTFIMMLVGLGMVLGNLLSGKLSGRYTPLRIAVVTDLVIVLSLMALFFFSGYKTASLTFAFICCAGLFALSAPLQILLLQNAKGGELLGAAGGQIAFNLGSAIGAWCGGLMLTLGFAYHYVALPAALLSFSAMSSLLVYGRLKHKQPSVTPVAG

SEQ ID NO: 1087 - DNA, 1191 bp, Salmonella enterica subsp. enterica serovar Choleraesuis str
  CDS (1)..(1191): transl_table=11
atgacaatcaatccagtttcccgcaaggtcgcgtggctacgggtagttacgcttgctattgccgcttttattttcaataccacagaatttgtgccggttggtttgctatcagacattgctgaaagctttcatatgcaaaccgcgcaggtcggcatcatgctaaccatttacgcctgggtagttgccgtcatgtcgctgccttttatgcttcttaccagtcaaatggagcgccgtaagctactcatttgtctgtttgttttgtttattgccagccatgtgctctcctttctggcatggaactttaccgtgctggtcattagccgtattggtatcgctttcgcccacgctattttctggtcgataaccgcctcgctggcgatccgcctggcccctgccgggaaacgcgcacaggcattaagtctgatagcgaccggcaccgcgttggccatggtgcttgggctgccgataggtcgcgttgttggtcagtattttggctggcgcaccaccttttttgccatcggcatgggcgcattaattacgctgctatgtctgattaagcttctaccgaaattgccgagcgagcattccggctcactaaaaagtttacctttgctattccgacgcccggcgctgatgagcctctatgtactgaccgtcgttgtggtgactgcgcattacacagcttatagctatattgagccgttcgttcagaatgtcgccgggctcagtgcgaattttgctaccgtcctgttactgatcctcggcggcgccgggatcatcggcagccttgtgtttggtaaactgggtaatcgtcatgcctcgtcgctcgtcagtatcgctattgccctgctggttgtctgtctgcttctgctgctgcctgcggcggatagcgaagcgcatctggccatactgagcattttctggggcatcgcgattatggtgatagggctcggtatgcaggtgaaagtactggcgctggccccggacgcgaccgatgtcgcaatggcgctattttcaggcatctttaatattggtattggcgctggcgcgctggtaggcaatcaggtgagtttgcactggtcaatgtcggccatcggctatattggcgacatacccgcctgtgccgcgctggtatgggctgtgctcatattccgcaaatggccagtgacgctggaagaacaaccgcattaa

SEQ ID NO: 1088 - protein, 396 aa, Salmonella enterica subsp. enterica serovar Choleraesuis str
MTINPVSRKVAWLRVVTLAIAAFIFNTTEFVPVGLLSDIAESFHMQTAQVGIMLTIYAWVVAVMSLPFMLLTSQMERRKLLICLFVLFIASHVLSFLAWNFTVLVISRIGIAFAHAIFWSITASLAIRLAPAGKRAQALSLIATGTALAMVLGLPIGRVVGQYFGWRTTFFAIGMGALITLLCLIKLLPKLPSEHSGSLKSLPLLFRRPALMSLYVLTVVVVTAHYTAYSYIEPFVQNVAGLSANFATVLLLILGGAGIIGSLVFGKLGNRHASSLVSIAIALLVVCLLLLLPAADSEAHLAILSIFWGIAIMVIGLGMQVKVLALAPDATDVAMALFSGIFNIGIGAGALVGNQVSLHWSMSAIGYIGDIPACAALVWAVLIFRKWPVTLEEQPH

SEQ ID NO: 1089 - DNA, 1134 bp, Corynebacterium glutamicum ATCC 13032
  CDS (1)..(1134): transl_table=11
atgactgccctcgcactcggtggcttcgccatcggtgtgacggaatttgtctccatgggtctgctcagcgcgatcgcctccgactttgagatctccgaagaccaagccggacacatcatcaccatctacgccctcggcgtggttgtgggtgccccgctgatcacagcgtttaccggcaaacttccacgacgccgcctgctgctcatcctggtggccttctttgtggtgggtaacgcgttgtccacactgaatgcgtcctatgaagtcctgttgattgcccgcttcatcgctggtctgccacacggcgcgtacttctcagttgcaggtttggcagcagcatcgatggcaccagacggacagcgtggacgtgcgatcgcctatgtcggtatgggtctttccgtgggtactgtcgccggtgttccagcagcccaagcactgggcgatgctttcggttggtccaccgcctacgtgctggtcaccgtcctgggtgttctcaccttgctggccctatggttcctcatgccacacatgacagagatgaaacccaccagcccgctgacagaactcagtgctttgaagaacagccaggtctggctcaccctgggcattggttccatcggtttcggtggcatgttcgcggtctacacctacatctcttggaccatgaccgaccaagctggcatgccaagctccctgatctggattgtgctgatggcctacggcgtgggcatgatctgcggaaactacgtcggtggacgcatcgccgactggaacgtggaccgcggaatcctcctcgcactgatctgcatcgtggtggccctcatcggtttctacttcacctccaacaacgccatcctgggaaccatcaacttcggactcgtcggattcttcggctccacactgatcccatcactgcagatccgactcatggacgttgcaggacgcgcacaaacgttggctgcatctctgaatcaatctgcactgaatatcggtaacgctttgggcgcagcgatcggtggcgtggttatcggcgcgggttattcctacagcactccagcccttgctggcgctggcctggcattccttgccatcgtggtgtggttccccatggtggccttgcgtaaacgcacataa

SEQ ID NO: 1090 - protein, 377 aa, Corynebacterium glutamicum ATCC 13032
MTALALGGFAIGVTEFVSMGLLSAIASDFEISEDQAGHIITIYALGVVVGAPLITAFTGKLPRRRLLLILVAFFVVGNALSTLNASYEVLLIARFIAGLPHGAYFSVAGLAAASMAPDGQRGRAIAYVGMGLSVGTVAGVPAAQALGDAFGWSTAYVLVTVLGVLTLLALWFLMPHMTEMKPTSPLTELSALKNSQVWLTLGIGSIGFGGMFAVYTYISWTMTDQAGMPSSLIWIVLMAYGVGMICGNYVGGRIADWNVDRGILLALICIVVALIGFYFTSNNAILGTINFGLVGFFGSTLIPSLQIRLMDVAGRAQTLAASLNQSALNIGNALGAAIGGVVIGAGYSYSTPALAGAGLAFLAIVVWFPMVALRKRT

SEQ ID NO: 1091 - DNA, 1209 bp, Pseudomonas syringae pv. syringae B728a
  CDS (1)..(1209): transl_table=11
ttgataacttcacctccaaacgagcaggcaggtagctggcttggcgtattcgcgctggccttggcggccttcattttcaataccaccgagttcgtgccgatcggtctgctgagtaacatcggccagagcttcgaaatgaccccggcccaggtcgggctgatgctcacgatctatgcctgggtcgtgtcgctgatgtcgttgccgatgatgctggcgacgcgcaacatcgagcgccgcaagttgctgatgttcgtgttcggcctgttcgtggtcagccacgtcctttccgcgattgcccccagcttcgcgatcctgctggtgagccgggtcggtatcgcgtttgcacatgcggtgttctggtcggtcacggcgtcgctggccgtgcgcatcgcaccgcccggcaagcaggttcaggcgctgggcctgctggcgaccggtacgtcgctggcgatggtattgggtattccgctgggccgcgtgctgggtgaagccctgggctggcgcaccacctttctgggcatcgccgccatcgctgcgctggtagtcttcctgctggttcgcgcgctgcctttgctgcccagtcagaactcaggctcgttgcgcagcctgccgatcctgttcaagcgcccacggctgatggcgatctacctgctgaccgccatcgtggtgaccgctcatttcaccgcctacagctatatcgagccgttcactcagaccgtgtccctgctcagcggcgaaatgaccacgatcctgctgctggtctttggcggggccgggatcatgggctcgatcatcttcagcctgttcagcgatcgcttccccaacgggctgttgatcacggccattggcacgctgaccctgtgcctgctgatgctgttgccgctctccggtgatgccgtgacgctcggcacgctgaccattatctggggcatggcgatcatgtgcttcggcctgaccttgcaggcgcgcgtactgtcgctggcacccgatgcgaccgatgtggcgatggcgctgttctcgggcatcttcaatatcggtattggcggcggcgcgctgctcggcagtgtggtcagcagccatctcggggttgccaatgtcggcatcgtcggcggcctgctggccctcggcgggttggggctgtgctgctacacaacgcatcacttcggcaaggtccggcctgctgccgagatgcaggccgagagcaaatag

SEQ ID NO: 1092 - protein, 402 aa, Pseudomonas syringae pv. syringae B728a
MITSPPNEQAGSWLGVFALALAAFIFNTTEFVPIGLLSNIGQSFEMTPAQVGLMLTIYAWVVSLMSLPMMLATRNIERRKLLMFVFGLFVVSHVLSAIAPSFAILLVSRVGIAFAHAVFWSVTASLAVRIAPPGKQVQALGLLATGTSLAMVLGIPLGRVLGEALGWRTTFLGIAAIAALVVFLLVRALPLLPSQNSGSLRSLPILFKRPRLMAIYLLTAIVVTAHFTAYSYIEPFTQTVSLLSGEMTTILLLVFGGAGIMGSIIFSLFSDRFPNGLLITAIGTLTLCLLMLLPLSGDAVTLGTLTIIWGMAIMCFGLTLQARVLSLAPDATDVAMALFSGIFNIGIGGGALLGSVVSSHLGVANVGIVGGLLALGGLGLCCYTTHHFGKVRPAAEMQAESK

SEQ ID NO: 1093 - DNA, 1200 bp, Pseudomonas syringae pv. syringae B728a
  CDS (1)..(1200): transl_table=11
gtgagtcgctttgaaaccgctggaaacgtacaaacaaaacccgcttcatggtgggccgttggcagcgtatcgcttgggtcgttcgccaccgtcaccactgaatttctgccggtcgggctgctgcccgatatcgctcgcgacctgggaaccagcatcagccagacaggcttgatgatggccgtccctggcatcctcgcggccatctcggcgccgtcctgtattgccctgttcagtcatgtcgaccgcaagcgcctgctgctcgggctgctgtcgatattgctggcctccaacctgatcgtcgcgttgtccacgcacttctggctgaccctggcgggcagggtcctgctcggcttcgcgctggggggattctggacgattgccgggtcgctcgggccacgcttgaggcccggcaaggagggcgtcaaggccaccgcgtatgtgctggcgggcgtctcgatcggcactgtcgccgggattccggccggcacgttgatcggtgaagccttcggctggcgtgctgcgtttgaaacagcggcagtggtcacggttgccgtgggggtgttgattgcaaccttcctgcctgcgttgccgggcgagcgctctgccggcatcagccagatgttgtcgctggctggcgagcagcgcattcgtcgcatgttcgctgccgcactgttgatctatgtcgggcacttcgcggcttacacgtacctcgcgcccttcgtgcaggaattcgcgcatattcagggtcaggccctgggcgcattgctcttcgccttcggcctggcggctgttgcaggcaacctggccggtggagctctggcggccaggagcgcaccgtcctcggtgctgatcatgaccctgctgatgctgggttcgctgaccgcgctgctgatgttcgtcggtaacccgtggctgctctggccggtgattctggtctgggggttcgcgttcgggatgatccccatcaccacgcagatctggtgcttcgaggcttcaaacgatcgtgtggaaggcgttcaggcgctgctggtctgtgtggtgaatctgtcgattggcggcggggcgttcattggcggtgcggtgtccgctcgggccggctttaccgctgccatcgtgatcggtgcggtatgtgctgcgctgtccatgctcaccgtgatgctggcgatgcgcaactcaaagccggtcagttgcaccgactga

SEQ ID NO: 1094 - protein, 399 aa, Pseudomonas syringae pv. syringae B728a
MSRFETAGNVQTKPASWWAVGSVSLGSFATVTTEFLPVGLLPDIARDLGTSISQTGLMMAVPGILAAISAPSCIALFSHVDRKRLLLGLLSILLASNLIVALSTHFWLTLAGRVLLGFALGGFWTIAGSLGPRLRPGKEGVKATAYVLAGVSIGTVAGIPAGTLIGEAFGWRAAFETAAVVTVAVGVLIATFLPALPGERSAGISQMLSLAGEQRIRRMFAAALLIYVGHFAAYTYLAPFVQEFAHIQGQALGALLFAFGLAAVAGNLAGGALAARSAPSSVLIMTLLMLGSLTALLMFVGNPWLLWPVILVWGFAFGMIPITTQIWCFEASNDRVEGVQALLVCVVNLSIGGGAFIGGAVSARAGFTAAIVIGAVCAALSMLTVMLAMRNSKPVSCTD

SEQ ID NO: 1095 - DNA, 1155 bp, Pseudomonas syringae pv. syringae B728a
  CDS (1)..(1155): transl_table=11
atgttgttgcccatccttctgctgtcagccgccgggtttaccgtgctgaccacagaattcgtcatcgtcggtcttttgccagcggttgcccgcgacctgaatgtcacggtctcccaggcaggtctgctggtgacgctgtttgcgtttaccgtcgccgcctttggtccttttctgaccgcctatttttcgcgcttcgagcgcaagcgcttgtttgtcagcatcctggtgctgttcggctttgcaaatgtcctggcggcgctggcgcccaatatcgccgtgatggggatcgcccggctgattcctgcgttggggttaccggtgttctgggcgctggccagcgagaccgccgtggacattgtcggtccgcagttcgcaggccgggcaattgccaggatcggtttcggcatcgtttgcgccacggtattcggcattcccatcggcaccctgatctccgatgccttcggctggcgcacggcctttctggttctggccgctctggcgttcgccaaggcactgttgctgacggtctatctgccgaagacggctgccaggcagaacccggtatcgatccttaagcagttcggcatcttgcgcagccggatgatgcaggggcacgtgctgctctcggtgctggtgttcagcggcatgttcacggcctatacctatctggcggacatgctcgagcgtcttgccggtttcgacggcgctctggtgggctggtgcctgatgggctttggcgctgtcggcttgctgggcaactcgctgggcgggcgcatggtcgaccgccatccgttgattgccagcctggtgttctgcgcattcatggtggttggcatggtcgcggtggtgccgagcatccattcggtggtggccttgtcactcgcgctggcggtctggggtatcacccaggcggccttgtttctggtcagtcatgtgcggttgatcaaggccgcgccgcaagcgcctgcgttcgcggcgtcactgaacatcgctggtgccaacctcggcattggcatcggcgcggtgatcggcggcagggtcattgatcacctggggctgggcaacgtcggttttgccgctgcgggcatcattgtgctggcgattgtgctggcgctgctgttgatcaagcgtgatccggggccgctcccggcttag

SEQ ID NO: 1096 - protein, 384 aa, Pseudomonas syringae pv. syringae B728a
MLLPILLLSAAGFTVLTTEFVIVGLLPAVARDLNVTVSQAGLLVTLFAFTVAAFGPFLTAYFSRFERKRLFVSILVLFGFANVLAALAPNIAVMGIARLIPALGLPVFWALASETAVDIVGPQFAGRAIARIGFGIVCATVFGIPIGTLISDAFGWRTAFLVLAALAFAKALLLTVYLPKTAARQNPVSILKQFGILRSRMMQGHVLLSVLVFSGMFTAYTYLADMLERLAGFDGALVGWCLMGFGAVGLLGNSLGGRMVDRHPLIASLVFCAFMVVGMVAVVPSIHSVVALSLALAVWGITQAALFLVSHVRLIKAAPQAPAFAASLNIAGANLGIGIGAVIGGRVIDHLGLGNVGFAAAGIIVLAIVLALLLIKRDPGPLPA

SEQ ID NO: 1097 - DNA, 1206 bp, Pseudomonas syringae pv. syringae B728a
  CDS (1)..(1206): transl_table=11
atgactacagatgagaagcagggcaaaacactccctctgggggcgttgctggcgctggcaatgacggggttcatctgcatcgtcaccgagaccttgcctgcgggtttgttgccgcagatcgccgatgggctggacgtgtccgcatcatttgccgggcagatggtgactgtttatgcgctgggttcattgctggccgccattccactgacgatcgcgacgcaaagctggcggcgcagaacggtcttgctggtgacgattatcggctttctggttttcaacagcgtcaccgcgttgtcgtccagttacggactgaccctgatcgcaaggtttttcgcaggcgtctcggcgggcctggcgtggagcctcatcgccggttacgcacggcgcatggtggtcccgcaactgcaagggcgcgcattggccgtggcgatggtcggcacgcctatcgccttgtcgctgggcgtaccgctgggaacctggcttggcgggttcatgggctggcgcatggcgtttggcctgatgtccgggatgaccgtgctgttgatcatctgggtgctggtcaaagtgccggactatccgggcaagtcctcctcacagcgcatggcgttacgtcaggtctttttcacgcccggcgtacgctcggtgctgggcgtggttttcacctggatgctggctcataacctgctttacacctacgtcgctccattcgtttccgcggcggggctggcgaatgatgtggacctggtattgctggcattcggggtcgccgcactggctggcatctgggttacgggacggttggttgatcgccatctgcgcaagacggtgcttgccagcctggcaaccttcgcagcggtgtcagtgtttttcggcgtgttctccggctctgcaacggccatttacatcggtgcttttatctggggcttgaccttcggtggcgccgccacactgctgcaaaccgcgctcgccgattcggcaggcgcgggcgcagatgtggcgctttcgatgaacgtcgtggtctggaacagcgcgatcgcaggcggcgggttactgggtggcgtgttgcttggccaatggggtgcgggatcctttccttgggtcttgctgatgctgttgttgctaagtctggtgatcgcactgcgcgcaggtgctcatggttttgcacggggcagccggctggaccgggagcatgttttggctgggtga

SEQ ID NO: 1098 - protein, 401 aa, Pseudomonas syringae pv. syringae B728a
MTTDEKQGKTLPLGALLALAMTGFICIVTETLPAGLLPQIADGLDVSASFAGQMVTVYALGSLLAAIPLTIATQSWRRRTVLLVTIIGFLVFNSVTALSSSYGLTLIARFFAGVSAGLAWSLIAGYARRMVVPQLQGRALAVAMVGTPIALSLGVPLGTWLGGFMGWRMAFGLMSGMTVLLIIWVLVKVPDYPGKSSSQRMALRQVFFTPGVRSVLGVVFTWMLAHNLLYTYVAPFVSAAGLANDVDLVLLAFGVAALAGIWVTGRLVDRHLRKTVLASLATFAAVSVFFGVFSGSATAIYIGAFIWGLTFGGAATLLQTALADSAGAGADVALSMNVVVWNSAIAGGGLLGGVLLGQWGAGSFPWVLLMLLLLSLVIALRAGAHGFARGSRLDREHVLAG

SEQ ID NO: 1099 - DNA, 1203 bp, Pseudomonas syringae pv. syringae B728a
  CDS (1)..(1203): transl_table=11
atgccttctctggaaaccactgcctccggcgctcgcagcgcaagctcgaccggcgccggcttgtccatcgcgattctggccctggccggcttcgtgatcgtcaccactgaatttctcatcatcggtctgttgccttcgatggcccgtgatctgggaatctccatctctactgccggtttgctggtgacgctgttcgccttcacggtgatgctctttggcccaccgctgacggccatgctttcgcacctggaccgcaagcgcacgttcatcgtcattctgctgatctttgccgcctccaacgcactggcggcggtatcgagcaatatctgggtgctggcgctggcacggttcattccggcactggccttgccagtgttctggggcaccgccagtgaaacggcaagcctgctggccggaccgaagcgcgctggcaaggccgttgcgcaggtctacctcggtatctcggctgccatgctgttcggtatcccgctgggtacggtattcgccgatgccgtgggttggcgcggggcattctgggctctgacgttgctgtcagcgttgatggctttgttgctggcactgtcgatgccgcgtatcgaacctaccgcaaaggtcggcctcgcggagcaggcaaaaattcttcgggatccgtttttcctcgccaacctgctgctgtccatcctgctgttcacggccatgttcggcgcctatacctatctggctgatacgctggaacgcatcgcgggcatcgaatcggctcaagtgggttggtggttgatgggcttcggcgcggtcggcctgatcggcaatgccctgggtggacgttatgtggaccgcagcccgctcggctcgaccatggcgtttgcgctgctgctcgcactgggcatgaccgcaagcgtacccgccgcaggctccatgccgctgcttgccgtggtactggtgatttggggcattgcgcacacggcgttgtttccgatctgccagatcagggtgatgaaagcagcgcctcaggcccaggcactggccgggaccctgaatgtctcggcagccaatgccggcatcggtctgggatcgatcatcggaggccttaccatcgagcacctgggcctgggtgccgtagggtatgtcgcagctgttgttgcgctgctgtccatcggcgttgcatggatgaccagcatgcagaaaaacagggcaccgttgtaa

SEQ ID NO: 1100 - protein, 400 aa, Pseudomonas syringae pv. syringae B728a
MPSLETTASGARSASSTGAGLSIAILALAGFVIVTTEFLIIGLLPSMARDLGISISTAGLLVTLFAFTVMLFGPPLTAMLSHLDRKRTFIVILLIFAASNALAAVSSNIWVLALARFIPALALPVFWGTASETASLLAGPKRAGKAVAQVYLGISAAMLFGIPLGTVFADAVGWRGAFWALTLLSALMALLLALSMPRIEPTAKVGLAEQAKILRDPFFLANLLLSILLFTAMFGAYTYLADTLERIAGIESAQVGWWLMGFGAVGLIGNALGGRYVDRSPLGSTMAFALLLALGMTASVPAAGSMPLLAVVLVIWGIAHTALFPICQIRVMKAAPQAQALAGTLNVSAANAGIGLGSIIGGLTIEHLGLGAVGYVAAVVALLSIGVAWMTSMQKNRAPL

SEQ ID NO: 1101 - DNA, 1263 bp, Pseudomonas syringae pv. syringae B728a
  CDS (1)..(1263): transl_table=11
atgcaagcatttgattcaactctgaagcagtccgaaataactactcatccgcccgcatggggcgcggtgttttcgatggcgctgtgtgtggtggtgctgattgcgtcggagttcatgccggtcagcctgctgacacccatcgcgcaggatctgggcatcagtcaggggcaggccgggcaggcgatttcgatctccggcttttttgccgtgctgaccagtctgctgaacacgctgctgaccgggcatctggatcgcaagcctgtcctgctgggcttcagcctgttgttgctggtgtctggcgtgatcgtcacgctggcctccaacggctggttgttcatgacgggccgtgcattgctcgggatcgccattggcgggttctggtcgatgtcgaccgctaccgtgatgaagctggtgccgaagcaatcggtcgccaagggcctggcattgatcaacggcggcaatgcgctggcggcgacggtcgccgcgccattgggcagcttcatgggccaatacatcggctggcgcggggcgtttttcctggtcatcccgctcgcggcgctggcgtttgcctggcagtggctgagcctgccggccatgcgcagtcagccgaacaaccgggcacgcaatccgttccgcctgctgcgtaacccgcaagtggccgtcggcatgagcgcgatcctgttgctgttcatgggccagttcgccgtcttcacctacctgcgcccgtttctggaagagatcaccggggtcagcatcaacacgttgtccctgatgcttttggcgctgggggccagcgggctggtcggcacctacctgatcggcaggctgctgcacaaaggcctgtatgcctgcctgatcgccattccgctgctgatggcggtgctggccgtggcgctcactggcctgggtcattcacctcagtccgtcgccattgtgcttgccgtctggggcctgattgccacgcctgcaccggtcgcctggggcctgtggttgagccgcacgctgcccgacgatgccgaggcaggcggcggcctgatggtggcgaccattcaattggcgatcaccgccggggccggcatcggcggcgcgctgttcgacagcctcggttggtggagcccgttcgcattcggtggcgtgttactggcgtgttcggccgcgctggcctggacggcacgcgacaacgcgttactgcaggaaaaaaacaccggtcagggccgggcagataaacgcgggtcaatttctcaacgaggtaacacgccatga

SEQ ID NO: 1102 - protein, 420 aa, Pseudomonas syringae pv. syringae B728a
MQAFDSTLKQSEITTHPPAWGAVFSMALCVVVLIASEFMPVSLLTPIAQDLGISQGQAGQAISISGFFAVLTSLLNTLLTGHLDRKPVLLGFSLLLLVSGVIVTLASNGWLFMTGRALLGIAIGGFWSMSTATVMKLVPKQSVAKGLALINGGNALAATVAAPLGSFMGQYIGWRGAFFLVIPLAALAFAWQWLSLPAMRSQPNNRARNPFRLLRNPQVAVGMSAILLLFMGQFAVFTYLRPFLEEITGVSINTLSLMLLALGASGLVGTYLIGRLLHKGLYACLIAIPLLMAVLAVALTGLGHSPQSVAIVLAVWGLIATPAPVAWGLWLSRTLPDDAEAGGGLMVATIQLAITAGAGIGGALFDSLGWWSPFAFGGVLLACSAALAWTARDNALLQEKNTGQGRADKRGSISQRGNTP

SEQ ID NO: 1103 - DNA, 1167 bp, Pseudomonas syringae pv. syringae B728a
  CDS (1)..(1167): transl_table=11
gtgcctctttcgctactcattctggccctgagcgccttcgccatcggcaccaccgaattcgtcatcatgggcctgctgcctgatgtggcggctgaccttggcgtatcgatccccggtgccggctggctggtgaccggctatgcgctgggtgtcgccgtcggtgcgccgttcatggccatggccacggcaaaactgccgcgcaaggctgcgctggtcacgctgatggggattttcatcattggcaatctgctctgtgcgctggccagtgactacaacgtcctgatgttcgcccgcgtggtgactgcgctgtgtcacggtgcgttctttggcatcggctcggtggttgccgcaggtctggtgcccgccaaccggcgtgcctcagcggtggccttgatgttcaccggcctgaccctggccaacgtactgggcgtgccgctgggcactgcgctgggtcaatacgcaggctggcgctcgaccttctgggctgtcacggtcatcggcgtgattgcgctgatcggcctgatccgcttcctgccaaccaaccgcaatgaagaaaagctcgatatgcgcgctgaactgggcgctctccgcggtgccggcatctggctgtcgctgaccatgactgcgctgttctcggcgtccatgttcaccctgttcacttacattgccccactgctcggcgaagtcaccggtgtatcgcccaacggcgtgacctggaccctgctgctcatcggtctgggcctgaccgccggcaacgtgatcggcggcaagatggccgaccgccgcctgtcatccacgctgattggcgtgttcgtctcgatggcggtgatctccaccatactcagctggaccagcgccgcgctgatcccgactgaaatcaccctgttcctctgggcagtcgcggccttcgctgccgtcccggcgctgcagatcaacgtggtgaccttcggtaaggcggcacccaacctggtttcaaccttgaacatcggcgccttcaacgtcggcaacgcactcggcgcctgggtcggtggcagcgtcatcgcccacggtctgggcctgaccagcgtaccgctggcggcagccgtactggcagtgctggcgctgctgatcaccctgattactttccgtcagaccggcaatccggatctggcacacgctacgcattga

SEQ ID NO: 1104 - protein, 388 aa, Pseudomonas syringae pv. syringae B728a
MPLSLLILALSAFAIGTTEFVIMGLLPDVAADLGVSIPGAGWLVTGYALGVAVGAPFMAMATAKLPRKAALVTLMGIFIIGNLLCALASDYNVLMFARVVTALCHGAFFGIGSVVAAGLVPANRRASAVALMFTGLTLANVLGVPLGTALGQYAGWRSTFWAVTVIGVIALIGLIRFLPTNRNEEKLDMRAELGALRGAGIWLSLTMTALFSASMFTLFTYIAPLLGEVTGVSPNGVTWTLLLIGLGLTAGNVIGGKMADRRLSSTLIGVFVSMAVISTILSWTSAALIPTEITLFLWAVAAFAAVPALQINVVTFGKAAPNLVSTLNIGAFNVGNALGAWVGGSVIAHGLGLTSVPLAAAVLAVLALLITLITFRQTGNPDLAHATH

SEQ ID NO: 1105 - DNA, 1197 bp, Xanthomonas campestris pv. campestris str. 8004
  CDS (1)..(1197): transl_table=11
atgtcttccgcatccactgcttccgccgccgtgcgcgctgcgcccagcgccagccgccagacctggagtgcggtgggctcgttgtcgttgtgcgtagcgttgttgatcgcctccgagttcatgccggtcagcctgctcacgccgatcgcggccgatctgcatgccaccgccggcatggccgggcaggcgatctccatctcggggttgtttgcggtgctggccagcctgctcatcgcgccacttacgtcgcgcttcaatcgccggcatgtgctgatcagcctgagcgcggtgatgttgctgtcattgttgctgatcgccaatgcgcattcgttcggcatgttgatggcggcgcgtgcgctgctggggatcaccattggtgggttctgggcgctggccaccgccacggtgatgcgcatgatgccggaagaggcggtacccaaggcgctgggcatcgtctacatcggcaacgcggtggcgaccgcatttgccgctccgttgggtagctatctgggcgcggtgatcggctggcgtggcgtgttctggggcatggtgccgttggtggcgctgaccatcgcctggcagtggcacagcctgccatccttgcctgcgcagggcggcacctcgctgggcagcatcgccgcattgctcaagcgtcgctacgtggcgcgcgcgatgctggcgatcatgttgggctttgccggtgcgttctctgcgtttacctatttccgtccgttcctggagaacgccgcgcacgtggatgtatcgcacttgtcgttgctgctgctcgggctgggcctggccggttttgccggcacctatgccgccacggccctgctgccgaagcgcttgttcagtctgctcacggtgctgccggtggcgttgggcgtggccaccctggcgatgctgctgaccagccatctgctgtggggcgtggcaatcgcgatgattgcgtggggcacactcaattcggcattgccggtggcgtggtccacctggctgagccgctgcatcaaggacgcaccggaagccggtggcggcctgatggtggccgccatccagctggccatcatgctcggtggtgcactgggcggcgtgctgctggatcacgtctccatcgccgccaccttcatcggtgccagcgtgctgctgctggctgcatcgctggtggccggtaatggcgcgcggttgcagccttga

SEQ ID NO: 1106 - protein, 398 aa, Xanthomonas campestris pv. campestris str. 8004
MSSASTASAAVRAAPSASRQTWSAVGSLSLCVALLIASEFMPVSLLTPIAADLHATAGMAGQAISISGLFAVLASLLIAPLTSRFNRRHVLISLSAVMLLSLLLIANAHSFGMLMAARALLGITIGGFWALATATVMRMMPEEAVPKALGIVYIGNAVATAFAAPLGSYLGAVIGWRGVFWGMVPLVALTIAWQWHSLPSLPAQGGTSLGSIAALLKRRYVARAMLAIMLGFAGAFSAFTYFRPFLENAAHVDVSHLSLLLLGLGLAGFAGTYAATALLPKRLFSLLTVLPVALGVATLAMLLTSHLLWGVAIAMIAWGTLNSALPVAWSTWLSRCIKDAPEAGGGLMVAAIQLAIMLGGALGGVLLDHVSIAATFIGASVLLLAASLVAGNGARLQP

SEQ ID NO: 1107 - DNA, 1209 bp, Xanthomonas campestris pv. campestris str. 8004
  CDS (1)..(1209): transl_table=11
atgtctgctcctgctacgtcccgcctgccgcccgcactgttggccctgaccatcggtgcgttcggcatcggcaccaccgaattcgtgatcatggggttgctgcagcaagtggctgccgacctgggcgtgtcgctgaccgcggcgggcctgttgatcagcggctacgcgctgggcgtgttcgtgggcgcgccggtactcacgttggccagtgcccgctggccgcgcaaggccgtgctggtggcgctgatgctggtgttcacgctgggcaatattgcctgtgcgctggcgccggactacaccagcctgatgatcgcgcgggtgctgacctcgctggcgcacggcaccttcttcggtgttggcgcggtggtggcgacctcgttggtcgcgcccgaacgccgcgcctcggccatctcgttgatgttcgccggcctgaccgtggcgaccctgctcggcgtgccggccggtgcgtggctgggcctgcagctgggctggcgcgccaccttctgggcggtggcggtgatcggcgtgctggccaccgctgcggtggcgctgtgggtgcctgccgcggctggggccgcgccgccggtgccgtggcgccaggaggtgcgcgtgcttgcgcgcggccaggtgttgctggccctggcgatgacggtgatgggctatgccggcgtgttcgcggtgttcacctatatccagccgctgctggtgcaggtgaccggctttgcgcaggcggcggtgtcgccggtgctgctggtgtttggcgtgggcatgatcgtgggcaacttgctgggcgggcgcctggccgatcgccggccgaccgcgaccttgttgggcacgttggctgcgctggtggtggtgctgggcgccatgggcctggtgctgcacagcaagccggccatgatcgcctttgtcggcctgctcggcgtggcggcgtttgccacggtggcgccgctgcaattgcgcgtgctcgagcatgcccacggcgccgggcagaacctggcctccagcttgaatatcgccgccttcaatctgggcaatgcgctcggcgcctggctgggcggggtggtgatcgcctccggtgccggcctggtcgccacgccgtgggtggcggcggtactcacagcgctcggcttgggcattgcgctatggagcgtgcagctgcagcgccgccaggccgcgctgccggccggctgcgtgcaagggcgctga

SEQ ID NO: 1108 - protein, 402 aa, Xanthomonas campestris pv. campestris str. 8004
MSAPATSRLPPALLALTIGAFGIGTTEFVIMGLLQQVAADLGVSLTAAGLLISGYALGVFVGAPVLTLASARWPRKAVLVALMLVFTLGNIACALAPDYTSLMIARVLTSLAHGTFFGVGAVVATSLVAPERRASAISLMFAGLTVATLLGVPAGAWLGLQLGWRATFWAVAVIGVLATAAVALWVPAAAGAAPPVPWRQEVRVLARGQVLLALAMTVMGYAGVFAVFTYIQPLLVQVTGFAQAAVSPVLLVFGVGMIVGNLLGGRLADRRPTATLLGTLAALVVVLGAMGLVLHSKPAMIAFVGLLGVAAFATVAPLQLRVLEHAHGAGQNLASSLNIAAFNLGNALGAWLGGVVIASGAGLVATPWVAAVLTALGLGIALWSVQLQRRQAALPAGCVQGR

SEQ ID NO: 1109 - DNA, 1179 bp, Xanthomonas campestris pv. campestris str. 8004
  CDS (1)..(1179): transl_table=11
gtgcctcgccgcgactacgtgctgatcttgctggcactggcgatgggcgggtttgccatcggcatcagcgagttctccacgatgggcctgatgacgcagattgcgcacgggctgcacatcagcgagccgcaggtggggcatgtgatcagcgcgtacgccctgggtgtggtggtgggtgcgccgctgctggcgatcctgggtgcgcgctggccgcgacgcaccttgttgctgctgctgatggtgttctatgcgctgggcaacctcgccagcgcattggcgccgagctaccacaccatgttgctgtgccgcttcattgccggccttccgcatggggcgtatttcggtgtggcctcgttggtggcggcgtcgatcagcccgcccaaccagcgcgccactgcggtggggcgcgtgttgctgggcctgagcgtggcgctgctggtcggcaacccgttggccacctggcttggccagagcctgagctggcgttgggcgtatgcggcggtgtcggtgattgcgttgggcacggtcgcggcagttgcggtgttgctgccaccggcaccggacgaaccgcgccagcaacccctgcgcgagatgcgcgcgttcaatcagccgcaggtgtggtttgcgctggcaattggcgcggtaggtttttccggcatgttctgcgtcttcagttatctggcgcccacgctcaccgccgtgaccggtgtggcgcctgcgcgcattccgctggccatggcggccttcggcgtaggcggcgtgctcggcagcattcttggcgggtggttgttcgaccgcatgcagttccgcgcggtgccggtgttgctggtgtggtcgatcgtggtgatgttgaccttcccgttggcggcgttgtcgagcagctgggtgttcgtgtcgatcgtggcggtcggcaccatgggcgcactggcaccggccctgcagacccggttgatggacgtggccgcagaagcgcaaaccctggccgccgcgtccaaccatgccgcgttcaacaccgccaacgcgttggggccgtggctggggggcatggcgatcacggcggggtggggctggacctccaccggctatgtcggtgcggccaccgcactgggcggcttgttggtctacagctgcgcggtgtggcaggagcgtcgccagcgcgcgctggcagccagctactaa

SEQ ID NO: 1110 - protein, 392 aa, Xanthomonas campestris pv. campestris str. 8004
MPRRDYVLILLALAMGGFAIGISEFSTMGLMTQIAHGLHISEPQVGHVISAYALGVVVGAPLLAILGARWPRRTLLLLLMVFYALGNLASALAPSYHTMLLCRFIAGLPHGAYFGVASLVAASISPPNQRATAVGRVLLGLSVALLVGNPLATWLGQSLSWRWAYAAVSVIALGTVAAVAVLLPPAPDEPRQQPLREMRAFNQPQVWFALAIGAVGFSGMFCVFSYLAPTLTAVTGVAPARIPLAMAAFGVGGVLGSILGGWLFDRMQFRAVPVLLVWSIVVMLTFPLAALSSSWVFVSIVAVGTMGALAPALQTRLMDVAAEAQTLAAASNHAAFNTANALGPWLGGMAITAGWGWTSTGYVGAATALGGLLVYSCAVWQERRQRALAASY

SEQ ID NO: 1111 - DNA, 1209 bp, Haemophilus influenzae 86-028NP
  CDS (1)..(1209): transl_table=11
atgtcgttatatttaaaagctgaaaaaatccaatcatggcgcgtgcttattatggcttgcgcaggatttatttttaatactacagaatttgtacccgttgcaatgttaagcgatattgcacaaagttttgatatgcaaactgctgatactggtttaatgatgacagtttatgcttggacggtgctaattatgtctttaccagcgatgcttgccacgggcaatatggaacgtaaaagtctgcttattaagcttttcattatatttattgttgggcatattttattggtcattgcatggaatttctggatattacttctcgctcgaatgtgtattgcattagcccattcggtgttttggtcaattactgcctcacttgtgatgcgcatctcacctaaacacaagaaaactcaagcattaggaatgctcgctattggcaccgcacttgccaccatcttaggcttaccgattgggagaatcgtcggacagcttgtcggttggcgagtcacttttggcattattgcggtactggcattatccatcatgtttttaattattcgattattgccaaatttacccagtaaaaatgctggctctattgcaagtttacccttgcttgcgaaacgcccattattactttggctttacgtaacaacggcaatcgtcatttcagcacattttactgcttatacttatatcgaaccatttatgattgatgtcgggcatttagatccaaattttgccacggctgtattattagtttttggtttctcaggcattgcagcaagcctattatttaacagattataccgatttgctcccacaaaatttattgttgtttcgatgagtttattgatgttctctctattgctcctgttattttcaactgaagcaataatagcaatgttcagccttgtgtttatttgggggattggcatttcttgtatcggactatctctacaaatgcgcgtactaaaacttgcgccagatgcaaccgatgttgccacagctatttactcgggcattttcaatgcaggaattggcgcaggcgcattatttggaaaccttgcgacaacctatttaggattaaatgaaattggttatacaggcgcagcattaggtttaatcggtttcatcatttttattacaacgcacttaaaatatcgccatacctttcttctgcaaaacaataaaaaaataaccgcactttag

SEQ ID NO: 1112 - protein, 402 aa, Haemophilus influenzae 86-028NP
MSLYLKAEKIQSWRVLIMACAGFIFNTTEFVPVAMLSDIAQSFDMQTADTGLMMTVYAWTVLIMSLPAMLATGNMERKSLLIKLFIIFIVGHILLVIAWNFWILLLARMCIALAHSVFWSITASLVMRISPKHKKTQALGMLAIGTALATILGLPIGRIVGQLVGWRVTFGIIAVLALSIMFLIIRLLPNLPSKNAGSIASLPLLAKRPLLLWLYVTTAIVISAHFTAYTYIEPFMIDVGHLDPNFATAVLLVFGFSGIAASLLFNRLYRFAPTKFIVVSMSLLMFSLLLLLFSTEAIIAMFSLVFIWGIGISCIGLSLQMRVLKLAPDATDVATAIYSGIFNAGIGAGALFGNLATTYLGLNEIGYTGAALGLIGFIIFITTHLKYRHTFLLQNNKKITAL

SEQ ID NO: 1113 - DNA, 1176 bp, Corynebacterium jeikeium K411
  CDS (1)..(1176): transl_table=11
atgccttttgccctctacatgcttgccctggcggtcttcgtcatgggcacttcagaattcatgctcgcgggattgctccccgcgatcgcgaccgaacttgacgtctcggtcggcactgcgggcctgctgacctccgcattcgcagtcggtatggtcgtcggcgcgccagtgatggcggcattcgctcgccgttggccaccgcggctcacattgatcgtttgccttctcgtgttcgcgggaagccacgtcatcggagcgatgacaccagtgttctctctcctgctcatcacccgggtgctcagcgctctcgcaaacacaggattcctcgccgtagcactgagcacggccactaccctcgtgccagcgaaccagaaggggcgtgcactgtcgatcctgctctccggcacgacgatcgcaaccgtcgtgggcgtccccgccggggcactgctcggcacagcgctgggctggcgaacgacgttctgggcgatcgccatcctctgtattcccgcggccgttggagtcattcgtggcgtcacgaacaatgttggtcggagcgagactagcgcgacctcaccaaggctccgtgtcgagctcagccagttggcgacgccgcggctcatcctggccatggcactcggagcgctgatcaacggagggacctttgcggcattcaccttcctggcacccatcgtgaccgagaccgcgggcttggccgaagcgtgggtgtccgtcgcgctggtgatgttcggcatcggatcgttccttggcgtcacgatcgcaggacgactatcagatcaacgacctggcctcgtgctcgcagtcggcggaccgctattgctgacaggctggatcgtgttggcagtggtcgcatctcatcccgttgcgcttatcgtcctcgtcctcgttcagggattcctgtcgttcggcgtcggcagtactctgatcacgcgtgtgctgtatgcagcatcgggtgcgccaacgatgggcggttcgtacgcaaccgcagcattgaatatcggagctgcagcggggcccgtgcttggtgcgctcgggctcgcgaccgggctggggctgctcgcgccggtttgggtcgcttcggtgctgacagcgatcgctctcgtcatcatgcttctcaccagacgcgcgcttacgaagaccgcggcggaggccaattga

SEQ ID NO: 1114 - protein, 391 aa, Corynebacterium jeikeium K411
MPFALYMLALAVFVMGTSEFMLAGLLPAIATELDVSVGTAGLLTSAFAVGMVVGAPVMAAFARRWPPRLTLIVCLLVFAGSHVIGAMTPVFSLLLITRVLSALANTGFLAVALSTATTLVPANQKGRALSILLSGTTIATVVGVPAGALLGTALGWRTTFWAIAILCIPAAVGVIRGVTNNVGRSETSATSPRLRVELSQLATPRLILAMALGALINGGTFAAFTFLAPIVTETAGLAEAWVSVALVMFGIGSFLGVTIAGRLSDQRPGLVLAVGGPLLLTGWIVLAVVASHPVALIVLVLVQGFLSFGVGSTLITRVLYAASGAPTMGGSYATAALNIGAAAGPVLGALGLATGLGLLAPVWVASVLTAIALVIMLLTRRALTKTAAEAN

SEQ ID NO: 1115 - DNA, 1245 bp, Corynebacterium jeikeium K411
  CDS (1)..(1245): transl_table=11
atgcccgtgagcgaaacgaaacttacaaagttgccctcccgccgtccagttccgcgccagactgagatctccactcgccatcgttacatcgccatggtggcgatggccctgggtggattcggcatcggcaccacggagtttgtggcgatgggtctgctgaaccttatcgcggaggacttctccatctcggaggaccaagccggccacgtgatttccgcttacgcgctgggtgtagtcatcggcgctccgctgattaccaccctcacaggttccatcccgcgccgccgcttggccttgctgttgatgggggctttcgtgatcggcaacggtctgagtgtcttcgcacactcctatgggatcctgatgctttcccgtttcatagcgggcttcccgcacggcgcgtacttctccgtcactgcgctgattgccgcgtcaatggctccgaacggcaagcgcggtaaagccgtggcattgacgggcatggggctttccatcgccacggtcatcggcgtgccaattgcgcagtggctgggttccactttcggctggaacgcggcctttgcgatggtcgcggccatcggtgtgatcacctttgtcgctctgtggttcaccgtgccgcacatgacgttgatgccgcgcacgaagcctctgacagagcttggcgcattggtgaactcgcaggtgctcatgaccctcgccatcggcaccgtcggtttcggcggtatgttcgcggtctacacctatatctcttggacactgacggagaacgctggcttcaacggcagcctcatctggattccgctgatggtctacggcatcggcatggtcatcggcacctatatcggtggtgtgctggccgaccggaacttggagtacgcgatccttggcaccttgctgtctctggtcgtcgtcctctctgccttttacttcctgtcccacaacgcggtggcgggcatcatcaacttcggcgtgatcggtttgttgggctccaccctggtgccgaacctgcagacccgcctgatggatgtagcgggcgaggcgcagaccctcgccgcggcactgaatcactcagcgctgaacatggctaacgcggcgggagcggcggttggcggtgccgttatcgccgctggttatggttattccaccccggcgctcgccggtgcggctatggccgcctgtggcgcgctgctgtggattcctgcctactatttgcgacgccgtcagctcgcggctgcccgggcctag

SEQ ID NO: 1116 - protein, 414 aa, Corynebacterium jeikeium K411
MPVSETKLTKLPSRRPVPRQTEISTRHRYIAMVAMALGGFGIGTTEFVAMGLLNLIAEDFSISEDQAGHVISAYALGVVIGAPLITTLTGSIPRRRLALLLMGAFVIGNGLSVFAHSYGILMLSRFIAGFPHGAYFSVTALIAASMAPNGKRGKAVALTGMGLSIATVIGVPIAQWLGSTFGWNAAFAMVAAIGVITFVALWFTVPHMTLMPRTKPLTELGALVNSQVLMTLAIGTVGFGGMFAVYTYISWTLTENAGFNGSLIWIPLMVYGIGMVIGTYIGGVLADRNLEYAILGTLLSLVVVLSAFYFLSHNAVAGIINFGVIGLLGSTLVPNLQTRLMDVAGEAQTLAAALNHSALNMANAAGAAVGGAVIAAGYGYSTPALAGAAMAACGALLWIPAYYLRRRQLAAARA

SEQ ID NO: 1117 - DNA, 1170 bp, Staphylococcus haemolyticus JCSC1435
  CDS (1)..(1170): transl_table=11
atgaaaggtaacagaatgatgtttttcatattcatgttaggtacatttacagtcggtatggcagaatatgttgttacaggattattaactcaaatcgcaagtgatatgaaagtgtctatttcaagtgcaggtttattaattagtgtgtatgctgtgagtgttgcattaattggaccattcatgcgtatatttacaatgaatgtacgtgccaaacgcttattacccattttggttgccatatttataggtagtaatgtggtagggatgttggcacccaattttcaagtattgctgttatcaagattgttgtcagcttcaatgcacgcaccattctttggcgtgtgtatgagtgtggctgcagccgttgcacctcgtggtaaacaaccgcaagccatcgcattagtccaagcaggattaacaattgcggttatgattggtgtgccattcggatcattcttaggtggctttgcgaattggagagctgtatttggcgttatgattggtttagcgattattacaatgctaggtatgttgaagtttgtaccagatgtatctctaagtacagaatctaatgtaaaaaatgaattaaaagtatttaaaaacccacacattttaatcgtgatgtctattatcgtctttggttattctggcgtattcacaacatacacgtttatggagccaatgatacatgacttcgcaccttttaaaatagtagggttaactatttgtctatttatgtttggtttaggtggtgtgttaggtaacttaattacaggaaatgtgccagaacctaaactaactaaatatctattctatacgtttttattattatttttaactatcgtactatttgtcacttttgtgcataatgcgattttagcaattattatatgtttcttatttggatttggaacatttggtacgacaccattattaaatagtaagattatattaagtgccaaagaagcaccattacttgcgagtacattagcggcgtctatttttaatgtggcaaatttcttaggtgccattattggttcaattttattatcaatcggtttaccttatttaatgattacctttgtatcaggggggattattattctaggtattttaattaatgcagttaattatttttatgaaaagaaacatttccaatttgaaaaatga

SEQ ID NO: 1118 - protein, 389 aa, Staphylococcus haemolyticus JCSC1435
MKGNRMMFFIFMLGTFTVGMAEYVVTGLLTQIASDMKVSISSAGLLISVYAVSVALIGPFMRIFTMNVRAKRLLPILVAIFIGSNVVGMLAPNFQVLLLSRLLSASMHAPFFGVCMSVAAAVAPRGKQPQAIALVQAGLTIAVMIGVPFGSFLGGFANWRAVFGVMIGLAIITMLGMLKFVPDVSLSTESNVKNELKVFKNPHILIVMSIIVFGYSGVFTTYTFMEPMIHDFAPFKIVGLTICLFMFGLGGVLGNLITGNVPEPKLTKYLFYTFLLLFLTIVLFVTFVHNAILAIIICFLFGFGTFGTTPLLNSKIILSAKEAPLLASTLAASIFNVANFLGAIIGSILLSIGLPYLMITFVSGGIIILGILINAVNYFYEKKHFQFEK

SEQ ID NO: 1119 - DNA, 1176 bp, Staphylococcus haemolyticus JCSC1435
  CDS (1)..(1176): transl_table=11
atgtctgttatgcggatagcgacatttatcatcagtgtatttatagtaggtatggttgaaatgatggtcgctggtatcatgaatttaatgagtgatgacttaggtgtttcagaagcaataattggacaacttgtcacactttatgcattaacctttgcgatatgtggacctatacttgttaaattaacaaatcgatatcctgcacgtcctgtattattatggactttagtcatctttgtagtaggtaatggaatcatcgctgtggcgcctaactttacgattctagtcattggacgtatattatcttcagctgcagcttcattaatcattgttaaagtcttagcgctcacagcaatgctaacgatacctaagaacagaggtaagatgattggcgttgtctatactggattcagtggggcaaatgtctttggtgtgcccattggtacgatgattggtgattggattggttggcgtttcacattcgtatttattattgttattagtcttattgccggcttattaatgttgaaatatcttccaactactacggaactcaatcaagccaatagaatgtataataacgtttccgatgataatcaagtcacatctcatattgttcgaccagttgagatcattaagtttttagcaattacattgcttattctaatcgctaattcagtgacgtttgtatttatcaatccacttattttagaaaatggtcactccatgggctatgtatcattagcactactcgttaatggcgttgccggtgttgttggtacatcaatgggtggtgtactagctgataaattgactagtaagcgatggttaattattgctttctcagtatttattgtcgtgatgctagccatcaatttaattttatctacaacagtactattattagttggactctttatttggaatatcgtgcaatggagtacgaaccctgcgatacaaagtggtattatcgaacatgttgaaggtgacacaagtcaagttatgagttggaatatgtcttgtcttaatgcaggtattggtttaggtggtattatcggtggccttgttgtttcaaatatgaatgttgaagcggtcacgtttgtaagtgcctttataggtttattaggactgattattgtaattacattaaagaacgtacattatgctaaaaattaa

SEQ ID NO: 1120 - protein, 391 aa, Staphylococcus haemolyticus JCSC1435
MSVMRIATFIISVFIVGMVEMMVAGIMNLMSDDLGVSEAIIGQLVTLYALTFAICGPILVKLTNRYPARPVLLWTLVIFVVGNGIIAVAPNFTILVIGRILSSAAASLIIVKVLALTAMLTIPKNRGKMIGVVYTGFSGANVFGVPIGTMIGDWIGWRFTFVFIIVISLIAGLLMLKYLPTTTELNQANRMYNNVSDDNQVTSHIVRPVEIIKFLAITLLILIANSVTFVFINPLILENGHSMGYVSLALLVNGVAGVVGTSMGGVLADKLTSKRWLIIAFSVFIVVMLAINLILSTTVLLLVGLFIWNIVQWSTNPAIQSGIIEHVEGDTSQVMSWNMSCLNAGIGLGGIIGGLVVSNMNVEAVTFVSAFIGLLGLIIVITLKNVHYAKN

SEQ ID NO: 1121 - DNA, 1167 bp, Pseudomonas fluorescens Pf-5
  CDS (1)..(1167): transl_table=11
atgcccctttcgcttctcatcctggccttgagtgccttcgccatcggtaccaccgagttcgtcatcatgggcctgctgcccgatgtggcggcggacctcggcgtgtcgattcccggcgccggctggctggtcaccggctacgcccttggggtggccatcggcgcgcccttcatggccctggccactgcccgcctgccccgcaaggcagccctggtggcgctgatgggaatcttcattgtcggcaacctgctgtgtgcactggccagtgattacaacgtgctgatgtttgcccgggtgatcaccgcgctgtgccatggtgccttctttggcatcggttcagtggtggccgccggcctggtgcccgccaacaagcgcgcttcggccgtggccctgatgttcaccggcctgaccctggccaacgtccttggcgtgcccctgggcaccgccctgggccaggccgccggctggcgctcgaccttctgggcggtgacggtcatcggcgtggtggcgctgatcggcctgctgcgcttcctgccggccaagcgcgacgaggaaaaactcgacatgcgtgcagagctggcggccctcaagggcgcgggtatctggctgtccctgagcatgaccgcgctgttcgccgcatcgatgttcaccctcttcacctacgttgcaccgctgctcggtgatgtcaccggtgtctcgcccaagggcgtgacctggaccctgctgctgatcggcctgggcctgaccctgggcaacatcatcggcggcaaactggcggacaagcgcctgggcgccaccctgatcggcgtgttcgcggccatggccgtggtctccaccgtactgacctggaccagcgtggcgctgatccccaccgagatcaccctgttcctctgggccaccgcttcgtttgccgcagtgccggcgttgcaggtcaacgtagtgaccttcggcaaggccgcaccgaacctggtttcgaccctgaacatcggcgccttcaacatcggcaatgccctgggtgcctgggtcggcggcagcgtcatcgcccacggcttcggcctgaccagcgtgccgttggcggctgcggccctggcgatcctggccctgctggtgacgctgattacctttcgccagggcggcaacgccgaactggctcctgcaacccactga

SEQ ID NO: 1122 - protein, 388 aa, Pseudomonas fluorescens Pf-5
MPLSLLILALSAFAIGTTEFVIMGLLPDVAADLGVSIPGAGWLVTGYALGVAIGAPFMALATARLPRKAALVALMGIFIVGNLLCALASDYNVLMFARVITALCHGAFFGIGSVVAAGLVPANKRASAVALMFTGLTLANVLGVPLGTALGQAAGWRSTFWAVTVIGVVALIGLLRFLPAKRDEEKLDMRAELAALKGAGIWLSLSMTALFAASMFTLFTYVAPLLGDVTGVSPKGVTWTLLLIGLGLTLGNIIGGKLADKRLGATLIGVFAAMAVVSTVLTWTSVALIPTEITLFLWATASFAAVPALQVNVVTFGKAAPNLVSTLNIGAFNIGNALGAWVGGSVIAHGFGLTSVPLAAAALAILALLVTLITFRQGGNAELAPATH

SEQ ID NO: 1123 - DNA, 1221 bp, Pseudomonas fluorescens Pf-5
  CDS (1)..(1221): transl_table=11
ttgtgtgagcattctttcatgaacatttgcgtacctttgccgaccgcctccagcaggctgccggtctggcgcctgctggcctttaccctggccggtttcatcgccatcgtcactgagacgctgcctgccgggctgttgccgcagatcagccagggcctgggcatcagcgaggccatggccgggcagttgatcagcctgtatgccctgggctcggtggcggcggcgattccgctgatcgccgccactcgcagttggcgccgtaggcccttgctgttgctggccatcggcggcctgttgctgttcaacagcctgaccgcgttgtcgacccactacctgctgaccctggccgcgcgctttgccgcgggcatggcggcggggctggtctggggcctgctggccggctatgcccggcgtctggtggtgcccgagttgcagggccgggccctggcggtggtgggcgtgggccagccgatcgcgctgtgcctgggggtgcccctgggggcctggctgggcacccgcatggattggccgcagatcttctgggggctgtcgctactggctctgctgctgtggttctgggtgcgcctggcagtgccggactaccccggccagccggcccaccagcgccagccgatcgcgcggatctttctcacccggggcctgccccaggcgctgctggtgatcttcgtgtggatcttggcccacaacattctctacacctatatcgcgccgttcctcgcgtccctgggcctggcggcctctctcgaccgggcgctgctggtgttcggcctggcctccctggtggggatctggttcaccgggctcggggtcgaccgctggctgcgcgggctgaccctgtgcagcctcgccggtttcgccctggcgtgcctgctgctggggatcgctgccagccagccctggctggcctggctcggcattggcgcctggggcctgaccttcggtggcgccccgaccttgctccagaccgccgtggcggatgtggccggggagggggcggatgtcgcgcaatcgatgctggtgaccatcttcaacctgggcattgcctgcgggggtatggtcggcggcctgctcttgcaacgctatggcgcggcgtcttttccctgggccatggccgccctggcgctggtgggcctgatgctggtctgggacgcgcgcagccatgccttcaagccgggtcagcgctctgcctgctgcgcctga

SEQ ID NO: 1124 - protein, 406 aa, Pseudomonas fluorescens Pf-5
MCEHSFMNICVPLPTASSRLPVWRLLAFTLAGFIAIVTETLPAGLLPQISQGLGISEAMAGQLISLYALGSVAAAIPLIAATRSWRRRPLLLLAIGGLLLFNSLTALSTHYLLTLAARFAAGMAAGLVWGLLAGYARRLVVPELQGRALAVVGVGQPIALCLGVPLGAWLGTRMDWPQIFWGLSLLALLLWFWVRLAVPDYPGQPAHQRQPIARIFLTRGLPQALLVIFVWILAHNILYTYIAPFLASLGLAASLDRALLVFGLASLVGIWFTGLGVDRWLRGLTLCSLAGFALACLLLGIAASQPWLAWLGIGAWGLTFGGAPTLLQTAVADVAGEGADVAQSMLVTIFNLGIACGGMVGGLLLQRYGAASFPWAMAALALVGLMLVWDARSHAFKPGQRSACCA

SEQ ID NO: 1125 - DNA, 1179 bp, Pseudomonas fluorescens Pf-5
  CDS (1)..(1179): transl_table=11
atgagtgattccgcggcgacaccccaaggcaactggcagccggtcatcgcgctggcgttggcggcctttgtcttcaacaccaccgagtttgtgccggtgggcctgctcagcgccattggcgccagcttcgacctgcccaccgagcgggtcggtctgatgctcaccatctacgcctggatcgtgtccctgacctcgctgccggtgatgctgctgacccgcaacatcgaacgacgcaagctgctcacggtgctgttcgggctgtttatcgtcagccatgtgttctccagcctggccagcaacttcggcctgctgatgctcagccgcatcggcgtggccctggcccatgcactgttctggtccatcaccgcgtccctggcggtgcgcctggcgccgccgggcaagcaggtgcaggccctcgggctgctggccaccggcacctcactggccatggtcctgggcattcccctgggccgcttgctgggcgaggccctgggctggcgcaccacgttcagcgtgatcgcggccatggccggcctgctggtgctgtggctgatccgcaccttgccgctgctgccgagccagaactccggttccctgcgcagcctgccgctgctgttcaagcgcccggcgctggtggcgatctatgtgcttaccgccctggtggtgacggcgcagttcaccgcctacagctacatcgagcccttcatcaaggtggcggcgggcctggggggcgaggtggtgaccctggtcctgctggtgttcggcggcgccgggatcatcggctcgctgctgttcagctggctgcaccgccacagcccccaggggtttctactgaccgcggtggcgctgctggcgctgtgcctgagcctgctgttgccgctcaatggccacgtctggtcgctggtggccctgagtgtgttctggggcatggcgatcatgggcttcggcctggccctgcaatccaaggtactggtgctggcgccggacgccaccgacgtggccatggcgatgttctccggcatctacaacatcggcattggcggcggtgcgctgctgggcagttgggtcggcgggcagttgggctttgcctatgtcggcctggcgggtggcgccctggcgaccctggccttgctgttgtacagcctggccctgggccgcatgagccgcaccagcgtgtag

SEQ ID NO: 1126 - protein, 392 aa, Pseudomonas fluorescens Pf-5
MSDSAATPQGNWQPVIALALAAFVFNTTEFVPVGLLSAIGASFDLPTERVGLMLTIYAWIVSLTSLPVMLLTRNIERRKLLTVLFGLFIVSHVFSSLASNFGLLMLSRIGVALAHALFWSITASLAVRLAPPGKQVQALGLLATGTSLAMVLGIPLGRLLGEALGWRTTFSVIAAMAGLLVLWLIRTLPLLPSQNSGSLRSLPLLFKRPALVAIYVLTALVVTAQFTAYSYIEPFIKVAAGLGGEVVTLVLLVFGGAGIIGSLLFSWLHRHSPQGFLLTAVALLALCLSLLLPLNGHVWSLVALSVFWGMAIMGFGLALQSKVLVLAPDATDVAMAMFSGIYNIGIGGGALLGSWVGGQLGFAYVGLAGGALATLALLLYSLALGRMSRTSV

SEQ ID NO: 1127 - DNA, 1158 bp, Pseudomonas fluorescens Pf-5
  CDS (1)..(1158): transl_table=11
atgctgttgcccatcctgctgttgtcggccgccggttttaccgtgctgaccacggagttcatcatcgtcggcctgttgccgtcgattgcccgcgacctgcaggtcagcgtgtcccaggccgggctgctagtgaccctgttcgcctttaccgtggctgccttcgggccatttctgaccgcctacttcgcgcgttttccccgcaagaagctgtttatcagcgtgctggtgatgttcggcctggccaataccctggcggcgctggcgccgaacatctgggtgatgtccctggcgcggctggtgccggccctggggttgccggtgttctgggccctggccagcgagacggcggtggacatcgtcggcccggactacgccgggcgggcgattgccaagatcggcttcggcattgtctgcgccacggtgttcgggattcccgtgggcaccctgattgccgatgcgttcggctggcgcagcgccttcggcatcctggcggtggtggcgttcgccaaggccctgttgctgtttatctacctgccgcaaacccgcctgcacaacgagcaggtgagcctgcgggcgcagtttcgcatcctgcgcagcccgctgatgcaagggcatgtgctgctgtcgatcctggtatttagcggcatgtttactgcctatacctacctggcggacatactcgagcgcctggccgggttcgacggtgcattggtgggctggtgcctgatgggctttggcgcggtgggcctgatcggcaattccctgggcggccgggcggtggaccgtcacccgctgatcgcctccatggtgttctgcgcactgatgatcggcggcatggtagccctggtgccgagcattcattcgaccctggggctggcagcggccatggccatctggggcgtgacccaggcggcgatgttcctggtgagccatgtgcgcttgatcaaggcggctccccaggcgccggccttcgccgcttcgttgaacattgccggggccaacctgggcattggcctgggggcaatggtcggcggccgggtgatcgataccctgggcctgggcagcctggggttcgcggcctcgggtttcattctgctgtcgatcgccctggcgctgctgctgatgaagctcaaagcgccgagtgcctgcgcttcctga

SEQ ID NO: 1128 - protein, 385 aa, Pseudomonas fluorescens Pf-5
MLLPILLLSAAGFTVLTTEFIIVGLLPSIARDLQVSVSQAGLLVTLFAFTVAAFGPFLTAYFARFPRKKLFISVLVMFGLANTLAALAPNIWVMSLARLVPALGLPVFWALASETAVDIVGPDYAGRAIAKIGFGIVCATVFGIPVGTLIADAFGWRSAFGILAVVAFAKALLLFIYLPQTRLHNEQVSLRAQFRILRSPLMQGHVLLSILVFSGMFTAYTYLADILERLAGFDGALVGWCLMGFGAVGLIGNSLGGRAVDRHPLIASMVFCALMIGGMVALVPSIHSTLGLAAAMAIWGVTQAAMFLVSHVRLIKAAPQAPAFAASLNIAGANLGIGLGAMVGGRVIDTLGLGSLGFAASGFILLSIALALLLMKLKAPSACAS

SEQ ID NO: 1129 - DNA, 1212 bp, Pseudomonas fluorescens Pf-5
  CDS (1)..(1212): transl_table=11
atgcccattgccctgctcgcgctgaccctcagcgcattcgccatcggcacgaccgagttcgttatcgttggcctgctacccaccataggtaccgacctcggggtcagcctaccgtccgccggcctgctggtcagcctctacgctctgggcgtggcgattggcgccccggtgctcaccgccctcagcggcaaggtgccgcgcaagctgttgctgctgtcgctgatggtgctgttcacccttggcaacctgctggcctggaaagcacccgggtatgaatccctggtgctggcacggattgtcacgggcctggcccacggggtgttcttctccatcggctcgaccatcgccaccagcctggtgcccaaggaaaaagccgccagcgcgatcgccatcatgttcaccgggctcaccgtggccctggtcaccggcgtacccctgggcacctttatcggccagcatctgggctggcgcgaaaccttcctcgcagtgtccgccctgggggtgatcgcctttatcggcagcctgctgttcgtgccgaagaacattacccaccgcccgccggcgtcgctgctgcaacaactgcaggtgctcaagcaaccgcgcctgctgctggtgtacgccatgaccgcggtgggctacggcggctcgttcatcgccttcaccttcctggcgccgatcctccaggacatttccggcttcagcgccggcaccgtgagcctggtgctgctggtgtacggcgtctcggtggcggtgggcaatatctggggcggcaagctggcggaccggcgcggaccgatcggcgccctgaagatcatcttcgccctgctcgccgcggtgctgctgatgctcagcctaaccgccggcaacccatggctggcgctgctgaccgtactgctgtggggcgcggtggcgtttggcaacgtaccggggctgcaggtctatgtggtacgtcaggccgagcactacacaccccaggcggtggatgtggcgtccggcctgaacattgccgccttcaacctggggattgccggtggagcctggctggggggcttgatcgtcgctcacctggggctgatccacaccgcctggatcggcgcgctggtggtgctggtggccctggccctgaccgttttgagcggccacctggatcgccgcaacccgctagcgttcgcgccggccggcggcagcgcccgggcagtggccggccactga

SEQ ID NO: 1130 - protein, 403 aa, Pseudomonas fluorescens Pf-5
MPIALLALTLSAFAIGTTEFVIVGLLPTIGTDLGVSLPSAGLLVSLYALGVAIGAPVLTALSGKVPRKLLLLSLMVLFTLGNLLAWKAPGYESLVLARIVTGLAHGVFFSIGSTIATSLVPKEKAASAIAIMFTGLTVALVTGVPLGTFIGQHLGWRETFLAVSALGVIAFIGSLLFVPKNITHRPPASLLQQLQVLKQPRLLLVYAMTAVGYGGSFIAFTFLAPILQDISGFSAGTVSLVLLVYGVSVAVGNIWGGKLADRRGPIGALKIIFALLAAVLLMLSLTAGNPWLALLTVLLWGAVAFGNVPGLQVYVVRQAEHYTPQAVDVASGLNIAAFNLGIAGGAWLGGLIVAHLGLIHTAWIGALVVLVALALTVLSGHLDRRNPLAFAPAGGSARAVAGH

SEQ ID NO: 1131 - DNA, 1200 bp, Psychrobacter arcticum 273-4
  CDS (1)..(1200): transl_table=11
atgacacataaccttgaggtgagctcagatgctcgccgaactcaatattttcaagtatttttgatgggggttagcgcctttatcatgaataccaccgaattcgtcccagtcgccctattaagtgacatcgcgcaagactttgctattaccacggcagaaacgggctggatgttgacgctctatgcgtggattgtcgctgccatgtcgttgccgctgatgctactgaccagtcgatttgaacggaagcgtttgctcttagccttgtttgcggtatttatcgccagccatgcgttatcagtatttgcgtggagtttccaagtattgctcatcagccgtgttgggattgcgctatcgcatgcgatattttggtcaatcacggcggcgattgccatacgagtggcacccaaaggcaaaaaagcaatggcactcagtgtgcttgcgaccggtacttcattggcaatggtactgggcgtaccattagggcgattggtcggtcaatggtttggctggcgcgcaacctttggcggtatcggcgcagttgctttggtggtatttatcttgcaagcaaggctattacccaccctgccaagtatgtttgagggctcgtttagaaagattccaacattgcttaaaaatcctttattggtcagtctgtatctgcttattttgctggtctttaccgcacactatagcgcttactcttatatcgaaccttttatgcgtcaggtcggtgcaatcagtgaaaacgccgcgacttttgtactactattatttggtgtggcaggcattttgggcagtgtgatattcagtcgctggggtgataactttaataccagattgatgctgatatcgatgatattaatattggtatcgatgcttgcgctattacttgccgtcacctcggtatgggcgctcagcttgattgccttactatggggcgcagcactcatgctgctgattgtctctatgcaagccaaagtgattatggtcgacgtcaaggcgcaagacatgctgatgtcaatgttctcagggattattaacttagggattggtacaggggctttgtttggaggttatgccgtgatccatctctcgttatcaagcgtgggctatgtaggggcagctatcgccagtgcagcactactcctgatactattgatgataaaacgcttccctgagctcagcaggaggctcggctaa

SEQ ID NO: 1132 - protein, 399 aa, Psychrobacter arcticum 273-4
MTHNLEVSSDARRTQYFQVFLMGVSAFIMNTTEFVPVALLSDIAQDFAITTAETGWMLTLYAWIVAAMSLPLMLLTSRFERKRLLLALFAVFIASHALSVFAWSFQVLLISRVGIALSHAIFWSITAAIAIRVAPKGKKAMALSVLATGTSLAMVLGVPLGRLVGQWFGWRATFGGIGAVALVVFILQARLLPTLPSMFEGSFRKIPTLLKNPLLVSLYLLILLVFTAHYSAYSYIEPFMRQVGAISENAATFVLLLFGVAGILGSVIFSRWGDNFNTRLMLISMILILVSMLALLLAVTSVWALSLIALLWGAALMLLIVSMQAKVIMVDVKAQDMLMSMFSGIINLGIGTGALFGGYAVIHLSLSSVGYVGAAIASAALLLILLMIKRFPELSRRLG

SEQ ID NO: 1133 - DNA, 1260 bp, Pseudomonas syringae pv. phaseolicola 1448A
  CDS (1)..(1260): transl_table=11
atgcgtggcgatcggccttcgggtcggaacattttcagggcgttgcgattcttgataacttcacctccaaacgagcaggcaggtagctggcttggcgtattcgcgctggccttggcggccttcattttcaataccaccgagttcgtgccgatcggtctgctgagtaacatcggccagagcttcgagatgaccccggcccaggtcgggctgatgcttacgatctatgcctgggttgtgtcgctgatgtcgttgccgatgatgctggcgacgcgcaacatcgagcgccgcaagttgctgatgttcgtgttcggcctgtttgtggtcagccatgtactctccgcaatctcccccagcttcgcaatcctgctggtgagtcgggtcggtatcgcctttgcacatgcggtgttctggtcggtcacggcgtcgctggccgtgcgcatcgcaccgcccggcaagcaggttcaggcgcttggcctgctggcgaccggtacgtcgctggcgatggtgctgggtattccgctgggccgcgtgctgggtgaggccctgggctggcggactacctttctgggcatcgccggcatcgctgcgctggtagtcttcctgttggctcgcgcgctgcctttgctgcccagccagaactccggctcgttgcgcagcctgccgatcctgttcaaacgcccacggttaatggcgatctacctgctgacagcgattgtggtgaccgctcatttcaccgcctacagctatatcgagccgttcacccagactgtgtcccgactcagcggcgaaatgaccacgattctgctgctggtctttggcggtgcaggaatcatgggctcgatcatcttcagcctgttcagcgaccgcttccctaacgggctattgatcaccgccattggcacgctgaccgtttgcctgctcatgctattgccactctccggcgatgcgacagcgctcggcacgctgaccattatctggggcatggcgatcatgtgcttcgggctgaccttgcaagcgcgtgtactctctctggcaccggatgcgaccgatgtggcaatggcgctgttctcgggcatcttcaatatcggaattggtggcggtgcgctgctcggcagcgtggtcagcagccatctcggggttgccaatgtcggtattgtgggcggcctgctggccttgggcgggttggggttgtgctgctttacgacgcattacttcggcaaaatccagcctgctgccgaggtgcaggccgagagcaaatag

SEQ ID NO: 1134 - protein, 419 aa, Pseudomonas syringae pv. phaseolicola 1448A
MRGDRPSGRNIFRALRFLITSPPNEQAGSWLGVFALALAAFIFNTTEFVPIGLLSNIGQSFEMTPAQVGLMLTIYAWVVSLMSLPMMLATRNIERRKLLMFVFGLFVVSHVLSAISPSFAILLVSRVGIAFAHAVFWSVTASLAVRIAPPGKQVQALGLLATGTSLAMVLGIPLGRVLGEALGWRTTFLGIAGIAALVVFLLARALPLLPSQNSGSLRSLPILFKRPRLMAIYLLTAIVVTAHFTAYSYIEPFTQTVSRLSGEMTTILLLVFGGAGIMGSIIFSLFSDRFPNGLLITAIGTLTVCLLMLLPLSGDATALGTLTIIWGMAIMCFGLTLQARVLSLAPDATDVAMALFSGIFNIGIGGGALLGSVVSSHLGVANVGIVGGLLALGGLGLCCFTTHYFGKIQPAAEVQAESK

SEQ ID NO: 1135 - DNA, 1380 bp, Pseudomonas syringae pv. phaseolicola 1448A
  CDS (1)..(1380): transl_table=11
atgaacacgctccaggctgaaaacgctactcaggctgccaatgcctggcgcgtgctgttcctgctttttctggccaatctgttcaacttctttgatcgcaccatcccggcgattatcgtcgagcccattcgtctggaatggcatttgagtgactttcaactggggttgctggggaccgcattcacgctggtctacgctttcgctggtctgccattggggcgcatggccgataacgggtcgcgcaagaaactcatgggctgcggtctggcggtctggagcgggttgactgcggtcaatggcatggtgggcagtttctggaccttcctgctggtgcgcatgggcgtcggcataggtgaggccagctacgcgcctgctgccaactcactgatcggtgatctgtttccagcccatcggcgtgcgcgggccatggggcttttcatgctgggtctgcctttgggtctactactggcgttctttaccatcggcgctatggtcaaggcgtttgacagctggcgcgcaccgttctttatcgctgcggttcctggtctgttgctggccgtgttcatctttttcatcaaggagcccaggcgcggcgcggctgaaagcgtgcggatgtcagaggagaagattgaaaagccgatccgccgtgtgctgtcgattccgacctttcgttggctggtgctgggcggtctgaccttcaactttgcgacttacgcctgcaattcattcatggtgccgatgctgcagcgctattttctgctgcccttgcaggaagctgcagtggcgaccggggttattgtcggcgtaaccgggctgatcggtctgacgcttgggggctggatagccgacaaactgcaccagcgcttttccaatggacggctgttgtttgcgaccatcagcatgttgatcgccgcactggccacaggctatgcgctgcatgcagggcagatcgggatcggtgtgttcgtgggggtgttcagtctgggctggctgttcgcttacaacttctatacctgcgtttacaccgctattcaggacgtaatcgaaccgcgcctgcgggccacggccatggcgctgttctttgccgggctttatttgctgggtggagggctggggccggtggtggtcggtttgctgtctgatcactttgcccatgctgcgatgggcgttgcaggtgtcgaggtgatgagcgaaagctttaaagccatcggtttgcacgatgccatgtacctgatcccggcagcgctgtttctgaccttgctgttcctgtatcaggcttcgcgctgtttcagccgggatgccgagcggatgaaggcgagaatggcggctgacgagccggtggaggagttggcgcagggaattgtggtggccaggcagtga

SEQ ID NO: 1136 - protein, 459 aa, Pseudomonas syringae pv. phaseolicola 1448A
MNTLQAENATQAANAWRVLFLLFLANLFNFFDRTIPAIIVEPIRLEWHLSDFQLGLLGTAFTLVYAFAGLPLGRMADNGSRKKLMGCGLAVWSGLTAVNGMVGSFWTFLLVRMGVGIGEASYAPAANSLIGDLFPAHRRARAMGLFMLGLPLGLLLAFFTIGAMVKAFDSWRAPFFIAAVPGLLLAVFIFFIKEPRRGAAESVRMSEEKIEKPIRRVLSIPTFRWLVLGGLTFNFATYACNSFMVPMLQRYFLLPLQEAAVATGVIVGVTGLIGLTLGGWIADKLHQRFSNGRLLFATISMLIAALATGYALHAGQIGIGVFVGVFSLGWLFAYNFYTCVYTAIQDVIEPRLRATAMALFFAGLYLLGGGLGPVVVGLLSDHFAHAAMGVAGVEVMSESFKAIGLHDAMYLIPAALFLTLLFLYQASRCFSRDAERMKARMAADEPVEELAQGIVVARQ

SEQ ID NO: 1137 - DNA, 1200 bp, Pseudomonas syringae pv. phaseolicola 1448A
  CDS (1)..(1200): transl_table=11
gtgagtcgttttgaaactgctggaaacctcgtaataaaacccgcttcatggtgggctgtaggcagtgtatcccttggatcattcgctaccgtcactactgaatttctccctgtcgggctgctgcccgatattgctcgtgacctgggaaccagcatcagccaagcgggcttgatgatggctgtccccggcatcctcgcggccatttcagcaccttcctgtatcgctctgttcagtcatgttgatcgcaagcgcctgctgctggggctgctgtcgatattgctggcgtccaacctgatcgtggcgctgtcgacgcacttctggctgacgcttgccggccgggtcctgcttggcttcgcactgggaggtttctggacgattgccggttcgctcgggcctcgtttgaggcccggcaaggagggcgtaaaggccaccgcgtatgtgctggcgggcgtctcgatcggcactgttgccggtattccggctggcacgttgatcggtgaagccttcggctggcgggcggcatttgaaacagcggcagtggtcacggttgcgatagggctgttgatcgcagcgtttttaccggcgttaccgggcgagcgctctgccggcatcagtcagatgctgtcgctggctggcaagcaacgcattcgtcgtatgttcgccgccgcactgttgatctacgtcgggcacttcgcggcttacacctacctcgcgcccttcgtgcaggagttcgcgcatatccaggggcaggccctgggagcattgctcttcgccttcggtctggcagcggtggcagggaatctggccgggggagccctggcagccagaagcgcgccgtcctcggtgctgatcatgaccctactgatgctgggatcgttgaccgcattgctgatgtttgtcagcaacccgtggctgctatggccggtgattctggtctgggggttcgctttcgggatgatccccatcaccacgcagatctggtgtttcgaggcctccaatgaccgcgtggagggtgttcaggcgttactggtctgtgtggtgaatctgtcaattggcggtggggcgttcatcggcggcgtggtgtccggtcgggccggctttaccgccgccatagtcatcggtgcggtatgtgccgcgctgtccatgttcaccgttgcgctggcgatacgtagctccaggtcggtcatttgcacagactga

SEQ ID NO: 1138 - protein, 399 aa, Pseudomonas syringae pv. phaseolicola 1448A
MSRFETAGNLVIKPASWWAVGSVSLGSFATVTTEFLPVGLLPDIARDLGTSISQAGLMMAVPGILAAISAPSCIALFSHVDRKRLLLGLLSILLASNLIVALSTHFWLTLAGRVLLGFALGGFWTIAGSLGPRLRPGKEGVKATAYVLAGVSIGTVAGIPAGTLIGEAFGWRAAFETAAVVTVAIGLLIAAFLPALPGERSAGISQMLSLAGKQRIRRMFAAALLIYVGHFAAYTYLAPFVQEFAHIQGQALGALLFAFGLAAVAGNLAGGALAARSAPSSVLIMTLLMLGSLTALLMFVSNPWLLWPVILVWGFAFGMIPITTQIWCFEASNDRVEGVQALLVCVVNLSIGGGAFIGGVVSGRAGFTAAIVIGAVCAALSMFTVALAIRSSRSVICTD

SEQ ID NO: 1139 - DNA, 1188 bp, Pseudomonas syringae pv. phaseolicola 1448A
  CDS (1)..(1188): transl_table=11
atgacgacagacgagagacagcgcgaaaaacttccgctcggggcattgctggcgctggcgatgacagggttcatttgcatcgtgactgagacgttgcccgcgggtttgctgccagagatcggcagtggcctgggagtctcggcatcgtttgcagggcaaatggtgactgtttatgcgttgggctcactgttggcagccattccgctgaccatcgctacgcagagctggcgccgccgaacagtcttgttgctgacgattgtcggcttcctgatattcaattccgtcactgcgctgtcttccagctactggctgaccctgatcgcgaggtttttcgctggcgtctctgcggggctggcctggagccttatcgcgggttacgcacgacgtatggtcgtcccgcaattgcagggccgcgcgctggcggtcgcgatggtaggaacgcccatcgcgttgtcattgggcgtgcctctgggaacctggctgggcgggttgatgggctggcgcatggcattcgggttgatgtccggaatgaccctgctgttggtcatctgggtgctgatcaaagtgccggattaccctggccagtccgcttcacagcgcatggcattgcgtcaggtctttttcaccccaggcgtacgctcggtactgggagtggtcttcacttggatgctggctcacaacattctttatacctacgtcgcgccgtttgtttccgaggccgggttggcgagtgacgttgatttggtattgctgacatttggtgtcgccgcgctggcaggcatctgggtaacgggacggctggttgatcgtcatttacgcaagaccgtgctggccagcctcgcgagctttgcggcggtttcggtgttcctgggcctgttttctggctcggccctggccatctatgtaggcgtatttatctggggcctgacctttgggggggccgccacgcttctgcaaaccgcgctcgccgactcggcaggtgagggcgctgatgtggcgctttcgatgaatgtcgttgtctggaacagcgctattgcaggcggtgggctactgggcggtgtgttgcttgggcagtggggcgtgagctcgtttacgtgggtcttgtttgcattgttagtgctgagcctggttattgcgctgcgtgcgcgggctcatggttttgcgagaggcgatcggctgatggagtaa

SEQ ID NO: 1140 - protein, 395 aa, Pseudomonas syringae pv. phaseolicola 1448A
MTTDERQREKLPLGALLALAMTGFICIVTETLPAGLLPEIGSGLGVSASFAGQMVTVYALGSLLAAIPLTIATQSWRRRTVLLLTIVGFLIFNSVTALSSSYWLTLIARFFAGVSAGLAWSLIAGYARRMVVPQLQGRALAVAMVGTPIALSLGVPLGTWLGGLMGWRMAFGLMSGMTLLLVIWVLIKVPDYPGQSASQRMALRQVFFTPGVRSVLGVVFTWMLAHNILYTYVAPFVSEAGLASDVDLVLLTFGVAALAGIWVTGRLVDRHLRKTVLASLASFAAVSVFLGLFSGSALAIYVGVFIWGLTFGGAATLLQTALADSAGEGADVALSMNVVVWNSAIAGGGLLGGVLLGQWGVSSFTWVLFALLVLSLVIALRARAHGFARGDRLME

SEQ ID NO: 1141 - DNA, 1155 bp, Pseudomonas syringae pv. phaseolicola 1448A
  CDS (1)..(1155): transl_table=11
atgttgttgcccatacttctgttgtcggccgccggtttcaccgtgctgaccacagaattcgtcattgtcggtcttttgcctgcggttgcccgcgatctggatgtcacggtttcgcaagcggggctgctggtcaccctgttcgcattcacggttgcagcgttcggtccttttctgaccgcttatttctcgcgtttcgagcgcaagcgtctgttcatcagcattcttgtgctattcggcttttcaaatctactggcagcgctggcacccaatattgccgtgatggggctggcgcggctgattcctgcgttggggctgccggtattctgggcgctggccagtgaaaccgccgtggacatcgtcgggccgcagttcgctggcagggcgattgccagaatcggtttcggcatcgtttgcgccactgtgttcggcatccccataggtactttgatttccgatgctttcggctggcgcagtgcgtttctggtgctcgccggcctggcatttgccaaggcactgttgctggcggtctatctgccacggacggcggcgaagaaaaacccggtgtcgatcctcaaccagttcggtattttgcgcagccggatgatgcaggggcatgtgctgctgtcggtactggtattcagcggcatgttcaccgcctacacctatctggctgacatgctggagcgtctcgccgggttcgatggcagcctggtgggctggtgcctgatggggtttggcgcggtcggcttgctcggcaactcgctgggcgggcgcatggttgaccggcatccgctgattgccagcctggtattctgcgccttcatggtggtcggcatggtcgctgtggtgcccagcatccactcggtgttcgccttgccagtcgcgctggcaatatggggtatcacccaggccgccttgtttctggtcagtcatgtccggttgatcaaggccgcaccgcaagcacctgcgttcgcggcgtcgcttaacatcgccggagcgaatcttggcatcgggactggtgcgatgatcggcggcagggtcatcgatcatctcggtctggggaacgtcggtttcgctgccgctggcattatcgctcttgcgattgtgctggcagtgctgctgatcaggcgtgattccggcccgcttgccgcctaa

SEQ ID NO: 1142 - protein, 384 aa, Pseudomonas syringae pv. phaseolicola 1448A
MLLPILLLSAAGFTVLTTEFVIVGLLPAVARDLDVTVSQAGLLVTLFAFTVAAFGPFLTAYFSRFERKRLFISILVLFGFSNLLAALAPNIAVMGLARLIPALGLPVFWALASETAVDIVGPQFAGRAIARIGFGIVCATVFGIPIGTLISDAFGWRSAFLVLAGLAFAKALLLAVYLPRTAAKKNPVSILNQFGILRSRMMQGHVLLSVLVFSGMFTAYTYLADMLERLAGFDGSLVGWCLMGFGAVGLLGNSLGGRMVDRHPLIASLVFCAFMVVGMVAVVPSIHSVFALPVALAIWGITQAALFLVSHVRLIKAAPQAPAFAASLNIAGANLGIGTGAMIGGRVIDHLGLGNVGFAAAGIIALAIVLAVLLIRRDSGPLAA

SEQ ID NO: 1143 - DNA, 1167 bp, Pseudomonas syringae pv. phaseolicola 1448A
  CDS (1)..(1167): transl_table=11
gtgcctctttcgctacttattctggccctgagcgcctttgccatcggcaccaccgaattcgtcatcatgggcctgctgcccgatgtggcggctgacctcggggtatctatccccggcgcaggctggctggtcaccggctatgcgctgggcgtggccgtcggcgcgccgttcatggccatggccacggcaaaactgccgcgcaaggctgcgctggtcacgctgatgggcattttcatcatcggcaacctgctctgcgcactggccagtgactacaacgtattgatgttcgcccgcgtggttacagcgctgtgtcatggtgcgttcttcggcatcggctcagtggttgccgcagggctggtgcctgccaatcgccgcgcttcggcggtagcgttgatgttcaccggtctgaccctggccaatgtactgggcgtgcctttgggtactgcattgggtcaatacgcaggctggcgctcgaccttctgggcggtaacagtcatcggcgtgattgcgctgatcggcctgatccgctttctgccgaccaatcgcaatgaagaaaaactcgacatgcgcgccgaactggccgcactgaaaggtgccggtatctggctgtcgctgaccatgaccgcgctgttttcagcgtccatgttcaccctgttcacctacattgccccgctgctcggcgaagtcaccggcgtatcgcccaagggcatgacctggaccctgctgttgataggcctgggcctgaccgcaggtaacgtgattggcggcaagatggccgaccgccgtgtgtcatccacgctgattgccgtgttcgtctcgatggcggtgatctcaaccgctctcagctggaccagcgccgcgctgatcccgactgaaatcaccctgttcctctgggcggtcgctgcctttgcagccgtcccggctctgcagatcaacgtggtgaccttcggcaaagccgcgcccaacctggtttcaaccctgaacatcggcgctttcaacgtgggcaacgcgcttggtgcctgggtcggtggcagcgtcatcgcccacggcctgggcctgaccagcgtaccgctggccgctgccatgctggcagtgctcgcgctgctgatcacactgattacttttcgtcagaccggcaaccccgatctggcacctgctacacattga

SEQ ID NO: 1144 - protein, 388 aa, Pseudomonas syringae pv. phaseolicola 1448A
MPLSLLILALSAFAIGTTEFVIMGLLPDVAADLGVSIPGAGWLVTGYALGVAVGAPFMAMATAKLPRKAALVTLMGIFIIGNLLCALASDYNVLMFARVVTALCHGAFFGIGSVVAAGLVPANRRASAVALMFTGLTLANVLGVPLGTALGQYAGWRSTFWAVTVIGVIALIGLIRFLPTNRNEEKLDMRAELAALKGAGIWLSLTMTALFSASMFTLFTYIAPLLGEVTGVSPKGMTWTLLLIGLGLTAGNVIGGKMADRRVSSTLIAVFVSMAVISTALSWTSAALIPTEITLFLWAVAAFAAVPALQINVVTFGKAAPNLVSTLNIGAFNVGNALGAWVGGSVIAHGLGLTSVPLAAAMLAVLALLITLITFRQTGNPDLAPATH

SEQ ID NO: 1145 - DNA, 1173 bp, Ralstonia eutropha JMP134
  CDS (1)..(1173): transl_table=11
atggatcgtcgactactgatgctggccctcggcatgtttgccatgggaacggacaacttcgttgttgccggcattcttccgaacgtcgctgcatcgctgcacacgaccccgagcctcgcgggccagatggtcaccgtctatgcgctgtcctatgcaatcctggcgccggtgatggcggctgtcgcgggggcgtggccaagaaagctgctgctggtcaccgcgctcggcatcttcgtcattggcaatgccatcacagcccttgcgacggatttgaacacggtcctgttcagtcgcgcgctggcgggccttggcgcggcgatgttctctcctaccgcattgggtgtcgccacgttactggcggctcctgagaggagagggcgcgcgcttgccacggtgaccgccggcctcgcgggcgcaacggcgctgggcgccccgatcggcacgttcatcggtgggttcggcagttggagaaccacgctctggttcgtcgcgctcctggggctgatcgcgatgatcgggatcggggccatgctgcgctcggttcctcagcctgcgcgaatctcgctgcgcgataggctgacgcccctgcgcgacgtccgcgttgccctgaccctgctcacgtccctgtttgcgttcggcggcttcctgatggtctacacctatgccggactcgtgctggatcgggtgaccggcggcgacgaacgcgtgctggccggcatgctgctcgtctggggctgcgccgcgacagtcgggaacatgcttgccggccgcctcgttgaccgcttcgacagtcgcaagatcatcaatgcaggcctttgcatcggcattctcaatttctgtgcgctgccatggacttcggcatacatggtcaccgccgcagtctccttggtcgcctgggggctggtcggatggggattgattgtgccgcaacagcaccggctggtaaaaatcgcgcctcccatggcgccgttgctgctggcccttaacaatacggctacctacggcgggctggcctgctcaggtgttctcgggggcattgtgctgctgttcatcgaccggcaatacctcagtatcgtgggtgccggattgatcgcgatcgctctggttttcgccgaggccgcgcatctgtgctctgcgcgcctctccacgagcatgcgacctatgccttcgtga

SEQ ID NO: 1146 - protein, 390 aa, Ralstonia eutropha JMP134
MDRRLLMLALGMFAMGTDNFVVAGILPNVAASLHTTPSLAGQMVTVYALSYAILAPVMAAVAGAWPRKLLLVTALGIFVIGNAITALATDLNTVLFSRALAGLGAAMFSPTALGVATLLAAPERRGRALATVTAGLAGATALGAPIGTFIGGFGSWRTTLWFVALLGLIAMIGIGAMLRSVPQPARISLRDRLTPLRDVRVALTLLTSLFAFGGFLMVYTYAGLVLDRVTGGDERVLAGMLLVWGCAATVGNMLAGRLVDRFDSRKIINAGLCIGILNFCALPWTSAYMVTAAVSLVAWGLVGWGLIVPQQHRLVKIAPPMAPLLLALNNTATYGGLACSGVLGGIVLLFIDRQYLSIVGAGLIAIALVFAEAAHLCSARLSTSMRPMPS

SEQ ID NO: 1147 - DNA, 1206 bp, Ralstonia eutropha JMP134
  CDS (1)..(1206): transl_table=11
atgcccattgccctgttagcgctaaccatcagcgcattcgccatcggcacgacggaattcgtcatcgtcgggctgattcccaccattgccgcggacctgcacatcagcctgccatcggcgggcctgctggtcagcctgtatgcgctcggcgtggccgttggcgcacccgtactgacggcgctgaccggccgcttgccacgcaagacgctgctgctgtcactgatggcgctgttcacgctcggcaacctgcttgcatggaaagcgcccagctatgagtcgctggtcgtcgcacggatcctgaccggtctggcgcatggcgtattcttctcaatcggctcgaccatcgccaccggcctcgtgccgaaggagaaggccgccagcgcgattgccatcatgttcaccggcctgaccgtcgcactggtaacgggtgtcccgctgggcacgttcatcggccagcatttcggctggcgcgagacattcctggccgtctccggacttggcgcaatcgccttcgtgggcagcctgctgttcgtgccgtcgtcgatccggcatacgcagccggcctcattgctccagcaggcgcgcgtgctggccgagccgaggttgctgctcgtctacgcgaagaccgcgatcggctatggcggctcgttcatcccgttcacgttcctggcgcccatcctgcaggacgtctcggggttcagcgccaacgcagtcgggctggtgatgctcgtgtacggcgtgtccgtggccgtgggcaatatctggggcggccgccttgctgaccgccatggtccgatcgctgcgctgcgcctcgtgttcctgctgctggcggcggtgctgttcgtgctgaccttcaccgcaccgcacccgtggctcgtcgtggcgacggtactggcctggggcgccgtggccttcggcaatgtgccgggcctgcaggtctacgtcgtcaagcaggcggagcgacacacaccgcatgctgtcgacgtcgcatccggcctgaacatcgcggccttcaaccttggcattgccggggcggcgtgggccggtggtctcatcgtgacccacctggggctgatgcatacgccatggatcggcgcgctcgtcgtgctggttgcactgggcctgactgagctgagcggccggctggaccgcgcagcgggcttcgatgcacgcggcagcctgcctgcaggcgccgcgatgcactga

SEQ ID NO: 1148 - protein, 401 aa, Ralstonia eutropha JMP134
MPIALLALTISAFAIGTTEFVIVGLIPTIAADLHISLPSAGLLVSLYALGVAVGAPVLTALTGRLPRKTLLLSLMALFTLGNLLAWKAPSYESLVVARILTGLAHGVFFSIGSTIATGLVPKEKAASAIAIMFTGLTVALVTGVPLGTFIGQHFGWRETFLAVSGLGAIAFVGSLLFVPSSIRHTQPASLLQQARVLAEPRLLLVYAKTAIGYGGSFIPFTFLAPILQDVSGFSANAVGLVMLVYGVSVAVGNIWGGRLADRHGPIAALRLVFLLLAAVLFVLTFTAPHPWLVVATVLAWGAVAFGNVPGLQVYVVKQAERHTPHAVDVASGLNIAAFNLGIAGAAWAGGLIVTHLGLMHTPWIGALVVLVALGLTELSGRLDRAAGFDARGSLPAGAAMH

SEQ ID NO: 1149 - DNA, 1173 bp, Ralstonia eutropha JMP134
  CDS (1)..(1173): transl_table=11
atggaccccaggctagtgacgctctgcgtcggcaatttcatcattggcaccggcgcgatgatcgttaccggcatgttgaacgacattgccgccgatttcggcctgggcgtggccagcgccggccagttgatctcggtgttcgcgctggccacctgtgtgggggcgccgctgttcgccacgctgggctcgcgtatcgaccgccggctgttgctggccggttcgctgctgatctatgcggtgatgcatctggccgcggcgctggcgccgagcttcgcgacgctgatggcgatccgcttcctgacggcgatcggcgccgccatctatacgccgcagaccgcggccaccctgcccttgctggtcaacgcgcagacgcgcggccgcgccatcagcttcgtgttcctcggctggagtatcgccagcgtggtcggcatgccgcttggcacctggattgccagcacactcggctggcgcttcagcatggcggtcgtcggcgtgctggcgctgctggtgtcggcggcggtgtggcgtgcgttgccgcgcgggctgtacgtgccggccgtggggcgtgaagcctgggacgccgtgctgcgccaccggccgatcatgctcgtggtggccgccacgatgatccagtcggccggcatgttcacgatgtttacctacattgcgccgctgatgcgcgatgcctacggcatcaccggtgccgcgctgagcctgatgttcctggcctatggcgcctgcggggtactcggcaacgcggtggcggcgtcgcgcatggaccggatcacgccgagccggattgtccagttcacgctgctgacgtcgaccgcggcgatggtgctgtggccgctcgcgggcctgggcagcgtcgcgctggtgctgctgttcatgctgtggggcatcggcgggtttgccaccaacagcgcacagcaggcgcggctggtcatgatcgagcccgaccgtgcatcggtgtcgatctcgctcaactcatcgtcgatctatctcggccaggcgctgggcgccatggctggtgcggccatctatacggtggcgggcaccggttcgctgcactggggtgcagcggcgctgacgctggtggcgctggcggtttcgcagtgggcgcgcgcgctgggccgccagtggccgcgtcggcaagcgccacaacaggcctga

SEQ ID NO: 1150 - protein, 390 aa, Ralstonia eutropha JMP134
MDPRLVTLCVGNFIIGTGAMIVTGMLNDIAADFGLGVASAGQLISVFALATCVGAPLFATLGSRIDRRLLLAGSLLIYAVMHLAAALAPSFATLMAIRFLTAIGAAIYTPQTAATLPLLVNAQTRGRAISFVFLGWSIASVVGMPLGTWIASTLGWRFSMAVVGVLALLVSAAVWRALPRGLYVPAVGREAWDAVLRHRPIMLVVAATMIQSAGMFTMFTYIAPLMRDAYGITGAALSLMFLAYGACGVLGNAVAASRMDRITPSRIVQFTLLTSTAAMVLWPLAGLGSVALVLLFMLWGIGGFATNSAQQARLVMIEPDRASVSISLNSSSIYLGQALGAMAGAAIYTVAGTGSLHWGAAALTLVALAVSQWARALGRQWPRRQAPQQA

SEQ ID NO: 1151 - DNA, 1245 bp, Ralstonia eutropha JMP134
  CDS (1)..(1245): transl_table=11
atgacggctccgcacggaacccccgactcgctttctctttccgcctccaccaccgacaacccagcctctacggcacatagccgccgcgccttgctcgcgctcggcgtgggcagctttggcatcggcactggcgaattcgtcatcatgggcctgttgcccgacgccgcgcgcgaccttgccatcacgatcccgcaagccgggcacctgatcagcgcctatgcgctgggcgtggtcatcggcgcgccgctgctggctgtgctcggcgcgcgcttgccgcggcgcaatctgctgatcgcgctgatggcggcctttgccatcggcaatttcgccagcgcatttgcgccctcctacgcttccatgctcatcgcgcggctgctgaccggctttccgcatggcacctacttcggcgtggcggcactggtggcggcgggactggtgccccgcgaacgtcgcggacaggcggtgggcctggtcatgctagggctgactgtcgccacgctggttggcgtgccgattgccgctacggtcggcacctggcttggctggcgcgccgccttcatgatcgtcggcgcaatcggtgcgctgacggcatggctggtgtggtgctgggtcccgttcttcccggccgatcgcaaggcgagcccgctgcgcgagctgactgcactgcgccgcaagcaggtgtggctgacgctcggaattggcgcgatcggctttggcggcatgttcgcggtgttcagctatatcaaacccgccatgcttgaagtggcgcaaatgccggcgagcgcgattccgtttgtgctcgcactgttcggtatgggcatggtcaccgggaaccttgtcggcgcgaagctcgccgacaaggccctgatgccagccatcggcggcgtgctggtgtggtcggcactggtgattggggcgttcacgctgaccgcgccgcatgcgtggctggccgcggtcaacgtgctgctgatcgggaccgtcgtcgcgctcggaccggcgctgcagatccgcctgatggacgtagcgggcgatgcccagacactggccgccgcgctcaatcactcggccttcaatatggcgaatgccctgggtgcatggctgggcggcgtgagcattgccgccgggctgggctggacgtcgaccggatgggtcggcgccctgctcgctgtgggcggacttatcgtgtttgcgtggtccgcgctggccatgcagcgcggtggcgtcaccatgccgcaggcgtcctga

SEQ ID NO: 1152 - protein, 414 aa, Ralstonia eutropha JMP134
MTAPHGTPDSLSLSASTTDNPASTAHSRRALLALGVGSFGIGTGEFVIMGLLPDAARDLAITIPQAGHLISAYALGVVIGAPLLAVLGARLPRRNLLIALMAAFAIGNFASAFAPSYASMLIARLLTGFPHGTYFGVAALVAAGLVPRERRGQAVGLVMLGLTVATLVGVPIAATVGTWLGWRAAFMIVGAIGALTAWLVWCWVPFFPADRKASPLRELTALRRKQVWLTLGIGAIGFGGMFAVFSYIKPAMLEVAQMPASAIPFVLALFGMGMVTGNLVGAKLADKALMPAIGGVLVWSALVIGAFTLTAPHAWLAAVNVLLIGTVVALGPALQIRLMDVAGDAQTLAAALNHSAFNMANALGAWLGGVSIAAGLGWTSTGWVGALLAVGGLIVFAWSALAMQRGGVTMPQAS

SEQ ID NO: 1153 - DNA, 1221 bp, Ralstonia eutropha JMP134
  CDS (1)..(1221): transl_table=11
atgtcgaacccaatctcctccccgccacgcagcaaccgcatgcccattgcgctctatgcgctgaccgctggctctttcggcatcggttgcgccgaattcgtcatcatgggcctgctgctgcaagtggccactgacttgcacgtcagcattgccgccgccggcatgctggtttccggctatgcgctcggcgtgttcgcgggcgcgccggtgctcaccctgctgacccgccgcatgccgcgcaaagccgtgctgctcgcgctgatggtcatctacaccgtcggcaatgcggcctgtgcgctggcgcccgactactccacgctgatgatcgcgcgcgtgctgacctcgctcacgcatggcaccttcttcggcgtcggcgccgtcgtggcgaccgggctggtgccggccgagcgccgcgcttcggcgatctccgtcatgttttctggcctcacgctggccacgcttctaggcatgcccgccggcgcatggctcggcctgcatctcggctggcgcgccaccttctgggccatgacgctgatcggcgtggtgtcgctggcggtaattgccgcgctggtggacaagagccgcgaccagagcgccccggttgcgctgcgcgaggagctcgccaccgtcgtacgtccgcaggtactgctcggcctgctgatgaccgtgctgcagtcggtcggtgtctttgccgtgatcacctatgtgcagccgctgctgacgcacgtggcgggcttcagcgaaagtgccgtgtcgccgatcctgctgctgttcggcggcggcatgatcctcggcaacatcctgggcggacgcttcgcggaccgccagcccaccacggcgctgctgggctcgctcgcgacgctcaccggtgtgctggccgccatgaccttcgcggtccacagccagccggccgtcgcgatctttgtcggcatccttggcgtggccgcattcgccacagtgtcgccgttgcagcttcgtgtgctgcaccacgccagcggcgcaggccagaatctcgcgtcgagcttcaatatcgcggccttcaacctcggcaacgggatcggcgcgtggctgggcggcacggtggtcgatcacggcccgggcccgggggcgctgccttgggtggccgctctcgcaccgctggccgcgctgatggtggcgtggctgagcgtgaggagggaacggggtggcactggcgtcggcgtggtggccgggatgggctag

SEQ ID NO: 1154 - protein, 406 aa, Ralstonia eutropha JMP134
MSNPISSPPRSNRMPIALYALTAGSFGIGCAEFVIMGLLLQVATDLHVSIAAAGMLVSGYALGVFAGAPVLTLLTRRMPRKAVLLALMVIYTVGNAACALAPDYSTLMIARVLTSLTHGTFFGVGAVVATGLVPAERRASAISVMFSGLTLATLLGMPAGAWLGLHLGWRATFWAMTLIGVVSLAVIAALVDKSRDQSAPVALREELATVVRPQVLLGLLMTVLQSVGVFAVITYVQPLLTHVAGFSESAVSPILLLFGGGMILGNILGGRFADRQPTTALLGSLATLTGVLAAMTFAVHSQPAVAIFVGILGVAAFATVSPLQLRVLHHASGAGQNLASSFNIAAFNLGNGIGAWLGGTVVDHGPGPGALPWVAALAPLAALMVAWLSVRRERGGTGVGVVAGMG

SEQ ID NO: 1155 - DNA, 1173 bp, Staphylococcus saprophyticus subsp. saprophyticus ATCC 15305
  CDS (1)..(1173): transl_table=11
atgtcgattatgagaattgccacctttattttgagtatctttatcgtaggtatggttgaaatgatggttgcagggattatgaatttgatgagcattgacttgcatgtttcggaagcgattattggacagttagtgacgctttatgccatcacatttgccattgcaggacctatattagtgaaaataacgaatcggttttctccaagacctgtattattatatgcattgcttgtttttattgtcggaaatatgatcattgcttttgcacctaatttttctattttagtatttggacgcatcatatcatctgcagcagcagcacttatcgtggttaaaatattagcgctaacagctttattaactgcgccacaacatcgagggaaaatgataggtattgtttattcaggctttagtggcgcaaatgtacttggtgtaccaattgggacaattatcggtgacttagttggatggagatatacattcttatttattgtctttgtaagtgtgttagtaggtatattgatgtatttctatgtaccacaacctcaatatcaaacggtaaatacagagtctagtactaagcagcgtgaaagtaattattctaaaatacttagaccaggagaagtcgctaagtttttagctatcacattcttattgctagttgcaaattctgtgacatttatttatattaatccacttatgttatcaagtggtcatgacttatccttcgtatcgattgtattattaatcaatggtgttgcaggtgttattggaacatcgatgggtgggttcctttcagataaattgacgagtaaacgttggctaacgattgccactattatatttatcacgatgatgttactgttgaatttattcttatcagtgacaggcgtattattaatgattatcttcatatggaatatcatgcaatggagtacaaatccagctgttcaaagtggtattatagaacatgttgaaggtgatacaagccaagtgatgagttggaatatgtctagtttaaatgcgggtatcggcattggtggtattgtcggtggtctagttgtttctaaaatagatgttttagcaactacgtacttcactgcagccatcgcattcgtagcttttattttaatcattagtctaaagcaaatgactaaatttaatagagcctaa

SEQ ID NO: 1156 - protein, 390 aa, Staphylococcus saprophyticus subsp. saprophyticus ATCC 15305
MSIMRIATFILSIFIVGMVEMMVAGIMNLMSIDLHVSEAIIGQLVTLYAITFAIAGPILVKITNRFSPRPVLLYALLVFIVGNMIIAFAPNFSILVFGRIISSAAAALIVVKILALTALLTAPQHRGKMIGIVYSGFSGANVLGVPIGTIIGDLVGWRYTFLFIVFVSVLVGILMYFYVPQPQYQTVNTESSTKQRESNYSKILRPGEVAKFLAITFLLLVANSVTFIYINPLMLSSGHDLSFVSIVLLINGVAGVIGTSMGGFLSDKLTSKRWLTIATIIFITMMLLLNLFLSVTGVLLMIIFIWNIMQWSTNPAVQSGIIEHVEGDTSQVMSWNMSSLNAGIGIGGIVGGLVVSKIDVLATTYFTAAIAFVAFILIISLKQMTKFNRA

SEQ ID NO: 1157 - DNA, 1161 bp, Staphylococcus saprophyticus subsp. saprophyticus ATCC 15305
  CDS (1)..(1161): transl_table=11
atgaaatatcctatagcgatatggatgcttgcaattggtgcgtttgcaattggcatgacagagtttgttattatggggttattgcctaatattgcacgagattttgacgtgacggtgagtcaagcaggacaattgatcactggttatgcattgggtgtagcaatcggtggacctatcatagttatgttgacaataaaatggaatagaaaatatttgttgattgtattgatgggaatatttattatagggaatcttacagcatcgtttagtcctaattatgggtttatgatgacaagtcgaattattacctctttagcacatggttcgttctttggtattggttctatacttgcggcaagtatggtaagacctgaaaagcgtgcgagcgcaatggcacttatgtttatggggttaagtatgagtaatatattaggtgtaccttttggtacattaattggtcaaaactttggttggcctatgacgtttattattatttcgattattggggcacttgcactgattggcattattattttcgttcctatgcaacgtgaaacgattaagtcatctgtcttaaatgaattacaaattttaaaagaaaagcgcttgtggctaacgcttgcagtgacattgtttggttttagtagtgtgtttgcatactttacttatatttctactgtgctcatagatgtctccaatgtacaagaaaacttaatctcttatctgttaattatatttggtataggggttactcttggtaatgtcgttggtggtaagctggcagattggaatttaaataaagctttaaaaatcatttttatcgtctttattctatatttcatcttattatacttcgttcaaatgaatagtattttaatggtagcaggcatcttcttctttggtttgattggctttagtatgagcccgtcattacaatttaagagtactttaatctctcaagatgcaccaacacttgcaagtacgttgaatcaatctgcatttaatttaggtaatgctttaggtgccttcataggaggcgtcgtggttacgaatttacctatagcatcattaagtttaatagcacctatattaacggttattggactcattttcttattagtgagtattcgtgttgagaaaaaagaaggactaaatatttaa

SEQ ID NO: 1158 - protein, 386 aa, Staphylococcus saprophyticus subsp. saprophyticus ATCC 15305
MKYPIAIWMLAIGAFAIGMTEFVIMGLLPNIARDFDVTVSQAGQLITGYALGVAIGGPIIVMLTIKWNRKYLLIVLMGIFIIGNLTASFSPNYGFMMTSRIITSLAHGSFFGIGSILAASMVRPEKRASAMALMFMGLSMSNILGVPFGTLIGQNFGWPMTFIIISIIGALALIGIIIFVPMQRETIKSSVLNELQILKEKRLWLTLAVTLFGFSSVFAYFTYISTVLIDVSNVQENLISYLLIIFGIGVTLGNVVGGKLADWNLNKALKIIFIVFILYFILLYFVQMNSILMVAGIFFFGLIGFSMSPSLQFKSTLISQDAPTLASTLNQSAFNLGNALGAFIGGVVVTNLPIASLSLIAPILTVIGLIFLLVSIRVEKKEGLNI

SEQ ID NO: 1159 - DNA, 1164 bp, Staphylococcus saprophyticus subsp. saprophyticus ATCC 15305
  CDS (1)..(1164): transl_table=11
atgaaaaataataaattaatcatattcatcttaactattggcgtcttcggtatattaaatactgaaatggggtttattggattaatccctcagattgctgaacattttaatgtaagtacatctactgctggttggttagtttccgtttttgctataggcattgcgatatctggacctattatgcctttattactttcaaaaatagaacgtaaaaaagtaatgattgctgtacttgttatctttattatcagtaacattgtctcattattcacaacaagcttcagcatattactcattgcaagaatcataccggccatatttcatcctgtatacattgcgttagcattttctgttgcttctgattccgttaattcaaaagatgctccaaaagcagtagctagagtatttattggtgtctctgctggcatagtcgtgggtgtgcctatcgttaatttcttggcaaatcaattcaatttatatgctgcgttagcatttttcgcattaattaatatgattgtattgattctcactataatctttatacctaaaatgcccgctaaaaaagcagtaacatatggaacacagttacgtgtacttaaacgccctttaacttggctatccattattgtatctatattgtttaatgctgcagtttttggtgtctatagttatttgaccgattttttaaatattgtaactaacgcgccaagtcatgcagtatctattattctctttttatatggtgcctctaatattttaggcaatgtcattgcaggtaagctattaacaacgattcccaaaaaagcaatttttcttttacctttttcattgataattatttatgtggccatgtttggtattggctcatttttaattccaatgatgatgatttcagtactttggggtatactcgcaggtatttcagcaaatattacacaatatgtcattatctcagttgcgcccgatgcacctgatttatcaaatggtatttttctatctgctgtgaattctggtacaaccataggtacatttttgggcggcatatttattgcaagtttaggatcgaattttgttatctttattggcatactggcctgtatgataaatattttatttatctacttaagaaacagggagcttaagcagtttgaaataacttcataa

SEQ ID NO: 1160 - protein, 387 aa, Staphylococcus saprophyticus subsp. saprophyticus ATCC 15305
MKNNKLIIFILTIGVFGILNTEMGFIGLIPQIAEHFNVSTSTAGWLVSVFAIGIAISGPIMPLLLSKIERKKVMIAVLVIFIISNIVSLFTTSFSILLIARIIPAIFHPVYIALAFSVASDSVNSKDAPKAVARVFIGVSAGIVVGVPIVNFLANQFNLYAALAFFALINMIVLILTIIFIPKMPAKKAVTYGTQLRVLKRPLTWLSIIVSILFNAAVFGVYSYLTDFLNIVTNAPSHAVSIILFLYGASNILGNVIAGKLLTTIPKKAIFLLPFSLIIIYVAMFGIGSFLIPMMMISVLWGILAGISANITQYVIISVAPDAPDLSNGIFLSAVNSGTTIGTFLGGIFIASLGSNFVIFIGILACMINILFIYLRNRELKQFEITS

SEQ ID NO: 1161 - DNA, 1170 bp, Shigella sonnei Ss046
  CDS (1)..(1170): transl_table=11
atgaaaattaactatccgttgctggcgctggcgattggcgcgtttggtatcgggacaacggagttctcgccaatgggcttgttgcccgtcattgcgcgcggtgtggatgtctcgattcccgctgccggaatgttaatcagtgcctatgcagttggcgtaatggtgggcgcgccgctgatgacgcttctactttctcatcgtgcccgccgcagtgcgttgattttcctgatggcaattttcacgctcggcaacgtactttccgccatcgcgccggattatatgaccctgatgctttcacgcattttgaccagcctgaatcacggagcattttttggtttgggttcagtcgtggccgcaagcgtggtgccaaaacataaacaggccagcgcagttgccactatgtttatggggttaaccctggcaaatatcggtggcgtgccggcggcgacctggttgggtgaaaccatcggctggcggatgtcatttctggcaacggcggggctgggagtgatttcaatggtaagtctgttcttctcattacctaaaggtggtacaggggcacgacctgaagtgaaaaaagagctggcggtattaatgcgtccgcaggtgctgtctgcattgctgacgacggtactgggagctggcgcaatgtttactctctacacctatatctctccggtactgcaaagtattacccacgcaacaccggtgttcgtcacggcaatgctggtgctgattggtgtcggattctctatcggtaactatctcggcggcaaactggcagatcgttcagttaacggcacgttgaaaggctttttgttgctgctgatggtgattatgctggcaaccccgttcctggcccgcaatgagttcggcgcagctattagcatggtggtgtggggcgcagcaacctttgcggtcgtaccgccgttacagatgcgcgtgatgcgtgtcgccagtgaagcgccaggtctgtcttcatcagtcaatattggtgcctttaatcttggaaatgcgctgggagcagcggctggtggtgcggtaatttccgctgggctgggatacagctttgtgccggtgatgggggcgattgtcgcgggactggcattattgctggtgtttatgtcagccagaaaacaacctgaaacagtttgcgttgccaacagctaa

SEQ ID NO: 1162 - protein, 389 aa, Shigella sonnei Ss046
MKINYPLLALAIGAFGIGTTEFSPMGLLPVIARGVDVSIPAAGMLISAYAVGVMVGAPLMTLLLSHRARRSALIFLMAIFTLGNVLSAIAPDYMTLMLSRILTSLNHGAFFGLGSVVAASVVPKHKQASAVATMFMGLTLANIGGVPAATWLGETIGWRMSFLATAGLGVISMVSLFFSLPKGGTGARPEVKKELAVLMRPQVLSALLTTVLGAGAMFTLYTYISPVLQSITHATPVFVTAMLVLIGVGFSIGNYLGGKLADRSVNGTLKGFLLLLMVIMLATPFLARNEFGAAISMVVWGAATFAVVPPLQMRVMRVASEAPGLSSSVNIGAFNLGNALGAAAGGAVISAGLGYSFVPVMGAIVAGLALLLVFMSARKQPETVCVANS

SEQ ID NO: 1163 - DNA, 1263 bp, Shigella sonnei Ss046
  CDS (1)..(1263): transl_table=11
gtggataagacgttcacgccgcatccggtaatctttgccctgttccgtttcgatcttaactccagctcaagcaacaccgtaaaagttgcaaaaacgttaaatgcgtcacacatttcaatgttaaagtggtcggcttttcccctgaaacatgccacgggtaacaccatgagtgaatttattgccgaaaaccgcggcgcggatgccatcacccgaccgaactggtcagccgttttctcggtggcgttttgtgtcgcctgtctgattatcgttgagtttttgcccgtcagtttgttgacgccaatggcccaggatttaggcatttcggaaggggttgccgggcaatcggtgaccgtgaccgcctttgtggcaatgtttgccagtttgtttattacccagacaattcaggctactgaccgccgcaacgttgttattttgtttgccgttttgctgacgctctcctgcttgctggtttcctttgctaactcattcagtttgcttttaatcggtcgtgcctgtctggggctggcgctgggcgggttctgggcgatgtcggcgtcgctgaccatgcgtctggtgccgccgcgtacggtgccgaaggcgctgtcggtgatcttcggcgcggtttctattgcgctggtgattgccgcgccgttgggcagttttttaggcgagcttatcggttggcgcaatgtctttaatgcggcggcggtgatgggcgtgctgtgtattttctggattatcaaatcattgccttcactgccaggcgaaccctcgcatcagaaacaaaatactttccgcttattacaacgtccgggtgtgatggcagggatgatcgccatcttcatgtctttcgccgggcagtttgctttcttcacatatattcgcccggtgtatatgaacctggcgggattcagcgtggatggcttaacgctggtgctgttgagttttggcattgccagctttatcggtacgtcgctttcgtcattcattcttaaacgttcggtaaaactggccttagcaggcgcgccgttaatactggctgtgagtgcgttggtgctgacgttgtggggaagcgataaaatcgttgctaccggcgtggcgattatctgggggctaacttttgcattggttcccgtcggctggtcaacgtggatcacccgctcactggccgatcaggcagaaaaagccgggtctattcaggtggcggttattcagcttgtggcgcggcaatcggcggttatgcgctggataatattggtctga

SEQ ID NO: 1164 - protein, 420 aa, Shigella sonnei Ss046
MDKTFTPHPVIFALFRFDLNSSSSNTVKVAKTLNASHISMLKWSAFPLKHATGNTMSEFIAENRGADAITRPNWSAVFSVAFCVACLIIVEFLPVSLLTPMAQDLGISEGVAGQSVTVTAFVAMFASLFITQTIQATDRRNVVILFAVLLTLSCLLVSFANSFSLLLIGRACLGLALGGFWAMSASLTMRLVPPRTVPKALSVIFGAVSIALVIAAPLGSFLGELIGWRNVFNAAAVMGVLCIFWIIKSLPSLPGEPSHQKQNTFRLLQRPGVMAGMIAIFMSFAGQFAFFTYIRPVYMNLAGFSVDGLTLVLLSFGIASFIGTSLSSFILKRSVKLALAGAPLILAVSALVLTLWGSDKIVATGVAIIWGLTFALVPVGWSTWITRSLADQAEKAGSIQVAVIQLVARQSAVMRWIILV

SEQ ID NO: 1165 - DNA, 1149 bp, Pseudomonas syringae pv. syringae B728a
  CDS (1)..(1149)
ttggcggccttcattttcaataccaccgagttcgtgccgatcggtctgctgagtaacatcggccagagcttcgaaatgaccccggcccaggtcgggctgatgctcacgatctatgcctgggtcgtgtcgctgatgtcgttgccgatgatgctggcgacgcgcaacatcgagcgccgcaagttgctgatgttcgtgttcggcctgttcgtggtcagccacgtcctttccgcgattgcccccagcttcgcgatcctgctggtgagccgggtcggtatcgcgtttgcacatgcggtgttctggtcggtcacggcgtcgctggccgtgcgcatcgcaccgcccggcaagcaggttcaggcgctgggcctgctggcgaccggtacgtcgctggcgatggtattgggtattccgctgggccgcgtgctgggtgaagccctgggctggcgcaccacctttctgggcatcgccgccatcgctgcgctggtagtcttcctgctggttcgcgcgctgcctttgctgcccagtcagaactcaggctcgttgcgcagcctgccgatcctgttcaagcgcccacggctgatggcgatctacctgctgaccgccatcgtggtgaccgctcatttcaccgcctacagctatatcgagccgttcactcagaccgtgtccctgctcagcggcgaaatgaccacgatcctgctgctggtctttggcggggccgggatcatgggctcgatcatcttcagcctgttcagcgatcgcttccccaacgggctgttgatcacggccattggcacgctgaccctgtgcctgctgatgctgttgccgctctccggtgatgccgtgacgctcggcacgctgaccattatctggggcatggcgatcatgtgcttcggcctgaccttgcaggcgcgcgtactgtcgctggcacccgatgcgaccgatgtggcgatggcgctgttctcgggcatcttcaatatcggtattggcggcggcgcgctgctcggcagtgtggtcagcagccatctcggggttgccaatgtcggcatcgtcggcggcctgctggccctcggcgggttggggctgtgctgctacacaacgcatcacttcggcaaggtccggcctgctgccgagatgcaggccgagagcaaatag

SEQ ID NO: 1166 - protein, 382 aa, Pseudomonas syringae pv. syringae B728a
MAAFIFNTTEFVPIGLLSNIGQSFEMTPAQVGLMLTIYAWVVSLMSLPMMLATRNIERRKLLMFVFGLFVVSHVLSAIAPSFAILLVSRVGIAFAHAVFWSVTASLAVRIAPPGKQVQALGLLATGTSLAMVLGIPLGRVLGEALGWRTTFLGIAAIAALVVFLLVRALPLLPSQNSGSLRSLPILFKRPRLMAIYLLTAIVVTAHFTAYSYIEPFTQTVSLLSGEMTTILLLVFGGAGIMGSIIFSLFSDRFPNGLLITAIGTLTLCLLMLLPLSGDAVTLGTLTIIWGMAIMCFGLTLQARVLSLAPDATDVAMALFSGIFNIGIGGGALLGSVVSSHLGVANVGIVGGLLALGGLGLCCYTTHHFGKVRPAAEMQAESK

SEQ ID NO: 1167 - DNA, 1176 bp, Burkholderia cepacia R18194
  CDS (1)..(1176)
atgcccatcccgttactggcgcttgcgatcagcgccttcgccatcggtaccaccgagttcatcatcatgggcctgctgcccgaagtcgcgcacgacctggccgtgtcgctgccgtcggccggcctgctggtcaccggctacgcgctcggtgtcgcggccggcgcgccgctgctcgcggtgctgacgagccgcatgccgcgcaaggccgcgctgcagttgctgatggcgatcttcatcgtcggcaacgtgctgtgcgcgaccgcgtccggctacgcgatgctgatggtcgcgcgcgtcgtcacgtcgttcgcgcacgggtcgttcttcgggataggcgcggtggtcgccgcgtcgctcgtgccgaccgacaagcgcgcgagcgcgatcgcgctgatgttcacggggctcacgctgtcgaacgtgctcggcgtgccgttcggcaccttcgtcggccagttgctcggctggcgtgcatcgttctggatcgtcgccgcgctcggcgtgctggcgctcggcggcgtagccgcgctcgtgccgaatcgccacgacagcgggccggtcggcctcggtcacgaagtgcgcgtgctgaaggagccgcaggtgtggctcgcgctgttgatgaccgtgctcggcttcggcggcgtgttcgtcgtgttcacgtacatcgcgccgattctccagtccgtgtcgggctattcgccgcgtgcggtcgcgctgatcctcgtgctgttcggcgcgggactgacaatcggcaacacgctcggcggcaagctcgcggaccgcgcgctgatgccgtcgttgatcgcgatcctcgtcgcgctgatggccgtgatggtcgtattcgccaggacgagccaccatccggtcgcggcggccgtgaccgtgttcgtgtgggggatcgctgcgttcgcgacggtgccgccgctgcaggcgcacgtggtcgagaaggccgcgagcgcgccgcatctcgcctcgacgctgaacatcggcgcgttcaacgtcggcaatgcgctcggcgcgtggctcggcggccttgcgctcggtcacggcctcgcgctcgacgcgttgccgtgggtggccgtcgcggtgacgttcgcggcgctcgtcgtcacgtggttcgcgatgcggctcggcgcgcgcgggccggcacgcggcgcggcgccagcggcgcaatga

SEQ ID NO: 1168 - protein, 391 aa, Burkholderia cepacia R18194
MPIPLLALAISAFAIGTTEFIIMGLLPEVAHDLAVSLPSAGLLVTGYALGVAAGAPLLAVLTSRMPRKAALQLLMAIFIVGNVLCATASGYAMLMVARVVTSFAHGSFFGIGAVVAASLVPTDKRASAIALMFTGLTLSNVLGVPFGTFVGQLLGWRASFWIVAALGVLALGGVAALVPNRHDSGPVGLGHEVRVLKEPQVWLALLMTVLGFGGVFVVFTYIAPILQSVSGYSPRAVALILVLFGAGLTIGNTLGGKLADRALMPSLIAILVALMAVMVVFARTSHHPVAAAVTVFVWGIAAFATVPPLQAHVVEKAASAPHLASTLNIGAFNVGNALGAWLGGLALGHGLALDALPWVAVAVTFAALVVTWFAMRLGARGPARGAAPAAQ

SEQ ID NO: 1169 - DNA, 1218 bp, Azotobacter vinelandii AvOP
  CDS (1)..(1218): transl_table=11
atgaatacccaaccgaatgcccccgccggcagttggccgagcgtgatcgcgctggccctggcaggcttcatcttcaacacgaccgagttcatccccgtcgccctgctgagcgccatcggcgacagtttctccctgtcgaccgaccgggtcggcctgatgctgacgatctacgcctgggtggtcaccctcgcctcgctgccgatgatgctgctgacgcgcaatatcgaccggcgccggctgctgatgctggtgttcgccctgttcgtcgccagccatgtcctgtcggcgctgtcttccaacttcatcgtcctgctgctgagcaggatcggcgtcgcctttgcgcatgccgtgttctgggcgatcacggcctccctggtggtgcgcatggccccgcctggcaagcagacccaggccctcggcctgctggcgaccggtacttccctggccatggtgctgggtattccgctggggcgcgtggtaggcgaaatgctcggctggcgcacggccttcgcggcaatcgccgggatcgccatgctgacgctgttgtgcctggcctggacgctgccgccgttgcccagccagaactcggggtcgctgcgcagcctcccggtgctgttcaagcgtccggcgctggtggcctgctacgtgctgaccgccgtggcgatcaccgcgcatttcaccgcctacagctatatcgaacccttcgccgaggccatcggccacctgaccggcgaggcgacgaccatcctgctgctgatcttcggcggcgccggcatcatcggttccctggtgttcagccatttctacaaccggaccccgaacggcctgctgatcaccgcgctctccgccatggcgctgtgcatgctgctgctcctgcccctggccggagaagcctggacgctcggcgcattgagcctggcatggggggtcgccatcatgtgcttcgggatgacgcagcagtccaaggtcatggcgctggccccggacgccaccgacgtggcgatggccctgcattcgggcatctacaacatcggcatcggcggcggcgccctgctcggcagcgcggtgagcagccatctgggaatcgcggacgtcggtaccaccggcggcctgctggccatgggtggactgctgttctgttgcgcgatgacttatcgcctcagcaaaccgctcgtcccccaggctcttgcgactggacagcaggatctgcgggtttga

SEQ ID NO: 1170 - protein, 405 aa, Azotobacter vinelandii AvOP
MNTQPNAPAGSWPSVIALALAGFIFNTTEFIPVALLSAIGDSFSLSTDRVGLMLTIYAWVVTLASLPMMLLTRNIDRRRLLMLVFALFVASHVLSALSSNFIVLLLSRIGVAFAHAVFWAITASLVVRMAPPGKQTQALGLLATGTSLAMVLGIPLGRVVGEMLGWRTAFAAIAGIAMLTLLCLAWTLPPLPSQNSGSLRSLPVLFKRPALVACYVLTAVAITAHFTAYSYIEPFAEAIGHLTGEATTILLLIFGGAGIIGSLVFSHFYNRTPNGLLITALSAMALCMLLLLPLAGEAWTLGALSLAWGVAIMCFGMTQQSKVMALAPDATDVAMALHSGIYNIGIGGGALLGSAVSSHLGIADVGTTGGLLAMGGLLFCCAMTYRLSKPLVPQALATGQQDLRV

SEQ ID NO: 1171 - DNA, 1200 bp, Silicibacter sp. TM1040
  CDS (1)..(1200): transl_table=11
atgccctcttctgccccaccgctctggatctccatcgccaccctgatgtgcgccattgccatcgtgggcaccaacgcgctgttgctgtcgcctctggtgcaaaccgtcggagccgacctcgcggccagcccggcgcaggtgctctgggcctcgagcggctatgggcttggggtggcagcggcggcgctgctgatcgccccgatcggcgaccgcatcggcgcggggcgtctgctgcgtatggccttggcggtgctgacccttggctttgttgccagcgcgctggccccgtcactagcggcactgatcgcggcgcaagtgctctgcggccttgcaggtggcgcggcgctgccctcgatctacacgatggccgccgtgattgccccaaaggggcgcgaagcccgcgtggttggggccgtgctcaccggctggaccctgtcgctggtcctgggcgtaagcctcgccgcatggagcgcagagcttgtgggctggcgggctgtttatggcgctttggcggcgctttgtgcgctgatctggaccctaagcgccccgcttgcgcgtctggatgagccgggcggcgcggccagctcccccctcagcgcgctgcgagtgccgggcatggcgcgcggcatctttgcctcggtcgggctgatgctcagtttctatgtcacctattcctacaccggtgcccacgccacggtaagccttggcctgagcaccggtcaggctgggcttttgccactgatctatggactggggtttggcggtgcggtgctgctcgacccgattctggaccgtatcgggatggcccgcgccaccacgccggttttcctcgcgctgagccttgtctatctcgccatgggcgtgttgggcgccagctatatgctctttctggcgctggcagccctgtgggggatcttccagcactttggcttgaatcttcttgtggcgcggctcaccgtgctggatgtgcgccaacgcggcgcgatcatgggtctttattcgaccacaacctacctcagcgtctttgccgcgccctttgtcggcggtatcggctttcaagcgctcgggatcatgggctgtgtgcttatttcggcggcgctcaccacccttgctgcggtcgaggcactgagccttcggcgcagcagcctgccctttacgacggatcccgcccagcccggcgcgcccgacgcgcctgcctga

SEQ ID NO: 1172 - protein, 399 aa, Silicibacter sp. TM1040
MPSSAPPLWISIATLMCAIAIVGTNALLLSPLVQTVGADLAASPAQVLWASSGYGLGVAAAALLIAPIGDRIGAGRLLRMALAVLTLGFVASALAPSLAALIAAQVLCGLAGGAALPSIYTMAAVIAPKGREARVVGAVLTGWTLSLVLGVSLAAWSAELVGWRAVYGALAALCALIWTLSAPLARLDEPGGAASSPLSALRVPGMARGIFASVGLMLSFYVTYSYTGAHATVSLGLSTGQAGLLPLIYGLGFGGAVLLDPILDRIGMARATTPVFLALSLVYLAMGVLGASYMLFLALAALWGIFQHFGLNLLVARLTVLDVRQRGAIMGLYSTTTYLSVFAAPFVGGIGFQALGIMGCVLISAALTTLAAVEALSLRRSSLPFTTDPAQPGAPDAPA

SEQ ID NO: 1173 - DNA, 1278 bp, Bacillus subtilis
  CDS (1)..(1278): transl_table=11
ttgagggtgtctaccaggaaccgtaaaatcctgattacaaaatttgtttatgacattttttgtaatcaggattttttttatttatcaaaacatttaagtaaaggagtttgttatgaatttcaaagttttcctgttgcagcttctacgattgcagtcggattggttgagttaattgtggggggaattcttcctcagatcgcaaatgatttagacatttccattgtttcagccggacagctgatcagtgtgtttgcgctgggatatgcagtatctgggccgctgcttttggcattgactgcgaagattgagcggaagcgcttatatctaattgctttatttgttttcttccttagcaatcttgtcgcctatttcagccctaatttcgcaacactgatggtatctagggtattggcagcaatgagtacagggctgattgttgtgctttctttaacaattgccccgaaaattgtagcgcctgaatacagagcccgcgcaatcggaattatttttatgggattcagctctgctatcgcattaggcgtgccgctcggaatcttaatcagcgattccttcgggtggcggattttgttccttggcatcggcctgttggcactgatctccatgctgattatttcaatcttctttgaaagaataccggcggagaaaatgattcctttccgggaacaactcaagacgatcggtaatctgaaaatcgcgagttcacacctcgtcacgatgtttacattagctggccactacacgctttacgcttactttgcgccgtttttagaagagactcttcacctgagctctttctgggtcagcatttgttatttccttttcgggatatctgctgtatgcggaggccctttcggaggagcgctatctgaccggcttggttcctttaagagcattttgctggtgaccggttcctttgccatcattatgttcttactgccgctgtctacatcgtctatgattttctttttgcctgtcatggtgatttggggtcttctgagctggagcctcgccccggctcagcaaagctatttaattgaaattgcacctgattcgtctgacattcagcaaagctttaacacatcggccctccaagtcggaattgcccttggctcagccattggcggtgttgttttggatcagacgggtactgtggtgtcaacggcatggtgcggcggatcgattgtgatcatcgctgtcctgtttgctttcatttctttaacaagacctgttcaaacagcaaaaaaatcctccttgtaa

SEQ ID NO: 1174 - protein, 425 aa, Bacillus subtilis
MRVSTRNRKILITKFVYDIFCNQDFFYLSKHLSKGVCYEFQSFPVAASTIAVGLVELIVGGILPQIANDLDISIVSAGQLISVFALGYAVSGPLLLALTAKIERKRLYLIALFVFFLSNLVAYFSPNFATLMVSRVLAAMSTGLIVVLSLTIAPKIVAPEYRARAIGIIFMGFSSAIALGVPLGILISDSFGWRILFLGIGLLALISMLIISIFFERIPAEKMIPFREQLKTIGNLKIASSHLVTMFTLAGHYTLYAYFAPFLEETLHLSSFWVSICYFLFGISAVCGGPFGGALSDRLGSFKSILLVTGSFAIIMFLLPLSTSSMIFFLPVMVIWGLLSWSLAPAQQSYLIEIAPDSSDIQQSFNTSALQVGIALGSAIGGVVLDQTGTVVSTAWCGGSIVIIAVLFAFISLTRPVQTAKKSSL

SEQ ID NO: 1175 - DNA, 1176 bp, Rhodococcus rhodochrous
  CDS (1)..(1176): transl_table=11
gtgcctttcgctatctacgtcctcgggcttgccgtctttgcccagggcacatccgaattcatgttgtccgggctcataccggatatggcccgcgacctcggcgtctcggtccccgccgccggactcctcacctccgccttcgcggtcgggatgatcatcggcgctccgctgatggccatcgccagcatgcggtggccccggcgacgcgcccttttgacattcctcatcacgttcatgctggtccacgtcatcggcgcgctcaccagcagcttcgaggtcttgctggtcacacgcatcgtcggcgccctcgccaacgccggattcttggcggtggccctgggcgcggcgatggcgatggtgcccgccgacatgaaagggcgcgcaacgtccgtcctcctcggtggtgtcacgatcgcatgtgtagccggagttcccgggggcgccttcctcggtgaaatatggggctggcgtgcagcgttctgggctgtcgtcgtcatctccgcccctgcggtggtggcgatcatgttcgccaccccggccgagccgccagcagagtccacaccgaacgccaagcgtgaactgtcctcgctgcgctcacgcaagctccagctgatgcttgtcctcggtgccctgatcaacggcgcaacattctgttcgttcacctacatggcgcccactctcaccgacatctccggtttcgactcccgttggattccgttgctgctggggttgttcgggctcggatcgttcatcggcgtcagcgtcggaggcaggctcgccgatacccggccgttccaacttctcgccgtgggatccgcagcactgttgacgggatggatcgtcttcgctctcacggcatcccaccctgcggtgacattggtgatgctgttcgtgcagggcgctctgtccttcgcggtcggctcgaccttgatctcccaggtgctctacgccgccgacgcggcgccgaccttgggtggatcgttcgcgacggccgcgttcaacgtcggcgctgcactgggcccggccctcggcgggctggcgatcggtatgggcctgagctaccgcgccccgctctggacgagcgccgcgctggtgactctcgcgatcgtcatcggcgcagccaccttgtcgctctggcggcgtccagcgtccgtccaggaaaccgtcccagcctga

SEQ ID NO: 1176 - protein, 391 aa, Rhodococcus rhodochrous
MPFAIYVLGLAVFAQGTSEFMLSGLIPDMARDLGVSVPAAGLLTSAFAVGMIIGAPLMAIASMRWPRRRALLTFLITFMLVHVIGALTSSFEVLLVTRIVGALANAGFLAVALGAAMAMVPADMKGRATSVLLGGVTIACVAGVPGGAFLGEIWGWRAAFWAVVVISAPAVVAIMFATPAEPPAESTPNAKRELSSLRSRKLQLMLVLGALINGATFCSFTYMAPTLTDISGFDSRWIPLLLGLFGLGSFIGVSVGGRLADTRPFQLLAVGSAALLTGWIVFALTASHPAVTLVMLFVQGALSFAVGSTLISQVLYAADAAPTLGGSFATAAFNVGAALGPALGGLAIGMGLSYRAPLWTSAALVTLAIVIGAATLSLWRRPASVQETVPA

SEQ ID NO: 1177 - DNA, 1200 bp, Bacillus subtilis
  CDS (1)..(1200): transl_table=11
atgacgttgagtatcaaaaacccatctgtaaaatttattatatttgttcttatgatttgtacattttcaatcggctatacagaatacgcggtgatgggtattttgacgtcgattgccaatgactttcatatacaggtttcatccgcagggcttcttgtcacggcttatgcggcaagcgtttgtttgacagggccgctcgtcaccatcatttccgtcaagcttccgagaaagcctgtgcttcttgggctgatggcgatatttatcctttccaacctgatgagcgcactggcgccgaattttgcggtattggccatttcaagaattttatctgcgtccattcacggcgctttcttcgcgattgccatggtattcgcaagtgaaatggttccgccggaaaagcgtgctgcagctgctgcttcaatgaacggcggactgacagtggctctaatgcttggtgttccattcggctcttatctcggagatgtcctgaattggagagcggtgttttccatcattacggcacttggtgtcatcggatttttaggccttatggctgccgtgccgaacagaaaaccaaaagtgatcccaatgcttatgaatgagtggggtgtttttaaacacaaacaagtgctgttttccttcgcgattaccattttaggctattccggtgtctttatcgcctacacctttatcgaacccattttgaggcattcagccggattcagcacggttggcattacaggtgctctctttgcgtatggattgggaggcgttgccgggaatttctttgctggaaaggtaccgctgcctttgctgactcggacgatgatcggcgtaatgatcggtttaatcggtgttctggctgtatttccttacatcgccatttacccggctgcagccattgtggcaacgttcctattcggggcatgcgcattcggcacgccgcctcttctgcaaacaaaggtcatttcctcatctgagggcggcacaaccattgccgcagctgtcagcgtatcagcatttaaccttgccaatgcccttggtgcatggatcggcggaatgattttaaacggaacaggctcttattcctggctgtttgcaggaggtgcgcttatgaccgcatgcggacttgtgctttctaccttcgcacacttatcagaaaagaagagcgtctacgaatatcaagtcaataaagggtaa

SEQ ID NO: 1178 - protein, 399 aa, Bacillus subtilis
MTLSIKNPSVKFIIFVLMICTFSIGYTEYAVMGILTSIANDFHIQVSSAGLLVTAYAASVCLTGPLVTIISVKLPRKPVLLGLMAIFILSNLMSALAPNFAVLAISRILSASIHGAFFAIAMVFASEMVPPEKRAAAAASMNGGLTVALMLGVPFGSYLGDVLNWRAVFSIITALGVIGFLGLMAAVPNRKPKVIPMLMNEWGVFKHKQVLFSFAITILGYSGVFIAYTFIEPILRHSAGFSTVGITGALFAYGLGGVAGNFFAGKVPLPLLTRTMIGVMIGLIGVLAVFPYIAIYPAAAIVATFLFGACAFGTPPLLQTKVISSSEGGTTIAAAVSVSAFNLANALGAWIGGMILNGTGSYSWLFAGGALMTACGLVLSTFAHLSEKKSVYEYQVNKG

SEQ ID NO: 1179 - DNA, 1233 bp, Streptomyces lividans
  CDS (1)..(1233): transl_table=11
atgcccacagcaaccaccacttccatcgactcgccttcattgccggcgcgatcaccattggtatcgtggctggcggtgatttcggtgatgttggggatcttctcgatcatcaccaccgagatcctgccgatcggccttttgacctcgattggctcgagtttcaccatctccgatggaatggctggtctgatgatgaccatgcctggttttctggccgcggtatcggcgcccgtggtaactgtcgccacggggcgcatcgatcgtcggctcatgctgggtacgtttattctgttgctggcattggcgaatttcctggccgcggttgcgccgagctactggcttgtcctggtctcacgtgtattggtcggggtcaccatcggtggtttctggtccatcggcgcagggctggcaagccggctggttcctgccgcatcggtgggccgggcaaccgccgtgatcttctccgcggtgcctctcgggtccgtgctcggagtcccgctgggtacgctcgtcggagacgttgcggggtggcgcaccgcgtttcttgtcatggggattctgaccctctgtgtcttcgccctgttgctcctggtggtcccgccgctgccgaccgatgagccgactcgtctgagtgcgctcacgggcatgctcaggagtgtcaatactcggtttgccttggtgatgacgttcctcgtggtgctcgcccacttcggtgcctacacctatgtcaccccgttcctggagcaggtgactcatgtgagcgccgggctcatcacggtctatctgctcgtgtacggagttgcaggaattgccgggaacttcctgggcggatcggctgtggcgcggtatccgatcggcaccttcgcagccgccgccctgatgatcgccggcgcgactgtgctgctcccggtgctcggcaaggaggatctcggcgccgtggccctgctggttttgtggggcgttgcctacggtgccgtgcctgtctgctcgcagacctggttcgccaaggcctcacccgattcacccgaagcctcttccgtgctcttcacggcctcgttccaggccaccatctccatcggggcgctggtcggaggcgtcgtggttgaccactcctccccatccacggtcatgacgctcgctggcacagccgctgccctgatggtgctggtcgcctggtcccactgcgcccggaagaacccgttgcctgacccggccaagcccaagcgagcatga

SEQ ID NO: 1180 - protein, 410 aa, Streptomyces lividans
MPTATTTSIDSPSLPARSPLVSWLAVISVMLGIFSIITTEILPIGLLTSIGSSFTISDGMAGLMMTMPGFLAAVSAPVVTVATGRIDRRLMLGTFILLLALANFLAAVAPSYWLVLVSRVLVGVTIGGFWSIGAGLASRLVPAASVGRATAVIFSAVPLGSVLGVPLGTLVGDVAGWRTAFLVMGILTLCVFALLLLVVPPLPTDEPTRLSALTGMLRSVNTRFALVMTFLVVLAHFGAYTYVTPFLEQVTHVSAGLITVYLLVYGVAGIAGNFLGGSAVARYPIGTFAAAALMIAGATVLLPVLGKEDLGAVALLVLWGVAYGAVPVCSQTWFAKASPDSPEASSVLFTASFQATISIGALVGGVVVDHSSPSTVMTLAGTAAALMVLVAWSHCARKNPLPDPAKPKRA

SEQ ID NO: 1181 - DNA, 1176 bp, Rhodococcus fascians
  CDS (1)..(1176): transl_table=11
gtgccattcgccatctatgtcctgggtattgctgtattcgcccagggcacatcggaattcatgctgtccggactcataccggatatggctcaggatctacaggtttcggtccccactgcaggacttctcacttcggcattcgcaatcggcatgatcatcggtgccccgttgatggcaattgtcagtatgcggtggcaacgtcgacgagcgctcttgaccttcctcatcacttttatggttgtgcatgtcatcggcgcactcaccgacagtttcggcgtcttgctggtcacccggatcgtaggagcactggccaacgccggtttcctggctgtagcgctgggcgcagccatgtcgatggttcctgccgacatgaagggacgagcgacctcagttctactgggcggagtgaccatcgcctgcgtagttggagtcccgggcggagcgctattgggcgaactgtggggatggcgcgcctcgttctgggaggtagtgctgatttccgcaccggcagtggcagcgatcatggcatcgacccctgctgattcccctacagattctgttccgaacgcgacccgcgaactgtcctcgctgcgtcaacgcaaacttcaactgatcttggtgctgggcgcgctgatcaacggtgccaccttctgttccttcacctacctggctccgacgctcaccgacgtcgccgggttcgactctcgctggatccctttgcttctcggactgttcggactggggtcgttcatcggcgtcagtgtcggtggccggctcgctgacacccgtccgtttcaattgctggtggcgggctcggcagctcttctggtcgggtggatcgtgttcgctatcactgcctctcacccggtagtgaccctggtgatgctgttcgtgcaaggaacgctgtcgttcgctgtggggtcgacgttgatctcgcgagtgctctacgtcgccgacggtgctccgactttggggggatccttcgctacggctgccttcaatgtcggagccgcattggggccggccctcggcggtgtggccatcggtatcggaatgggctatcgcgctccactgtggaccagcgcggctctggtggcacttgcgatcgtgatcggtgccgcgacgtggacgcgttggcgggaaccacgtccagcgctggacaccgttcctccgtga

SEQ ID NO: 1182 - protein, 391 aa, Rhodococcus fascians
MPFAIYVLGIAVFAQGTSEFMLSGLIPDMAQDLQVSVPTAGLLTSAFAIGMIIGAPLMAIVSMRWQRRRALLTFLITFMVVHVIGALTDSFGVLLVTRIVGALANAGFLAVALGAAMSMVPADMKGRATSVLLGGVTIACVVGVPGGALLGELWGWRASFWEVVLISAPAVAAIMASTPADSPTDSVPNATRELSSLRQRKLQLILVLGALINGATFCSFTYLAPTLTDVAGFDSRWIPLLLGLFGLGSFIGVSVGGRLADTRPFQLLVAGSAALLVGWIVFAITASHPVVTLVMLFVQGTLSFAVGSTLISRVLYVADGAPTLGGSFATAAFNVGAALGPALGGVAIGIGMGYRAPLWTSAALVALAIVIGAATWTRWREPRPALDTVPP

SEQ ID NO: 1183 - DNA, 1311 bp, Streptomyces violaceus
  CDS (1)..(1311): transl_table=11
atgccgtctccctccgccgagcccacgacatccaccccgacccccgacgccgggcccgccgcatccccccggatgcccctggccgtctacatcctcggactgtccgcgttcgcgctcgggacgagcgaattcatgctctccggcctcgtgccgcccatcgcggaggacatgaacgtctccatcccccgcgccggactcctcatctcggcgttcgcgatcggcatggtcgtcggcgcaccgctcctcgccgtcgccaccctccggctcccccgcaagaccaccctcatcgccctcatcaccgtcttcggcctgcgccagatggccggcgccctcgcccccaactacgcggtcctcttcgcctcccgcgtgatcagcgccctgccctgcgcgggcttctgggcggtcggcgcggcggtggccatcgcgatggtcccggtcggctcacgggcccgggcgctggcggtcatgatcggcggcctctccatcgccaacgtcctgcgcgtccccgccggcgccttcctcggcgagcacctcggctgggcctccgccttctgggccgtcggcctcgcctccgccatcgcgctcgtcggcgtcgtcacccgcatcccccgcatcccgctccccgagaccaggccccgccctctcaagaacgaggtcgccatctaccgcgaccgccaggtcctcctgtcgatcgcggtcacggccctcgcggcgggcggcgtcttctgcgccttctcgtacctcgcgccgctgctcaccgacgtctccggcctcgacgaggcctgggtctccggcgtcctcggcctcttcggcatcggcgccgtcgtcggtacgacgatcggcggccgggtcgccgacgcgcacctcttcggcgtgctgctcaccggcatctccgcctccaccgtcttcctcgtggccctggccctgttcgcctcgaacccggccgccacgatcgtgctgaccttcctcctcggcgtctcggccttctacacggccccggccctcaacgcccgcatgttcaacgtcgccggcgccgcccccaccctcgcgggcgccaccaccaccgccgccttcaacctcggcaacacgggcggcccctggctcggcggcacggtcatcgacgcgaacctcggcttcgcctcgacggcctgggcgggcgcggcgatgacggtcctgggcctgggaacggcggccctggccctccgcctgaccaagcgcccggcccccggccacgtggtcgcccggagcagaggggcgggcgggaccaccccgtccgaaccggccagggggaaggccacgtcgagctgctga

SEQ ID NO: 1184 - protein, 436 aa, Streptomyces violaceus
MPSPSAEPTTSTPTPDAGPAASPRMPLAVYILGLSAFALGTSEFMLSGLVPPIAEDMNVSIPRAGLLISAFAIGMVVGAPLLAVATLRLPRKTTLIALITVFGLRQMAGALAPNYAVLFASRVISALPCAGFWAVGAAVAIAMVPVGSRARALAVMIGGLSIANVLRVPAGAFLGEHLGWASAFWAVGLASAIALVGVVTRIPRIPLPETRPRPLKNEVAIYRDRQVLLSIAVTALAAGGVFCAFSYLAPLLTDVSGLDEAWVSGVLGLFGIGAVVGTTIGGRVADAHLFGVLLTGISASTVFLVALALFASNPAATIVLTFLLGVSAFYTAPALNARMFNVAGAAPTLAGATTTAAFNLGNTGGPWLGGTVIDANLGFASTAWAGAAMTVLGLGTAALALRLTKRPAPGHVVARSRGAGGTTPSEPARGKATSSC

SEQ ID NO: 1185 - DNA, 1239 bp, Streptomyces antibioticus
  CDS (1)..(1239): transl_table=11
atgacccctcccgccgcacagcaggggcgcgcctggcggacccacgcctgtgtgctcgcactcggcacgttcgccgtcggcaccgacgccttcgtcatcgccggcctgctccccgacatcagtgactcgctcgacatctccgtgggcgcggcgggccagctcgtcagcgtcttctcgctggcctacgccctgctctccccggtgctcgccgcgttcaccgcccgctggtcacgccgtacggtgctgatcacggggctcggcgtgttcgccgtcggcaacgtggtcaccgccctcgcccccgactacgcgctcgtcctggcggcccgggtgatcgccgcggccggcgccgcgatgttcacccccaacgcgggcgcgaccgcggcgaccctggccggacccgagcaccggggccgggcgatcgccatcgtcaccgtggggctgaccgcctcgctcgcgctgggcgcgccgctcggcaccgtcatcggcgaggcgctgggctggcaggccaccatgtggttcgtcaccgcgctcgccctggtcgtggccccggtcatcgccctgcggctgcccgacgtcaccctgggcggcccgacccagctgcggcggcgcctcgccccgctcgccgaccgcaaggtcgccggggtactggccggcacgctggtcgcgttcatcggcatctacctgccctacacctacatcagcgccgtcttcgagcccgccaccggcggggacggtgacaaggtggccgtactgctgctggtcttcggcctggcggggacggccggcaacctcaccgcgggccggctcgccgaccgcaaggggccgcgcacggtcgtcatcggcgcgacgctgctgctgacggtggtgttcgcggtcatggccggcgtccgctcctcctacccggccgccgtcgcgctgacggcggtgtgcggcgtcgcctcctggtcggtgaccgcgccgcagcagcagcgcgtcatggcgctggccagccccggcagcgagcccctggccgtctccctcaacgccgccgtgatgtacctggcgatctcgctgtccagcgcgctgggcgccgggatcctcggtgcgacgggtgccgtgtggatcgcctgggcgggcgccgccttcgccgtggccgcggcgctggtcacggccgccgccgcccgcaccgagcgggccggcgccgggtccgcggagccggagcgggagccggccggggcgcaggaggcgtccgccggttag

SEQ ID NO: 1186 - protein, 412 aa, Streptomyces antibioticus
MTPPAAQQGRAWRTHACVLALGTFAVGTDAFVIAGLLPDISDSLDISVGAAGQLVSVFSLAYALLSPVLAAFTARWSRRTVLITGLGVFAVGNVVTALAPDYALVLAARVIAAAGAAMFTPNAGATAATLAGPEHRGRAIAIVTVGLTASLALGAPLGTVIGEALGWQATMWFVTALALVVAPVIALRLPDVTLGGPTQLRRRLAPLADRKVAGVLAGTLVAFIGIYLPYTYISAVFEPATGGDGDKVAVLLLVFGLAGTAGNLTAGRLADRKGPRTVVIGATLLLTVVFAVMAGVRSSYPAAVALTAVCGVASWSVTAPQQQRVMALASPGSEPLAVSLNAAVMYLAISLSSALGAGILGATGAVWIAWAGAAFAVAAALVTAAAARTERAGAGSAEPEREPAGAQEASAG

SEQ ID NO: 1187 - DNA, 1176 bp, Rhodococcus erythropolis
  CDS (1)..(1176): transl_table=11
gtgcctttcgctatctacgtcctcgggcttgctgtcttcgcccagggcacatccgaattcatgttgtccggactcataccggacatggcccgtgacctcggggtttcggtccccgccgccggactcctcacctccgccttcgcggtcgggatgatcatcggcgctccgttgatggctatcgccagcatgcggtggccccggcgacgcgcccttctgacattcctcatcacgttcatgctggtccacgtcatcggcgcgctcaccagcagcttcgaggtcttgctggtcacacgcatcgtgggagccctcgccaatgccggattcttggcagtggccctgggggcggcgatggcgatggtgcccgccgacatgaaagggcgcgccacgtccgtcctcctcggcggtgtcacgatcgcatgtgtagccggtgttcccgggggcgccttcctgggtgaaatgtggggctggcgtgcagcgttctgggctgtcgtcgtcatctccgcccctgcagtggtggcgattatgttcgccaccccggccgagccgcttgcagagtccacaccgaatgccaagcgtgaactgtcctcactgcgctcacgcaagctccagctcatgcttgtcctcggggcgctgatcaacggcgcaacgttctgttcgttcacgtacatggcgcccacgctcaccgacatctccggtttcgactcccgttggattccgttgctgctggggctgttcgggctcggatcgttcatcggtgtcagcgtcggaggcaggctcgccgacacccggccgttccaactgctcgctgtcgggtccgcagcactgttgacgggatggatcgtcttcgctctcacggcatcccaccccgcggtgacattggtgatgctgttcgtgcagggcgctttgtccttcgcggtcggctcgactttgatctcccaggtgctctacgccgccgacgcggcaccgaccttgggtggatcgttcgcgacggccgcgttcaacgtcggtgctgcactgggaccggcgctcggcgggttggcgatcggcatgggtctgagctaccgcgccccgctctggacgagcgccgcgctggtgacactcgcgatcgtcatcggcgcagccaccttgtctctgtggcggcgaccagcgtctgtccacgaatctgtccccgcctga

SEQ ID NO: 1188 - protein, 391 aa, Rhodococcus erythropolis
VPFAIYVLGLAVFAQGTSEFMLSGLIPDMARDLGVSVPAAGLLTSAFAVGMIIGAPLMAIASMRWPRRRALLTFLITFMLVHVIGALTSSFEVLLVTRIVGALANAGFLAVALGAAMAMVPADMKGRATSVLLGGVTIACVAGVPGGAFLGEMWGWRAAFWAVVVISAPAVVAIMFATPAEPLAESTPNAKRELSSLRSRKLQLMLVLGALINGATFCSFTYMAPTLTDISGFDSRWIPLLLGLFGLGSFIGVSVGGRLADTRPFQLLAVGSAALLTGWIVFALTASHPAVTLVMLFVQGALSFAVGSTLISQVLYAADAAPTLGGSFATAAFNVGAALGPALGGLAIGMGLSYRAPLWTSAALVTLAIVIGAATLSLWRRPASVHESVPA

SEQ ID NO: 1189 - DNA, 1311 bp, Streptomyces capreolus
  CDS (1)..(1311): transl_table=11
atgcagccggacttgaccctcacaccaatgtcacacattgatgatcaggttatgacacgaacggatacatcaccatcgccttccgccgctgacgcacggttcccgctcgcgggtctgctggctctggctgccacggggttcatcacgctcctgacggagacgatgcccgctgggatgttgtcgcagatgagccgcgacctgggagtgagcgaggcggctacggggcagagcgtcacggtcttcgcgatcggcgcgattctcgcggcggtccctctcacgagagccacgatcggctggcgacgcaagcacctgctgctgttcgcgatctccgggttcgcggtcgccaacacggtcacggccttttccgacagtttcgcgctcaccctgaccgcgcggttcctcggcgggatcgtcggcggcatgctctgggcgctccttgccggttacgcccggaggatggttcccgcgcaccagcgcggcaaggccatggccatcgcgatggcgggcgggaccgtcgcactgtccgtcggggtccccgcagccgcgttcctcgccaaggccgtcgaatggcgattcgcgttcgggatcatcacgctggtcactctcgcactgatcgtatgggtgatcgccaccgttccggacttccccggccaatccaagggcgcacgactgccgctggcccacacgttccgtctgcccggagtcgccccgatcctcgtcgtgacgttgacgttcgtgttcgcacacaacatcctcttcacctacatcgcaccgttcctggccccgctcggtatggcgggtcaggttgactcagtgctgctcaccttcggcctggtctccctcgtgagcatctggatcaccggcgtactcatcgaccggcacctgcgcatgcttatgatcctggcctgcgcactcctggccacagccgctctcatcctgtgcgttttctctgacaaccccgccctcgtgtacgccagtgcagccctgtggggactcgcgttcggcggtgcttcaaccctgctgcaaaccgcgatcgctgacgccgcaggcccagcgggcgacgtcgcacaagcactcctcaccacatgctggaacatcgcgatcgccgtaggcgggatcatcggcggtatcaccctcaacgtgctgggacccccctccttgagctgggtcaccttcgcgctcctgctcccggcgctcgctatcgtcatcggcgcacgtcgacacggattcaccaaccgcgcattcgaacgcgagaccgcctccggaccggacgcgcgacaccagacagccgaaaacggcgcgctggcgtga

SEQ ID NO: 1190 - protein, 436 aa, Streptomyces capreolus
MQPDLTLTPMSHIDDQVMTRTDTSPSPSAADARFPLAGLLALAATGFITLLTETMPAGMLSQMSRDLGVSEAATGQSVTVFAIGAILAAVPLTRATIGWRRKHLLLFAISGFAVANTVTAFSDSFALTLTARFLGGIVGGMLWALLAGYARRMVPAHQRGKAMAIAMAGGTVALSVGVPAAAFLAKAVEWRFAFGIITLVTLALIVWVIATVPDFPGQSKGARLPLAHTFRLPGVAPILVVTLTFVFAHNILFTYIAPFLAPLGMAGQVDSVLLTFGLVSLVSIWITGVLIDRHLRMLMILACALLATAALILCVFSDNPALVYASAALWGLAFGGASTLLQTAIADAAGPAGDVAQALLTTCWNIAIAVGGIIGGITLNVLGPPSLSWVTFALLLPALAIVIGARRHGFTNRAFERETASGPDARHQTAENGALA

SEQ ID NO: 1191 - DNA, 1227 bp, Rhizobium loti
  CDS (1)..(1227): transl_table=11
atgaccgaatccgctacgggcttcatggacggagttctgcatgacccaaaacagccagatcaacggtctggtcccgcatggggtgcagtcatttcgcttgccttaggcacctttgggcttgtgacggcagagtttctgcctgccagcgtgctgacgccgctcgcgcatgatctctctatcaccgagggtgcagttggacaggcgctgacaacgaccgccatcgtgggggcgatctcggcgcccacgatggccgtcatcacaaggcccctggaccgcaggatcgtcatatgggcgatgacgctgctgctgatcctgtcgaacgttctatcggccgtcgcggggtcgctgccggttctcctggccgcccgcgtcgtgctcggcatagcactcggagggttctggtcgatttcggcagcgctggcgatgcggctcgttccaagtcacctcctgcggcgcgccatgtcgatcatcctcaccggcgttacctgcgctaccgtttgcgcggctccaatcggcgcctatgtcggcgatatctggggatggcgaaccgccttcatgatcgctgcggtcgtcggcgccgttacgctggtagcgcaactcataaccattccgaggctgcctccgattggagtggccagcttccgcagtctgctggatgtggccaagaatccgatgatcaaagtcgcgatgttggtcgtcctgctggtcgcttccgggcacttcgccggcttcacctatatccgcgccttccttgagaagtttcccgcgcttgatatcgagacgatctcgctggtgttgctcgtctttggcatcggcggcttcttcggcaatttggccggcggattcctggccgagcacagcctcaaggcagccgcggccctgccgcccctgctcatagcgatggccactgtctcgctgctgacgctgggagcatcggcttgggccacggcgattgcggttacagtatggggctttgccttcggcgcggtgccggtgggactgcagacatggatggtgctgcacgccgctcccgagcaggccgaaagcgccggtgggctgatggccgcaacgttccaggtagccatcgcagcgggcgcgattttcggcggactactgatggacaatgccggcgtcgccagttcccttgcctacagcgccgttgcctcgttcctcggcgccctgacagtgttcttgctcggcccgaagcgcgaacctcagaccacctga

SEQ ID NO: 1192 - protein, 408 aa, Rhizobium loti
MTESATGFMDGVLHDPKQPDQRSGPAWGAVISLALGTFGLVTAEFLPASVLTPLAHDLSITEGAVGQALTTTAIVGAISAPTMAVITRPLDRRIVIWAMTLLLILSNVLSAVAGSLPVLLAARVVLGIALGGFWSISAALAMRLVPSHLLRRAMSIILTGVTCATVCAAPIGAYVGDIWGWRTAFMIAAVVGAVTLVAQLITIPRLPPIGVASFRSLLDVAKNPMIKVAMLVVLLVASGHFAGFTYIRAFLEKFPALDIETISLVLLVFGIGGFFGNLAGGFLAEHSLKAAAALPPLLIAMATVSLLTLGASAWATAIAVTVWGFAFGAVPVGLQTWMVLHAAPEQAESAGGLMAATFQVAIAAGAIFGGLLMDNAGVASSLAYSAVASFLGALTVFLLGPKREPQTT

SEQ ID NO: 1193 - DNA, 1176 bp, Lactococcus lactis subsp
  CDS (1)..(1176): transl_table=11
atgaaaaaaatctctcctagtcttacacttcttgctttagcgattaatgcttttgcaattggttcaaccgaatttatcagcgttggtttaatgccaatgattgtgaacacttttaatattagtttatcgcaagccggtttaacagtctctctttatgcgctaggtgtaacggttggtgcaccattactaactattctcacaggaacttggaatcgaaaaactttgatggttgccattatgattttgtttatccttggtaatttactctcagcctttgccccaacttttattttacttttagttggacgggtgctagcttcacttgcccatgggatcttcatgtccatttccacagtcattgccgctgatgttgttcgtcctgaaaaaagagcttcagcaattgccttaatgtttacaggacttacagttgctacagttatcggtgttcctttgggaactttcattggtcaacactctacttggcacatgtcatttattttcattgttgtcattggattgattgggctgatagctacaagtattcttgttcctaaaggtcttccaatccctggaaaaatcaacttgagtagacttgtaagaattttcacgaataaatcaattatgatgtccttctttatcactgcttttggatatggtggaactttcgctgcttacacttatcttacccccatacttgaagggacttttagattttcagcaagtacagtcgttattattttagttgcctatggtgtgatggttgccattggtaattcactaggtggacatctagcaaataaaaatatccttcctgctttgcaaaaaatgtttgcggctcttgccctaagcttgctctttctttttatcagtacaagcttagcttctcaacctttgggattgattgcaacattactcttgggactctttgcttttatgaatgttcctggtttacaattatatgttgttcaactggccgaaaaattcactccaaaagatattactctggtttctgcattcaatattgcagcctttaacattggaattactcttggttcttttgtaggaggccaaatttccaaaacctctagtgttgtctttacgcctatcggaggaattgttatcatcttgctcgcaatgattctcattggcatagcccaaaaacaaaaagctcagtaa

SEQ ID NO: 1194 - protein, 391 aa, Lactococcus lactis subsp
MKKISPSLTLLALAINAFAIGSTEFISVGLMPMIVNTFNISLSQAGLTVSLYALGVTVGAPLLTILTGTWNRKTLMVAIMILFILGNLLSAFAPTFILLLVGRVLASLAHGIFMSISTVIAADVVRPEKRASAIALMFTGLTVATVIGVPLGTFIGQHSTWHMSFIFIVVIGLIGLIATSILVPKGLPIPGKINLSRLVRIFTNKSIMMSFFITAFGYGGTFAAYTYLTPILEGTFRFSASTVVIILVAYGVMVAIGNSLGGHLANKNILPALQKMFAALALSLLFLFISTSLASQPLGLIATLLLGLFAFMNVPGLQLYVVQLAEKFTPKDITLVSAFNIAAFNIGITLGSFVGGQISKTSSVVFTPIGGIVIILLAMILIGIAQKQKAQ

SEQ ID NO: 1195 - DNA, 1059 bp, Acinetobacter sp
  CDS (1)..(1059): transl_table=11
atgagcagccgcatcaaccttcctttgctggcactggcgattggtgcatttgcaattggaacaacagagttctctccaatggggctgttgcccaatattgccaatgatctcggggtatcgattccaagtgcgggcatgttgattacaggttatgcacttggcgtgatgctcggtgcaccgatcatgaccttatggtttggtggctttgcccgtcgtaatgccctgattctactgatggcaatcttcaccatcgggaatctgatcgcagcctttgcacccaattacatgagtttaatgggtgcccgattaattaccagcttaaaccacggtgctttcttcgggattggttctgtggtggcagccagtgttgttccagcaaataaacaggccagtgcggtggccaccatgtttatgggcctaaccatcgccaatattggtgggtaccactcgcaacatgggtggggcaaacattggttggagaatgtctttccttgcgatttcagccctcggtgtcatcaccatgctgtcactttggaaggcccttccggtcggatcggttggacaaaagccaaatgtaaaaatggagttaagtgttctcactcgttctccccgtggtattggcattgctcacaaccgtatttggtgcctcagcgatgtttaccttgtatacctatatcgcaccaagtctggttgagttcacccacggcctctccgacctttatcaccatgatgctgttcttgatcggaattggtttttcaatcgggaaccatttcggtggaaagtttgcagacttatcgattgataaaaccttgattggtttcttggtcttgttgatcgcgttgatggtcatcttcccaatccttgcccaaagccaattgggggcagcaatcggtttggtgatctggggtgcagcagcctttgcgatcgttccgccattacaaatgcgcgtgatgtcggtggcacatgaagcctcgggtcttgcttcttcagtgaatattggcgcatttaacttaggcaatgccattggtgccgcagcaggcggtgccctcttaagctag

SEQ ID NO: 1196 - protein, 352 aa, Acinetobacter sp
MSSRINLPLLALAIGAFAIGTTEFSPMGLLPNIANDLGVSIPSAGMLITGYALGVMLGAPIMTLWFGGFARRNALILLMAIFTIGNLIAAFAPNYMSLMGARLITSLNHGAFFGIGSVVAASVVPANKQASAVATMFMGLTIANIGGYHSQHGWGKHWLENVFPCDFSPRCHHHAVTLEGPSGRIGWTKAKCKNGVKCSHSFSPWYWHCSQPYLVPQRCLPCIPISHQVWLSSPTASPTFITMMLFLIGIGFSIGNHFGGKFADLSIDKTLIGFLVLLIALMVIFPILAQSQLGAAIGLVIWGAAAFAIVPPLQMRVMSVAHEASGLASSVNIGAFNLGNAIGAAAGGALLS

SEQ ID NO: 1197 - DNA, 1179 bp, Streptomyces lividans
  CDS (1)..(1179): transl_table=11
atgcctcttccgctgtacctgctcgccgtggccgtctgcgccatgggcacctcggagttcatgctcgccggtctcgtgccggacatcgcctcggatctcggcgtcaccgtcgggaccgcaggcacgctcacctccgccttcgcgaccggcatgatcgtcggcgctcccctcgtggcggcgctggcccgcacctggcccaggcgttccagcctcctcggattcatcctcgccttcgcggcggcacacgccgtgggagccggcaccacgagcttccccgtcctggtggcctgccgggtcgtggccgcgctcgcgaacgcgggattcctcgcggtcgcactgacgactgccgccgcactggtccctgccgacaagcagggacgcgcgctggccgtgctgctgtccggcacgacggtggccacggtcgccggcgtccccggcgggtcactcctcggcacgtggctcggctggcgggccacgttctgggccgtcgccgtctgctgcctgcccgcggcgttcggcgtgctgaaggcaatccccgccggacgtgcgacggcagcggcgaccggtgggccgccgctgcgagtcgagctcgccgcgctcaagaccccccggttgctgctggcgatgctgctgggcgcgctggtgaacgcggcaaccttcgcgagcttcaccttcctggcccccgtcgtgaccgacaccgcagggctgggcgacctgtggatctctgtcgccctggtgctcttcggcgccggttccttcgccggcgtcaccgtcgccggacgactgtccgaccgacgccccgcccaggtgctcgccgtcgccggtccgctgctgctcgtcggctggcccgcgctggcgatgctggccgaccggccggtcgccctgctgaccctcgtgttcgtccaaggcgcactgtcgttcgcgctgggcagcacgctgatcacgcgggtcctctacgaggcggcgggagcacccaccatggccggttcgtacgcgaccgccgccctcaacgtgggcgccgcggccggaccgctcgtcgccgcgaccactctcggccacacgaccggcaacctcgggccgctgtgggcgagcgggctcctggtcgccgtcgcgctgctcgtcgcgttccccttccgcacggtgatcacgacggccgcacccgccgacgcgacccggtga

SEQ ID NO: 1198 - protein, 392 aa, Streptomyces lividans
MPLPLYLLAVAVCAMGTSEFMLAGLVPDIASDLGVTVGTAGTLTSAFATGMIVGAPLVAALARTWPRRSSLLGFILAFAAAHAVGAGTTSFPVLVACRVVAALANAGFLAVALTTAAALVPADKQGRALAVLLSGTTVATVAGVPGGSLLGTWLGWRATFWAVAVCCLPAAFGVLKAIPAGRATAAATGGPPLRVELAALKTPRLLLAMLLGALVNAATFASFTFLAPVVTDTAGLGDLWISVALVLFGAGSFAGVTVAGRLSDRRPAQVLAVAGPLLLVGWPALAMLADRPVALLTLVFVQGALSFALGSTLITRVLYEAAGAPTMAGSYATAALNVGAAAGPLVAATTLGHTTGNLGPLWASGLLVAVALLVAFPFRTVITTAAPADATR

SEQ ID NO: 1199 - DNA, 1209 bp, Pseudomonas aeruginosa
  CDS (1)..(1209): transl_table=11
atgacaacccgcgcactcgataccgccaacgaaaaccctgaacaatcgggctcctggagtggcgtcctggccattgcggtttgcgccttcgcactggtcgcgtcggagttcctgccggtcagcctgctgactcccatcgccaacgacctgggaactaccgagggcatggcaggccagggcatcgccatctccggcgccttcgccgttttaaccagcctgttcatttcatccgttgccggcagcctgaaccgcaagacgctgttgctgggactgacggcggcaatgggcatgtccggcgcaatcgtcgcgctcgcgccaaactatttcgtctacatgctgggccgggcgctgatcggcatagtgatcggcggcttctggtcgatgtcggcagccacggccatgcgcctggtgcctgccaacgacgtgccgcgagccctggccctcgtcaatggcggcaacgctctggcgacagtggtggccgcgccgctgggcgcctggctaggcaccctcatcggctggcgaggggcttttctctgccttgtgccggtagccctggtggcactggcctggcaatggaccaccctgccctccatgcgggccggcgcgcgtgctcccggcccgggcaatgtgttcacggtattcgctctgctcaagcgtcccggtgtgatgctcggcatgctcgccagcagcctgttcttcatgggccagttttccctgttcacctatgtgcgaccattcctggagacggtcaccggcgtacatggcgcgcatgtttcgctggtactgctggtgatcggtgcagcgggctttatcggcaccctgctgatcgaccgggttctgcaacggcgcttcttccagacactggtcgccatcccgttgctgatggccctgatcgccctggtactgacggtccttggcggctggcccgccatcgttgtcgtcctgctcggattgtggggactgaccggtacctcggcccccgtcggttggtgggcctggatcgccagggtgttcccagaggacgccgaagccggtggcggcctgttcgtcgccgtggtgcaactctccattgccctgggctccacattgggtggtctgctgttcgatcgcactggctatcaggcgaccttcttcgccagcgccgcgatgctgctgatcgcagccttcctgaccatcctcaccgcacgctcgaaagccccggccggctag

SEQ ID NO: 1200 - protein, 402 aa, Pseudomonas aeruginosa
MTTRALDTANENPEQSGSWSGVLAIAVCAFALVASEFLPVSLLTPIANDLGTTEGMAGQGIAISGAFAVLTSLFISSVAGSLNRKTLLLGLTAAMGMSGAIVALAPNYFVYMLGRALIGIVIGGFWSMSAATAMRLVPANDVPRALALVNGGNALATVVAAPLGAWLGTLIGWRGAFLCLVPVALVALAWQWTTLPSMRAGARAPGPGNVFTVFALLKRPGVMLGMLASSLFFMGQFSLFTYVRPFLETVTGVHGAHVSLVLLVIGAAGFIGTLLIDRVLQRRFFQTLVAIPLLMALIALVLTVLGGWPAIVVVLLGLWGLTGTSAPVGWWAWIARVFPEDAEAGGGLFVAVVQLSIALGSTLGGLLFDRTGYQATFFASAAMLLIAAFLTILTARSKAPAG

SEQ ID NO: 1201 - DNA, 1188 bp, Erwinia chrysanthemi
  CDS (1)..(1188): transl_table=11
atgacatccgcatcaccctcgcgctccaccgcctggctgcgcgtggtcacattggctatcgccgcgtttattttcaacaccacggaatttattccggtggggctgttgagcgacatcgccaactcctttgccatgaaaaccgaagatgtcgggctgatgatcaccatttatgcctggatcgtggcggtggcttcgctgatctgcatgttgctgaccagcggtattgagcgccgtaaattgctgattggcctgttcagcctgtttatcctcagccatctgctgtccgccgtcgcctggaactttaccgtgctggttatttcccgcgccggggtggcgctggcgcactcggtattctggtcgattaccgcctcgctggcgattcgcatggcgccccccggtaaacgcgcgcaggcgctggggctgatcgccaccgggtcgtcgctggcgatggtgctggggctgccgctggggcgggtcatcggtcagtatctcggctggcgcgtaaccttcctgaccatcgccgccggcgccacggtcgccatgatcctgttggcgcgcctgctgccgttgctgcccagcgagcattccggttcgctaggcagcgtgccgaagctgttccgtcgcccggcgctggtcggtatctacctgctgaccgtggtggtggtgaccgcgcatttcaccgcttacagctatattgagccgtttatccagacggtcgccggtctgccggaaaacttcaccaccctgattttgctgttgttcggctgcgccgggatcgccggcagtatgctctacagccgctacagcgaccgtttcccgattggctttctggtgaccgctatgctgctgttgctggcctgtctgacgttgctgatgccgttgtccggttatccgttcggcctgacgctgctgtgtctggtgtgggggctggcgatgatgtccatcgggctggcgatgcaggccaaagtgctgtcactggcgcctgacgccagtgacgtcgccatgtcgattttctccggcttgttcaatctcggcatcggcggcggcgcgctgctgggtagccaggtcagcctgcatctggggatggataaaatcggttatgtcggcgcgccgctggtgctggtggcgctgttcgccaccctactcagcgtctaccgcagcgtgcgactggtacattcccgcgtttga

SEQ ID NO: 1202 - protein, 395 aa, Erwinia chrysanthemi
MTSASPSRSTAWLRVVTLAIAAFIFNTTEFIPVGLLSDIANSFAMKTEDVGLMITIYAWIVAVASLICMLLTSGIERRKLLIGLFSLFILSHLLSAVAWNFTVLVISRAGVALAHSVFWSITASLAIRMAPPGKRAQALGLIATGSSLAMVLGLPLGRVIGQYLGWRVTFLTIAAGATVAMILLARLLPLLPSEHSGSLGSVPKLFRRPALVGIYLLTVVVVTAHFTAYSYIEPFIQTVAGLPENFTTLILLLFGCAGIAGSMLYSRYSDRFPIGFLVTAMLLLLACLTLLMPLSGYPFGLTLLCLVWGLAMMSIGLAMQAKVLSLAPDASDVAMSIFSGLFNLGIGGGALLGSQVSLHLGMDKIGYVGAPLVLVALFATLLSVYRSVRLVHSRV

SEQ ID NO: 1203 - DNA, 1191 bp, Haemophilus influenzae
  CDS (1)..(1191): transl_table=11
atgtcgttatatttaaaagctgaaaaaatccaatcatggcgcgtgcttattatggcttgcgcaggatttatttttaatactacagaatttgtacccgttgcaatgttaagcgatattgcacaaagttttgatatgcaaaccgccgatactggtttaatgatgacagtttatgcttggacggtgctaattatgtctttgcctgcgatgcttgccacgggcaatatggaacgtaaaagtctgcttattaagcttttcattatatttattgttgggcatattttatcggtcattgcatggaatttctggatattacttctcgctcgaatgtgtattgcattagcacattcggtgttttggtcaattactgcctcacttgtgatgcgcatctcacctaaacacaagaaaactcaagcattaggaatgctcgctattggcaccgcacttgccacaatcttaggcttaccgattggacgaattgtcggacagctcgtcggttggcgggtcacttttggcattattgcggtactggcattatccatcatgtttttaattattcgattattgccaaatttacccagtaaaaatgctggctctattgcaagtttacccttgcttgctaaacgtccattattactttggctttacgtaacaacggcaatcgtcatttcagcacactttactgcttatacttatatcgaaccatttatgattgatgtagggcatttagatccaaattttgccacggctgtattattagtttttggtttctcaggcattgcagcaagcctattatttaacagattataccgatttgctcccacaaaatttattgttgtttcgatgagtttattgatgttctccctcttgctactcctcttttcgaccaaaacaataatagcaatgttcagccttgtgtttatttgggggattggcatttcttgtatcggactatctctacaaatgcgcgtactaaaacttgcgccagatgcaaccgatgttgccacagctatttactcgggcattttcaatgcaggaattggcgcaggcgcattatttggaaaccttgcgacaacctatttaggattaaatgaaattggttatacaggcgcagcattaggtttaatcggtttcatcatttttattacaacgcacttaaaatatcgccatacatttcttctgcaaaacaaataa

SEQ ID NO: 1204 - protein, 396 aa, Haemophilus influenzae
MSLYLKAEKIQSWRVLIMACAGFIFNTTEFVPVAMLSDIAQSFDMQTADTGLMMTVYAWTVLIMSLPAMLATGNMERKSLLIKLFIIFIVGHILSVIAWNFWILLLARMCIALAHSVFWSITASLVMRISPKHKKTQALGMLAIGTALATILGLPIGRIVGQLVGWRVTFGIIAVLALSIMFLIIRLLPNLPSKNAGSIASLPLLAKRPLLLWLYVTTAIVISAHFTAYTYIEPFMIDVGHLDPNFATAVLLVFGFSGIAASLLFNRLYRFAPTKFIVVSMSLLMFSLLLLLFSTKTIIAMFSLVFIWGIGISCIGLSLQMRVLKLAPDATDVATAIYSGIFNAGIGAGALFGNLATTYLGLNEIGYTGAALGLIGFIIFITTHLKYRHTFLLQNK

SEQ ID NO: 1205 - DNA, 1176 bp, Helicobacter pylori J99
  CDS (1)..(1176): transl_table=11
atgatgataaccaaacaatcgtatcaaagattcgctttaatgcgggtttttgtgttttcgctttcggcgtttatttttaacaccacggagtttgtccctgttgcacttctgtcagacattgcgaaaagctttgaaatggagagcgcaacagtggggcttatgatcactgcttatgcatgggtggtgtctcttggctcattgcccttgatgctgcttagcgctaaaattgaaaggaaacgcttattgctttttcttttcgctctttttattttcagccatatcctttcagcgttagcgtggaatttttgggtgcttctcctttctcgtatgggtatcgcttttgcccactctattttttggtccatcacggcttctttagtcattcgtgtcgcgccaagaaacaaaaaacaacaggccttagggctgttagcgttagggagttcgttagcgatgattttagggttgccgcttgggaggatcattgggcaaattttggattggcgatccacttttggcgtgattgggggcgttgcgactcttataatgctgcttatgtggaaattgctcccgcatctaccgagtagaaacgccggcacgctcgcaagtgtccctatattaatgaaacgcccgcttttagtggggatttatttgcttgtgatcatggttatttctgggcatttcaccacttatagctatattgagccttttatcattcaaatcagccaattttctcctgacattacaacgctaatgttgtttgtgtttgggttagcaggcgtggtggggagttttttgttcggccgtttgtatgcgaaaaattcaagaaaatttatcgcttttgcaatggttttagtcatttgcccgcaactcttgctttttgtgtttaaaaacttagagtgggtgatctttttgcagattttcttgtgggggattgggattacttcactcaccattgcgttacaaatgagggtgttgcaactcgcgcccgatgccacggatgttgcgagcgcgattttttcggggagctataatgtggggattggatcaggagcgctgtttggcagtattgtgatccaccaattagggctagaatatattggctttgtgggtggggctttgggtttgttggcgctattttggcttagattcattacgataaaatttaaaaaaacttaa

SEQ ID NO: 1206 - protein, 391 aa, Helicobacter pylori J99
MMITKQSYQRFALMRVFVFSLSAFIFNTTEFVPVALLSDIAKSFEMESATVGLMITAYAWVVSLGSLPLMLLSAKIERKRLLLFLFALFIFSHILSALAWNFWVLLLSRMGIAFAHSIFWSITASLVIRVAPRNKKQQALGLLALGSSLAMILGLPLGRIIGQILDWRSTFGVIGGVATLIMLLMWKLLPHLPSRNAGTLASVPILMKRPLLVGIYLLVIMVISGHFTTYSYIEPFIIQISQFSPDITTLMLFVFGLAGVVGSFLFGRLYAKNSRKFIAFAMVLVICPQLLLFVFKNLEWVIFLQIFLWGIGITSLTIALQMRVLQLAPDATDVASAIFSGSYNVGIGSGALFGSIVIHQLGLEYIGFVGGALGLLALFWLRFITIKFKKT

SEQ ID NO: 1207 - DNA, 1176 bp, Helicobacter pylori
  CDS (1)..(1176): transl_table=11
atgatgataaccaaacaatcgtatcaaaagttcgccttaatgcgggtttttgtgttttcgctttcggcgtttatttttaacaccacggagtttgtccctgtcgcgcttctgtcagatattgcgaaaagctttgaaatggagagcgcaacggtggggcttatgatcactgcttatgcatgggtggtgtctcttggctcattgcccttgatgctgcttagcgctaaaattgaaaggaaacgcttattgctttttcttttcgccctttttattctcagccatatcctttcagcgttagcgtggaatttttgggtgctactcctttctcgtatgggtatcgcttttgcccactctattttttggtccatcacggcttctttagtcattcgtgtcgcgccaagaaataaaaaacaacaggccttagggctgttagcgttagggagttcgttagcgatgattttagggttgccgcttgggaggatcattgggcaaattctagattggcgttccacttttggcgtgatcgggggcgttgcgacccttatagcgttgcttatgtggaaattgctcccgcatctacccagtagaaacgcaggcacgctcgcaagtgtccctgtattaatgaaacggccgcttttaatggggatttatttgcttgtgatcatggtcatctctgggcatttcaccacttatagttatattgagccttttatcattcaaatcagccaattttctcctgacattacaacgctaatgttgtttgtgtttgggttagcgggcgtggtggggagttttttgttcggccgtttgtatgcaaaaaattcaagaaaatttatcgcttttgcgatggttttagtcatttgcccgcaactcttgctttttgtgtttaaaaacttagagtgggtggttttcttgcaaattttcttatgggggattgggatcacttcgcttgggatttccttgcaaatgagggtgttgcagcttgcgccggatgccacggatgttgcgagtgcgatttactcagggagctataatgtggggattggatcaggagcgctgtttggcagtattgtgatccaccaactagggctaggatatattggctttgtgggtggggctttaggtttgttggcgctcttttggcttagattcattacgataaagtttaaaaaaacataa

SEQ ID NO: 1208 - protein, 391 aa, Helicobacter pylori
MMITKQSYQKFALMRVFVFSLSAFIFNTTEFVPVALLSDIAKSFEMESATVGLMITAYAWVVSLGSLPLMLLSAKIERKRLLLFLFALFILSHILSALAWNFWVLLLSRMGIAFAHSIFWSITASLVIRVAPRNKKQQALGLLALGSSLAMILGLPLGRIIGQILDWRSTFGVIGGVATLIALLMWKLLPHLPSRNAGTLASVPVLMKRPLLMGIYLLVIMVISGHFTTYSYIEPFIIQISQFSPDITTLMLFVFGLAGVVGSFLFGRLYAKNSRKFIAFAMVLVICPQLLLFVFKNLEWVVFLQIFLWGIGITSLGISLQMRVLQLAPDATDVASAIYSGSYNVGIGSGALFGSIVIHQLGLGYIGFVGGALGLLALFWLRFITIKFKKT

SEQ ID NO: 1209 - DNA, 1215 bp, Pasteurella multocida
  CDS (1)..(1215): transl_table=11
atgttaccttttcaggccgctcgtcaacgtcaatttgcgcgtgttatcacctttgcgcttgctgggtttgtgtttaatacaacagagtttattcctgttgccttactctctgatattgcgcaaagctttgcgatgcccgtatcacaaacgggtttaataattactgtttatgcttgggtagtgtcattaatgtcattgccttttatgttactgactgcaaaagcagagcgtagagggttattgattaaattactggtgttatttattttaagtcatctgttatcggtgatcgcttgggatttttgggtattagtattagccagaataggtgtcgcattaacccattctattttttgggcaattactgcgtctttagtcattcgggttgcgcctaaagataaaaaatcacaggcaattggactacttgctataggttgttctttggcaatgattttaggcttgcccctcggacgtttgattgggcaattctttggttggcgtgcaacctttgccattattgcccttattgcgataggcattttatgcttgttttatcaacttttaccgcacttaccaagtaagaatgcgggttctttaaatagtctgccaacgctttttaaacgtccattattgcttgggctttatgcgcttactatgattattatttcggctcattttactgcgtatagctatattgaaccctttatgctcaatatcagcacaatgagtcatagtatggcaacttttgttctcttcgtcttcggtctttctggcattaccgctagtttgttatttaatcgctattataatgcaggaccgatccgttttattttgttttcaatgggactactcaccgctacacttttgctcttattcattgcgagccaacaaacgtggacaatgtttttattaaccttcttctggggaattggcatagcaggcattggcttaggattacaaattcgagtgttacaccttgcccctgatgctacagacgtcgcgatggcaatctattctgggatttataatattggcattggggctggcgcattgctaggtaatcaagtgatgcaacattatgggctagcctatattggtgttgctggggcgttatttgcagtattcgggcttgttttatttattttagtccagtggaaatatggtcacttagcgccaaataagctatcgactgaagagaagaaaaagtgcggttaa

SEQ ID NO: 1210 - protein, 404 aa, Pasteurella multocida
MLPFQAARQRQFARVITFALAGFVFNTTEFIPVALLSDIAQSFAMPVSQTGLIITVYAWVVSLMSLPFMLLTAKAERRGLLIKLLVLFILSHLLSVIAWDFWVLVLARIGVALTHSIFWAITASLVIRVAPKDKKSQAIGLLAIGCSLAMILGLPLGRLIGQFFGWRATFAIIALIAIGILCLFYQLLPHLPSKNAGSLNSLPTLFKRPLLLGLYALTMIIISAHFTAYSYIEPFMLNISTMSHSMATFVLFVFGLSGITASLLFNRYYNAGPIRFILFSMGLLTATLLLLFIASQQTWTMFLLTFFWGIGIAGIGLGLQIRVLHLAPDATDVAMAIYSGIYNIGIGAGALLGNQVMQHYGLAYIGVAGALFAVFGLVLFILVQWKYGHLAPNKLSTEEKKKCG

SEQ ID NO: 1211 - DNA, 1191 bp, Pseudomonas aeruginosa
  CDS (1)..(1191): transl_table=11
atggacagcacctccgaaacccgcagcggcagctggctgagcgtgatcgccctggccctggccgccttcatcttcaacaccacggagttcgtcccggtcggcctgctcagcgacatcggccacagcttcgagatgcccacctcgcaggtcggcctgatgttgaccatctatgcctgggtggtgtcgctggcctcgttgccgatgatgctgctgacccgcaatatcgagcggcgcaagctgctggtcggggtattcctgctgttcatcgccagccacgtgctgtccgggctggcctggagcttccaggtgctgatgctcagccggatcggcattgccttcgcccacgcggtgttctgggccatcaccgcttcgctggcggtgcgcgtggcgccgccgggacagcaggccaaggcgctagggctgctggccaccggcaccaccctggcgatggtcctgggcatcccgctggggcgggtggttggcgaggccctgggctggcgtaccaccttcatggccatcgccggactctcggtgctgaccttgctctacctggcgcgctccctgccgctgctgccaagccagaactccggttccctgcgcagcctgccgatgctgttccgacgcccggcgctggtttgcctgtacgtgctgaccgtggtggtgatcagcgcccagttcaccgcctacagctacatcgagcccttcgccaagcaggtggcgcagatgagcggcgaggcgaccaccctgctgttgctgttgttcggcggcgccgggatcttcggttcgatcctcttcagccgctacagcgaggctttcccgcgaggcttcctgctggccgcgatcctcgccttgggcagcagcctggcgctgctgttgccgctgtccgcgcagccgacctggctgatggcgctcagcctgctctggggcatgtcgatcatgtgcttcggcctggcccagcagtcccgcgtcctgcgcctcgcctcggacgccaccgacgtggccatggcgctgttctccggcctgtacaacgtcggcatcggcgccggcgcgctgctcggcagcgtggtcagcgaacgcatgggcctggcctcgatcggcaacgtcggcgccgcgctggcgctggccggcctgctgctcgccctgttcgccgcactgcgctacgcggaggcgctgaaaagcacgtcgttgtga

SEQ ID NO: 1212 - protein, 396 aa, Pseudomonas aeruginosa
MDSTSETRSGSWLSVIALALAAFIFNTTEFVPVGLLSDIGHSFEMPTSQVGLMLTIYAWVVSLASLPMMLLTRNIERRKLLVGVFLLFIASHVLSGLAWSFQVLMLSRIGIAFAHAVFWAITASLAVRVAPPGQQAKALGLLATGTTLAMVLGIPLGRVVGEALGWRTTFMAIAGLSVLTLLYLARSLPLLPSQNSGSLRSLPMLFRRPALVCLYVLTVVVISAQFTAYSYIEPFAKQVAQMSGEATTLLLLLFGGAGIFGSILFSRYSEAFPRGFLLAAILALGSSLALLLPLSAQPTWLMALSLLWGMSIMCFGLAQQSRVLRLASDATDVAMALFSGLYNVGIGAGALLGSVVSERMGLASIGNVGAALALAGLLLALFAALRYAEALKSTSL

SEQ ID NO: 1213 - DNA, 1200 bp, Pseudomonas putida
  CDS (1)..(1200)
atgaacggacccatacccacacacctgccgcccacaacgggcagcggcagctggctgagcgtcatcgccctggccttggcggccttcattttcaacaccaccgagttcgtcccggtggccctgctcagtgacattggccgcagcttcgacatgagcactgcccaggtcggcctgatgctgaccatctacgcctggatcgtggcactggcctcgttgcccatgatgttgctgacccgcaacatcgaacggcggcgtctgctgctgttcgtgttcctggtgttcattgtcagccacttgctgtcctggctttcgcaaagcttcgccatgctgctggtcagccgcatcggcattgccctggcgcatgcggtgttctggtccatcaccgcctcgctggcggtgcgtgtggcgccgccgggccagcaggccaaggcgctgggcctgctggccaccggtactaccctggccatggtcctgggcatcccgctgggccgtgtggtgggcgaggcactgggctggcgtatcacgttcctgagcattgccggggtagcgctagccaccatgctttgcctgatcaaatcgctgccgctgctgcccagccagaactccggttcgttgcgcagcctgccggtcctgttcaagcgcccggcactggtcattacctacttgctggtgacgctggtcattaccgcgcagttcacggcctacagctatatcgagccgttcgccctgcacgtagcgcagatcggcggcgaccgcaccacgctgttgctgctgttgttcggcggtgccggggtttttggttcattgttgttcagccgttacagcgaacgcttcccgcatggcttcctggtaggttcgatcggggtactcgccgcgtgcctgttgctgatgttgccgctgtcgggcaacttctatgtgtttgcagtgctgagcatgttctggggcgtggcaattctcagcttcagcctggcgctgcagtccaagaccctgaagctggcgtccgacgccaccgatgtggccatggcgctgttctcgggtatctacaacatcggcattggcggtggtgcgctgctgggcagtatcgtcagcagccagatggatgtggcggatatcggcctggtgggcggcagcgtggcagtggtcgggctggtactggccgttgccagtacccggcgctttcgcgaggcgttgacacgttga

SEQ ID NO: 1214 - protein, 399 aa, Pseudomonas putida
MNGPIPTHLPPTTGSGSWLSVIALALAAFIFNTTEFVPVALLSDIGRSFDMSTAQVGLMLTIYAWIVALASLPMMLLTRNIERRRLLLFVFLVFIVSHLLSWLSQSFAMLLVSRIGIALAHAVFWSITASLAVRVAPPGQQAKALGLLATGTTLAMVLGIPLGRVVGEALGWRITFLSIAGVALATMLCLIKSLPLLPSQNSGSLRSLPVLFKRPALVITYLLVTLVITAQFTAYSYIEPFALHVAQIGGDRTTLLLLLFGGAGVFGSLLFSRYSERFPHGFLVGSIGVLAACLLLMLPLSGNFYVFAVLSMFWGVAILSFSLALQSKTLKLASDATDVAMALFSGIYNIGIGGGALLGSIVSSQMDVADIGLVGGSVAVVGLVLAVASTRRFREALTR

SEQ ID NO: 1215 - DNA, 1224 bp, Pseudomonas syringae pv
  CDS (1)..(1224): transl_table=11
ttgatcacttcacctcccaatgaacaaaccggtgagcacaccggcagctggctgggcgttttcgcgctggccctggcggcctttattttcaacaccaccgagtttgtgccgatcggcttgctgagcaacatcggccagagcttcgacatgacgccggcacaagtcggtttgatgctgacgatctacgcctgggtcgtctcgctgatgtcgctgcccatgatgctggcgacgcgcaacattgagcgccgcaaactgttgatgtttgtgttcggcctgtttgtggtcagccacgtcatctctgcgatggcgtccagcttcgcgattctgctggtgagccgtgtcggcattgcgtttgcgcatgcggtgttctggtcggtcacggcctcccttgccgtgcgcatcgcaccgccgggcaagcaggttcaagcccttggtttgctggcgaccggcacttcgctggcgatggttctgggtattccgctgggacgtgtgctgggtgaagccctgggttggcgcaccacattcctcggtatcgccggggtcgctgcgctggtggtctttctgctggcgcgcgcgctgccgttgctgccgagccagaactccggctcgctgcgcagcctgcctatcctgttcaaacgcccgcgcctgatggccatctacctgttgactgccatcgtggtgactgcgcacttcaccgcctacagctacatcgagccgttcacgcaaaccgtgtcgcgcctcagcggtgaaatgaccaccatcttgctgctggtcttcggcggtgccggaatcatgggctcgattgtgttcagcctgttcagcgaccggtttccaaacggtctgttgatcactgccattggcaccctggcggtctgcttgctgatgctgttgccactgtctggcgacgcaacaatgctcggcacgctgaccgtggtctgggggatggcgatcatgtgcttcgggctgttgctgcaggcgcgcgtgctgtcgctggcaccggatgcgaccgacgtggcgatggcgctgttttccgggatattcaacatcggcattggcggcggtgccttgctgggcagcgtcgtcagcagccacctgggcgtggcgaatgtcggcattgtaggcggcctgttggcccttggcgggttggggctgatttgctatacgacgtttctattcggcaagacgcagccccatgcagagatgcaggctgacgctaaacactga

SEQ ID NO: 1216 - protein, 407 aa, Pseudomonas syringae pv
MITSPPNEQTGEHTGSWLGVFALALAAFIFNTTEFVPIGLLSNIGQSFDMTPAQVGLMLTIYAWVVSLMSLPMMLATRNIERRKLLMFVFGLFVVSHVISAMASSFAILLVSRVGIAFAHAVFWSVTASLAVRIAPPGKQVQALGLLATGTSLAMVLGIPLGRVLGEALGWRTTFLGIAGVAALVVFLLARALPLLPSQNSGSLRSLPILFKRPRLMAIYLLTAIVVTAHFTAYSYIEPFTQTVSRLSGEMTTILLLVFGGAGIMGSIVFSLFSDRFPNGLLITAIGTLAVCLLMLLPLSGDATMLGTLTVVWGMAIMCFGLLLQARVLSLAPDATDVAMALFSGIFNIGIGGGALLGSVVSSHLGVANVGIVGGLLALGGLGLICYTTFLFGKTQPHAEMQADAKH

SEQ ID NO: 1217 - DNA, 1191 bp, Salmonella typhi
  CDS (1)..(1191): transl_table=11
atgacaatcaatccagtttcccgcaaggtcgcgtggctacgggtagttacgcttgctattgccgcttttattttcaataccacagaatttgtgccggttggtttgctatcagacattgctgaaagctttcatatgcaaaccgcgcaggtcggcatcatgctaaccatttacgcctgggtagttgccgttatgtcgctgccttttatgcttcttaccagtcaaatggagcgccgtaagctactcatttgtctgtttgttttgtttattgccagccatgtgctctcctttctggcatggaactttaccgtgctggtcattagccgtattggtatcgctttcgcccacgctattttctggtcgataaccgcctcgctggcgatccgcctggcccctgccgggaaacgcgcgcaggcattaagtctgatagcgaccggcaccgcgttggccatggtgcttgggctgccgataggtcgcgttgttggtcagtattttggctggcgcaccaccttttttgccatcggcatgggcgcattaattacgctgctatgtctgattaagcttctaccgaaattgccgagcgagcattccggctcactaaaaagtttacctttgctattccggcgcccggcgctaatgagcctctatgtactaaccgtcgttgtggtgactgcgcattacacagcttatagctatattgaaccgttcgttcagaatgtcgccgggctcagtgcgaattttgctaccgtcctgttactgatcctcggcggcgccgggatcatcggcagccttgtgtttggtaaactgggtaatcgtcatgcctcgtcgctcgtcagtatcgctattgccctgctggttgtctgtctgcttctgctgctgcctgcggcggatagcgaagcgcatctggccatactgagcattttctggggcatcgcgattatggtgatagggcttggtatgcaggtgaaagtactggcgctggccccggacgcgaccgatgtcgcaatggcgctattttcaggcatctttaatattggtattggcgctggcgcgctggtaggcaatcaggtgagtttgcactggtcaatgtcggccatcggctatattggcgccatacccgcctgtgccgcgctggtatgggctgtgctcatattccgcaaatggccagtgacgctggaagaacaaccgcattaa

SEQ ID NO: 1218 - protein, 396 aa, Salmonella typhi
MTINPVSRKVAWLRVVTLAIAAFIFNTTEFVPVGLLSDIAESFHMQTAQVGIMLTIYAWVVAVMSLPFMLLTSQMERRKLLICLFVLFIASHVLSFLAWNFTVLVISRIGIAFAHAIFWSITASLAIRLAPAGKRAQALSLIATGTALAMVLGLPIGRVVGQYFGWRTTFFAIGMGALITLLCLIKLLPKLPSEHSGSLKSLPLLFRRPALMSLYVLTVVVVTAHYTAYSYIEPFVQNVAGLSANFATVLLLILGGAGIIGSLVFGKLGNRHASSLVSIAIALLVVCLLLLLPAADSEAHLAILSIFWGIAIMVIGLGMQVKVLALAPDATDVAMALFSGIFNIGIGAGALVGNQVSLHWSMSAIGYIGAIPACAALVWAVLIFRKWPVTLEEQPH

SEQ ID NO: 1219 - DNA, 1170 bp, Escherichia coli O157
  CDS (1)..(1170): transl_table=11
atgaaaattaactatccgttgctggcgctggcgattggcgcgtttggtatcgggacaacggagttctcgccaatgggcttgttgcccgtcattgcgcgcggtgtggatgtctcgattcccgctgccggaatgttaatcagtgcctatgcagttggcgtaatggttggcgcgccgctgatgacgcttctactttctcatcgtgcccgccgcagtgcgttgattttcctgatggcaattttcacgctcggcaacgtactttccgccatcgcgccggattatatgaccctgatgctttcacgcattttgaccagcctgaatcacggagcattttttggtttgggttcagtcgtggccgcaagcgtggtgccaaaacataaacaggccagcgcagttgccactatgtttatggggttaaccctggcaaatatcggtggcgtgccggcggcgacctggttgggtgaaaccatcggctggcggatgtcatttctggcaacggcggggctgggagtgatttcaatggtaagtctgttcttctcattacctaaaggtggtgcaggggcacgacctgaagtgaaaaaagagctggcggtattaatgcgtccgcaggtgctgtctgcattgctgacgacggtactgggagctggtgcaatgtttactctctacacctatatctctccggtactgcaaagtattacccacgcaacaccggtgttcgtcacggcaatgctggtgctgattggtgtcggattctctatcggtaactatctcggcggcaaactggcagatcgttcagttaacggcacgttgaaaggctttttgttgctgctgatggtgattatgctggcaatcccgttcctggcccgcaataagttcggcgcagctattagcatggcggtgtggggcgctgcaacctttgcggtcgtaccgccgttacagatgcgcgtgatgcgtgtcgccagtgaagcgccaggtctgtcttcatcagtcaatattggtgcctttaatcttggaaatgcgctgggagcagctgctggtggtgcggtaatttccgctgggctgggatacagctttgtgccggtgatgggggcgattgtcgcgggactggcattattgctggtgtttatgtcagccagaaaacaacctgaaacagtttgcgttgctaacagctaa

SEQ ID NO: 1220 - protein, 389 aa, Escherichia coli O157
MKINYPLLALAIGAFGIGTTEFSPMGLLPVIARGVDVSIPAAGMLISAYAVGVMVGAPLMTLLLSHRARRSALIFLMAIFTLGNVLSAIAPDYMTLMLSRILTSLNHGAFFGLGSVVAASVVPKHKQASAVATMFMGLTLANIGGVPAATWLGETIGWRMSFLATAGLGVISMVSLFFSLPKGGAGARPEVKKELAVLMRPQVLSALLTTVLGAGAMFTLYTYISPVLQSITHATPVFVTAMLVLIGVGFSIGNYLGGKLADRSVNGTLKGFLLLLMVIMLAIPFLARNKFGAAISMAVWGAATFAVVPPLQMRVMRVASEAPGLSSSVNIGAFNLGNALGAAAGGAVISAGLGYSFVPVMGAIVAGLALLLVFMSARKQPETVCVANS

SEQ ID NO: 1221 - DNA, 1170 bp, Escherichia coli
  CDS (1)..(1170): transl_table=11
atgaaaattaactatccgttgctggcgctggcgattggcgcgtttggtatcgggacaacggagttctcgccaatgggcttgttgcccgtcattgcgcgcggtgtggatgtctcgattcccgctgccggaatgttaatcagtgcctatgcagttggcgtaatggttggcgcgccgctgatgacgcttctactttctcatcgtgcccgccgcagtgcgttgattttcctgatggcaattttcacgctcggcaacgtactttccgccatcgcgccggattatatgaccctgatgctttcacgcattttgaccagcctgaatcacggagcattttttggtttgggttcagtcgtggccgcaagcgtggtgccaaaacataaacaggccagcgcagttgccactatgtttatggggttaaccctggcaaatatcggtggcgtgccggcggcgacctggttgggtgaaaccatcggctggcggatgtcatttctggcaacggcggggctgggagtgatttcaatggtaagtctgttcttctcattacctaaaggtggtgcaggggcacgacctgaagtgaaaaaagagctggcggtattaatgcgtccgcaggtgctgtctgcattgctgacgacggtactgggagctggtgcaatgtttactctctacacctatatctctccggtactgcaaagtattacccacgcaacaccggtgttcgtcacggcaatgctggtgctgattggtgtcggattctctatcggtaactatctcggcggcaaactggcagatcgttcagttaacggcacgttgaaaggctttttgttgttgttgatggtgattatgctggcaatcccgttcctggcccgcaatgagttcggcgcagctattagcatggtggtgtggggcgcagcaacctttgcggtcgtaccgccgttacagatgcgcgtgatgcgtgtcgccagtgaagcgccaggtctgtcttcatcagtcaatattggtgcctttaatcttggaaatgcgctgggagcagctgctggtggtgcggtaatttccgctgggctgggatacagctttgtgccggtgatgggagcgattgtcgcgggactggcattattgctggtgtttatgtcagccagaaaacaacctgaaacagtttgcgttgctaacagctaa

SEQ ID NO: 1222 - protein, 389 aa, Escherichia coli
MKINYPLLALAIGAFGIGTTEFSPMGLLPVIARGVDVSIPAAGMLISAYAVGVMVGAPLMTLLLSHRARRSALIFLMAIFTLGNVLSAIAPDYMTLMLSRILTSLNHGAFFGLGSVVAASVVPKHKQASAVATMFMGLTLANIGGVPAATWLGETIGWRMSFLATAGLGVISMVSLFFSLPKGGAGARPEVKKELAVLMRPQVLSALLTTVLGAGAMFTLYTYISPVLQSITHATPVFVTAMLVLIGVGFSIGNYLGGKLADRSVNGTLKGFLLLLMVIMLAIPFLARNEFGAAISMVVWGAATFAVVPPLQMRVMRVASEAPGLSSSVNIGAFNLGNALGAAAGGAVISAGLGYSFVPVMGAIVAGLALLLVFMSARKQPETVCVANS

SEQ ID NO: 1223 - DNA, 24 bp, Artificial sequence
  primer
atgacaacaaacactgtttcccgc

SEQ ID NO: 1224 - DNA, 25 bp, Artificial sequence
  primer
ttattgcgtctgttcttcgagtgtc

SEQ ID NO: 1225 - protein, 359 aa, Artificial sequence
  consensus sequence
  Variant (2)..(6): Xaa in position 2 to 6 is any amino acid
  Variant (8)..(10): Xaa in position 8 to 10 is any amino acid
  Variant (11)..(15): Xaa in position 11 to 15 is any or no amino acid
  Variant (17)..(17): Xaa in position 17 is any amino acid
  Variant (19)..(24): Xaa in position 19 to 24 is any amino acid
  Variant (25)..(32): Xaa in position 25 to 32 is any or no amino acid
  Variant (34)..(39): Xaa in position 34 to 39 is any amino acid
  Variant (41)..(57): Xaa in position 41 to 57 is any amino acid
  Variant (58)..(58): Xaa in position 58 is any or no amino acid
  Variant (60)..(89): Xaa in position 60 to 89 is any amino acid
  Variant (91)..(118): Xaa in position 91 to 118 is any amino acid
  Variant (119)..(120): Xaa in position 119 to 120 is any or no amino acid
  Variant (122)..(126): Xaa in position 122 to 126 is any amino acid
  Variant (127)..(127): Xaa in position 127 is any or no amino acid
  Variant (129)..(131): Xaa in position 129 to 131 is any amino acid
  Variant (133)..(135): Xaa in position 133 to 135 is any amino acid
  Variant (137)..(137): Xaa in position 137 is any amino acid
  Variant (138)..(138): Xaa in position 138 is any or no amino acid
  Variant (140)..(147): Xaa in position 140 to 147 is any amino acid
  Variant (148)..(149): Xaa in position 148 to 149 is any or no amino acid
  Variant (152)..(153): Xaa in position 152 to 153 is any amino acid
  Variant (155)..(169): Xaa in position 155 to 169 is any amino acid
  Variant (170)..(173): Xaa in position 170 to 173 is any or no amino acid
  Variant (175)..(212): Xaa in position 175 to 212 is any amino acid
  Variant (213)..(224): Xaa in position 213 to 224 is any or no amino acid
  Variant (226)..(240): Xaa in position 226 to 240 is any amino acid
  Variant (241)..(245): Xaa in position 241 to 245 is any or no amino acid
  Variant (247)..(249): Xaa in position 247 to 249 is any amino acid
  Variant (251)..(254): Xaa in position 251 to 254 is any amino acid
  Variant (255)..(255): Xaa in position 255 is any or no amino acid
  Variant (257)..(260): Xaa in position 257 to 260 is any amino acid
  Variant (262)..(326): Xaa in position 262 to 326 is any amino acid
  Variant (327)..(353): Xaa in position 327 to 353 is any or no amino acid
  Variant (355)..(357): Xaa in position 355 to 357 is any amino acid
FXXXXXEXXXXXXXXGXLXXXXXXXXXXXXXXGXXXXXXAXXXXXXXXXXXXXXXXXXRXXXXXXXXXXXXXXXXXXXXXXXXXXXXXXRXXXXXXXXXXXXXXXXXXXXXXXXXXXXXXAXXXXXXGXXXAXXXGXXPXXXXXXXXXXWRXXFXXXXXXXXXXXXXXXXXXXPXXXXXXXXXXXXXXXXXXXXXXXXXXXXXXXXXXXXXXXXXXXXXXXXXXYXXXXXXXXXXXXXXXXXXXXLXXXGXXXXXGXXXXGXXXXXXXXXXXXXXXXXXXXXXXXXXXXXXXXXXXXXXXXXXXXXXXXXXXXXXXXXXXXXXXXXXXXXXXXXXXXXXXXXXXXXXXXXXXXGXXXGG

SEQ ID NO: 1226 - DNA, 882 bp, Escherichia coli K12
  CDS (1)..(882): transl_table=11
atgatgcgaatcgcgctcttcctgctaacgaacctggccgtaatggtcgttttcgggctggtactgagcctgacagggatacagtcgagcagcgttcaggggctgatgatcatggccttgctgttcggttttggtggttccttcgtttcgcttctgatgtccaaatggatggcattacgatctgttggcggggaagtgatcgagcaaccgcgtaacgaaagggaacgttggctggtcaatactgtagcaacccaggctcgtcaggcggggatcgctatgccgcaagtggctatctaccatgcgccggacatcaacgcttttgcaaccggtgcgcgccgtgatgcctctctggttgctgtcagcaccggtttgctgcagaacatgagcccggatgaagccgaggcggtaattgctcacgaaatcagccacatcgccaatggtgatatggtcaccatgacgctgattcagggcgtggtgaacaccttcgttatctttatttcccgtattctggcgcagcttgccgcgggttttatgggcggaaatcgtgatgaaggtgaagagagcaacggcaacccgctgatctactttgcggttgcaacggttctggaactggtgtttggtattctggcgagcattatcaccatgtggttctcgcgtcatcgtgaattccatgctgatgccggttcggcaaaactggttggtcgcgagaaaatgattgccgcgctgcagcgcctgaaaaccagctatgaaccgcaagaagcaaccagcatgatggctctctgcattaacggtaagtcgaaatcgctcagtgagttgttcatgacccacccgccgctggataaacgaattgaagctctgcgtacgggtgaatacctgaagtaa

SEQ ID NO: 1227 - protein, 293 aa, Escherichia coli K12
MMRIALFLLTNLAVMVVFGLVLSLTGIQSSSVQGLMIMALLFGFGGSFVSLLMSKWMALRSVGGEVIEQPRNERERWLVNTVATQARQAGIAMPQVAIYHAPDINAFATGARRDASLVAVSTGLLQNMSPDEAEAVIAHEISHIANGDMVTMTLIQGVVNTFVIFISRILAQLAAGFMGGNRDEGEESNGNPLIYFAVATVLELVFGILASIITMWFSRHREFHADAGSAKLVGREKMIAALQRLKTSYEPQEATSMMALCINGKSKSLSELFMTHPPLDKRIEALRTGEYLK

SEQ ID NO: 1228 - DNA, 879 bp, Pyrococcus horikoshii OT3
  CDS (1)..(879): transl_table=11
gtgagtaagatgggtttaggtctttggataagaactggaattttaatgacccttctaactgtagtattagtggggataggttatcttctaggcggaactggcgggatgataatagctttcacgctggcccttttcatgaacctcataagctattggttcagcgactctattgttcttaattggtataacgcgaggatagttagcgaggaggaagcccccgagctccattatatcgtagaaaagcttgctagacaagccggaattccaaagccaagggttgccatagtcccaactatggtcccaaatgcatttgcaactgggaggagcccaagaaatgccgtagttgccgtaactgagggtttactacagctactaaataaagatgagcttgagggagttatagcccatgagataagtcatataaagaatagagacacactaattcagactatagcagcagtcttggctggggccattatgatactcgttgattttgctaggtggtcactttggtttggagcctatgatgacgagagagattcgggaagcgtaataggattaattctcgctataatcttagctccacttgctgcaaccttaatccagctagctataagcagatcaagggagtacctagccgatgaaactggggctaggataagcgggaagcctcacgcccttgctagtgccctcatgaaaatagaggaggccgtgaggtacagaccccttaggaggggtaacccagcaacggcccacatgttcataattaacccatttaggggaatagactttgcggagttattctccacccatccaccaaccgagaagaggatagagaggcttaggaagatcgcccttgagatgggtataatcttctag

SEQ ID NO: 1229 - protein, 292 aa, Pyrococcus horikoshii OT3
MSKMGLGLWIRTGILMTLLTVVLVGIGYLLGGTGGMIIAFTLALFMNLISYWFSDSIVLNWYNARIVSEEEAPELHYIVEKLARQAGIPKPRVAIVPTMVPNAFATGRSPRNAVVAVTEGLLQLLNKDELEGVIAHEISHIKNRDTLIQTIAAVLAGAIMILVDFARWSLWFGAYDDERDSGSVIGLILAIILAPLAATLIQLAISRSREYLADETGARISGKPHALASALMKIEEAVRYRPLRRGNPATAHMFIINPFRGIDFAELFSTHPPTEKRIERLRKIALEMGIIF

SEQ ID NO: 1230 - DNA, 1044 bp, Neisseria meningitidis MC58
  CDS (1)..(1044): transl_table=11
ttgaaatgtgtttattggaatcaaacagatggtttacgattctacacggcttggcacaatagttcaaaaaccaactgcacaaactgccatttgcaagcaaatgttttgcatacctttgccgagtctgatattcacaagccggcaactttttgggacaatcccccaaaatttcaaaacatcacaccctaccaaaaaggaacatccgtgaaacgaatttttctgtttttggctaccaatatcgctgttttggtcgtaatcaacattgttttggcggttttgggcatcaacagccggggcggcacgggcagcctgttggcgtattccgccgtcgtcggcttcactggttcgattatttcgctgctgatgtccaaatttatcgccaaacaatcggtcggcgcggaagttatcgacacgccgcgcaccgaagaagaagcctggcttttgaacactgtcgaagcccaagcgcggcaatggaacctgaaaacgcccgaagtcgccatctaccactcccccgaacccaatgcctttgccacgggcgcatcgagaaacagctccctgatcgccgtcagcaccggtttgctcgaccatatgacgcgtgacgaagtggaagccgtattggcgcacgaaatggcacacgtcggcaacggcgatatggttacgctgacgctgattcaaggcgtggtcaatacctttgtcgtgttcctgtcgcgcattattgccaacctgattgcccgaaacaacgacggcagccagtcccagggaacttatttcctggtcagcatggtattccaaatcctgttcggcttccttgccagcttaattgtcatgtggttcagccgacaacgcgaataccgcgccgatgcgggcgcggcaaaactggtcggcgcgccgaaaatgatttccgccctgcaaaggctcaaaggcaacccggtcgatttgcccgaagaaatgaacgcaatgggcatcgccggagatacgcgcgactccctgctcagcacccacccttcgctggacaaccgtatcgcccgcctcaaatcgctttaa

SEQ ID NO: 1231 - protein, 347 aa, Neisseria meningitidis MC58
MKCVYWNQTDGLRFYTAWHNSSKTNCTNCHLQANVLHTFAESDIHKPATFWDNPPKFQNITPYQKGTSVKRIFLFLATNIAVLVVINIVLAVLGINSRGGTGSLLAYSAVVGFTGSIISLLMSKFIAKQSVGAEVIDTPRTEEEAWLLNTVEAQARQWNLKTPEVAIYHSPEPNAFATGASRNSSLIAVSTGLLDHMTRDEVEAVLAHEMAHVGNGDMVTLTLIQGVVNTFVVFLSRIIANLIARNNDGSQSQGTYFLVSMVFQILFGFLASLIVMWFSRQREYRADAGAAKLVGAPKMISALQRLKGNPVDLPEEMNAMGIAGDTRDSLLSTHPSLDNRIARLKSL

SEQ ID NO: 1232 - DNA, 909 bp, Streptococcus pneumoniae R6
  CDS (1)..(909): transl_table=11
gtgactaagatgttgtttgatcaaattgcaagcaataaacgaaaaacctggattttgttgctggtatttttcctactcttagctcttgttggttatgcggttggttatctctttataagatctggacttggtggtttggttatcgcactgattatcggctttatctacgctttgtctatgatttttcaatcgacagagattgtcatgtccatgaatggagcgcgtgaggtggatgagcaaacggcaccagacctctaccatgtagtggaagatatggctctggtcgctcagattcctatgccccgtgttttcatcattgatgatccagccttaaatgcctttgcgacaggttctaatcctcaaaatgcggctgttgctgcgacttcaggtctactagctatcatgaatcgtgaagaactagaagctgttatgggacatgaagtcagtcatattcgtaattatgatatccgtatttcgactattgcagttgcccttgttagtgctatcaccatgctttctggtatggcaggtcgtatgatgtggtggggtggagcaggtcgcagacgaagtgatgatgaccgagatggaaatggtcttgaaatcattatgctagtggtttccctactagctattgtactggcacctctcgctgcaaccttggttcagctcgctatttctcgtcagagggaatttctggcagatgcatctagtgtcgagctgactcgcaatccccagggaatgattaatgccctagataagttggacaatagcaaacctatgagtcgccacgtcgatgatgctagcagtgctctttatatcaatgatcccaagaaaggtggggggttccaaaaactcttttatacccacccacctatctcagaacggattgaacgtttaaaacagatgtaa

SEQ ID NO: 1233 - protein, 302 aa, Streptococcus pneumoniae R6
MTKMLFDQIASNKRKTWILLLVFFLLLALVGYAVGYLFIRSGLGGLVIALIIGFIYALSMIFQSTEIVMSMNGAREVDEQTAPDLYHVVEDMALVAQIPMPRVFIIDDPALNAFATGSNPQNAAVAATSGLLAIMNREELEAVMGHEVSHIRNYDIRISTIAVALVSAITMLSGMAGRMMWWGGAGRRRSDDDRDGNGLEIIMLVVSLLAIVLAPLAATLVQLAISRQREFLADASSVELTRNPQGMINALDKLDNSKPMSRHVDDASSALYINDPKKGGGFQKLFYTHPPISERIERLKQM

SEQ ID NO: 1234 - DNA, 1014 bp, Brucella melitensis 16M
  CDS (1)..(1014): transl_table=11
ttgacgggcaattgccagatttggagaccgccacggatgaatatgacgaaaactgccatgctgatcgccctcatgacggtgatgttcatgagtattggctatttgctgggcggcggcggcggcatgatgatcgcgcttgtgatcgccgtcgccatgaacctgttcggctactggaattccgacaaaatggtgctgcgcatgtacaatgcgcaggaagtggacgagcgcagcgcacccgaatattaccgtatggtgagcggtcttgccgctaatgcgggcctgcccatgccgaaggtctatatcatccatgaagaccagccgaatgcctttgccacgggccgcaacccggaaaatgctgccgtggcggccacaaccggcctcctcaactggctttcgccggaagaagtcgcaggcgtgatggcgcacgagctggcccacgtccagaaccgcgacacgctgaccatgaccatcgtggcaacacttgccggtgccatatccatgctcggcaattttgctttcttcctcggcggcaatcgcgaaaacggcaatggcgtcatgggcgtcgtcggcacgcttcttgccatgatcgtcgcacccttcggggcgatgattgtgcagatggcggtgagccgcacccgcgaatatgccgccgacaagcgcggcgcggaaatctgcggcaatccgctgtggctctcctccgcgctaggcaagatcgcgcgtggtgccaaggtcatcccgaatgaagaagccgaacacaacccggcgaccgcgcatatgttcatcatcaacccgctgagcggacgtggcgcggacaatcttttctcgacccacccggataccgacaaccgcattgccgcacttgaacagatggctgctgaaacgggtatccgctcggccgcaatgacggcgcgcgccgccgccccttcacaaaacagtggtccctgggggcaaagaagtgataatgcaggcggcaacagcaatggcggttcccgctatcgggggccgtggtcgtaa

SEQ ID NO: 1235 - protein, 337 aa, Brucella melitensis 16M
MTGNCQIWRPPRMNMTKTAMLIALMTVMFMSIGYLLGGGGGMMIALVIAVAMNLFGYWNSDKMVLRMYNAQEVDERSAPEYYRMVSGLAANAGLPMPKVYIIHEDQPNAFATGRNPENAAVAATTGLLNWLSPEEVAGVMAHELAHVQNRDTLTMTIVATLAGAISMLGNFAFFLGGNRENGNGVMGVVGTLLAMIVAPFGAMIVQMAVSRTREYAADKRGAEICGNPLWLSSALGKIARGAKVIPNEEAEHNPATAHMFIINPLSGRGADNLFSTHPDTDNRIAALEQMAAETGIRSAAMTARAAAPSQNSGPWGQRSDNAGGNSNGGSRYRGPWS

SEQ ID NO: 1236 - DNA, 777 bp, Vibrio vulnificus CMCP6
  CDS (1)..(777): transl_table=11
atgcagccaggaagcctctcaggtttattggtgatggctgcggtatttggttttggtggtgcatttatctccttgatgatgtcaaagggaatggcactacgctctgtcggtggaatggtgatcgagagccctcgtaacgagacagagcactggttattggaaacggtgagtcgccaagctcagcaagcgggcattggtatgccaaccgttgccatttatgattcgccggatatcaacgcgtttgcaactggggcaaagcgtgacgattcgctggtcgcggtttctacgggtctgctgcacaacatgacacgtgatgaagcagaagcggtgctggcgcatgaggtgagccatatcgccaatggtgacatggtgaccatgacgttgatgcagggtgttgtgaacaccttcgttatcttcttgtctcgctttattgccaacatggtggcttctaataacagcgatgaagaaggtgaaggttcaaacatgatggtgtatttcgcggtttctatcgcgcttgagctggtgtttggtttcctcgcgagcttcatcaccatgtggtatagccgtcatcgtgaattccatgccgatgcgggagccgcccgtctagttggtaaagagaaaatgatagcggctctagagcgtctaaaaatgagccaagaatcaaaactggatggcaccatgatggcatttggtatcaacggtaagcaatctctaacggaactgcttatgagccacccgccactcgataagcgtatcgctgcccttcgcaatttctaa

SEQ ID NO: 1237 - protein, 258 aa, Vibrio vulnificus CMCP6
MQPGSLSGLLVMAAVFGFGGAFISLMMSKGMALRSVGGMVIESPRNETEHWLLETVSRQAQQAGIGMPTVAIYDSPDINAFATGAKRDDSLVAVSTGLLHNMTRDEAEAVLAHEVSHIANGDMVTMTLMQGVVNTFVIFLSRFIANMVASNNSDEEGEGSNMMVYFAVSIALELVFGFLASFITMWYSRHREFHADAGAARLVGKEKMIAALERLKMSQESKLDGTMMAFGINGKQSLTELLMSHPPLDKRIAALRNF

SEQ ID NO: 1238 - DNA, 876 bp, Tropheryma whipplei str. Twist
  CDS (1)..(876): transl_table=11
ttgatgtacagctttattgcgagaaacaaaatcaatacctttttgatattgtttgttttcatactggcttgtgggggttttggcctgcttgccggcagattcctcggtatgtcattttttctttttatcttgttattagcagcgggctatgcgtgtgtgcagtattttttctctggacgtttagccgttttgatgtcgggtgcccgaaaaattagccggaacgacaacccgcgcctctggaatactgttgagaatttatcaataacaaccggcttgccaatgccggaggtgtacattgttgacgaccccgcccctaatgcatttgcaacaggccgcgacccaaaacatgccaaggttgccgcaacatccggtctgcttgagatacttgatgattccgagcttgagggtgtcatggcccacgaaatgggccatgtaaagaactacgatataagggttagcactatcgtttttggcctcgtttcagccgttggccttatttcagatatggtccttcgggctctaatttggggggataatcgtcgcgaaggaaattctgccttttcgtttgttattgtcttatttttctccctccttgcccccattgcggcaatgctggttcagttggcggtttccagggaaagggagtatttggcggatgcaaccggcgccttgacaacaagatatcctgccgccctggcctctgcccttgccaaactggagggcaatgcaagaccgctgcaaagacagagcagtagcatggcccatttgtggatttcaaacccaatgccccgggggttcttcagaaagcttttttctacccacccacccaccgaggagaggattaggcgattgaaagaaatggggaaccagttctga

SEQ ID NO: 1239 - protein, 291 aa, Tropheryma whipplei str. Twist
MMYSFIARNKINTFLILFVFILACGGFGLLAGRFLGMSFFLFILLLAAGYACVQYFFSGRLAVLMSGARKISRNDNPRLWNTVENLSITTGLPMPEVYIVDDPAPNAFATGRDPKHAKVAATSGLLEILDDSELEGVMAHEMGHVKNYDIRVSTIVFGLVSAVGLISDMVLRALIWGDNRREGNSAFSFVIVLFFSLLAPIAAMLVQLAVSREREYLADATGALTTRYPAALASALAKLEGNARPLQRQSSSMAHLWISNPMPRGFFRKLFSTHPPTEERIRRLKEMGNQF

SEQ ID NO: 1240 - DNA, 876 bp, Tropheryma whipplei TW08/27
  CDS (1)..(876): transl_table=11
ttgatgtacagctttattgcgagaaacaaaatcaatacctttttgatattgtttgttttcatactggcctgcgggggttttggcctgcttgccggcagattcctcggtatgtcattttttctttttatcttgttattagcagcgggctatgcgtgtgtgcagtattttttctctggacgtttagccgttttgatgtcgggtgcccggaaaattagccggaacgacaacccgcgcctctggaatactgttgagaatttatcaataacaaccggcttgccaatgccggaggtgtacattgttgacgaccccgcccctaatgcatttgcaacaggccgcgacccaaaacatgccaaggttgccgcaacatccggtctgcttgagatacttgatgattccgagcttgagggtgtcatggcccacgaaatgggccatgtaaagaactacgatataagggttagcactatcgtttttggcctcgtttcagccgttggccttatttcagatatggtccttcgggctctaatttggggggataatcgtcgcgaaggaaattctgccttttcgtttgctattgtcttatttttctccctccttgcccccattgcggcaatgctggttcagttggcggtttccagggaaagggagtatttggcggatgcaaccggcgccttgacaacaagatatcctgccgccctggcctctgcccttgccaaactggagggcaatgcaagaccgctgcaaagacagagcagtagcatggcccatttgtggatttcaaacccaatgccccgggggttcttcagaaagcttttttctacccacccacccaccgaggagaggattaggcgattgaaagaaatggggaaccagttctga

SEQ ID NO: 1241 - protein, 291 aa, Tropheryma whipplei TW08/27
MMYSFIARNKINTFLILFVFILACGGFGLLAGRFLGMSFFLFILLLAAGYACVQYFFSGRLAVLMSGARKISRNDNPRLWNTVENLSITTGLPMPEVYIVDDPAPNAFATGRDPKHAKVAATSGLLEILDDSELEGVMAHEMGHVKNYDIRVSTIVFGLVSAVGLISDMVLRALIWGDNRREGNSAFSFAIVLFFSLLAPIAAMLVQLAVSREREYLADATGALTTRYPAALASALAKLEGNARPLQRQSSSMAHLWISNPMPRGFFRKLFSTHPPTEERIRRLKEMGNQF

SEQ ID NO: 1242 - DNA, 1854 bp, Vibrio parahaemolyticus RIMD 2210633
  CDS (1)..(1854): transl_table=11
atggacttttttcatcatcaagacactgcgcgccagcgaactggacttttggtgatgctattcactttggccgttttagccatcacagggctagtgagtgtcatttcgattggcatctacttttatttcactggcgaaccgttcaccactcaatccatcatcagttattgtttgttgagctttgtgggcgtgctattggttgttagcatcagctcattcattcgtcttagtgagctaaacgccaatggtggacgtggcgttgcagaaagcatcggtggcaagttgatttcgacagacacgtcaaatgcgaaacaccgccagttactcaatgttgtggaagaaatgtccatcgcgtcgggaattcccgtgccaccagtttatgtgatggcggaagagcacggcatcaacgcgtttgctgcaggcatgagcattgatgatgccgtcatcggagtaacgcaaggagcactagatgcgtttagccgtgacgaacttcaaggtgtaattgcccatgagttcagccacatcttaaatggtgatatgcggttgaatactcgtctgattggtgcgttatttggcattacctgcattgctcattttggtcatctgatcttggataactcgaacagcactcgtcacgtatcgcgtagttcttctgattcaaacaaaggcttcgctgtcatcatactgattgcgattgtctgcttggtgctgggttggttaggaaccttgttcggcaacatgatcaaagcagcgatttcgcgccaacgcgagtttttagcagacgccagtgccgtgcagttcactcgtaacgatcaagggattgcgggagcgttaaagaagattggcagcaacgttcaaggctctaccttaaacacgaaagccagtgatgaaatgagccacatgatgtttggacagagtaaattgtccggtttctctggtttgttcgcgacacacccaccattggacgaaagaattcgaagaatcgaacccaattgggatggaagctacgctcaacattctcatgctcaaaacacggcgtttgataacgaacaagtcagtggctttgccgtaggtggcggctctcctgcttcgcaatctgcctcaccatcggagcaattgagcgagacaggccaacagttgatcagtcaattaccaccagagctagttgatatcgcacgtgaaccatatagcgcccgatttattgcattcgccctcatttttgatggcagcgatattcagcgcgaaatgattaagtcgtacgttccactcgcatcgcaatctacattgcttccctggctagattatgacttaccacttcatctgcgtttcccgttactcgaactcgctctgccggcgcttaaatcgctgagtgaagcccagaaaatcagcttatgtaaagtgctacgtgagctctcagagacggataatcaatactcgctagccgaatggtgtgtcatcaacttactagaaaagcagctactcgcctcttttggattcatcaaacaacacaagtcgttgaagcaattagaggaaagtgtgttttggctattgcgagaactggcatgggtcagccactctcaagcagacaaagctcagcgcgcctaccattgtgccctcgcccatttaggctttcctgaagtgaagttagaaccagctaacagcaattggcatttaagtcgcgccgcattagagttgttgctacaactgaaacccaatgacagacgaatgttcgtcaaagcttgtcgactcgcgattgaatcagatggggaaattaccgttgctgaaggagaaatctatcgcgtcattgcttgcttccttgaagtaccggaaccaccacttacaatctcgggttag

SEQ ID NO: 1243 - protein, 617 aa, Vibrio parahaemolyticus RIMD 2210633
MDFFHHQDTARQRTGLLVMLFTLAVLAITGLVSVISIGIYFYFTGEPFTTQSIISYCLLSFVGVLLVVSISSFIRLSELNANGGRGVAESIGGKLISTDTSNAKHRQLLNVVEEMSIASGIPVPPVYVMAEEHGINAFAAGMSIDDAVIGVTQGALDAFSRDELQGVIAHEFSHILNGDMRLNTRLIGALFGITCIAHFGHLILDNSNSTRHVSRSSSDSNKGFAVIILIAIVCLVLGWLGTLFGNMIKAAISRQREFLADASAVQFTRNDQGIAGALKKIGSNVQGSTLNTKASDEMSHMMFGQSKLSGFSGLFATHPPLDERIRRIEPNWDGSYAQHSHAQNTAFDNEQVSGFAVGGGSPASQSASPSEQLSETGQQLISQLPPELVDIAREPYSARFIAFALIFDGSDIQREMIKSYVPLASQSTLLPWLDYDLPLHLRFPLLELALPALKSLSEAQKISLCKVLRELSETDNQYSLAEWCVINLLEKQLLASFGFIKQHKSLKQLEESVFWLLRELAWVSHSQADKAQRAYHCALAHLGFPEVKLEPANSNWHLSRAALELLLQLKPNDRRMFVKACRLAIESDGEITVAEGEIYRVIACFLEVPEPPLTISG

SEQ ID NO: 1244 - DNA, 963 bp, Bacteroides thetaiotaomicron VPI-5482
  CDS (1)..(963): transl_table=11
atgcagtacgtcggaatccaaacacagcagagccggaacaaccggcgctctgttcttctgttatttctatttccctgcctggtagcagcattgctttatctggcctgttatctattggtcgcctttgggcacggtgagagcatggaagtaagtatcctggaattggctaatcctcttttcatcaatgccctcccctatacgatgggtgtcgtattgatttggttcctgatagctttctgggcgaatacgagtatcatcaaagccgccacaggcgccaaacctctcgaccgcagagaaaacaaacgtgtctataatctggtcgagaacctctgcatggcaaacggaatgaaggctccgaaaatcaatatcatcgacgacgattcattgaacgcttttgccagcggtatcaacgaccgcacctatacggtcactctctcgaaagggattattcagaagttgaacgacgaagaactggaagcagtcatcgcccacgaactgactcacatccgcaacagggatgtgcgcctgctgatcgtctcgattgtatttgtcggaatcttctcgatgctgacgcaaatcactttctatactattacgcacacgcgcatacgtagcaacggaaaaaacggtggaggagctatcctcatcatactgattgctttagtaatagcggctgtcggttacttctttgccagtctgatgcgcttcgccatttcacggaagcgcgaatatatggcggatgccggttcggcggagatgacaaagaatccgttggcattggcaagtgccctgcgcaaaatttccgatgatccggatatagaagcggtaaaacgtagcgatgtagcgcaattattcattcagaatccgggcgaccagtcgaaaagtgccctcagcgggcttagcggactctttgccacgcatcctcctatcgagaaacgcatctccattctggaacagttctag

SEQ ID NO: 1245 - protein, 320 aa, Bacteroides thetaiotaomicron VPI-5482
MQYVGIQTQQSRNNRRSVLLLFLFPCLVAALLYLACYLLVAFGHGESMEVSILELANPLFINALPYTMGVVLIWFLIAFWANTSIIKAATGAKPLDRRENKRVYNLVENLCMANGMKAPKINIIDDDSLNAFASGINDRTYTVTLSKGIIQKLNDEELEAVIAHELTHIRNRDVRLLIVSIVFVGIFSMLTQITFYTITHTRIRSNGKNGGGAILIILIALVIAAVGYFFASLMRFAISRKREYMADAGSAEMTKNPLALASALRKISDDPDIEAVKRSDVAQLFIQNPGDQSKSALSGLSGLFATHPPIEKRISILEQF

SEQ ID NO: 1246 - DNA, 933 bp, Streptomyces avermitilis MA-4680
  CDS (1)..(933): transl_table=11
gtgatgcagatgcagagccggttccagagcgatcggcgactgaccgcgcggatgacagtcacactctttctcctcggactgctgtacctggcgttcgtcgccgcgctgatcgtcctgctgaagtcctgggtgctggtcgtggtgatcgcggcggcgttcctgggggcgcagtactggttctccgaccggatcgcgctgtacgcgatgcgcgggcggatcgtggagcgcgaggagtacccccagctgcacggggtcgtcgaccggctgtccgcggtggccgacatgcccaacccgctcgtcgccgtctccgacctggagatgccgaacgcgttcgcgaccgggcggaacgccgatcacgcggtgctgtgcgtgaccaccgggctactgcgacgactggagcccgacgagctggagggcgtcctcgctcacgagctgtcgcacgtggcgcacaaggacgtcgccgtgatcaccgtcgcgtccttcctcggggtcatcgccggtctgatcgtgcggttcgcgttctactcgcagttcttcggcgtacggggacggaaggaccagaacaccgttgtgatcttcatggcggtgctggcggtgtccgcggccgtgtacgcgctcagcttcttgctcatccgggccctgtcccgctaccgcgagctggccgccgaccgggccgccgccctgctgaccgggcgtccctcggcactggcgtccgcgctgaccaaggtcaccggtgacatcgcccgcatcccgacgaaggacctgcggtcggcgcaggccttcaacgccttctacttcacgcccgccctcggcaccacgccgggcctcgagcgcctcttctccacacatccgagcctggagcagcggctcgaacaactcggccgtatctccgccgagttgggcgaggcggcgacgcccgggaaggcgcgctga

SEQ ID NO: 1247 - protein, 310 aa, Streptomyces avermitilis MA-4680
MMQMQSRFQSDRRLTARMTVTLFLLGLLYLAFVAALIVLLKSWVLVVVIAAAFLGAQYWFSDRIALYAMRGRIVEREEYPQLHGVVDRLSAVADMPNPLVAVSDLEMPNAFATGRNADHAVLCVTTGLLRRLEPDELEGVLAHELSHVAHKDVAVITVASFLGVIAGLIVRFAFYSQFFGVRGRKDQNTVVIFMAVLAVSAAVYALSFLLIRALSRYRELAADRAAALLTGRPSALASALTKVTGDIARIPTKDLRSAQAFNAFYFTPALGTTPGLERLFSTHPSLEQRLEQLGRISAELGEAATPGKAR

SEQ ID NO: 1248 - DNA, 882 bp, Nitrosomonas europaea ATCC 19718
  CDS (1)..(882): transl_table=11
atgatgaaacggatttttctttttatagtaacgaacctggccatactgttaatgctgagcatcaccctgcgtctgcttggcgttgaccgcatactggatgccgaaggcagtgaattaaattttaatgcgctgctggttttctcggccgtactgggatttggcggctcgctcatttctcttgccatgtccaagtggagtgcaaaacacatgaccggcgccatggtcattgatgtgccttccaactcaaccgagggctggctggtggaaacggtacgtcgtcaggcaaaagcggcaggaataggcatgcctgaagtagcgatctacgattcacccgatatcaacgcatttgctaccggaatgaaccggaacaatgcgctggtggcagtcagtacgggattgttgcaaaaaatgaaccgggacgaggctgaggccgtgctggctcacgaagtcagccatgttgccaatggtgacatggtaacgcttgcattgatccagggggtcgtgaataccttcgtgatttttctctcccggatcatcggccatatcgtcgatcgcgccgttttcaaatcggaagaagggcacgggccagcttattttgtgaccagcctgatcgctcaaatggtgctgggtatccttgccacgattatcgtgatgtggttcagccgtcagcgtgaattccgcgcggatgccggcagtgcgcagatttccggaaggaacaagatggttgctgcgctgcggcggttgcagcaggagtatgaaccttctcatttgccagacaagattgctgcttttggcatctccggacaaaaaagccagatcgggcgtctgttcatgtcgcacccgcctctggaagagcgaatccaggcactgcaatctgcctga

SEQ ID NO: 1249 - protein, 293 aa, Nitrosomonas europaea ATCC 19718
MMKRIFLFIVTNLAILLMLSITLRLLGVDRILDAEGSELNFNALLVFSAVLGFGGSLISLAMSKWSAKHMTGAMVIDVPSNSTEGWLVETVRRQAKAAGIGMPEVAIYDSPDINAFATGMNRNNALVAVSTGLLQKMNRDEAEAVLAHEVSHVANGDMVTLALIQGVVNTFVIFLSRIIGHIVDRAVFKSEEGHGPAYFVTSLIAQMVLGILATIIVMWFSRQREFRADAGSAQISGRNKMVAALRRLQQEYEPSHLPDKIAAFGISGQKSQIGRLFMSHPPLEERIQALQSA

SEQ ID NO: 1250 - DNA, 930 bp, Helicobacter hepaticus ATCC 51449
  CDS (1)..(930): transl_table=11
atgaactcccattttgaacgaattattgctcaaaataagcttaaaacttatgcggttttggctatatatatcatcatttttatacttattggtttgcttgcagatattattcgcattgacgctcctagcttacaagaggggtttataatgcttcttagtttttatgaatttcctcttattacctttggaatggcagtggtggcagtgggcattattctttttagcgtgcagcgtttctcacgcattatgctaagtggcaatgaatataaacgcattaatcctaataatgtgctctctcgtcaagaatctcgcctgtatggtgtatttcaagatttacttagaagtgcaaattgttcttttgaacccgcactttatattatggaagccccttatatgaatgcttttgcgagtgggtggaatgaaaaaaattctatgattgctgttacttcagcgttgttagagcgattagatgagagtgagctaaaagcggtagtagcgcacgagttaagccatattcggcacggagatgtgcgattaacgatgtgtgtagggattttaagcaacattatgcttttaggtgtgaatatttttgccttttattttagctctgctcaatctcaaggagcaagggcagcacgaagtattttgctcattttacaatttgtcctcccacttcttacacttgtgctaagcctttttatctctcgtaatcgtgaatatatggcggattctggagcagcatatttaatgaaagaaagtgagccaatggttcgggcattacaaaaaattagccaagattatgcgcaaaataattatcaagagccaaatcccacacgagcaaatgcctatcttttcggcataggtgagattctaagcacacatccaagcatacaaaatcgtataaaagcattacttggacaacatttttaa

SEQ ID NO: 1251 - protein, 309 aa, Helicobacter hepaticus ATCC 51449
MNSHFERIIAQNKLKTYAVLAIYIIIFILIGLLADIIRIDAPSLQEGFIMLLSFYEFPLITFGMAVVAVGIILFSVQRFSRIMLSGNEYKRINPNNVLSRQESRLYGVFQDLLRSANCSFEPALYIMEAPYMNAFASGWNEKNSMIAVTSALLERLDESELKAVVAHELSHIRHGDVRLTMCVGILSNIMLLGVNIFAFYFSSAQSQGARAARSILLILQFVLPLLTLVLSLFISRNREYMADSGAAYLMKESEPMVRALQKISQDYAQNNYQEPNPTRANAYLFGIGEILSTHPSIQNRIKALLGQHF

SEQ ID NO: 1252 - DNA, 882 bp, Bordetella bronchiseptica RB50
  CDS (1)..(882): transl_table=11
atgaaacgcattttcctgttcctgatcaccaacctggccgtcatggttgtgctgtcggccacgatgcgcatcctcggcgtggaccgcttcctgaccgcgcaggggctgaacctcaccggcctgctgatcttctcggccgtgatcggcttcaccggcgcgatcatttcgctgctgatgagcaagcccatggccaaatggagcaccggcgcgcgcgtcatcgaccccaacgcgccggccaaccagcgcgaagcctggctgctcgacaccgtgcaccagctggccgaccgcgccggcatcggccggcccgaggtggccatctaccagggcgaacccaacgcattcgccaccggcgcgttccgcaacgactcgctggtggcggtctcgaccggcctgctcgacagcatgaccgaagaagaagtggccgccgtgctgggccacgaggtggcgcacgtggccaacggcgacatggtcaccctcaccctgatccagggcgtggtcaacaccttcgtcgtgttcctggcgcgggtggtcggctatttcgtcgaccgcgccattctcaagaacgaacgcggcgtgggcctgggctactacgccaccgtgatcgtctgtgagatcgtcttcgggatcctggcctccatcatcgtggcctggttctcgcgccagcgcgaataccgcgccgacgcgggctcggcccacctgatgggctcgcgcgagcccatgatccgcgccctggcgcggctgggcggcctggagccgggcgaactgcccaagtcgttcgaagcctcgggcatctcgggcaagaacggcatctcggccatgttcgcctcgcaccccccgatccaggcccgcatcgcggccctgcagcacgcccgcctgggctga

SEQ ID NO: 1253 - protein, 293 aa, Bordetella bronchiseptica RB50
MKRIFLFLITNLAVMVVLSATMRILGVDRFLTAQGLNLTGLLIFSAVIGFTGAIISLLMSKPMAKWSTGARVIDPNAPANQREAWLLDTVHQLADRAGIGRPEVAIYQGEPNAFATGAFRNDSLVAVSTGLLDSMTEEEVAAVLGHEVAHVANGDMVTLTLIQGVVNTFVVFLARVVGYFVDRAILKNERGVGLGYYATVIVCEIVFGILASIIVAWFSRQREYRADAGSAHLMGSREPMIRALARLGGLEPGELPKSFEASGISGKNGISAMFASHPPIQARIAALQHARLG

SEQ ID NO: 1254 - DNA, 882 bp, Chromobacterium violaceum ATCC 12472
  CDS (1)..(882): transl_table=11
atgaaacgggtgattttgctgattgtgaccaacatcgcggtgatgctggttctgagcctgagcgtgcgattgctgggcctggatcgcttcgtcaccgccggcggcctgaacctgggcatgctgctgatgttctcggcggtgctgggtttcggcggcgctttcatttccctggccctgtccaagaccatggccaaatggagcaccggcgcgcgggtgatcacgcagccgtccggccagaccgaagcctggctgctgaacactgtgcgcaagctggccgaccgcgccggcctgccgatgccggaggtggcggtgtacgagggcgagcccaatgctttcgccaccggccccagccgcgccaactcgctggtggcggtgtccaccggcttgctggccaatatgaatgaggaggaagtggaggcggtgctggcgcacgagatcgcccacatccgcaacggcgatatggtgacgctgacgctgatccagggcgtggtcaacaccttcgtctatttcctggcccgggtggtcggctacctggtggacagctggctgaagcgcgacgaggagaacggttccgccggcaccgggatcggttatttcatcacggtcatcgtctgcgagatcgtattcggcatcctggcttccgtggtggtgatgtacttctcccgccagcgcgagttccgcgccgacgccggcgccgccgagctgctgggctcgcccgtgccgatggccaacgcgctgcgtcgtctgggcggcatcgaggccgacggcttgcccaagagcatggcggcttccgggatcgccggcggccgcggcctgctgggcctgttcgccacccacccgagcatggaggagcgcatcgccgcgctggaaggccgcggttga

SEQ ID NO: 1255 - protein, 293 aa, Chromobacterium violaceum ATCC 12472
MKRVILLIVTNIAVMLVLSLSVRLLGLDRFVTAGGLNLGMLLMFSAVLGFGGAFISLALSKTMAKWSTGARVITQPSGQTEAWLLNTVRKLADRAGLPMPEVAVYEGEPNAFATGPSRANSLVAVSTGLLANMNEEEVEAVLAHEIAHIRNGDMVTLTLIQGVVNTFVYFLARVVGYLVDSWLKRDEENGSAGTGIGYFITVIVCEIVFGILASVVVMYFSRQREFRADAGAAELLGSPVPMANALRRLGGIEADGLPKSMAASGIAGGRGLLGLFATHPSMEERIAALEGRG

SEQ ID NO: 1256 - DNA, 855 bp, Chromobacterium violaceum ATCC 12472
  CDS (1)..(855): transl_table=11
atgaacgacaactggctgaagaccacgatgctgatggccgccatcatggcgctgttcgtcctgataggcggcatgctgggcggcaagggcggcatgctgctggcgctgctgttcggcggcggcatgaacttgttcgcctggtggaattccgaccgcatggtgctgtcgatgtacaacgcgcaggaagtggacgccaacagcgcgcccgaattctacggcatggtggccgagctggcgcagcgcgccggcctgccgatgccgcgcgtctacgtgatccacgaggaccagcccaacgccttcgccaccgggcgcaacccggaaaacgcggcggtggcggccaccagcggcatcatgcgcatgctcgactaccgcgagctgcgcggcgtgatggcccacgagctggcccacgtcaagcaccgcgacaccctgatctccactatctcggcgacgatggccggcgccatttccgcgctggccaacttcgcgatgttcttcggcggccgcgacgagaacggccagccggtcggcctgctgccgcggctggcggtggctttcctcgccccggtggcggccagcctgatccagatggcgatctcgcgcgcgcgcgagttcgaggccgaccgcggcggggccgagatttgcggcgatccgctggcgctggcttccgcgctgcagaaaatcgaatattatgcccagggcatctcgatgccgtccgccgaggcgcatccggagaccgcgcagatgatgatcattaatcccttgtccggcggcggcgtgggcgatctgttccgcacccatccgcataccgccgatcgcatagagcggctgcaggcgctggcgcgcggcgtctactag

SEQ ID NO: 1257 - protein, 284 aa, Chromobacterium violaceum ATCC 12472
MNDNWLKTTMLMAAIMALFVLIGGMLGGKGGMLLALLFGGGMNLFAWWNSDRMVLSMYNAQEVDANSAPEFYGMVAELAQRAGLPMPRVYVIHEDQPNAFATGRNPENAAVAATSGIMRMLDYRELRGVMAHELAHVKHRDTLISTISATMAGAISALANFAMFFGGRDENGQPVGLLPRLAVAFLAPVAASLIQMAISRAREFEADRGGAEICGDPLALASALQKIEYYAQGISMPSAEAHPETAQMMIINPLSGGGVGDLFRTHPHTADRIERLQALARGVY

SEQ ID NO: 1258 - DNA, 927 bp, Wolinella succinogenes DSM 1740
  CDS (1)..(927): transl_table=11
atgtttgaaaaagtgatacgcgaaaatcaaaccaaaacccaactcgttctagcgctctatgtcgctatctttctttttatcggacttttggtggatgtcgtgcgcatcaacgccccaagccttcaagaggggctttatgccctcatcttttttcatatcacccctttggtgacgcttggcatgggcgtattggcccttggagccattggagtgacgattctctatttcaagcgaatcatgctcagtggaagcgagtataaagagcttcttccttcagatcgctccctctcccgccaagaatcagatcttgttcagattctccaagaggtggtcagagagtcaaacactccctttactcccaagctctacctcatggaggcgccctacatgaacgcctttgcaagcggctggagcgagcaaaactccctcatcgctgtgaccaccgaacttatgcaaaagcttgatcgagatgagctcaaagcggtcgtggcgcatgagctaagccacattcgccatggcgatattcgcctcactctcgtggtgggcgtgctcagcaatatcatgctcttagccgccaactatgccgtctatatgttcatggggaacagcagggataagggggcgcagagtgcacgaaccatcctcttggtgcttcagttcatccttccgctcatcaccatgtttttgcaaacgttcctcagtcgaagtcgtgaatacatggccgatagcggtgcagcctacatcatgaaggataatcgccccatgattcgcgccctccaaaaaattagcacaaactacgctcaaagcgactttagcgaggttgatgccaacccaacgcgccgtgctgcctacctctttgaccccaaagaggcgttcagcactcatcccactattgaaaatcgaataaaggctctacttggaagataa

SEQ ID NO: 1259 - protein, 308 aa, Wolinella succinogenes DSM 1740
MFEKVIRENQTKTQLVLALYVAIFLFIGLLVDVVRINAPSLQEGLYALIFFHITPLVTLGMGVLALGAIGVTILYFKRIMLSGSEYKELLPSDRSLSRQESDLVQILQEVVRESNTPFTPKLYLMEAPYMNAFASGWSEQNSLIAVTTELMQKLDRDELKAVVAHELSHIRHGDIRLTLVVGVLSNIMLLAANYAVYMFMGNSRDKGAQSARTILLVLQFILPLITMFLQTFLSRSREYMADSGAAYIMKDNRPMIRALQKISTNYAQSDFSEVDANPTRRAAYLFDPKEAFSTHPTIENRIKALLGR

SEQ ID NO: 1260 - DNA, 888 bp, Photorhabdus luminescens subsp. laumondii TTO1
  CDS (1)..(888): transl_table=11
atgatgcgaattgttttgttcctcctcactaacctcgctgttatgttggtgttcgggataatactttctttgacaggaattcaggggagtagtgtacaaggtttgatgattatggctggcctgttcggtttcggtggggcgtttgtttctctgctgatgtccaaatggatggccctgcgttctgtgggtggtcaggtcatcgaacagccagcaaacgaagttgaacattggttagttgaaactgttcgcagtcaagcggaacaagtcaatattgccatgccccaggttgcgatttatgccgcgcctgatattaacgcattcgctaccggagcgcgtcgtaatgcttctctggttgctgtcagcagcggtctattggataacatgagtagggcagaagcagaagctgttattgctcatgagattagtcatattgctaatggtgatatggtgacgatgaccttgttgcaagggatagtaaatactttcgttatctttatttcccgtctactggctcaagctgtatcaagtttcctgtctggcaatagtgacgaggaagagagtaactcctctggcaatccgattgtttacatggttgcttcaatggtgttggaaatagtatttggtattctggcgagcattatcacgatgtggttctcgcgttatcgcgaattccatgcagatgcaggttctgctaagttggtcggtcgtgagaaaatgatcgctgctttacagcgtctgaaaaccagttatgaaccgcaggaagaaggcggtatgatggcgttctgtattaatggtaaatcaaagacattcagtgagctgttcatgtctcacccgccattggacaaacgtattgaagcactgcgtagtgggcaatacctgaataaataa

SEQ ID NO: 1261 - protein, 295 aa, Photorhabdus luminescens subsp. laumondii TTO1
MMRIVLFLLTNLAVMLVFGIILSLTGIQGSSVQGLMIMAGLFGFGGAFVSLLMSKWMALRSVGGQVIEQPANEVEHWLVETVRSQAEQVNIAMPQVAIYAAPDINAFATGARRNASLVAVSSGLLDNMSRAEAEAVIAHEISHIANGDMVTMTLLQGIVNTFVIFISRLLAQAVSSFLSGNSDEEESNSSGNPIVYMVASMVLEIVFGILASIITMWFSRYREFHADAGSAKLVGREKMIAALQRLKTSYEPQEEGGMMAFCINGKSKTFSELFMSHPPLDKRIEALRSGQYLNK

SEQ ID NO: 1262 - DNA, 975 bp, Rhodopseudomonas palustris CGA009
  CDS (1)..(975): transl_table=11
atgagttacttcaagaccgctctcttgctggccggcctgaccgcgctgttcatgggggtcggctatctgatcggcggcgccaatggcgcgctgattgcgctcgtcgtcgccgcggcgatgaacatcttcacctactggaattccgaccggatggtgctgtcgatgtacggcgcccaggaggtcgacgagcgctcggcgccggatctctaccggatggtggcggaactggccggccgcgcctcgctgccgatgccgcgggtgttcatcatggacaacccgcagccgaacgcgttcgccaccggccgcaatcctgagaacgccgccgtcgccgtcaccaccgggctgatgaaccagctcagccgtgaggaacttgccggcgtggtggcgcacgaactggcgcacatcaagaaccacgacacgctgctgatgaccatcacggcgacgatcgccggtgcgatctcgatggtggcgcagttcggcatgttcttcggcggtaaccgcgagaacaacaacggccccggtctgatcgggtcgctggcgctgatgatcctcgcgccgctcggcgccatgctggtgcagatggcgatcagccggacccgcgaatacgccgccgacgagatgggcgcgcggatctgcggccagccgatgtggctcgcctcggcgctcggccggatcgaagccgccgcgcatcaggtgccgaactatgacgctgaacgctcgccggcgaccgcgcacatgttcatcatcaacccgctgtcgggacagggcatggacaatctgttcgccacgcacccgtccaccgacaatcgggtcgccgcgctgcagcggctcgcggccgagatcggcggcagttcgtatcgtccggcctcgacgttctctcgcggcgccggcacggctgcctcaagcggcaccccgcgcggcaccggccgcagtccttggggcggccagccgcgtggccgaggtccgtggggttag

SEQ ID NO: 1263 - protein, 324 aa, Rhodopseudomonas palustris CGA009
MSYFKTALLLAGLTALFMGVGYLIGGANGALIALVVAAAMNIFTYWNSDRMVLSMYGAQEVDERSAPDLYRMVAELAGRASLPMPRVFIMDNPQPNAFATGRNPENAAVAVTTGLMNQLSREELAGVVAHELAHIKNHDTLLMTITATIAGAISMVAQFGMFFGGNRENNNGPGLIGSLALMILAPLGAMLVQMAISRTREYAADEMGARICGQPMWLASALGRIEAAAHQVPNYDAERSPATAHMFIINPLSGQGMDNLFATHPSTDNRVAALQRLAAEIGGSSYRPASTFSRGAGTAASSGTPRGTGRSPWGGQPRGRGPWG

SEQ ID NO: 1264 - DNA, 864 bp, Geobacter sulfurreducens PCA
  CDS (1)..(864): transl_table=11
atgatgaaccgactcaaaaccaccctgctcctgaccctgctcacccttctcatggtggccatggggagcgccataggcggcaagaccggcatggtcttcgctttcttcatggcctgcgccatgaacttcttttcctactggttctcggacaagatcgttctctccatgtacggggcaaaggagataaccgagaccgaaaacccgaccttctacggcatggtgcgccggctggccgtgcaggcgggcctgcccatgccgcgggtctacatcatccccagcgacagccccaatgccttcgccaccggccgcaaccccaatcacgcggcagtggccgccacccagggcatcctccgcatcctctcccccgaggagctcgagggggtcatggcccacgagctggcccacgtgaagaaccgcgacatcctggtgtccaccatcgccgccacctttgccggtgccatctccatgctcggcaatatgctccagtgggcggccatgttcggcggcggccggagcgacgacgaggaaggggccggcggcatgatcggcggcctggccatggcgatcatcgcccccatcgccgccatgctgatccagatggcggtatcccgctcccgcgagtatttggcggacgagtcgggtgcgcgcatctgcggcaatccccagtccctggccaatgccctgcgcaagctccagatggcgtcccaaatgatcccgatgcagcaggcgtcgccggcttcggcccacctcttcatcgtcaacccgctcagcggcagttcgctgttcaagcttttctccacccacccccccatggaagagcggatcgcccggctcgaagccatggcgtacagtagaaatttctag

SEQ ID NO: 1265 - protein, 287 aa, Geobacter sulfurreducens PCA
MMNRLKTTLLLTLLTLLMVAMGSAIGGKTGMVFAFFMACAMNFFSYWFSDKIVLSMYGAKEITETENPTFYGMVRRLAVQAGLPMPRVYIIPSDSPNAFATGRNPNHAAVAATQGILRILSPEELEGVMAHELAHVKNRDILVSTIAATFAGAISMLGNMLQWAAMFGGGRSDDEEGAGGMIGGLAMAIIAPIAAMLIQMAVSRSREYLADESGARICGNPQSLANALRKLQMASQMIPMQQASPASAHLFIVNPLSGSSLFKLFSTHPPMEERIARLEAMAYSRNF

SEQ ID NO: 1266 - DNA, 861 bp, Geobacter sulfurreducens PCA
  CDS (1)..(861): transl_table=11
atgaacaggctcaagacaacccttctcctctccctgctgaccgttctcatggtcctcatgggcagtgccctgggcggcaagtccggtatgatcacggcttttgtcatagcccttggcatgaacttcttctcctactggttttccgacaagatcgtcctcaagatgtacggagcccgcgaggtcgacgagcacgaccatccgcagttctacggcatggttcgccgcctggcccttcaggcggggctccccatgcccaaggtctacatcatcccgtccgacagccccaacgcctttgccacgggaaggaatccgcagcatgccgccgtagccgcgacagaaggcatcttgcggattctgtcgccggatgaactcgaaggggtaatggcccatgaacttgcccacgtccagaaccgggacatcctggtgggaaccattgccgccaccttcgccggtgcaatctccatgatcggcaacatgctccagtggggcgccatgctcggcgtcggcagaaacgacgacgaggaggggggcgccggcggcctgatgggttcgctggtcatggccattgtcgcacccatggcggccatgctgatccagatggcggtctcgcgctcccgggagtacctggcggacgaaaccggcgcaaggatctgcggcagaccactggcactggccaatgccctgcgcaaactccatgtcgcatctcacagcatacccatgcaggaggccagaccggcctcagcacacatgttcatcgttaatccactgaccgggggcagcctcctctccctcttctcgacccacccgccaatggaggagcggattgcccggcttgaagcgatgtccagaacatcaaggtaa

SEQ ID NO: 1267 - protein, 286 aa, Geobacter sulfurreducens PCA
MNRLKTTLLLSLLTVLMVLMGSALGGKSGMITAFVIALGMNFFSYWFSDKIVLKMYGAREVDEHDHPQFYGMVRRLALQAGLPMPKVYIIPSDSPNAFATGRNPQHAAVAATEGILRILSPDELEGVMAHELAHVQNRDILVGTIAATFAGAISMIGNMLQWGAMLGVGRNDDEEGGAGGLMGSLVMAIVAPMAAMLIQMAVSRSREYLADETGARICGRPLALANALRKLHVASHSIPMQEARPASAHMFIVNPLTGGSLLSLFSTHPPMEERIARLEAMSRTSR

SEQ ID NO: 1268 - DNA, 891 bp, Lactobacillus johnsonii NCC 533
  CDS (1)..(891): transl_table=11
atgctctatcaacaaatagcacgcaataagcgtaaaacagcatttttgcttgttatattcgttattattctagctcttgttggtggtgggttaggatacttaattaatggcgaacctttttccggaatcgccattgctcttattggtagtttaatttatctttttattgttcttcaaaatcctggaaacctagtgatgagcatgaatcacggccgagagattcatgaagaagacgatccagaactttggcacattgttgaagatatggctctggctggacaagttccgatgccaagagtttttattatcaatgatccaagcccgaatgcttttgcgactggacgagatcctaagcatagttatgttgccgttacaactggcttacgagaacgattaaatagaagtgagttagagggcgttttaggtcatgaaatttctcatattagaaattatgatatcttagtttcaactattggagttgcactagcagcagtaatttcttttatttctaacttcgcctctcgcatttggtggtggggcagcaattcagaccgcgatgaccgagactcaagtcctttagaagcaatttttaaggtagtagcaattgtttttaccctaattttaggaccacttgctgcaggacttgcccaaatggctctgtctcgtaatcgagaatatctggctgatgcgggctcagtagaacttactaggaatccacaaggcctaatttcagctttagagaagatttctaacagtgagccaatgaaagatccagatccatcaagtgctgggctctacattgaaaatccacttcataatcgtgggttaagctcactctttgatactcacccatctactgcggatcgaattaagagattaaaaaatatgtaa

SEQ ID NO: 1269 - protein, 296 aa, Lactobacillus johnsonii NCC 533
MLYQQIARNKRKTAFLLVIFVIILALVGGGLGYLINGEPFSGIAIALIGSLIYLFIVLQNPGNLVMSMNHGREIHEEDDPELWHIVEDMALAGQVPMPRVFIINDPSPNAFATGRDPKHSYVAVTTGLRERLNRSELEGVLGHEISHIRNYDILVSTIGVALAAVISFISNFASRIWWWGSNSDRDDRDSSPLEAIFKVVAIVFTLILGPLAAGLAQMALSRNREYLADAGSVELTRNPQGLISALEKISNSEPMKDPDPSSAGLYIENPLHNRGLSSLFDTHPSTADRIKRLKNM

SEQ ID NO: 1270 - DNA, 897 bp, Bdellovibrio bacteriovorus HD100
  CDS (1)..(897): transl_table=11
atggcatttttgaaacgtattggtctatttgtattaacgaacgtccttgtgatcgtcacgatcgggattgtttggtctatcgtcagccgcttcctgggcatggcgggacttaactcttacattccgttcctgatggctttctgtgccgtttggggtatgggtggcgcgttcatctccctgttcatgtccaagtggatggcgaagatgttccatggcgtgaaaatcatcgacgccaacaatccaaatccggaacttcgcaacttggtaaacaaagttcatgagttcgcaagacgcgctcagctccctaaaatgccagaggttggtatctacgaatccgtggacatcaacgcttttgcgacaggtccttccaaaaagaactctctggttgcggtttccaccggacttttgcagagaatgaatgaaaaagaagtcgacggcgttctggcgcacgaagtggcccacatcgccaacggtgacatggtgaccatgactctgatccagggtatcgtgaatgcctttgcgatgttcttctctcgtattctggcgggccttgtggctgccaacgtggatgaaaaataccgcgagatcgttcgctttgccgtgacgatcctgggcgacatcgccttcacaatgctgggttctatcgtggtgaactacttctctcgtcagcgcgaattccgtgcggatgctggcggcgcgaagtattcttcccgcgacagcatggtcgcagctttgcaaaagctgcgttccgtgtatgatctgccaattccaccggaagaaggtcagactgcgactttgatgatttccaaccgcgacaaaggtggaatcgccaaattgttcatgactcaccctcctctggaagttcgtatcgaagctcttcagcgcggtcgcttctaa

SEQ ID NO: 1271 - protein, 298 aa, Bdellovibrio bacteriovorus HD100
MAFLKRIGLFVLTNVLVIVTIGIVWSIVSRFLGMAGLNSYIPFLMAFCAVWGMGGAFISLFMSKWMAKMFHGVKIIDANNPNPELRNLVNKVHEFARRAQLPKMPEVGIYESVDINAFATGPSKKNSLVAVSTGLLQRMNEKEVDGVLAHEVAHIANGDMVTMTLIQGIVNAFAMFFSRILAGLVAANVDEKYREIVRFAVTILGDIAFTMLGSIVVNYFSRQREFRADAGGAKYSSRDSMVAALQKLRSVYDLPIPPEEGQTATLMISNRDKGGIAKLFMTHPPLEVRIEALQRGRF

SEQ ID NO: 1272 - DNA, 858 bp, Methanococcus maripaludis S2
  CDS (1)..(858): transl_table=11
atgatgtctacagtaaaagttcttttattgatggcacttttaacaggaatgatttatggaatctgttatatgcttggattccccccaatatttgcaatacttttagcactaatccctaatttaataagctatttttatagcgacaaaatagttctgactagctatggtgcaaaaatagttgatgaaaacgaagcgccaaatttacacagaattgtcgaatcaatagcaaacagggcaaatattcaaaaaccaaaagttgcaataattaatacggatactccaaatgcatttgcaacaggtagaagccctaaaaatggtgtagttgcagttactactggaatcttacaacttttaaatgagcaggaactcgaaggggttttagctcacgaaattggacacataaagcacagggatatattaattggaacaatagttgcaacaatggctggagcaataatgtacattgcaaatttcttacagtggggaatgctttttggatatggaagagatgacgatggaaatcctttgcagattgttgcatccttacttttcataatattggccccaattgccgcgatggttgttcaatttgcaatttcaaggcagaatgaatacaatgctgatgaaaacggggcaaaatattcaaatccaatttaccttgcaaatgcacttacaaaacttgaaaaaggggtaaaataccatccgttaagaaatggaagccctgcaactgcgcacatgtttattgtaaatccttttaaagcaggaaacgttgcaaggttattttcaacacacccttcaaccgaagaacgggtaaaaagattaatggaaatggcaagtaatcctaaatatttaagatag

SEQ ID NO: 1273 - protein, 285 aa, Methanococcus maripaludis S2
MMSTVKVLLLMALLTGMIYGICYMLGFPPIFAILLALIPNLISYFYSDKIVLTSYGAKIVDENEAPNLHRIVESIANRANIQKPKVAIINTDTPNAFATGRSPKNGVVAVTTGILQLLNEQELEGVLAHEIGHIKHRDILIGTIVATMAGAIMYIANFLQWGMLFGYGRDDDGNPLQIVASLLFIILAPIAAMVVQFAISRQNEYNADENGAKYSNPIYLANALTKLEKGVKYHPLRNGSPATAHMFIVNPFKAGNVARLFSTHPSTEERVKRLMEMASNPKYLR

SEQ ID NO: 1274 - DNA, 981 bp, Parachlamydia sp. UWE25
  CDS (1)..(981): transl_table=11
gtgatggccatgaacttttgggaagctcagcgtgaagcaaagacaaaaacaactctttatttagtgatcttctttattcttactcttatctcagcaacacttgcagaaatattgatgagaggctttgcacaagatggctaccatactgattttccttatataggcttaggatttttaagtgttattttttgtgtggccggattcaattatatgaattatttgcaaaatggaggtagttacgtagcagagtctttaggtgcgagacttgtcgaccctaatacgcgcgatggtaaagaaaggcaattattgaatatcgtggaagaaattgctttggccacttctttacctattcctcctgtgtacattttagaagctcaagaaatcaatgcttttgcggcaggaacttcgtacgataatgcagctataactgtcacacaaggatgtttattagctttgaatcgagatgaattgcaaggagttttagctcacgaattcgggcatatatataatcgagatatgctgattggaatgcgtgttgcggctatgattatgggattctttattgtctcttatattggacttagaatgttacaaaccgccccttatgcaagaagagatgataaggaagaacgtaaaagtggtaatcctgttgcagcgataggtatgattttcacgttagtgggagcattcatgtggttttttggctctattcttcaagccatggtgagtcgccaaagggagtatttagcggatgcaagttctgtccaatatacacgcaatcctgcagggatctctagtgctttaaagaagatccaaaactataaactttctgatatgccaaaaagtggaaaaccttttgctcatttatactttaatgagcatacctctttttggcagcgtttattcgcgagtcatcctccaattgaagatcgtattgcagcgattgaaggtcataaatatgtggatcttaatcaaaaatga

SEQ ID NO: 1275 - protein, 326 aa, Parachlamydia sp. UWE25
MMAMNFWEAQREAKTKTTLYLVIFFILTLISATLAEILMRGFAQDGYHTDFPYIGLGFLSVIFCVAGFNYMNYLQNGGSYVAESLGARLVDPNTRDGKERQLLNIVEEIALATSLPIPPVYILEAQEINAFAAGTSYDNAAITVTQGCLLALNRDELQGVLAHEFGHIYNRDMLIGMRVAAMIMGFFIVSYIGLRMLQTAPYARRDDKEERKSGNPVAAIGMIFTLVGAFMWFFGSILQAMVSRQREYLADASSVQYTRNPAGISSALKKIQNYKLSDMPKSGKPFAHLYFNEHTSFWQRLFASHPPIEDRIAAIEGHKYVDLNQK

SEQ ID NO: 1276 - DNA, 1050 bp, Bartonella quintana str. Toulouse
  CDS (1)..(1050): transl_table=11
atgaatataatgcgtacagcaatgcttttggcatttatgacagccctttttatgggagtcggttatctcattggcggaagcaatggcatggtcatcgcacttttgatggcaggtggcttaaattttttttcttattggaattcggataaaatcgttttaaacatgtatggtgctcgcaaagttgatcagcattcgtcacctgtttattataaaattgtaagcgatttggctcaaagagcttctctccctcagccaaaagtttatattattgatagtgcacaaccaaatgcttttgctacgggacgcaatcctcaaaatgcagctgttgctgcaagtactgggttgttagagcagttaagcgcagaagaagttgctggagttatggcgcatgagctggcacatattgagcatcgtgatactttaacaatgactctaaccgcaacgattgctggggcaatttcaatgcttggtaatttcgctttttttatgggagggcagcggaattcttcagaacattctcatggtgctggggcgcttgggggacttattgctctgtttgtggcaccttttgctgctatgctagtgcaaatggccattagtcgcacccgtgaatatgctgctgataggcggggcgctgaaatatgtggtaaccctttatggttggcttcggcattaagtaaaattgccggcggtgggcatacggtatacaatgaagaagcagagcataatccagcaacagcgcatatgtttattattaatcctttgaagggtgaaggggctgatagccttttttctacccatccagcaacagccaatcgtattgctgctcttcgtcggcaagcagaagagatgaaaggagcaatgccaaagagcatgggatggagtgaggaagagaattttcacaaaaaaaacagcaacttagactatgatggtctgaatcgcagtgcgcaaaccagcatattcggtaatcaggaaaacaatgctgttcagcgcattaaaaaacgtccttcttggcttcgttatgaagattcaaaaaggtctcgatcataa

SEQ ID NO: 1277 - protein, 349 aa, Bartonella quintana str. Toulouse
MNIMRTAMLLAFMTALFMGVGYLIGGSNGMVIALLMAGGLNFFSYWNSDKIVLNMYGARKVDQHSSPVYYKIVSDLAQRASLPQPKVYIIDSAQPNAFATGRNPQNAAVAASTGLLEQLSAEEVAGVMAHELAHIEHRDTLTMTLTATIAGAISMLGNFAFFMGGQRNSSEHSHGAGALGGLIALFVAPFAAMLVQMAISRTREYAADRRGAEICGNPLWLASALSKIAGGGHTVYNEEAEHNPATAHMFIINPLKGEGADSLFSTHPATANRIAALRRQAEEMKGAMPKSMGWSEEENFHKKNSNLDYDGLNRSAQTSIFGNQENNAVQRIKKRPSWLRYEDSKRSRS

SEQ ID NO: 1278 - DNA, 1038 bp, Bartonella henselae str. Houston-1
  CDS (1)..(1038): transl_table=11
atgaacataatgcgtacagcaatgcttttggcttttatgactgctcttttcatgggagttggttatctggttggcggaagcaatggcatggtcatcgcacttttgatggctggtggcttaaactttttttcttattggaattcggataaaatcgttctacgcatgtatggtgcacgtgaagtcgatcaacattcgtctcccgtttattataagattgtaagcgatttagcgcgaagagcttctcttcctcaaccaaaagtttatattattgataatgcacagccaaatgcttttgctacaggacgtaatcctcagaatgcagctgttgctgcaagtactggattgctaaatcagttgagtgcagaagaagtggctggagtgatggcgcatgagcttgctcatattgagcatcgtgatacgttaacgatgactttgactgcaacgattgccggggcaatttcaatgcttggtaatttcgctttttttatggggggacagcgtcattcttctgaaaattctcatagtactggggcaatcggaggacttcttgccctgtttgtagcaccttttgctgcaatgctggtgcaaatggccattagtcgcacccgtgaatatgctgctgataggcgaggggctgaaatatgcggaaatcctttatggttggcttcagcattgagtaaaattgcaggtggggggcatacggtatacaatgaagaggcagaacataatccggcaacagcacatatgtttattatcaatcctttgcgtggtgaaggggccgatagtcttttttctacccatcccgcaacagcaaatcgtattgctgctcttcgtcggcaagcagaagagatgaaaggagcaagagtggaaaatatgggatggaatgaaaaaattggtttacataaaaaaagcagtgactttagagatttgaattctggtgcgcaaacaagtgtctttaacgaagaaagtactgttcagcgtattaaaaaacgcccttcttggcttcgttatggagattcaaagagacctcgatcataa

SEQ ID NO: 1279 - protein, 345 aa, Bartonella henselae str. Houston-1
MNIMRTAMLLAFMTALFMGVGYLVGGSNGMVIALLMAGGLNFFSYWNSDKIVLRMYGAREVDQHSSPVYYKIVSDLARRASLPQPKVYIIDNAQPNAFATGRNPQNAAVAASTGLLNQLSAEEVAGVMAHELAHIEHRDTLTMTLTATIAGAISMLGNFAFFMGGQRHSSENSHSTGAIGGLLALFVAPFAAMLVQMAISRTREYAADRRGAEICGNPLWLASALSKIAGGGHTVYNEEAEHNPATAHMFIINPLRGEGADSLFSTHPATANRIAALRRQAEEMKGARVENMGWNEKIGLHKKSSDFRDLNSGAQTSVFNEESTVQRIKKRPSWLRYGDSKRPRS

SEQ ID NO: 1280 - DNA, 906 bp, Acinetobacter sp. ADP1
  CDS (1)..(906): transl_table=11
atgatgcggattggtttgtttttgctaaccaacctcgcggtactggttgtggctggcattatcttgtcactgttcggtgtcggtagttaccatggcgcgggtggcttaaatctaggcaaccttttggttatctgtttcgtgtttggtatggttggctcgctgatctcccttttgatgtccaaatggatggctaaaaaaaccaccggtacagaaattattgatccgaatgcaccccgtaaccaggctgaagcttggctattacaaactgttgcagaactttcacaacgtgctggcatccaaatgccagaagttggaattttcccatcctatcaatctaatgcctttgcaacaggctggaacaaaaacgatgccctcgtttcggtttcaacaggattaatggaacgcatgaataaagatgaattgcgtgctgtattggcgcatgaaattggtcacgttgccaatggtgacatggtgacacttgcgctgattcaaggtgtcgtcaacgcgtttgtgatgttctttgcccgtgtagtcggtgattttattgatcgaaacgtgtttggtcgccaagatggtgaagcacctggcatgggttacttcgcgattacgattgtccttgatattgtatttggtattcttgcctcagcgattgtgatgtggttctcccgccatcgtgaatatcgtgccgatgaagctggtgctcgtttagcaggtaaacaagcgatgatttctgccctattacgcttacaggcagagtcagaaatgccagatcaaatgccaaaagaaatgaaagcctttgcaattgcggaaggtaaagaacaaggttttagtcttgctgccttattccaaacccacccaagtatcgagcaacgtgttgctgcgctacagcaattaaattgtccataa

SEQ ID NO: 1281 - protein, 301 aa, Acinetobacter sp. ADP1
MMRIGLFLLTNLAVLVVAGIILSLFGVGSYHGAGGLNLGNLLVICFVFGMVGSLISLLMSKWMAKKTTGTEIIDPNAPRNQAEAWLLQTVAELSQRAGIQMPEVGIFPSYQSNAFATGWNKNDALVSVSTGLMERMNKDELRAVLAHEIGHVANGDMVTLALIQGVVNAFVMFFARVVGDFIDRNVFGRQDGEAPGMGYFAITIVLDIVFGILASAIVMWFSRHREYRADEAGARLAGKQAMISALLRLQAESEMPDQMPKEMKAFAIAEGKEQGFSLAALFQTHPSIEQRVAALQQLNCP

SEQ ID NO: 1282 - DNA, 882 bp, Erwinia carotovora subsp. atroseptica SCRI1043
  CDS (1)..(882): transl_table=11
atgatgcgtattgcgcttttcctgatcaccaacctggcggtgatgttggttttcgggctggtactcagcctgacgggaattcagtccagcagtgtccagggcttaatgataatggctgggctgtttggctttggcggtgcgtttgtttcactgctgatgtctaaatggatggcgttacggtccgttggcggtgaagtcattgaacaaccacgtaacgaaaccgaacgttggctggtagaaaccgttcgttcacagtcacagcaggctgggatcgcgatgccacaggtggcaatctatcatgcacctgacatcaatgcgttcgcaacgggagctcgtcgtgatgcatcgttggtggctgtaagcaccggtttgttgcaaaacatgagccgtgatgaggctgaagcggttatcgcgcatgaaatcagtcacatcgcaaatggcgatatggtgacgatgacgctggttcaggggatagttaacaccttcgttatctttatttctcgtctgatcgctcaggttgtttccgggtttctgtccggtaaccgcgatgaaggtgaaagcagcaacggcaacccgatggtttactttgctgtcgcaactgtgctggaactggtgtttggtattcttgccagcatcatcaccatgtggttctcacgctaccgtgaattccatgcggatgccggttccgccaagctggtggggcgtgaaaaaatgatcgctgcactgcaacgcttgaagaccagctatgagccgcaggaagagggcagcatgatggctttctgtattaacggcaaatcgaaatccttcagtgaattgtttatgtcgcacccgccgttggataagcgaatcgaagcgctgcgctccggtgagtatctgaagtaa

SEQ ID NO: 1283 - protein, 293 aa, Erwinia carotovora subsp. atroseptica SCRI1043
MMRIALFLITNLAVMLVFGLVLSLTGIQSSSVQGLMIMAGLFGFGGAFVSLLMSKWMALRSVGGEVIEQPRNETERWLVETVRSQSQQAGIAMPQVAIYHAPDINAFATGARRDASLVAVSTGLLQNMSRDEAEAVIAHEISHIANGDMVTMTLVQGIVNTFVIFISRLIAQVVSGFLSGNRDEGESSNGNPMVYFAVATVLELVFGILASIITMWFSRYREFHADAGSAKLVGREKMIAALQRLKTSYEPQEEGSMMAFCINGKSKSFSELFMSHPPLDKRIEALRSGEYLK

SEQ ID NO: 1284 - DNA, 864 bp, Desulfotalea psychrophila LSv54
  CDS (1)..(864): transl_table=11
atgtttcgtgtaggactttttttggcaacaaacctggcgattttgcttctgcttggcttggtcatgtccctgcttggcctggattcgcgcagcgcctccggccttttgttgatggcaggatgttttggtatgggcggttcccttatctcccttgccctgtcaaaatggatagcaaaaaaggccacgggcgcccatgtaatagagcagccccgcaatggcaccgaagagtggctgctgcacacggtggccagacaggcccaaacggcggggattggtatgccggaggtggccgtatatgaggctgacgacatgaatgcctttgccactgggatgcgtcgagatgccgctttggtagctgtcagcacaggacttatccgtggtatgtctcaagacgaggtcgaggccgtattggctcacgaaatgagtcatatcgccaatggtgatatggtgaccctctctcttattcagggggtgttgaatacctttgttatctttctctcccgcatggcggcgaacgtcatagataacttcctcagctccgatgaggatggtggtggccttggcttttttggctatatggcggtttccatgcttcttgagttcgtctttggtctttttgccagtatgattgtgatgtggttctctcgtaggcgggagttccgggcagactatggggcaacggaacttgcctcaaaacagaagatgattgcagctcttgcccgtctgcagcagcaacatatttcatcaagcctgccggaacaggtggcggcctttggtattcggccccgtcagggtggtctggcggagctttttcgcagccatccctctcttgaagataggatagccgctctggaggctatctag

SEQ ID NO: 1285 - protein, 287 aa, Desulfotalea psychrophila LSv54
MFRVGLFLATNLAILLLLGLVMSLLGLDSRSASGLLLMAGCFGMGGSLISLALSKWIAKKATGAHVIEQPRNGTEEWLLHTVARQAQTAGIGMPEVAVYEADDMNAFATGMRRDAALVAVSTGLIRGMSQDEVEAVLAHEMSHIANGDMVTLSLIQGVLNTFVIFLSRMAANVIDNFLSSDEDGGGLGFFGYMAVSMLLEFVFGLFASMIVMWFSRRREFRADYGATELASKQKMIAALARLQQQHISSSLPEQVAAFGIRPRQGGLAELFRSHPSLEDRIAALEAI

SEQ ID NO: 1286 - DNA, 894 bp, Bacillus licheniformis ATCC 14580
  CDS (1)..(894): transl_table=11
atgggaaaaagaatctttctctttcttttatcgaacatcttagtcattacgacgatcggtatcgtgctttcgattatcggttcgctgacaggggtaggcacgtatttcacggctaacggcggcatcgatattgttgcgcttctcgtatttagtgcagttgtcggttttgtcggctcctttatgtcgctcttgatgtcaagatggatggcgaaaatggcgatgggcgttcaggtgctgaatcctgataagcaaacgctcagctatgaagaacagcagctcgttgaccgggtatataagctgtcccgcgctgccggactgacaaagatgcctgaagtcggcatctacaattcacgcgaagtgaatgcctttgcgaccgggccgtctaaaaaccgctcgcttgtcgctgtatcgacgggccttcttcaggaaatggatgacgacgcagtggaaggcgtacttgcccacgaagtggcgcatattgcaaacggcgatatggtgacgatgacgctccttcaaggaatcgtcaatacgttcgttgttttcttcgcaaggattgcggcatgggctgtttcacgcgttgtccgtgaagagctggcgccgatcgttcactttatcgcggtcatcgtattccaaattgtgttctctattctcggaagccttgtcgtgtttgcgtactcccgccaccgcgaatatcatgcggatagaggaggagcagaccttgcaggcaaggataagatgattcacgcgctccgctcgcttgagcagtacacttcaagagtcaaagaagaacaggcatctgttgcaactttaaaaatcaacgggaaaaagcatacatcgcttttctcaacacaccctgatttaagcgacagaatccgccgtctggaagcaaaataa

SEQ ID NO: 1287 - protein, 297 aa, Bacillus licheniformis ATCC 14580
MGKRIFLFLLSNILVITTIGIVLSIIGSLTGVGTYFTANGGIDIVALLVFSAVVGFVGSFMSLLMSRWMAKMAMGVQVLNPDKQTLSYEEQQLVDRVYKLSRAAGLTKMPEVGIYNSREVNAFATGPSKNRSLVAVSTGLLQEMDDDAVEGVLAHEVAHIANGDMVTMTLLQGIVNTFVVFFARIAAWAVSRVVREELAPIVHFIAVIVFQIVFSILGSLVVFAYSRHREYHADRGGADLAGKDKMIHALRSLEQYTSRVKEEQASVATLKINGKKHTSLFSTHPDLSDRIRRLEAK

SEQ ID NO: 1288 - DNA, 855 bp, Mannheimia succiniciproducens MBEL55E
  CDS (1)..(855): transl_table=11
atgatgagaattcttttatttttagctactaacgccgccgtgttaattgtatttaacattatcctgagtttaacgggaattcgcggtcaggatgccatggggctgttaattatggcggcattatttggtttcaccggttctattatttccttgctgatgtctaaacgttccgctttggcggcaaccggtgcggaagtaatcgaacagccccgtaacgatacggagcgctggttactgcagactgtacattcccaagcggaaaaagccggtttaccgaaacctgacgtagcaatttatcattctaatgatgtgaatgcttttgccaccggtgccagtaaaaacaattcgcttgttgccgtcagtactgcgctgttaaataatatgacccgcgatgaagcggagggcgtattggctcatgaaatcagtcatatcaaaaatggtgacatggtcacaatgactttactgcaaggcgtgctaaatacctttgttatttttgccgcacgcatgattgcgcgaatggtcgctaataatcgcagcagcgaagaaagcaattccggtatttattttctcgtggctatggtacttgaagtggttttcggtttcctggcaagtatgattgccatgtggttttcacgtttccgggagttccgtgccgatgcgggttccgcagagttagcgggtaaacaaaaaatgattgccgccttaaaacgtttgcaggctattcatgagccacaggaaatggacggtaaattagcggcatttgccattaacggcaaacgcggtggtttcacgtcattatttttgagccatccgccgctggaaaaacgtattgaagcgctggaaacaagcaaataa

SEQ ID NO: 1289 - protein, 284 aa, Mannheimia succiniciproducens MBEL55E
MMRILLFLATNAAVLIVFNIILSLTGIRGQDAMGLLIMAALFGFTGSIISLLMSKRSALAATGAEVIEQPRNDTERWLLQTVHSQAEKAGLPKPDVAIYHSNDVNAFATGASKNNSLVAVSTALLNNMTRDEAEGVLAHEISHIKNGDMVTMTLLQGVLNTFVIFAARMIARMVANNRSSEESNSGIYFLVAMVLEVVFGFLASMIAMWFSRFREFRADAGSAELAGKQKMIAALKRLQAIHEPQEMDGKLAAFAINGKRGGFTSLFLSHPPLEKRIEALETSK

SEQ ID NO: 1290 - DNA, 843 bp, Legionella pneumophila subsp. pneumophila str. Philadelphia 1
  CDS (1)..(843): transl_table=11
atgataaataacctgaaaacttttatcttgttagcctctctaacagcattgttagttgttattgggggattgcttggaggctctacaggaatgctgattgcattagtatttgcaggagttatgaatttttcagcttactggtactctgatgttcttgttttgaaaatgtataatgctgaacctctgcccaataatcactttgttaacaatattatttcagaacttgcgcatagggcaggaacccctgtacccaaagtttatttaattaataactctactccaaacgcgtttgcaacagggagaaatccagagaatgccagtatcgctgtgacaacaggattgttagataggctcactcaagaggaaatcaccggagttttagctcatgaactggcccatgtaatccaccgcgacactttaattaatgtggtaagcgcaacgatagcaggggcgattagcgggattgccaatatgttcatgtggctttcaatgtttggccacaattcaaataatgaagaaggtgtccatccagtggttggcatgatcatgatgatagtagctcccctggcggctggactgattcaaatggctatatcgcgctccagggagtttgaagcggatgccggtggagcacgaatttccgggaatccgcagtggctggccagtgccttgttaaaacttgatcaagccaaccatgagcaatactttgatgaagcagaaactcacccctccactgcgcacctgtttatcattaaccccttaaacggagaaaagctggctaacttattttcaacccatccatcgacagcagaacgagtagcaagactaagagccatgtactaa

SEQ ID NO: 1291 - protein, 280 aa, Legionella pneumophila subsp. pneumophila str. Philadelphia 1
MINNLKTFILLASLTALLVVIGGLLGGSTGMLIALVFAGVMNFSAYWYSDVLVLKMYNAEPLPNNHFVNNIISELAHRAGTPVPKVYLINNSTPNAFATGRNPENASIAVTTGLLDRLTQEEITGVLAHELAHVIHRDTLINVVSATIAGAISGIANMFMWLSMFGHNSNNEEGVHPVVGMIMMIVAPLAAGLIQMAISRSREFEADAGGARISGNPQWLASALLKLDQANHEQYFDEAETHPSTAHLFIINPLNGEKLANLFSTHPSTAERVARLRAMY

SEQ ID NO: 1292 - DNA, 858 bp, Burkholderia pseudomallei K96243
  CDS (1)..(858): transl_table=11
atgttcaattgggtcaaaacggcgatgctgatggccgcgatcacggccctgttcatcgtgatcggcggcatgatcggcggatcgcgcgggatgacgatcgcgttgctgatcgcgctcgggatgaatttcttctcatactggttctccgacaagatggtgctgcgcatgtacaacgcgcaggaagtcgacgaggccacggcgccgcagttctatcggatggtgcgcgaactcgcgacgcgcgcgaacttgccgatgccgcgcgtttatctgatcgatgagaaccagccgaacgcgtttgcgaccggccgcaatcccgagcacgcggccgtcgccgcgacgacgggcatcctgcgtgtgctgtccgagcgcgagatgcggggcgtgatggcgcacgagcttgcgcacgtgaagcatcgcgacatcctgatctcgacgatttcggcgacgatggcgggcgcgatctcggcgctcgcgaatttcgcgatgttcttcggcgggcgcgacgagaatggccggccggcaaatccgatcgcgggcatcgcggtcgcgctgctggcgccgatcgcgggcgcgctgattcagatggcgatttcgcgtgcgcgcgaattcgaggcggaccgcggcggcgcgcagatctcgggcgatccgcaggcgcttgcctcagcgctcgacaagatccaccgctatgcgtcgggcattccgtttcagacagccgaggagcatccggccaccgcgcagatgatgatcatgaatccgctgtcgggcggtgggctgcagaatctgttctcgacgcaccccgccaccgaggagcggatcgcgcggctgatggacatggcgcgcaccggccgcttcgactga

SEQ ID NO: 1293 - protein, 285 aa, Burkholderia pseudomallei K96243
MFNWVKTAMLMAAITALFIVIGGMIGGSRGMTIALLIALGMNFFSYWFSDKMVLRMYNAQEVDEATAPQFYRMVRELATRANLPMPRVYLIDENQPNAFATGRNPEHAAVAATTGILRVLSEREMRGVMAHELAHVKHRDILISTISATMAGAISALANFAMFFGGRDENGRPANPIAGIAVALLAPIAGALIQMAISRAREFEADRGGAQISGDPQALASALDKIHRYASGIPFQTAEEHPATAQMMIMNPLSGGGLQNLFSTHPATEERIARLMDMARTGRFD

SEQ ID NO: 1294 - DNA, 885 bp, Methylococcus capsulatus str. Bath
  CDS (1)..(885): transl_table=11
atgcgcatccttttgttcctgctgaccaacgccgccgtactggtgctgatcagcatcgttttcaacgtgctcggcctgggccagttgctggcacagcagggcgtcaacctggatctcgacagcctgctggtgttctccgccgtcatgggcatgagcgggtccttcatctcgctgctgatgtccaaatggatggcgaaacagtccatgggcgtcttcgtcatcgaacggccgtccaacagtaccgagagctggctgatcgacaccgtcgcccgccaggcccggcagctcgggctcggcatgccggaagtcggcatcttcgactcccccgaaccgaacgccttcgccaccggagccagcaagaacagctcgctggtcgcggtcagcaccggcctgttgcagaacatgaacccggacgaagtcgaagccgtgctcggccatgagatgagccacgtcgccaatggcgacatggtgaccatgggcctgctccagggtgtggtcaacactttcgtatatttcttcgccacggtggccggccatctcgtcgaccgtgtgctgttccgctcggaggacgaccgcggcggctacggcccggcttattacatcacccagatgatcgcgcagatcatactgtcgatcctcgccaccatgatcgtgatgtggttctcgcgctggcgcgagttccgcgcggatgccggtggcgcccgcctggccggtcgaggcaagatgatcgatgctctgcgagcactccaacgggcacgggagccgcacgaccttcccggtcagctcgctgccttcggcatcagcggtggcggcggcctgagccggctgttcatgagccatccgccgctggaagagcgcatcgccgcgctgcagaacctgcgctga

SEQ ID NO: 1295 - protein, 294 aa, Methylococcus capsulatus str. Bath
MRILLFLLTNAAVLVLISIVFNVLGLGQLLAQQGVNLDLDSLLVFSAVMGMSGSFISLLMSKWMAKQSMGVFVIERPSNSTESWLIDTVARQARQLGLGMPEVGIFDSPEPNAFATGASKNSSLVAVSTGLLQNMNPDEVEAVLGHEMSHVANGDMVTMGLLQGVVNTFVYFFATVAGHLVDRVLFRSEDDRGGYGPAYYITQMIAQIILSILATMIVMWFSRWREFRADAGGARLAGRGKMIDALRALQRAREPHDLPGQLAAFGISGGGGLSRLFMSHPPLEERIAALQNLR

SEQ ID NO: 1296 - DNA, 843 bp, Legionella pneumophila str. Paris
  CDS (1)..(843): transl_table=11
atgataaataacctgaaaacgtttatcttgctagcctctctaacagcattgctagttgttattgggggattgcttggcggttctacaggaatgttggttgcgttactattcgcaggaattatgaatttttcagcttactggtattcagatacgcttgttttgaaaatgtataatgctgagcctctttctaataatcactttgtttaccatattgtttcagagcttgctcatagagcaggaacctcagtacccaaagtttatttaattaataactctactccaaacgcgtttgcaacagggagaaatccagagaatgccagtatcgctgttacaacaggattgttagataggctcactcaagaagaaatcaccggagttttagctcatgaattggcccatgtaatccaccgcgacactttaattaatgtggtaagcgcaacaatagcagggacgattagcgggattgccaatatgttcatgtggctttcaatgtttggccacagttcaaataatgaagaaggtgtccacccagtggttggcatgatcatgatgatagtagctcccctggcggctggactaattcaaatggctatatcgcgctccagggagtttgaagcggatgccggtggagcacgaatttccgggaatccgcagtggctggccagtgccttgttaaagcttgatcaagccaaccatgagcaatactttgatgaagcagaaactcaccctgccactgcgcacctgtttatcattaatccattaaatggagaaaagctggcgaacctcttttcaactcatccctcaacagcagagcgggtagcaaggctaagagccatgtactaa

SEQ ID NO: 1297 - protein, 280 aa, Legionella pneumophila str. Paris
MINNLKTFILLASLTALLVVIGGLLGGSTGMLVALLFAGIMNFSAYWYSDTLVLKMYNAEPLSNNHFVYHIVSELAHRAGTSVPKVYLINNSTPNAFATGRNPENASIAVTTGLLDRLTQEEITGVLAHELAHVIHRDTLINVVSATIAGTISGIANMFMWLSMFGHSSNNEEGVHPVVGMIMMIVAPLAAGLIQMAISRSREFEADAGGARISGNPQWLASALLKLDQANHEQYFDEAETHPATAHLFIINPLNGEKLANLFSTHPSTAERVARLRAMY

SEQ ID NO: 1298 - DNA, 843 bp, Legionella pneumophila str. Lens
  CDS (1)..(843): transl_table=11
atgataaataacctgaaaacttttatcttgctagcctctctaacagcattgctagttgttattgggggattgcttggcggttctacaggaatgctggttgcgttactattcgcaggaattatgaatttttcagcttactggtattcagatactcttgttttgaaaatgtataatgctgagcctctttctaataatcactttgtttaccatattgtttcagagcttgctcatagagcaggaacctcagtacccaaagtttatttaattaataactctactccgaacgcgtttgcaacagggagaaatccagagaatgccagtatcgctgttacaacaggattgttagataggctcactcaagaagaaatcacaggagttttagctcatgaactggcccatgtaatccaccgcgacactttaattaatgtggtaagcgcaacaatagcaggggcgattagcgggattgccaatatgttcatgtggctttcaatgtttggccacaattcaaataatcaagaaggtgtccacccagtggttggcatgatcatgatgatagtagctcccctggcggctggactgattcaaatggctatatctcgctccagggagtttgaagcggatgccggtggagcacaaatttccgggaatccgcagtggctggccagtgccttgttaaagcttgatcaagccaaccatgagcaatactttgacgaagcagaaactcaccctgccactgcacacctgtttatcattaatccattaaatggagaaaagctggcgaacctgttttcaactcatccctcaacagcagaacgggtagcgaggctaagagccatgtactaa

SEQ ID NO: 1299 - protein, 280 aa, Legionella pneumophila str. Lens
MINNLKTFILLASLTALLVVIGGLLGGSTGMLVALLFAGIMNFSAYWYSDTLVLKMYNAEPLSNNHFVYHIVSELAHRAGTSVPKVYLINNSTPNAFATGRNPENASIAVTTGLLDRLTQEEITGVLAHELAHVIHRDTLINVVSATIAGAISGIANMFMWLSMFGHNSNNQEGVHPVVGMIMMIVAPLAAGLIQMAISRSREFEADAGGAQISGNPQWLASALLKLDQANHEQYFDEAETHPATAHLFIINPLNGEKLANLFSTHPSTAERVARLRAMY

SEQ ID NO: 1300 - DNA, 900 bp, Photobacterium profundum SS9
  CDS (1)..(900): transl_table=11
ttggagataattggaaatatgaagcgaattgctttgttcttggcaaccaaccttgccgtaatgctggtattcagcgttgtcttgaatgtcgtttatgctgtaacaggtatgcagcctggtagcctatctggcttattggtaatggctgcactgttcggctttggtggctcgctattctcactcttcatgtcaaagaagatggctcttcgttctgtcggtggttcagttattgaacatcctcgcaatgaaacagagcactggttgatggaaaccgtttctcgtcaagcgcaacaagcaggcattggtatgccaaccgttgctgtttatgactctgctgatatcaacgcatttgcaacaggcgctaagcgtgatgattcactggttgcggtttcaacgggtttgcttcacagcatgacacgtgatgaagctgaagcggtacttgctcatgaaatcagtcatatctctaatggtgatatggtaacgatgaccttaatgcaaggtgttgtgaatacctttgttatttttgtttctcgtttagtggcgggcgcaatcagcggtgttaacaacagtgatgaggaaggcggaggtggtagctacataacgtacttcatcgtctcttcaattatggaagtactgtttggcttcttagcaagcattctaactatgtggtatagccgacaccgtgaatttaaagcggacgcgggttctgcgaacttagtcggtaaagaaaagatgattgctgcgttagagcgtttgaaaatgagccacgagccacagctagaaggctctatgatggcattcggtatcaatggtaagaagaagtcattgtctgaattgtttatgactcacccaccgctagacaagcgtattgatgctttgcgccgtggtgagcacctttaa

SEQ ID NO: 1301 - protein, 299 aa, Photobacterium profundum SS9
MEIIGNMKRIALFLATNLAVMLVFSVVLNVVYAVTGMQPGSLSGLLVMAALFGFGGSLFSLFMSKKMALRSVGGSVIEHPRNETEHWLMETVSRQAQQAGIGMPTVAVYDSADINAFATGAKRDDSLVAVSTGLLHSMTRDEAEAVLAHEISHISNGDMVTMTLMQGVVNTFVIFVSRLVAGAISGVNNSDEEGGGGSYITYFIVSSIMEVLFGFLASILTMWYSRHREFKADAGSANLVGKEKMIAALERLKMSHEPQLEGSMMAFGINGKKKSLSELFMTHPPLDKRIDALRRGEHL

SEQ ID NO: 1302 - DNA, 825 bp, Haloarcula marismortui ATCC 43049
  CDS (1)..(825): transl_table=11
atgacagatttcggattacaggtgcggatgcttgtcgtcggtgcggttctgttcgcgttctacgttttcgccggaacggcactgtcggtgctgttaggcctgccgcttgtcccggtgctcctcgtcggcatcctcgtcgtgccggcgatccagtacaagctcgggaagtggctggcactccgtggcgcggaggagatgccggacgaccagcggttcggctacgtccaccagatggtccggcggctctgcagagatatgagtatcgaggagccgcgactgatggtgatggacatgggcgtgcccaacgccttcgccgtcggccggaaaggtgcgggtgtcgtcgtcgtgtcgagcgaactgatgcaactgctggacgatgacgaactggagggcgtcatcgcgcacgaactggcacacatcaagaaccgggacgtcatcacaatggtcgtcgggcagtccatcggaatgctcgtcggctacgtcgcttacttcgcagtgctgttcggcggcgagcgaaacatcggttcctggatcatggcgatgatcgcctcctcgctcgcgaacgcgctggtcatggtgttcgtgctggcgatttcgaggtatcgggaatacgtcgccgacgcggacgcgcgccgcgccatcggcaccggcgagccgctggcccgtgcgctcgaaaaaatctctcgcggtgcggaggggcgggaatcagccgtcgacgacagcatgaacgccctctgtattttcaacgccgacaaggggctgttcgagaagctgttttcgacccacccgccgacggagaagcgaatccagcggctccggtcctga

SEQ ID NO: 1303 - protein, 274 aa, Haloarcula marismortui ATCC 43049
MTDFGLQVRMLVVGAVLFAFYVFAGTALSVLLGLPLVPVLLVGILVVPAIQYKLGKWLALRGAEEMPDDQRFGYVHQMVRRLCRDMSIEEPRLMVMDMGVPNAFAVGRKGAGVVVVSSELMQLLDDDELEGVIAHELAHIKNRDVITMVVGQSIGMLVGYVAYFAVLFGGERNIGSWIMAMIASSLANALVMVFVLAISRYREYVADADARRAIGTGEPLARALEKISRGAEGRESAVDDSMNALCIFNADKGLFEKLFSTHPPTEKRIQRLRS

SEQ ID NO: 1304 - DNA, 879 bp, Haloarcula marismortui ATCC 43049
  CDS (1)..(879): transl_table=11
atggagtggcaaacagactgggggctccgtggccggatggccctgacgatgttcctgctgttcgcgctgtacatcgtcttccttggagcgctcacgctgtatttcagcaacctcgcgcttatcgttgtcgtcatgggactgttcctcggtgcgcagtttttcttcagcgacaagctcgccctgtactcgatgggagcccggacggtcgaaccggaggaatatccggaacttcaccggaccgtcgaccgcctggctcagcaggccgacctcccgaagcccaaggtcgccgtcgccgactcgcgggtgcccaacgccttcgccaccggccggtcgaaagacagctcggctgtctgcgtgacgacaggcatcatggacacgctggaccaggacgaactggagggggtcatcgcccacgaactggcccacatcaagaaccgcgacgtgatggtgatgaccatcgcgtcgttcctctcgactatcgccttcctcatcgtccggtggggctggctgttcagcggcggccgcgagcgcggtggccagcaggtgcccgtcatcgtcgccatcctcatctcgctggtcgtctgggtcatctcgttcctcctgatccggacgctcagccgctaccgcgagtatgccgccgaccgcggcggcgcgatgattaccggcaagcccgccgcccttgcgaacgcactgatgaaaatcgacggtcggatggacaaggtccccaaagaggatatgcgcgaccaggctgaaatgaacgcgttcttcatcatcccgattaacgtcgggtggatcggccgtctggccagcactcacccctcgaccgagaagcgcatcgaccgcctgcaggacctcgaacgcgaactcgaaagtcggtaa

SEQ ID NO: 1305 - protein, 292 aa, Haloarcula marismortui ATCC 43049
MEWQTDWGLRGRMALTMFLLFALYIVFLGALTLYFSNLALIVVVMGLFLGAQFFFSDKLALYSMGARTVEPEEYPELHRTVDRLAQQADLPKPKVAVADSRVPNAFATGRSKDSSAVCVTTGIMDTLDQDELEGVIAHELAHIKNRDVMVMTIASFLSTIAFLIVRWGWLFSGGRERGGQQVPVIVAILISLVVWVISFLLIRTLSRYREYAADRGGAMITGKPAALANALMKIDGRMDKVPKEDMRDQAEMNAFFIIPINVGWIGRLASTHPSTEKRIDRLQDLERELESR

SEQ ID NO: 1306 - DNA, 900 bp, Streptococcus thermophilus LMG 18311
  CDS (1)..(900): transl_table=11
atgttatttgatcaaattgctcgaaataagagaaagacttggcttctgctccttgtctttttcctcttgttgggccttgttggttacggtgttggcaacctttggttaggttcaggcttcggtggtctgattcttgctctagttatcggttttatctatgtcgttaccatgattttccaatcaactaatgtcgttatggctatgaacggtgcacgagaggttgatgaacaaaccgctccgaacctttatcatgttgttgaggatatggctatggtggcacaaataccgatgccacgtgtctttattgtcgatgatccttcaatgaatgcttttgcgactggatcaagccctaagaatgcggcagtagctgctacaacaggtcttcttgcggttatgaatcgtgaggagctcgaaggggttatcggacatgaagtgagtcatattcgcaattacgatattcgaatctctaccatagcagttgccttagcatcggctatcaccatgctagctgggatggctcgtaatatgatgttatggggtggaggtcgtcgtagaaacgatgatgaccgtgatggaagtagcggtttggaaattgtttttctcattctttctttgattgcgattatcctggcgcctttggcagctaccttggttcagttggctatttcacgccagcgtgaatttttagctgatgcttctagcgtcgaattgacacgtaacccacaaggtatgattaacgctctgctcaaacttgataacagtgcgccaatgcaacatcacgtggatgatgctagcgcagccctctttatcaatgaccctaaaaaggaatctggtttgcagaagctcttttatactcacccaccaatttcagaacgggtggaacgcttgaaacaaatgtaa

SEQ ID NO: 1307 - protein, 299 aa, Streptococcus thermophilus LMG 18311
MLFDQIARNKRKTWLLLLVFFLLLGLVGYGVGNLWLGSGFGGLILALVIGFIYVVTMIFQSTNVVMAMNGAREVDEQTAPNLYHVVEDMAMVAQIPMPRVFIVDDPSMNAFATGSSPKNAAVAATTGLLAVMNREELEGVIGHEVSHIRNYDIRISTIAVALASAITMLAGMARNMMLWGGGRRRNDDDRDGSSGLEIVFLILSLIAIILAPLAATLVQLAISRQREFLADASSVELTRNPQGMINALLKLDNSAPMQHHVDDASAALFINDPKKESGLQKLFYTHPPISERVERLKQM

SEQ ID NO: 1308 - DNA, 900 bp, Streptococcus thermophilus CNRZ1066
  CDS (1)..(900): transl_table=11
atgttatttgatcaaattgctcgaaataagagaaagacttggcttctgctccttgtctttttcctcttgttgggccttgttggttacggtgttggctatctttggttaggttcaggcttcggtggtatgattcttgctctagttatcggttttatctatgccgttaccatgattttccaatcaactaatgtcgttatggctatgaatggtgcacgagaggttgatgaacaaaccgctccgaacctttatcatgttgttgaggatatggctatggtggcacaaataccgatgccacgtgtctttattgtcgatgatccttctatgaatgcttttgcgactggatcaagccccaagaatgcggcagtagctgctacaacaggtcttcttgcggttatgaatcgtgaggagcttgaaggggttatcggacatgaagtgagtcatattcgtaactatgacatccgtatttcgaccattgcagttgccttggcatctgcaatcaccatgctagctgttatggcccgcaatatgatgttctggggtggaggccgtcgtcgtaatgatgatgatcgtaatggaagtagtggtttggaaattattcttctcattatttctttgattgcgattatcctggcgcctttggcagctaccttggttcagttggctatttcacgccagcgtgaatttttagctgatgcttctagcgtcgaattgacacgtaacccacaaggtatgattaatgctctgctcaaacttgataatagtgcgccaatgcaacatcacgtggatgatgctagcgcagccctctttatcaatgaccctaaaaaagaatctggtttgcagaagctcttttatactcacccaccaatttcagaacgggtggaacgcttgaaacaaatgtaa

SEQ ID NO: 1309 - protein, 299 aa, Streptococcus thermophilus CNRZ1066
MLFDQIARNKRKTWLLLLVFFLLLGLVGYGVGYLWLGSGFGGMILALVIGFIYAVTMIFQSTNVVMAMNGAREVDEQTAPNLYHVVEDMAMVAQIPMPRVFIVDDPSMNAFATGSSPKNAAVAATTGLLAVMNREELEGVIGHEVSHIRNYDIRISTIAVALASAITMLAVMARNMMFWGGGRRRNDDDRNGSSGLEIILLIISLIAIILAPLAATLVQLAISRQREFLADASSVELTRNPQGMINALLKLDNSAPMQHHVDDASAALFINDPKKESGLQKLFYTHPPISERVERLKQM

SEQ ID NO: 1310 - DNA, 864 bp, Idiomarina loihiensis L2TR
  CDS (1)..(864): transl_table=11
atgaagagagttttgctgtttttagcgactaacatggccattctgctggttgttagcgtggtctttaatattgtgatggcggtaaccggcattgatgcacaagggtcagtgggtttactggtgttctgtgcactgtttggttttggtggtgcgtttgtatcgctctggatatcacgctggatggcaattcgttcaaccggagccagagtcatagaaaaaccacagaaccagtctgaagaatggttgttccgtaccgttcagcaacaggcgcaaaaagcaggggttcctatgcctcaggtcgcggtttatcaatcaccggagcctaacgcttttgctaccgggcgcagtaaaaatgcttcattggttgcggtcagtaccggactattacaaagcatgaatgctgacgaagttgaggcggttcttgcacatgaaatgagtcatattgctaatggcgatatggtgacgctgaccttaatccagggcgtgataaatacgtttgtcatgttttttgcgcggatcattgccagcgcgataatgcggggcggtgataaccagcggggtggtgggttcgcctattatggtgtcgtgatgttgctggaaatcgtatttggcgtcttagccagcactattgttatgtggttctctcgtcagcgtgagttcagagcagatgccgggtccgcagatttagttggtaaacaaaaaatgattgctgctttacgtcgcttacagcaaggcaaagagtcggaactcgatggcactatgctggcgtttggtattaaaggaaaacgctcaactatgtcgaaattgtttatgagtcacccgcctttagaagaacgaattcatgctcttgagcaacggcgttag

SEQ ID NO: 1311 - protein, 287 aa, Idiomarina loihiensis L2TR
MKRVLLFLATNMAILLVVSVVFNIVMAVTGIDAQGSVGLLVFCALFGFGGAFVSLWISRWMAIRSTGARVIEKPQNQSEEWLFRTVQQQAQKAGVPMPQVAVYQSPEPNAFATGRSKNASLVAVSTGLLQSMNADEVEAVLAHEMSHIANGDMVTLTLIQGVINTFVMFFARIIASAIMRGGDNQRGGGFAYYGVVMLLEIVFGVLASTIVMWFSRQREFRADAGSADLVGKQKMIAALRRLQQGKESELDGTMLAFGIKGKRSTMSKLFMSHPPLEERIHALEQRR

SEQ ID NO: 1312 - DNA, 876 bp, Bacillus clausii KSM-K16
  CDS (1)..(876): transl_table=11
ttgtttcatatccagattgcccgcaataaacgaaagacggtttttttggtcgccctctttattgtttttgttctcttgattggcgccgctattacgtacgtgcgtgccggcgattacgtgagcggcgctatttttgccgcggtcatcgccggaggctatacgatttttatgatttccacaagcaccaatgttgtcatgcgcatgaaccacgcccgtgagatcacttcatcaacggaacagccgtttttatggcacaccgtcgagggattagccattgcagcgcggatcccaatgccgcgaatttttattattcaagacaaaagcccgaatgcctttgcaacagggatttcgccaaaatcgggcgctgtagccgtcacttccggattgatggagcgcctctcccgcgaagaaattgaaggtgtgcttgctcatgaagtggcccatattcgcaattatgatatacgcttatctaccattgccgtcgctctcgtatcggcaatcgccatattgagcgatctcggcatgcgttttttcgtgttttctggaggacgtaataaagacaacaagcatccgcttattctcatcattgcgattttcctcgtcttgctttcgccgcttgtggccacgatgatgcagcttgccatttcccgcaaccgcgagtatttggctgatgcgagtgcagtagagttgacccgcaaccctgtagcgttagcaagcgcactggaaactattacgaatacgcgtattcctgtggaagaagcatcgtcttcaaccgcatcgctatactttgcggacccgttaaaaaagaaagccgcgtcgttattttcaacccatccgccgccagaagaacggataaaacgattgcggaatatgtga

SEQ ID NO: 1313 - protein, 291 aa, Bacillus clausii KSM-K16
MFHIQIARNKRKTVFLVALFIVFVLLIGAAITYVRAGDYVSGAIFAAVIAGGYTIFMISTSTNVVMRMNHAREITSSTEQPFLWHTVEGLAIAARIPMPRIFIIQDKSPNAFATGISPKSGAVAVTSGLMERLSREEIEGVLAHEVAHIRNYDIRLSTIAVALVSAIAILSDLGMRFFVFSGGRNKDNKHPLILIIAIFLVLLSPLVATMMQLAISRNREYLADASAVELTRNPVALASALETITNTRIPVEEASSSTASLYFADPLKKKAASLFSTHPPPEERIKRLRNM

SEQ ID NO: 1314 - DNA, 909 bp, Bacillus clausii KSM-K16
  CDS (1)..(909): transl_table=11
atggggaaacgtatccttttgtttatcgggacaaatatcttggtcttgacgacaattatggtcgtttggacgttggttacatcgtttacaggcatagacggttcgtttgtaagcagcagtggcgcaattcaatttgttccgatcctaatctttagtctcattgtcgggttctcaggctcgtttatttcgctagcgatgtcgcgctggattgcgaaaaaaatgatgaaagtccaggtgcttgatccagatgggccgctcaatgctgaacagaaagcgattgttgaaaaagtgcaccgtttgtcgagggcggcagggctgacacatatgccggaagtcgggatttaccaatcggcggaagtcaatgcttttgcaacaggcccatctaaaaaacgttctcttgtcgccgtatccactggcttgttagacgtgatggatgacgatgcagtcgaaggggtcatcgcccatgaagtcgcccacgtcgccaatggagatatggtgacgatgacgttgctgcaagggattgtgaacacatttgttgtctttttgtcccgtgttttagcgatcgttgtctcacggtttgtgaagcctgaacttcagtttattgtgcaattcctggccattattatattgcaaatcttgttctctatccttggcagccttgttgtcaacgcatactcacgttatcgtgaatatcacgcagacagaggcggcgctgatttggctgggaaagataaaatggttcatgccttacatgcgctaaaaaattatgtggaccgagcgaaagccaatgacaacacagatgatacagctgtacagacgatgaaaattagtggcggtaactccatgctaaaactattttcaacacaccctgatttaaatgaccgaatcgcccgtctacaagagcggtag

SEQ ID NO: 1315 - protein, 302 aa, Bacillus clausii KSM-K16
MGKRILLFIGTNILVLTTIMVVWTLVTSFTGIDGSFVSSSGAIQFVPILIFSLIVGFSGSFISLAMSRWIAKKMMKVQVLDPDGPLNAEQKAIVEKVHRLSRAAGLTHMPEVGIYQSAEVNAFATGPSKKRSLVAVSTGLLDVMDDDAVEGVIAHEVAHVANGDMVTMTLLQGIVNTFVVFLSRVLAIVVSRFVKPELQFIVQFLAIIILQILFSILGSLVVNAYSRYREYHADRGGADLAGKDKMVHALHALKNYVDRAKANDNTDDTAVQTMKISGGNSMLKLFSTHPDLNDRIARLQER

SEQ ID NO: 1316 - DNA, 1194 bp, Dehalococcoides ethenogenes 195
  CDS (1)..(1194): transl_table=11
atgtgggaacagatacaatccaatagaacccgttccattatgctggttatcggcatggggcttattctggtagccctgggctacgctttaggcatggcctttaccgataacgggctggtgggactggtaattgctcttgtcctgtggggaattatgaatctggtagccctaacccagggtgacagtattcttctgggcatggctaatgccaaggaaataaaaccggctgaccatccgcgcctttacaacgtggtggaggaaatgaagattgcctccgggctggataccatgcccaaggtttatattattgacgaccccgccttaaacgcctttgccaccggacgggacaaaaaccatatttcagttgccattacttccggactgctgcagaagctgaaccgtgatgaactgcagggtgtgatagggcatgaaatggcccatatcaaaaaccgggatgtctcactgatggtgtggtgcagtatccttttggggactatagttattttagcccagtacggctcacggatgtttattttcggcggagggtcacgccgttcttcctcaaacgaagggggcggcggcggggctcaggctatcttgatggtggcggcactgctgcttattatactggcacccttgtttgcccagctgatatattttgccatctcacgcaaacgcgaatatctggcagatgcgtcatctgcccagtatacccgttacccggaggggctggcttccgcccttgaaaagctgggggcttctaccgcacagctgcgctcagccaaccaggctaccgcccccatgtatataattaaccccttcagagccaaaggcaaagccgccgctgacctgacttccacccatccccccataagcgagcggatacggattctgcggtctatgaacggggcttcctaccacaactatgacgaggcctttaaacaggtgaaaggcgggcatgttataccgcctaccgctatcaagcttgaccacgccgagactatacgggaggcttcggacgaagggcctttggctactgaaatcggccgcgcccgcgaaacctcaaacgccctctggaatatgaataaataccagacggtagattgtgactgcggggtcaggctgcgtgtcccacccggcttaaaggggcaggaggtcagttgcccgcactgcggcaaaacccaccagacctga

SEQ ID NO: 1317 - protein, 397 aa, Dehalococcoides ethenogenes 195
MWEQIQSNRTRSIMLVIGMGLILVALGYALGMAFTDNGLVGLVIALVLWGIMNLVALTQGDSILLGMANAKEIKPADHPRLYNVVEEMKIASGLDTMPKVYIIDDPALNAFATGRDKNHISVAITSGLLQKLNRDELQGVIGHEMAHIKNRDVSLMVWCSILLGTIVILAQYGSRMFIFGGGSRRSSSNEGGGGGAQAILMVAALLLIILAPLFAQLIYFAISRKREYLADASSAQYTRYPEGLASALEKLGASTAQLRSANQATAPMYIINPFRAKGKAAADLTSTHPPISERIRILRSMNGASYHNYDEAFKQVKGGHVIPPTAIKLDHAETIREASDEGPLATEIGRARETSNALWNMNKYQTVDCDCGVRLRVPPGLKGQEVSCPHCGKTHQT

SEQ ID NO: 1318 - DNA, 897 bp, Lactobacillus acidophilus NCFM
  CDS (1)..(897): transl_table=11
atgttgtaccaacaaattgcccgtaacaagcgtaaaactgcgctaattatggttctttttgtggtaatcttgaccttagttggtgctggactgggctatctttttagcaatagtccatggacgggaataatcattgcattagctggtagcttaatctatctattaattatgtggcaaaacccagctaacatgattatgagtctcaatcatgctcaggaaattcaagaagctgataaccctgagttgtggcatattgtagaagatatggcaatggtagctcgtgtaccaatgccacgcgtttttattattcctgatcctagcccgaatgcttttgcaacggggcgtgatcctgaacacagcgctgttgccgtaacgcaaggaattcttgaattaatgaatcgagaagagcttgaaggcgttctgggtcatgaattatcacacgtacgtaattacgatattttattatcaacaatcggtgtagttttggtgggtgttatttcctttatttctggaatagcttctcgctatatttggtttttcggtggtaatcgtcgagacgatgaagatcgagacaccaatgcatttgaaataatttttaaagtcatcgctattgtctttgtattaattttaggtcctatttctgcatccctcgcacaaatggccctatcacgtaatcgagaatatttagctgatgcttcttctgttgaattaacccgtaatccacaaggcttaatctccgcattaagaaagattgaaggcagtcagcctatgcgtcaagcagatcgtagtagtgccgggttatatattgagaacccatttcacaatcacggtctatctcacttatttgacacacatccaccgacagaagatagaatcaaacgattagaacacatgtaa

SEQ ID NO: 1319 - protein, 298 aa, Lactobacillus acidophilus NCFM
MLYQQIARNKRKTALIMVLFVVILTLVGAGLGYLFSNSPWTGIIIALAGSLIYLLIMWQNPANMIMSLNHAQEIQEADNPELWHIVEDMAMVARVPMPRVFIIPDPSPNAFATGRDPEHSAVAVTQGILELMNREELEGVLGHELSHVRNYDILLSTIGVVLVGVISFISGIASRYIWFFGGNRRDDEDRDTNAFEIIFKVIAIVFVLILGPISASLAQMALSRNREYLADASSVELTRNPQGLISALRKIEGSQPMRQADRSSAGLYIENPFHNHGLSHLFDTHPPTEDRIKRLEHM

SEQ ID NO: 1320 - DNA, 879 bp, Xanthomonas oryzae pv. oryzae KACC10331
  CDS (1)..(879): transl_table=11
atgttcaaccgcattttcctgttcctgctgaccaacgttgcggtgctgatgctcgccggcgtcgtgatgtcggtgttgggcgtcaatcccgcgcaaatgagtggtctgttggtaatggccgccatcttcggtttcggcggctcgttcatttccttgctgctatccaagttcatggccaagcgcagcactggcgcgcaggtcatcaccgagccgcgcacgcccaccgagcgctggttgctggagaccgtgcgccgtcaggcccaggctgccggcatcggcatgccggaagtggcggtctacgacggcccggagatcaatgcgttcgctaccggcgcgaaccgcaacaacgccctggtggcggtgtctaccggcctgctgcagcacatggaccaggatgaagccgaggcggtgctcggccacgaaatcgcccacgttgctaatggcgacatggttaccatggcgctgttgcagggcgtgctcaataccttcgtgatcgtgctcgcacgcgtggtcggcggcatcatcgacagcgccgtgtcgggcaatcgcgacagtggccgcggctttgcgtactacatcatcgtgttcgtgctggagatggtgttcggcatgttcgcgaccatgattgcgatgtggttctcgcgccgtcgcgaattccgcgccgacgccggcggcgcgcaactggctggccgcagcaagatgatcgctgcgctggagcggttgtcgctcaatcatggccagaacactttgccttcgcaggtgcaggcattcggcatttccggcggggtgggcgacggcctgcgccgcctgttcctgagccatccgccgttgaccgagcgcatcgctgcactgcgtgccgccaacggcactgcgatgtaa

SEQ ID NO: 1321 - protein, 292 aa, Xanthomonas oryzae pv. oryzae KACC10331
MFNRIFLFLLTNVAVLMLAGVVMSVLGVNPAQMSGLLVMAAIFGFGGSFISLLLSKFMAKRSTGAQVITEPRTPTERWLLETVRRQAQAAGIGMPEVAVYDGPEINAFATGANRNNALVAVSTGLLQHMDQDEAEAVLGHEIAHVANGDMVTMALLQGVLNTFVIVLARVVGGIIDSAVSGNRDSGRGFAYYIIVFVLEMVFGMFATMIAMWFSRRREFRADAGGAQLAGRSKMIAALERLSLNHGQNTLPSQVQAFGISGGVGDGLRRLFLSHPPLTERIAALRAANGTAM

SEQ ID NO: 1322 - DNA, 876 bp, Vibrio fischeri ES114
  CDS (1)..(876): transl_table=11
atgaagcgtatagcgctgtttttagcaacaaacttagcggtaatgattgtattcagtattgttctgaatatcgtttacgcggttacggggatccaacaaggtagtttatctggcttattggtaatggcagtattgtttggttttggtggttcattaatttctttaatgatgtcgaaatcaatggcactacgttctgtgggcggcgaagtaattgaacagcctcgcaatgaaacagaacattggttattagaaacggtttctcgtcaagctcaacaggttggtattggtatgccaacggttgctatttacgattcaccagacatgaacgcatttgctactggtgcaaagcgtgatgattcattggtggctgtttctacaggtttattgcacagcatgactcgcgatgaagctgaagcggtattagcgcacgaagttagccacattgcgaatggtgatatgatcacgatgacgttaatgcaaggtgttgtgaatacctttgttattttcttatctcgtatgattgctaatgcggtaagtggctttacatcaagcgatgaagagggcgaaggtgaaggcggaagcttcatgacgtacttcattgtgtctactgtacttgaattagcgtttggcttcttagcaagcttcctaacgatgtggtttagccgtcaccgtgaattccatgcggatgcgggtgctgctcagttagttggtaaacaaaaaatgattgcagctcttgaacgtttacgtatggggcaggagtctcagctagaaggttctatgatggcatttggtatcaacggtaaaaaatcgttaaccgaattgttgatgagccacccacctctagagaaacgtattgacgctcttcgtcaaatgtaa

SEQ ID NO: 1323 - protein, 291 aa, Vibrio fischeri ES114
MKRIALFLATNLAVMIVFSIVLNIVYAVTGIQQGSLSGLLVMAVLFGFGGSLISLMMSKSMALRSVGGEVIEQPRNETEHWLLETVSRQAQQVGIGMPTVAIYDSPDMNAFATGAKRDDSLVAVSTGLLHSMTRDEAEAVLAHEVSHIANGDMITMTLMQGVVNTFVIFLSRMIANAVSGFTSSDEEGEGEGGSFMTYFIVSTVLELAFGFLASFLTMWFSRHREFHADAGAAQLVGKQKMIAALERLRMGQESQLEGSMMAFGINGKKSLTELLMSHPPLEKRIDALRQM

SEQ ID NO: 1324 - DNA, 840 bp, Neisseria gonorrhoeae FA 1090
  CDS (1)..(840): transl_table=11
gtgaaacgcatttttctgtttttggctaccaatatcgctgttttggtcgtaatcaacattgttttggcggttctgggcatcaacagccggggcggcgcgggcagcctgttggcgtattccgccgtcgtcggcttcactggttcgattatttcgctgctgatgtccaaatttatcgccaaacaatcggtcggtgcggaagtcatcgacacgccgcgcaccgaagaagaagcctggcttctgaacactgtcgaagcccaagcgcggcaatggaatctgaaaacgccagaagtcgccatctaccactcccccgaacccaatgcctttgccacgggcgcatcgagaaacagctccctgatcgccgtcagcaccggtttgctcgaccatatgacgcgcgacgaagtggaagccgtgttggcgcacgaaatggcgcacgtcggcaacggcgacatggttacgctgacgctgattcaaggcgtggtcaatacctttgtcgtgttcctgtcgcgcattattgccaacctgattgcccgaaacaacgacggcagccagtcccagggaacttatttcctagtcagcatggtattccaaatcctgttcggcttccttgccagcctgattgtcatgtggttcagccgccaacgcgaataccgcgccgacgcgggcgcggcaaaactggtcggcgcaccgaaaatgatttccgccctgcaaaggcttaaaggcaacccggtcgatttgcccgaagaaatgaacgcaatgggcatcgccggagatacgcgcgactccctgctcagcacccacccttcgctggacaaccgaatcgcccgcctcaaatcgctttaa

SEQ ID NO: 1325 - protein, 279 aa, Neisseria gonorrhoeae FA 1090
MKRIFLFLATNIAVLVVINIVLAVLGINSRGGAGSLLAYSAVVGFTGSIISLLMSKFIAKQSVGAEVIDTPRTEEEAWLLNTVEAQARQWNLKTPEVAIYHSPEPNAFATGASRNSSLIAVSTGLLDHMTRDEVEAVLAHEMAHVGNGDMVTLTLIQGVVNTFVVFLSRIIANLIARNNDGSQSQGTYFLVSMVFQILFGFLASLIVMWFSRQREYRADAGAAKLVGAPKMISALQRLKGNPVDLPEEMNAMGIAGDTRDSLLSTHPSLDNRIARLKSL

SEQ ID NO: 1326 - DNA, 978 bp, Brucella abortus biovar 1 str. 9-941
  CDS (1)..(978): transl_table=11
atgaatatgacgaaaactgccatgctgatcgccctcatgacggtgatgttcatgagtattggctatttgctgggcggcggcggcggcatgatgatcgcgcttgtgatcgccgtcgccatgaacctgttcggctactggaattccgacaaaatggtgctgcgcatgtacaatgcgcaggaagtggacgagcgcagcgcacccgaatattaccgtatggtgagcggtcttgccgctaatgcgggcctgcccatgccgaaggtctatatcatccatgaagaccagccgaatgcctttgccacgggccgcaacccggaaaatgctgccgtggcggccacaaccggcctcctcaaccggctttcgccggaagaagtcgcaggcgtgatggcgcacgagctggcccacgtccagaaccgcgacacgctgaccatgaccatcgtggcaacacttgccggtgccatatccatgctcggcaattttgctttcttcctcggcggcaatcgcgaaaacggcaatggcgtcatgggcgtcgtcggcacgcttcttgccatgatcgtcgcacccttcggggcgatgattgtgcagatggcggtgagccgcacccgcgaatatgccgccgacaagcgcggcgcggaaatctgcggcaatccgctgtggctctcctccgcgctaggcaggatcgcgcgtggtgccaaggtcatcccgaatgaagaagccgaacacaacccggcgaccgcgcatatgttcatcatcaacccgctgagcggacgtggcgcggacaatcttttctcgacccacccggataccgacaaccgcattgccgcacttgaacagatggctgctgaaatgggtatccgctcggccgcaatgacggcgcgcgccgccgccccttcacaaaacagtggtccctgggggcaaagaagtgataatgcaggcggcaacagcaatggcggttcccgctatcgggggccgtggtcgtaa

SEQ ID NO: 1327 - protein, 325 aa, Brucella abortus biovar 1 str. 9-941
MNMTKTAMLIALMTVMFMSIGYLLGGGGGMMIALVIAVAMNLFGYWNSDKMVLRMYNAQEVDERSAPEYYRMVSGLAANAGLPMPKVYIIHEDQPNAFATGRNPENAAVAATTGLLNRLSPEEVAGVMAHELAHVQNRDTLTMTIVATLAGAISMLGNFAFFLGGNRENGNGVMGVVGTLLAMIVAPFGAMIVQMAVSRTREYAADKRGAEICGNPLWLSSALGRIARGAKVIPNEEAEHNPATAHMFIINPLSGRGADNLFSTHPDTDNRIAALEQMAAEMGIRSAAMTARAAAPSQNSGPWGQRSDNAGGNSNGGSRYRGPWS

SEQ ID NO: 1328 - DNA, 888 bp, Pseudomonas syringae pv. syringae B728a
  CDS (1)..(888): transl_table=11
atgatgcgcattttgctgtttttggccactaaccttgcggtcgtgctgattgccagcatcaccctgagcctttttggcttcaatgggttcatggcggccaacggggttgatctgaacctcaatcagctgctggtcttctgcgctgtgttcggcttcgcgggctcgctgttctcgctgttcatctccaagtggatggcgaagatgagcaccggtactcagatcatcagccagcctcgcactcgccatgagcaatggttgctgcagaccgttgaacaattgtcccgcgacgcgggcatcaagatgccggaggtcggtattttcccggcgtacgaagccaacgcgttcgctacgggctggaacaagaacgatgcactggttgcggtcagccagggcctgctcgagcgtttttcgccggatgaggtgaaagccgtactggcgcacgagatcggccacgttgccaacggcgacatggtgacgctggcgctggtgcagggtgtggtgaacaccttcgtgatgttcttcgcccgcatcatcggcaacttcgtcgacaaggtgatcttcaagactgaaaacggtcagggcatcgcttactacatcacgacgatcttcgccgagctggtactgggctttctggccagcgccatcgtcatgtggttctcgcgcaaacgcgaattccgcgctgacgatgccggtgcacgactggcgggtacgggtgcaatgatcggcgcgctgcaacgcctgcgttccgaacagggcgtcccggtgaacatgcccgacagcctgaccgccttcggtatcaacgccggtctcaagaaaggcctcgccggcctgttcatgagccacccgccgctggagcaacgcatcgaggccctgcgccgccgcggttga

SEQ ID NO: 1329 - protein, 295 aa, Pseudomonas syringae pv. syringae B728a
MMRILLFLATNLAVVLIASITLSLFGFNGFMAANGVDLNLNQLLVFCAVFGFAGSLFSLFISKWMAKMSTGTQIISQPRTRHEQWLLQTVEQLSRDAGIKMPEVGIFPAYEANAFATGWNKNDALVAVSQGLLERFSPDEVKAVLAHEIGHVANGDMVTLALVQGVVNTFVMFFARIIGNFVDKVIFKTENGQGIAYYITTIFAELVLGFLASAIVMWFSRKREFRADDAGARLAGTGAMIGALQRLRSEQGVPVNMPDSLTAFGINAGLKKGLAGLFMSHPPLEQRIEALRRRG

SEQ ID NO: 1330 - DNA, 852 bp, Haemophilus influenzae 86-028NP
  CDS (1)..(852): transl_table=11
atgatgcgaattcttcttttcttggcaaccaatatggctgtaatgctggtattggggattattttaaatgtgactggtattgcaggaaatagcactggcggcattttaattatggctttgctatttggttttgctggttcattaatttccttattcctgtctaaaacgatggcattacgttctgtagatggagaagtgattactcaacctcgtaatcaaactgaacgttggttaattgatactgttagtcgccaagcacagaaagcgggaattccgatgccagacgtggcgatttatcattcacccgatgtgaatgcttttgctacaggtgcaacgaaaagcaattctttagtggcagtgagtacgggattattaaacaacatgacggaggctgaagctgaagctgttttagcgcacgaaatttctcatatttccaatggcgatatggtgacgatggcgttattgcaaggcgtattgaatactttcgtgattttcttatctcgcgttatcgcaacggcggtagcaagttcgcgtaacaataatggagaggaaacgcgcagttcaggtatttatttcttggtttctatggtattggaaatgctctttggtgtgcttgcgagtattatcgcaatgtggttctctcgttaccgagaatttcgtgcagatgctggttccgcaagtttagtaggcaaagaaaaaatgattatggcactgcaacgtttgcaacaacttcacgaaccacaaaatctcgaaggttctttaaatgcctttatgattaatggtaaacgcagtgaactctttatgagccatccaccactcgaaaagcgtattgaagccttacgtaatctttaa

SEQ ID NO: 1331 - protein, 283 aa, Haemophilus influenzae 86-028NP
MMRILLFLATNMAVMLVLGIILNVTGIAGNSTGGILIMALLFGFAGSLISLFLSKTMALRSVDGEVITQPRNQTERWLIDTVSRQAQKAGIPMPDVAIYHSPDVNAFATGATKSNSLVAVSTGLLNNMTEAEAEAVLAHEISHISNGDMVTMALLQGVLNTFVIFLSRVIATAVASSRNNNGEETRSSGIYFLVSMVLEMLFGVLASIIAMWFSRYREFRADAGSASLVGKEKMIMALQRLQQLHEPQNLEGSLNAFMINGKRSELFMSHPPLEKRIEALRNL

SEQ ID NO: 1332 - DNA, 888 bp, Pseudomonas fluorescens Pf-5
  CDS (1)..(888): transl_table=11
atgatgcgaatcctgctgtttttggccactaaccttgcggtcgtgctgattgccagcatcaccctgagccttttcggcttcaacgggttcatggcggccaatggggttgatctgaacctcaatcagctgctgattttctgtgcggtcttcggttttgccggttcgctgttctcgctgttcatctccaagtggatggcgaagatgagcaccagcacgcagatcatcacccaacctcgcacccgccatgagcaatggttgctgcataccgtcgagcaactgtcccgcgaagcgggcatcaagatgcccgaagtgggtattttcccagcctatgaggccaacgcctttgccaccggctggaacaagaatgatgcgctggtagccgtcagccagggccttctggaacgtttttcgcccgatgaagtgaaagccgtgctggcccacgagatcggccacgtcgccaacggtgacatggtgaccctggccctgatccagggtgtggtgaacactttcgtgatgttcttcgcacggatcatcggcaacttcgtcgacaaggtgatcttcaagaacgaagaaggccagggcatcgcctactacgtggcgaccatcttcgccgaactggttctgggtatcctggccagcgccatcgtcatgtggttctcgcgcaaacgcgaataccgcgccgacgaagccggcgcccgcctggccggcaccaacgcgatgatcggcgcgctgcagcgcctgcgttcggaacagggcctgccggtgcacatgcccgacaccctgaatgccttcggcatcaacggtggcatcaagcagggcctggctcgcatgttcatgagccaccctccgctggaagagcgtatcgaggccctgcgtcgtcgcggctga

SEQ ID NO: 1333 - protein, 295 aa, Pseudomonas fluorescens Pf-5
MMRILLFLATNLAVVLIASITLSLFGFNGFMAANGVDLNLNQLLIFCAVFGFAGSLFSLFISKWMAKMSTSTQIITQPRTRHEQWLLHTVEQLSREAGIKMPEVGIFPAYEANAFATGWNKNDALVAVSQGLLERFSPDEVKAVLAHEIGHVANGDMVTLALIQGVVNTFVMFFARIIGNFVDKVIFKNEEGQGIAYYVATIFAELVLGILASAIVMWFSRKREYRADEAGARLAGTNAMIGALQRLRSEQGLPVHMPDTLNAFGINGGIKQGLARMFMSHPPLEERIEALRRRG

SEQ ID NO: 1334 - DNA, 888 bp, Pseudomonas syringae pv. phaseolicola 1448A
  CDS (1)..(888): transl_table=11
atgatgcgcattttgctgtttttggccactaaccttgcggtcgtgctgattgccagcatcaccctgagcctttttggcttcaatgggttcatggcggccaacggggttgatctgaacctcaatcagctgctggttttctgcgctgtgttcggtttcgcgggctcgttgttctcgctgttcatctccaagtggatggcgaaaatgagtaccggtactcagatcatcagtcagcctcgcacccgccatgagcaatggttgctgcagaccgttgaacaactgtcccgcgatgcgggtatcaagatgccggaagtcggtattttcccggcgtatgaagccaacgcattcgccacgggctggaacaagaacgacgcactggttgcggtaagccacggcctgctcgagcggttctcgccggatgaggtaaaagctgtactggcgcacgaaatcggccacgttgccaacggcgacatggtcacactggcgctggtgcagggtgtggtgaacacgttcgtgatgttctttgcccgcatcatcggtaacttcgtcgacaaggtgatcttcaagagcgagaacggtcagggtattgcctactacatcacgacgattttcgccgagctggtattgggctttctggccagcgccatcgtcatgtggttctcgcgcaaacgagaattccgcgctgacgacgcaggggctcgactggccggtacggacgcgatgatcggtgcgctacaacgcctgcgttccgaacagggcgtaccggtgaacatgcctgacagcctgacggcgttcggcatcaacgccggcctgaagaaaggcctggcagggctgttcatgagtcacccgccgctggagcaacgtatcgaggcgctgcgccgccgcgggtga

SEQ ID NO: 1335 - protein, 295 aa, Pseudomonas syringae pv. phaseolicola 1448A
MMRILLFLATNLAVVLIASITLSLFGFNGFMAANGVDLNLNQLLVFCAVFGFAGSLFSLFISKWMAKMSTGTQIISQPRTRHEQWLLQTVEQLSRDAGIKMPEVGIFPAYEANAFATGWNKNDALVAVSHGLLERFSPDEVKAVLAHEIGHVANGDMVTLALVQGVVNTFVMFFARIIGNFVDKVIFKSENGQGIAYYITTIFAELVLGFLASAIVMWFSRKREFRADDAGARLAGTDAMIGALQRLRSEQGVPVNMPDSLTAFGINAGLKKGLAGLFMSHPPLEQRIEALRRRG

SEQ ID NO: 1336 - DNA, 936 bp, Candidatus Blochmannia pennsylvanicus str. BPEN
  CDS (1)..(936): transl_table=11
atgatgcgcattatattgtttttaattactaatttatcagtaatgatattatttggtagtatattgagcttactgggatgttggtcctctactacatttgaattaatgaaaatggctggaatatttggtttcggaggagcgtttatttccttattattatctaaatctatagctttatctgcagttaatggattgatcattagtcaagcatctaatgatgtagagcatttattattgaaaataataaatgttcaggctaagaaattaaatattgttgcaccacagttggcaatttacgattctatagatatgaatgcttttgctacgggagcaagaagaaattcggcattaatagccgttagtactggtcttttaaaaaatatgaatacagagtcaattgaggctgttgttgctcatgaaatgaatcatatcgcttctggcgatatgattactatgactcttattcaaggtataattaatacttttgtgatttttgtatcacgtagtcttgccgcgatggtcttttattggacttcttttataaatgaccaaaatgatgagcagtttgatgttcgcagtagtaatcattgtgatataaacaattctatggtgtatattattgtgtcaataattttagaagttgtgttcggcatgtttgctagtatcatcgtgttttggttttctcgttatcgtgaattttatgcggatgctggtgctgctaaattagtaggatgcagaaatgttattgctgccttacaagaattaaaacatagttatacacttaacacatctaatcatattactactttgtatattaatagtgtaaaaaaaagtatattaagtgatttgttcgcatctcatccatctttagataaacggatagaagcgttacaacatggtacttatttaaataagtcgtcttatttttttaaataa

SEQ ID NO: 1337 - protein, 311 aa, Candidatus Blochmannia pennsylvanicus str. BPEN
MMRIILFLITNLSVMILFGSILSLLGCWSSTTFELMKMAGIFGFGGAFISLLLSKSIALSAVNGLIISQASNDVEHLLLKIINVQAKKLNIVAPQLAIYDSIDMNAFATGARRNSALIAVSTGLLKNMNTESIEAVVAHEMNHIASGDMITMTLIQGIINTFVIFVSRSLAAMVFYWTSFINDQNDEQFDVRSSNHCDINNSMVYIIVSIILEVVFGMFASIIVFWFSRYREFYADAGAAKLVGCRNVIAALQELKHSYTLNTSNHITTLYINSVKKSILSDLFASHPSLDKRIEALQHGTYLNKSSYFFK

SEQ ID NO: 1338 - DNA, 897 bp, Streptococcus pyogenes MGAS6180
  CDS (1)..(897): transl_table=11
atgctttatcaacagatttcacaaaataagcaacgaacagttgttttattagttgttttcttcgctctcttagcacttattggagcttcagcaggctatctgctgttagataattatgccatgggcttggttcttgctcttgtcattggggtgatttatgctaccagtatgatttttcaatccaccagtcttgtaatgagtatgaacaatgctagagaagtcacagaaaaagaggctccaggcttcttccatattgtcgaggatatggctatggtggctcagattccgatgccgagagtttttattattgaagatccttctttaaatgcttttgcgacaggatctagccctcaaaatgctgctgttgcagcaacgacaggtttacttgaagtcatgaatcgtgaagaacttgaaggtgttatcggccatgaaattagccacatccgaaattatgatatccgtatttcgactattgctgtagctttggcgagtgctgttaccgttatttctagtatcggtgggcgtatgctatggtatggtggcggttctcgcaggcaaagagatgacggagatgatgatgttttaagaatcattacattacttttgtcgttattatctttgcttttagcgcccctagtagcaagtttgattcagttggctatttctcgtcaaagagaatatctagctgatgctagttctgttgaactaacaagaaatccccaaggtatgattaacgctcttgaaaaattgcagttatctcagccaatgaagcatcctgttgatgatgctagtgcagccttgtatattaatgagcctcgcaaaaaaaggagcttcagttcattattcagcacccatcctcctattgaggagaggattgaaaggctaaaaaacatgtga

SEQ ID NO: 1339 - protein, 298 aa, Streptococcus pyogenes MGAS6180
MLYQQISQNKQRTVVLLVVFFALLALIGASAGYLLLDNYAMGLVLALVIGVIYATSMIFQSTSLVMSMNNAREVTEKEAPGFFHIVEDMAMVAQIPMPRVFIIEDPSLNAFATGSSPQNAAVAATTGLLEVMNREELEGVIGHEISHIRNYDIRISTIAVALASAVTVISSIGGRMLWYGGGSRRQRDDGDDDVLRIITLLLSLLSLLLAPLVASLIQLAISRQREYLADASSVELTRNPQGMINALEKLQLSQPMKHPVDDASAALYINEPRKKRSFSSLFSTHPPIEERIERLKNM

SEQ ID NO: 1340 - DNA, 843 bp, Dechloromonas aromatica RCB
  CDS (1)..(843): transl_table=11
atgttcaactggatgaagactgccattctgatggccgccatcatggcgctgttcggtattgttggcggcatgatcggcggcaagtccggcatgctgatggcgctggtcttcggtggtgcgatgaatctgttctcgtactggttctccgacaccatggtgctgaagatgtacaacgcccagccggtggacgagaccagtgcgccgcagttctatgcgatggtgcgcgaactggctcagcgggccgggctaccgatgcccaaggtgtacatcatcaatgaagcccagcccaatgcctttgccaccggccgcaacccggagcatgcggcggtggcggcaacgaccggcattatccagttgctgtcggcccgcgagctgcgtggggtcatggcgcatgaactggctcacgtgaagcatcgtgacatcctgatctcgaccatctcggcgaccatggccggggccatttcggcactggccaattttgcgatgttcttcggcgggcgggacgaaaacggtcgttcggtaaatccgctggttggcattctggtggcaattctggcgccgctggccgccagcctgatccagatggcgatttcccgggctcgcgaattcgaggctgatcaaggtggggcggaaatcagcggtacgccgaatgcgctcgccgatgcgctgggcaagatccagatgtatgccgaaggccgcattccgatggcgccggccgaggcgcatccggaaacggcgcagatgatgatcctgaacccgctctccgctggcggtattcgtggactgttctcgactcatccgccgaccgaggagcgcattgcccggttgcgggccatgtcctga

SEQ ID NO: 1341 - protein, 280 aa, Dechloromonas aromatica RCB
MFNWMKTAILMAAIMALFGIVGGMIGGKSGMLMALVFGGAMNLFSYWFSDTMVLKMYNAQPVDETSAPQFYAMVRELAQRAGLPMPKVYIINEAQPNAFATGRNPEHAAVAATTGIIQLLSARELRGVMAHELAHVKHRDILISTISATMAGAISALANFAMFFGGRDENGRSVNPLVGILVAILAPLAASLIQMAISRAREFEADQGGAEISGTPNALADALGKIQMYAEGRIPMAPAEAHPETAQMMILNPLSAGGIRGLFSTHPPTEERIARLRAMS

SEQ ID NO: 1342 - DNA, 879 bp, Dechloromonas aromatica RCB
  CDS (1)..(879): transl_table=11
atgaaacgcatcatcctgtttctcgccaccaacctggcggtcatgctggttctcagtgtggccaccagcctgttgggcgttaacaagttcctgacagccaatggcctgaacgtcggcatgttgtttgtctttgccgcagtgatcggtttcggtggcgccttcatttcgctgctggtgtccaagaccatggccaagtggagcactggcgctcgggtcatcgagtcaccgagttcatcgacggagatgtggctggtcgatacggtggccaagctggccaagcgcgccaacctgccgatgccggaagtggctatctacgatggcgagccgaatgccttcgcgaccggcgcgaccaagaacaagtcgctggttgccgtctcgaccggcctgctgcagagcatgacccgcgatgaagccgaagccgtgctggcccatgaggtggcccacatcgccaacggcgacatggtcacgctgacgctgatccagggcgtggtgaacaccttcgtcgtcttcctgtcgcgcatcgtcggctacgtggtcgatggcttcctgcgtcgtggcgacagcgaaaacagtggcccggggattggttacatggtgaccagcatgatttgtgaagtcatcttcggcctgctggccagcatcgttgtggcctggttctcgcgtcagcgtgaattccgtgccgatgcgggggcggctggcttgatgggctcgccggtgccgatgcagaacgccttgcgtcgtctgggcaacctgcataccgaagccttgccgcaaaacatggccgcttcaggtattgccggtggcaaggggggcttcatggcgctgttttccacccacccgccgctggaagaacggattgccgcattgggaggccgttga

SEQ ID NO: 1343 - protein, 292 aa, Dechloromonas aromatica RCB
MKRIILFLATNLAVMLVLSVATSLLGVNKFLTANGLNVGMLFVFAAVIGFGGAFISLLVSKTMAKWSTGARVIESPSSSTEMWLVDTVAKLAKRANLPMPEVAIYDGEPNAFATGATKNKSLVAVSTGLLQSMTRDEAEAVLAHEVAHIANGDMVTLTLIQGVVNTFVVFLSRIVGYVVDGFLRRGDSENSGPGIGYMVTSMICEVIFGLLASIVVAWFSRQREFRADAGAAGLMGSPVPMQNALRRLGNLHTEALPQNMAASGIAGGKGGFMALFSTHPPLEERIAALGGR

SEQ ID NO: 1344 - DNA, 879 bp, Ralstonia eutropha JMP134
  CDS (1)..(879): transl_table=11
atgaaacgcgtcctgcttttcctggcgaccaacctcgccgtcatgcttgtcctcagcatcaccgccagcgtccttggcgtgaaccgcttcctgaccgccaacggtctcaacttcggcatgctgctcgcttttgccgcgctgatgggcttcggcggcgccttcatttcgctgctgatgtccaaaaccattgccaagtggtccaccagtgcgcaggtcatcacgcacccgagcacaagcaccgaactgtggctggtgcagaccgtgcagaagctgtcgcagaaggccgggttgcccatgccggaagtggcgatctacgagggcgagcccaacgcgttcgcgacgggcgcgacgaagaacagctcgctggtcgccgtttcgactggcctgctgcagtcgatgtcgcatgacgaggtggaagccgtgctggcgcacgaagtggcgcacatcgccaatggcgacatggtcacgctcacgctgatccagggcgtcgtcaacacgttcgtgatcttccttgcgcgcgtggtcggctatttcgtcgattcgatgctgcgcaagaacgacgaggagtcgagcgggcccggcattggctacatggtcacggtgatcgtctgcgaaatcgtcttcggcgtgctggccagcatcatcgtggccgccttctcgcgccgtcgcgagttccgtgccgacgccggtgcggcgagcctgatgggctcgtccacgccgatggtgggcgcattgcgccgcctcggcggactggatgccgacgggttgccgcagaacatgcaggccatgggcatagcaggtggaaagtcgtggatggagctgttctcgagccatccgccgatcgagcagcgcattgcggcgctgcagtcggcacgctga

SEQ ID NO: 1345 - protein, 292 aa, Ralstonia eutropha JMP134
MKRVLLFLATNLAVMLVLSITASVLGVNRFLTANGLNFGMLLAFAALMGFGGAFISLLMSKTIAKWSTSAQVITHPSTSTELWLVQTVQKLSQKAGLPMPEVAIYEGEPNAFATGATKNSSLVAVSTGLLQSMSHDEVEAVLAHEVAHIANGDMVTLTLIQGVVNTFVIFLARVVGYFVDSMLRKNDEESSGPGIGYMVTVIVCEIVFGVLASIIVAAFSRRREFRADAGAASLMGSSTPMVGALRRLGGLDADGLPQNMQAMGIAGGKSWMELFSSHPPIEQRIAALQSAR

SEQ ID NO: 1346 - DNA, 921 bp, Ralstonia eutropha JMP134
  CDS (1)..(921): transl_table=11
atgttcagcgcgccccgctgcgacggcggcgcgggatacgactactcggagatcacgtcaatgttcaactgggtcaagaccttcatgttgatggccgccatcacggcgctgttcatcgtcattggcggcatgatcggcggacgcaacggcatgatgttcgcgctgctgatggcgctgggcatgaacttcttctcctactggttctcggacaagatggtcctgcgcatgtacaacgcgcaggaagtcgacgccggcagcgcgccgcagttttacggcatggtgcaggaactggcgcagcgcgcgggcctgccgatgccgcgcgtctatctgatcaacgaggatgcaccgaacgcgttcgcaacgggccgcaatcccgaacacgcggccgtggcggcgacgactggcatcctgcgcgtgctgtcggagcgcgaactgcgcggcgtgatggcgcacgaactcgcgcacgtgcgccaccgcgacatcctgacctcgaccatcgccgcgaccatggccggtgcgatctcggcgctcgcaaacatggcgatgttcttcggcgggcgcgacgaaaacggcaaccgcaccaatccgattgccagcattgccgtggcaatcctggcgccactggccgcttcgttgatccagatggcgatttcgcgtgcgcgtgagttcgaagccgaccgcggcggcgccgagatcagcggcgatccgcaggcactggccagcgcgctcgacaagatccaccgctatgcgcagggcatcccgttccaggccgcagaagagcacccggccacggcgcagatgatgatcatgaatccgctgtcgggcggcggcatcgccaatctgttctcgacccacccggcgaccgaggaacgcatcgcccgtctgatgcagatggcccagaccggtacttatccggcctga

SEQ ID NO: 1347 - protein, 306 aa, Ralstonia eutropha JMP134
MFSAPRCDGGAGYDYSEITSMFNWVKTFMLMAAITALFIVIGGMIGGRNGMMFALLMALGMNFFSYWFSDKMVLRMYNAQEVDAGSAPQFYGMVQELAQRAGLPMPRVYLINEDAPNAFATGRNPEHAAVAATTGILRVLSERELRGVMAHELAHVRHRDILTSTIAATMAGAISALANMAMFFGGRDENGNRTNPIASIAVAILAPLAASLIQMAISRAREFEADRGGAEISGDPQALASALDKIHRYAQGIPFQAAEEHPATAQMMIMNPLSGGGIANLFSTHPATEERIARLMQMAQTGTYPA

SEQ ID NO: 1348 - DNA, 864 bp, Methanosarcina barkeri str. fusaro
  CDS (1)..(864): transl_table=11
atgaagaacatgcttaaaactacaattttgcttgccacccttacaggcctcctggttctgataggagactactttggaggtacgggcggaatgattattgcgttcctgtttgcaataattatgaattttggaagttactggtacagcgacaaaatagtactcaaaatgtacagggcaaaggaagtctcacctgcggaagctccgaacctgcacaggatcgtcgatggactggctatgaaagcaggaatcccaaagcccaaagtgtatatcgtagaatccggaatgccaaatgcctttgcaaccggaagaaacccagagcatgcggctgtggctgctacaactggaattcttgagttactatcttatgaagaaatggaaggcgtgctggcacacgagcttgcacatgtgaagaacagggataccctgataagtgctatagctgcaactcttgcaggtgttatcacaatgcttgcccactgggcacaatgggctgcaattttcggcggcttcggcggcaacagagatgatgacaacggaggaatcataggcctcatcgcgatggcaattctagcgcctctcgctgcaactttgatccagcttgcgatctcaagatcaagagaatatgcagctgatgcagaaggagccagcatatccagaaaaccctgggctcttgccaatgcccttgaaaaactcgaatacgggaactctcactataagccgagagtctcagatgtccaggcaaaagaaagcagcgcccatatgtttattgtcaatccattaaaaggaggagcaattcagtctcttttcagtactcaccctgtaaccgaagaaagggtaaggcgccttagggcaatgaggttctga

SEQ ID NO: 1349 - protein, 287 aa, Methanosarcina barkeri str. fusaro
MKNMLKTTILLATLTGLLVLIGDYFGGTGGMIIAFLFAIIMNFGSYWYSDKIVLKMYRAKEVSPAEAPNLHRIVDGLAMKAGIPKPKVYIVESGMPNAFATGRNPEHAAVAATTGILELLSYEEMEGVLAHELAHVKNRDTLISAIAATLAGVITMLAHWAQWAAIFGGFGGNRDDDNGGIIGLIAMAILAPLAATLIQLAISRSREYAADAEGASISRKPWALANALEKLEYGNSHYKPRVSDVQAKESSAHMFIVNPLKGGAIQSLFSTHPVTEERVRRLRAMRF

SEQ ID NO: 1350 - DNA, 885 bp, Methanosarcina barkeri str. fusaro
  CDS (1)..(885): transl_table=11
atgaaacgaaagtgggaacgggatttgggacttcagggacggatgattttcacgatgtttcttctggcagcagtttatctttttttcctggcgtttctttcgtacaacgggactccaccagtagttatgatgctttttgtaggctctttcatggcgatccagtacttttactcggataaactggtgctgtggtcaactggtgcacatattgtttctgaaagcgaagccccacaactgcatggaataattacgcggctctgcgcaatagctgatctcccgaaacctcaggtggcgattgtcaggactcaggttccaaatgcttttgcaacaggccgaaaccagaacaacgctgttgttgcagttacaacaggaattatggacaaactctctccagccgaacttgaggctgtgcttgctcacgaacttacccatgtcaagaacagagatatggctatcatgacaattgccagtttcatctcaactctggctttttactttgtccgttacagcctctactttggagatatgggaggaggtcggaaaaaagaaggcggaggcattttgcttgtctggttagtttcacttgcagtctgggcagtcagtttcctacttatccgagctctttcccgctacagggaatatgccgcagataggggtgcagccattattaccggacagccgtcaaaccttgcatcggccctaatgaaaataagcggagtcatgtccagggtcccgagcgaagatctcaggtcagtagaaggaatgaatgcctttttcatcatacctgcaatttcaggttcttccataatggatctgttttccactcatccgtctgtggaaaaaagaatagccaagcttgaaaaaatacagcaggatctgggctaa

SEQ ID NO: 1351 - protein, 294 aa, Methanosarcina barkeri str. fusaro
MKRKWERDLGLQGRMIFTMFLLAAVYLFFLAFLSYNGTPPVVMMLFVGSFMAIQYFYSDKLVLWSTGAHIVSESEAPQLHGIITRLCAIADLPKPQVAIVRTQVPNAFATGRNQNNAVVAVTTGIMDKLSPAELEAVLAHELTHVKNRDMAIMTIASFISTLAFYFVRYSLYFGDMGGGRKKEGGGILLVWLVSLAVWAVSFLLIRALSRYREYAADRGAAIITGQPSNLASALMKISGVMSRVPSEDLRSVEGMNAFFIIPAISGSSIMDLFSTHPSVEKRIAKLEKIQQDLG

SEQ ID NO: 1352 - DNA, 1194 bp, Dehalococcoides sp. CBDB1
  CDS (1)..(1194): transl_table=11
atgtgggaacagatacaatccaatagaacccgttccattatgctggttataggtatggggcttattctggtagccttgggctacgctttggggatggcttttaccgataacgggctggcgggactggtgattgcccttgtcctgtggggaataatgaacctgatagccctgacccagggggatagtatcctcttgggtatggctaatgccaaggagataaaaccctctgaccacccgcgcctttacaacgtggtggaggaaatgaagattgcctccggtatggacaccatgcccaaggtttatatcattgatgaccctgccttgaacgcttttgccaccggacgggacaaaaaccatatctcggtggctatcacctccggcctgctgcaaaagctgaacagggatgagcttcagggcgttatagggcacgaaatggcccatataaaaaaccgggatgtatcactaatggtctggtgcagcatccttctgggaactatcgttatcttagcccagtacggctcacggatgtttattttcggcggagggtcacgccgttcttcctccaatgaggggagtggcggcggggctcaggctattttaatggtggcagcacttttgcttattgtgttggcacccttgtttgcccagctgatttactttgccatttcacgcaaacgggagtatctggcagatgcctcttccgcccagtatacccgttaccctgagggactggcttcagcccttgaaaaactgggggcttccactgaacagctgcgttcagccaatcaggctaccgctcccatgtatatcatcaaccctttcagggccaaaggtaaggctgcggctaacctgacatccacccatccccccatcagcgagagggtaaggattctgcggtctatgaacggggcttcctaccacaactatgatgaggcctttaaacaggtaaaaggcgggcatgtcataccccccactgccattaagctggaccatgacgaaaccatcagggaggcttcggatgaagggcctttggctaccgaaataggccgcgcccgagagacctcaaatgccctctggaatatgaataaataccagacggtagattgcgattgcggagtcaggcttcgcgttccgcccggtttgaaagggcaggaaatccaatgcccccactgcggtgaaatccaccagacttga

SEQ ID NO: 1353 - protein, 397 aa, Dehalococcoides sp. CBDB1
MWEQIQSNRTRSIMLVIGMGLILVALGYALGMAFTDNGLAGLVIALVLWGIMNLIALTQGDSILLGMANAKEIKPSDHPRLYNVVEEMKIASGMDTMPKVYIIDDPALNAFATGRDKNHISVAITSGLLQKLNRDELQGVIGHEMAHIKNRDVSLMVWCSILLGTIVILAQYGSRMFIFGGGSRRSSSNEGSGGGAQAILMVAALLLIVLAPLFAQLIYFAISRKREYLADASSAQYTRYPEGLASALEKLGASTEQLRSANQATAPMYIINPFRAKGKAAANLTSTHPPISERVRILRSMNGASYHNYDEAFKQVKGGHVIPPTAIKLDHDETIREASDEGPLATEIGRARETSNALWNMNKYQTVDCDCGVRLRVPPGLKGQEIQCPHCGEIHQT

SEQ ID NO: 1354 - DNA, 876 bp, Thiobacillus denitrificans ATCC 25259
  CDS (1)..(876): transl_table=11
atgaaacgcatcgtgctgttcctcgcaaccaaccttgcgatcgtgctggtgctctcgctcaccatgcgtctgctcggcgtcgagccctacctcacggccaacggcctcaacctcacgtcgctgctgattttcgccgcggtcatgggcttcggcggttcgctgatttcgctcgcgatctcgaagtggatggcgaagaaatcgatgggcgtccaggtcatcgagacaccggcgaactcgaccgagttctggctcgtcgagacggtgaggaaatacgccgacgacgccggcatcggcatgcccgaagtcggcatcttcccgtcgccagaagtcaacgccttcgccaccggcatgaacaagaacaacgcgctcgtcgcggtgtcggcgggtctgctcagcacgatgacgcgcgccgaggccgaggccgtgatcggccacgaagtcgcgcacgtcgccaatggcgacatggtcacgctcgcgctcattcagggcgtcgtcaataccttcgtgatgtttctgtcgcgcatcatcggccataccgtcgatcgcgtcgtgttcaagaacgaggaggggcacgggccggcgtttttcgtcacgatgatcgtggccgaactcgtgctcggcatcctcgcgtcgatcatcgtcatgtggttctcgcgtcagcgtgaattccgcgccgaccgcggcggtgcctcgctcgccggcaagggcgcgatgatcgccgcgctcgagcgcctgaggagtctgcatccgcatcccttgcccgacaagatggcggccttcggtatcgccggcggcggtgctgccggtctgaagcgcctgttcatgacgcacccgccgctggaggagcgcattgcggcactgcgcgccgtacagtaa

SEQ ID NO: 1355 - protein, 291 aa, Thiobacillus denitrificans ATCC 25259
MKRIVLFLATNLAIVLVLSLTMRLLGVEPYLTANGLNLTSLLIFAAVMGFGGSLISLAISKWMAKKSMGVQVIETPANSTEFWLVETVRKYADDAGIGMPEVGIFPSPEVNAFATGMNKNNALVAVSAGLLSTMTRAEAEAVIGHEVAHVANGDMVTLALIQGVVNTFVMFLSRIIGHTVDRVVFKNEEGHGPAFFVTMIVAELVLGILASIIVMWFSRQREFRADRGGASLAGKGAMIAALERLRSLHPHPLPDKMAAFGIAGGGAAGLKRLFMTHPPLEERIAALRAVQ

SEQ ID NO: 1356 - DNA, 873 bp, Natronomonas pharaonis DSM 2160
  CDS (1)..(873): transl_table=11
atgcaatgggagaccgactgggggctcagagcccggatgggcctgacgatgtttttgctctttgccctctatctcgtctttgtcggcgtgttgacgctgtacttcgaggggctgctcgttccagctatactgctcggcggcttctctatcgcccagttcttcttcagcgacaaactggccttgcggtcgatgggcgcacggacagtcgaccaagaggagtatccggagctccacgccaaggtcggccggcttgcccagcaggcggacctgccaaagccgacagtcgccgtcgccgacaaccagacgccgaacgcctttgcgacggggcggtcgccgtcgaactcggcggtctgtgtgaccacggggctgctccagacactcgacgacgaggaacttgagggcgtgttggcccacgaactggcgcacatcaagaaccgcgacgtcgccgtgatgacgatagcctcgttcctgtcgacaattgccttcctcatcgtccggtgggggtggctcttcagcggcggccgaggcggccgcaatcaggcaccgctcattgtcgccatactcgtctcgcttttggtgtgggtgctctcgttcctgctcatccgcgcgctcagccgctatcgggagtactcggccgaccggggcgcggccgccatcaccggcaagccgtcggcgctggcgacggcgttgatgaaaatctccggccggatggacgaggtcccacaggaagacctccgcgagcaggccgagatgaacgccttcttcattattcccatcagcaaggggtttatcgccaagctggcatcgacgcacccgccgaccgaaacacgcatcgaaaagctccgggagctcgaacgggagatggagcgttag

SEQ ID NO: 1357 - protein, 290 aa, Natronomonas pharaonis DSM 2160
MQWETDWGLRARMGLTMFLLFALYLVFVGVLTLYFEGLLVPAILLGGFSIAQFFFSDKLALRSMGARTVDQEEYPELHAKVGRLAQQADLPKPTVAVADNQTPNAFATGRSPSNSAVCVTTGLLQTLDDEELEGVLAHELAHIKNRDVAVMTIASFLSTIAFLIVRWGWLFSGGRGGRNQAPLIVAILVSLLVWVLSFLLIRALSRYREYSADRGAAAITGKPSALATALMKISGRMDEVPQEDLREQAEMNAFFIIPISKGFIAKLASTHPPTETRIEKLRELEREMER

SEQ ID NO: 1358 - DNA, 882 bp, Pseudoalteromonas haloplanktis TAC125
  CDS (1)..(882): transl_table=11
ttgaggacaagtatgaaacgtgtttttttatttttactaacaaacctcgcggttatgttggtattaggtgtagtgctttcaatagtgatgagtgtatttggactaagcaaccgtagcttaggcggtatgctaatgattgccactgtgtttggttttggtggctcgtttatttcgttatttatgtcgaaatggatggctaaaaaatcaaccggcgcacatgttattacccaaccacgtaacgaaaccgaacattggctagtaactacggttgcagcacaagcgcaaaaagccggcattaaaatgccagaagtggccatttacgacagcccagaaatgaacgcatttgccaccggcccaagtaaaaacaactcactagtggcagtaagcacaggtttattacacagcatgagccaagatcaagccgaagccgtacttgcccacgaagtatcgcatattgctaatggcgacatggtaacgcttacacttatacaaggcgtggtaaacacctttgttatatttgccgctaaagtgctagcaggcatagtagataactttataaacagtaacaacgatgaacaagagagcggcaacagctggacctacttcctgttcgatatgttgtttcaagtaatttttggcattttagccagcgttatagtggcttattacagccgccaacgtgagtttgctgccgacagcggcgctgccaaactagtaggcgcagacaaaatgcgttcagcccttgagcgattaaagcaaaatcatccttcgcaactagaaggctcaatgatggcgtttggtattgccagtggtaaaggtatggctgagttgttttcgtcgcacccaccgcttgacgcccgcatagacgcactgcgtaaataa

SEQ ID NO: 1359 - protein, 293 aa, Pseudoalteromonas haloplanktis TAC125
MRTSMKRVFLFLLTNLAVMLVLGVVLSIVMSVFGLSNRSLGGMLMIATVFGFGGSFISLFMSKWMAKKSTGAHVITQPRNETEHWLVTTVAAQAQKAGIKMPEVAIYDSPEMNAFATGPSKNNSLVAVSTGLLHSMSQDQAEAVLAHEVSHIANGDMVTLTLIQGVVNTFVIFAAKVLAGIVDNFINSNNDEQESGNSWTYFLFDMLFQVIFGILASVIVAYYSRQREFAADSGAAKLVGADKMRSALERLKQNHPSQLEGSMMAFGIASGKGMAELFSSHPPLDARIDALRK

SEQ ID NO: 1360 - DNA, 888 bp, Nitrosococcus oceani ATCC 19707
  CDS (1)..(888): transl_table=11
atgataaaacgcgtgatactttttttggcaactaaccttgcggtcctgctggtacttagcatttccatgcgtcttctcggaattgagagcctgcttaatcagcaagggaccgatcttaaccttaacgctctgctcatattcgccgcaatcattggctttagcggctctttaatctccctggcgatctccaagtttaccgccaagcgccttactggtgcccaggttattgaacgcccccgcagcaccaccgaggtttggctgctggaaaccgttcaacgccatgcacgaatggcagggataggcatgccagaagtggcgatttacgcgtccccggaacccaatgcctttgccactggctggaatcgtaatgccgccctggtggctgtaagcagtggtcttttggagcaaatgaatcaaaatgaagtagaggcggtgttaggccatgaaattagtcatgtggctaatggcgacatggtgaccttggccttgattcagggcgtcgtcaacacattcgtaatttttctcgcccggattatcggccacttagtggatcgggtagtctttaaaaccgagcgcggttatggccccgcttttttcattaccaccctcatcgctcaaacggtgcttgccattctcgctagcctcattgtcctgtggtttagccgccaacgtgaatttcgggctgatgcggggggggcccagctggccggcaaggaaaaaatgatcgcggcgttagagcgactaggcaggatggcccaggagggacttccagagcaacttcaggctttcggaatagcggggggggagagatctcaaggatggaagcgtctattcatgtcccatccgcccattgaagagcggatcgccgcgcttcgggctgaacactaa

SEQ ID NO: 1361 - protein, 295 aa, Nitrosococcus oceani ATCC 19707
MIKRVILFLATNLAVLLVLSISMRLLGIESLLNQQGTDLNLNALLIFAAIIGFSGSLISLAISKFTAKRLTGAQVIERPRSTTEVWLLETVQRHARMAGIGMPEVAIYASPEPNAFATGWNRNAALVAVSSGLLEQMNQNEVEAVLGHEISHVANGDMVTLALIQGVVNTFVIFLARIIGHLVDRVVFKTERGYGPAFFITTLIAQTVLAILASLIVLWFSRQREFRADAGGAQLAGKEKMIAALERLGRMAQEGLPEQLQAFGIAGGERSQGWKRLFMSHPPIEERIAALRAEH

SEQ ID NO: 1362 - DNA, 888 bp, Pseudomonas fluorescens PfO-1
  CDS (1)..(888): transl_table=11
atgatgcgcatcctgctgtttttggccactaacctggcggtcgtgctgatagccagcatcaccctgagcctttttggcttcaacgggttcatggcggccaacggggttgatctcaacctcagtcagctgctggttttctgtgcagtctttggttttgccggttccctgttctcgctgttcatctccaagtggatggcgaagatgagcaccggcacccagatcatcacccagccacgcactcgtcacgagcaatggctgctgcaaaccgtcgagcaactgtcccgggaagccggaatcaagatgcccgaagtcgggattttcccggcctacgaagcgaacgccttcgctaccggctggaacaagaacgacgcactggttgcggtcagccagggcttgctcgaacgcttcaaggaagacgaagtgcgggccgtgctggctcacgagatcggtcacgtggccaatggcgacatggttaccctggcactgatccagggcgtggtgaacaccttcgtgatgttcttcgcgcggatcatcggcaacttcgtcgacaaggtgatcttcaagaacgaagaaggccagggcatggcctactacatcgcgaccatcttcgccgaactggtactgggcattctggccagcgcgatcgtgatgtggttctcgcgcaagcgcgagttccgtgccgacgatgccggtgcccgcctggccggtaccggcgcgatgatcaacgcattgcaacgcctgcgcgccgaacagggcctgccggtgcacatgccggacaccctgaacgccttcggcatcaacggtggcatcaaacaagggttcgcccgcatgttcatgagccacccgccgctggaagagcgtatcgacgccctgcgtcgtcgcggttga

SEQ ID NO: 1363 - protein, 295 aa, Pseudomonas fluorescens PfO-1
MMRILLFLATNLAVVLIASITLSLFGFNGFMAANGVDLNLSQLLVFCAVFGFAGSLFSLFISKWMAKMSTGTQIITQPRTRHEQWLLQTVEQLSREAGIKMPEVGIFPAYEANAFATGWNKNDALVAVSQGLLERFKEDEVRAVLAHEIGHVANGDMVTLALIQGVVNTFVMFFARIIGNFVDKVIFKNEEGQGMAYYIATIFAELVLGILASAIVMWFSRKREFRADDAGARLAGTGAMINALQRLRAEQGLPVHMPDTLNAFGINGGIKQGFARMFMSHPPLEERIDALRRRG

SEQ ID NO: 1364 - DNA, 903 bp, Rhodobacter sphaeroides 2.4.1
  CDS (1)..(903): transl_table=11
atgggatacgttcgcacaggcatcctgatggcggtcatgacggcgctgttcctcggcgtcggggcgctcatcggcgggcagagcggcgcgatcatcgcgctcgtgatcgccgcgggcatgaacctcttcaccttctggaattcggaccgggccgtgctctcgatgcatggcgcgcatgaggtggacccgcgcgcggccccggatctctacaacatggtccgggggctggccgaccgggccgggatgccgatgccgaagctctatctgatcgagaccgaccagcccaacgccttcgccaccgggcgcaaccccgagaatgctgcggtggcggtcacgcggggccttctgcgggcgctgaccccggaagaggtggcgggcgtggtggcgcacgagctcgcccatatccggaaccgcgacacgctgctgatgaccgtgaccgcgaccttcgccggcgcgatctcgatgctcgccaacttcgccttcttcttcggcggcagctcgaacgaggagggcgagcggccgatgggcctcgtgggcacgctcgcgctgatgttcctcgcgccgctggcggcgggtctcgtgcagatggcgatctcgcggtcgcgcgaatatgaggcggaccggatcggcgccgagatctgcggccgtccgctctggctcgcctcggcgctgggcaagatcgaggggctcgcgcagcgcatcgacaatgtccgggccgagcgtaaccccgcgacggcgcacatgttcatcgtgaacccgcttcatgcgatgggccacgaccggctgttcgcgacccacccgaacaccgccaaccggatcgcggcgctccgcgccatggccgagggcgcgccgcaggcctcgcgcattccccgcgtggccgcgcgccgcggtccgtggagctga

SEQ ID NO: 1365 - protein, 300 aa, Rhodobacter sphaeroides 2.4.1
MGYVRTGILMAVMTALFLGVGALIGGQSGAIIALVIAAGMNLFTFWNSDRAVLSMHGAHEVDPRAAPDLYNMVRGLADRAGMPMPKLYLIETDQPNAFATGRNPENAAVAVTRGLLRALTPEEVAGVVAHELAHIRNRDTLLMTVTATFAGAISMLANFAFFFGGSSNEEGERPMGLVGTLALMFLAPLAAGLVQMAISRSREYEADRIGAEICGRPLWLASALGKIEGLAQRIDNVRAERNPATAHMFIVNPLHAMGHDRLFATHPNTANRIAALRAMAEGAPQASRIPRVAARRGPWS

SEQ ID NO: 1366 - DNA, 840 bp, Pelobacter carbinolicus DSM 2380
  CDS (1)..(840): transl_table=11
atgaatacactgaggacggtagcccttatgaccgtgctcaccctgttgctggtgtgggcaggcggaatgatgggcggtcgtggcggcgctctgttcgcgttgatcatggctgcggtcatgaatctgggttcgtactggttttccgacaaaatcgtcattgccatgtaccgcggtcgcgaagtcagcagcgggccgcttttcagtgtggtgcaggaactatgtctgcgcaatgccctgcccatgccgaaagtctatatcctgccgcaggcgacgcccaacgcctttgccaccggacgtaacccgaagcatgccgcggtagccgccacagaaggcattctgcaggtactctcccgcgaagagctcatgggggtcatggcgcatgaaatgagtcacgtccggcatcgcgacatccttatcggttctatcgccgcgaccattgccggggctatctcctacctggcgcacatggcgcaatgggcggccctgttcggaggctttggcggacgcgacgatgacgatggcaaccctctgggtctgctgttgctgatcatcttcgcaccgctggcggccatgctcgtacagatggccatatcccgctcacgggaatatgccgccgaccgaggcggcgcagccttatgcggcaacccccactatctggccaacgccctgcgcaagctggagatggccaacagccgtcaaccgatgccgaaagtcaacgaagccacggcgcacatgttcattgtcaaccccctgcgcggcggcggtttgaagtctctgttttcgacccatccgccggtcgatgaacgtatccgtcggcttgaaaacatgaccgtgctgtag

SEQ ID NO: 1367 - protein, 279 aa, Pelobacter carbinolicus DSM 2380
MNTLRTVALMTVLTLLLVWAGGMMGGRGGALFALIMAAVMNLGSYWFSDKIVIAMYRGREVSSGPLFSVVQELCLRNALPMPKVYILPQATPNAFATGRNPKHAAVAATEGILQVLSREELMGVMAHEMSHVRHRDILIGSIAATIAGAISYLAHMAQWAALFGGFGGRDDDDGNPLGLLLLIIFAPLAAMLVQMAISRSREYAADRGGAALCGNPHYLANALRKLEMANSRQPMPKVNEATAHMFIVNPLRGGGLKSLFSTHPPVDERIRRLENMTVL

SEQ ID NO: 1368 - DNA, 846 bp, Carboxydothermus hydrogenoformans Z-2901
  CDS (1)..(846): transl_table=11
atgaccaatacgataaaaacctggcttttaatgggtgtgttaacagttttgctggttttacttggcagagttattggtgggacgaccggagcatttacgtttttcctgatagctctggccatgaactttattagctattacttcagcgataccctggtaataaaaatgaccggttcttatccggtaagtgaggcggaggcgccggagttgtactcaattgtgagaaatctatccttaaaagccggcattcccatgcccaaaatttatattaccccgtcgccccagcccaatgcttttgccaccgggcgtaatcctgaacacgcagcggtagcggtaaccgaaggacttttaaatcttctaaaccggcaggagattgaaggggtgctggcccacgagatagctcatattaaaaaccgggatattctgataggaaccattgcggcggctatggccggagctatttccatgctggcggatgtttttcgctgggggttgttttttggcggtggtcgcgatgatgataataatcccggagggcttatagccgatcttatcctgctgattttagctccgattgcggctttactggtgcagcttgcgatttcccgttcccgggagtatttggccgatgaaacgggggcaaagcttgcggggtcaccggtgggccttgcggaggctttaaagaagctccatgcttacagcttgcggataccgatggaagtgtctccagccgcatcgcatatgtttatcataaaccccttgaacggacgggccttaatggcgcttttctctacccatccacccattgaagaccggattgaaaggctttatgctatgaggtggtag

SEQ ID NO: 1369 - protein, 281 aa, Carboxydothermus hydrogenoformans Z-2901
MTNTIKTWLLMGVLTVLLVLLGRVIGGTTGAFTFFLIALAMNFISYYFSDTLVIKMTGSYPVSEAEAPELYSIVRNLSLKAGIPMPKIYITPSPQPNAFATGRNPEHAAVAVTEGLLNLLNRQEIEGVLAHEIAHIKNRDILIGTIAAAMAGAISMLADVFRWGLFFGGGRDDDNNPGGLIADLILLILAPIAALLVQLAISRSREYLADETGAKLAGSPVGLAEALKKLHAYSLRIPMEVSPAASHMFIINPLNGRALMALFSTHPPIEDRIERLYAMRW

SEQ ID NO: 1370 - DNA, 879 bp, Xanthomonas campestris pv. vesicatoria str. 85-10
  CDS (1)..(879): transl_table=11
atgttcaaccgcattttcctgttcctgctgaccaatcttgcggtgctgatgctcgccggcatcgtcatgtcgttgctgggcgtcaatcccgcgcagatgagtggcctgttggtgatggccgccatcttcggtttcggcggctcgttcatttccttgctgctgtccaagttcatggccaagcgcagcaccggtgcgcaggtcatcaccgagccgcgcacgccgaccgagcgctggttgctggagaccgtgcgccgccacgcccaggctgccggcatcggcatgccggaagtagcggtctacgacggcccggaaatcaacgcgttcgccaccggcgccaaccgcaacgacgccctggtggcggtgtccaccggcctgctgcagaacatggaccaggatgaagccgaggcggtgcttggccacgagatcgcccacgtggccaacggcgatatggtcaccatggcgctgctgcagggcgtcctcaataccttcgtgatcgtgctcgcccgcgtggtcggcggcattatcgacagcgccttgtcgggcaaccgcgagggcggtcgtggctttgcgtactacatcatcgtgtttgcgttggagatggtgttcggcttgttcgcgaccatgattgcgatgtggttctcgcgacgccgcgaattccgcgccgatgccggtggcgcgcagctggccggccgcagcaagatgatcgctgcgctggagcggctgtcgctcaaccatggccagaacaccttgccctcgcaagtgcaggcgttcggcatctccggtggggtgggcgagggcttgcgccggctgttcctgagccatccgccgcttaccgaacgcatcgctgcgctgcgcgccgccagtggtagcgccatgtaa

SEQ ID NO: 1371 - protein, 292 aa, Xanthomonas campestris pv. vesicatoria str. 85-10
MFNRIFLFLLTNLAVLMLAGIVMSLLGVNPAQMSGLLVMAAIFGFGGSFISLLLSKFMAKRSTGAQVITEPRTPTERWLLETVRRHAQAAGIGMPEVAVYDGPEINAFATGANRNDALVAVSTGLLQNMDQDEAEAVLGHEIAHVANGDMVTMALLQGVLNTFVIVLARVVGGIIDSALSGNREGGRGFAYYIIVFALEMVFGLFATMIAMWFSRRREFRADAGGAQLAGRSKMIAALERLSLNHGQNTLPSQVQAFGISGGVGEGLRRLFLSHPPLTERIAALRAASGSAM

SEQ ID NO: 1372 - DNA, 858 bp, Burkholderia sp. 383
  CDS (1)..(858): transl_table=11
atgttcaattgggtcaaaacggcgatgctgatggccgcgatcacggccctgttcatcgtgatcggcgggatgatcggcggctcgcggggcatgacgatcgcgctgctgttcgcgctcggcatgaatttcttctcttactggttctcggacaagatggtgctgcgcatgtacaacgcgcaggaagtcgacgagaacacggcgccgcagttctaccggatggtgcgcgagctggctacgcgcgcgaacttgccgatgccgcgcgtctacctgatcaacgaggatgcgccgaacgcatttgcgaccggccgcaacccggagcacgcggcagtcgccgcgacgacgggcatcctgcgcgtgctgtcggagcgcgagatgcgcggcgtgatggcgcacgagctcgcacacgtgaagcaccgcgacatcctgatctcgacgatcaccgcgacgatggcaggcgcgatctcggcaatcgcgaacttcgcgatgttcttcggcgggcgcgacgagaatggccggccggccaacccgatcgcgggtatcgcggtcgcgctgctcgcgccgatcgccggcgcgctgatccagatggcgatttcgcgggctcgcgagttcgaggccgatcgcggtggcgcgcagatctccggcgatccgcagtcgcttgcgactgcgctcgacaagatccatcgctatgcggcgggcatcccgttccaggcagccgagcagcatccggccaccgcgcagatgatgatcatgaatccgctgcacggcggcggcctgcagaatctgttctcgacgcacccggccaccgaggaacggatcgcgcgcctgatggagatggcgcgtaccggtcgcttcgactaa

SEQ ID NO: 1373 - protein, 285 aa, Burkholderia sp. 383
MFNWVKTAMLMAAITALFIVIGGMIGGSRGMTIALLFALGMNFFSYWFSDKMVLRMYNAQEVDENTAPQFYRMVRELATRANLPMPRVYLINEDAPNAFATGRNPEHAAVAATTGILRVLSEREMRGVMAHELAHVKHRDILISTITATMAGAISAIANFAMFFGGRDENGRPANPIAGIAVALLAPIAGALIQMAISRAREFEADRGGAQISGDPQSLATALDKIHRYAAGIPFQAAEQHPATAQMMIMNPLHGGGLQNLFSTHPATEERIARLMEMARTGRFD

SEQ ID NO: 1374 - DNA, 876 bp, Pelodictyon luteolum DSM 273
  CDS (1)..(876): transl_table=11
atgaaacgcgtatttcttttcctcataaccaaccttgccgttatactggtgctgtccttcagcgcccggcttctcggcgtagaccggtttctgacgtcgaacggccttgacctcggcatgctgctggcgtttgccgccctcatcggcttcggcggctcgttcatatcgctgttgatgtcgaaaaccatggcaaaatggagcaccggggcacgggtcatcctgcgcgcgtcgaacgaggacgagtcatggctgctgaatacggtccggcagctttccaaaaaagctgaccttgcaatgcctgaagtagcaatctacgagggtgctcccaatgcgttcgcgaccggaccgagccgttcgaagtcgcttgttgccgtttcgagcggtcttctccgcagcatggaccgcaaacaggtggaagcggtactggctcatgaggtggcccatatccagaacggcgacatggtcaccctcaccctcatccagggtgtcgtcaacaccttcgtgatttttctggcgcgcgtctttgcttacgccctcgacagctttctccggagggacgaagacgagtccggcagcccgggcatcggctactggatcagcagcattgcctttgaaatcgttttcggtatccttgcaagcatcgttgtcatgtacttctcgcgcaagcgtgaattccgggcggatgccggagccgcagccctgatcggcgaccgccgtccgatgatcgaggccctgcgtgcactcggaagcattgacgccggcaaactgcctaaagagatggcggctagcggcattgccggtggcggcatgatggcgctcttcagcagccacccccctcttgaatcccggatcgcagcacttgaatcagcccgctga

SEQ ID NO: 1375 - protein, 291 aa, Pelodictyon luteolum DSM 273
MKRVFLFLITNLAVILVLSFSARLLGVDRFLTSNGLDLGMLLAFAALIGFGGSFISLLMSKTMAKWSTGARVILRASNEDESWLLNTVRQLSKKADLAMPEVAIYEGAPNAFATGPSRSKSLVAVSSGLLRSMDRKQVEAVLAHEVAHIQNGDMVTLTLIQGVVNTFVIFLARVFAYALDSFLRRDEDESGSPGIGYWISSIAFEIVFGILASIVVMYFSRKREFRADAGAAALIGDRRPMIEALRALGSIDAGKLPKEMAASGIAGGGMMALFSSHPPLESRIAALESAR

SEQ ID NO: 1376 - DNA, 864 bp, Geobacter metallireducens GS-15
  CDS (1)..(864): transl_table=11
atgatgaaccgactcaagaccacactgctcctgacccttctcacccttctcatggtggccatgggaagcgccattggcggcaagtccggcatggtcttcgccttcttcatggcctgcgccatgaacttcttctcctactggttctcggacaagatagtcttgaaaatgtacggggccagggaaatcaccgaggcggagaacccggccttctacggcatggtgcggcgtctggctacgtcaggcggtctgccgatgccgcgggtctacgtgatcccgagcgacagccccaacgcctttgccacggggcgcaacccgaaccatgccgccgtggccgccacggagggaatcctccgcatcctctccttggaggaactggaaggggtcatggcccacgaactttcccacgtaaagaaccgcgacatccttgtctccaccatcgcggcaaccttcgcgggggccatctccatgctcggcaacatgctccagtgggctgccatattcggcggcgggcgcagcgatgacgacgagggggccggcggcatgatcggcgggcttgccatggcgattatcgcccccatagccgcgatgctgatccagatggcggtctcccgctcccgcgagtacctggccgacgagtcgggggcccggatctgcggtaatcccctggccctggccaacgccctcaagaagctgcagatggcatcgcagatggtcccgatgcaacaggcgacccctgcctcggcccaccttttcatcgtgaatccgctcacgggcggtgcgctcctcaacctcttctccacccatccccccatggaggagcggatcgcacgactggagcagatggcttacaacagaaccttctga

SEQ ID NO: 1377 - protein, 287 aa, Geobacter metallireducens GS-15
MMNRLKTTLLLTLLTLLMVAMGSAIGGKSGMVFAFFMACAMNFFSYWFSDKIVLKMYGAREITEAENPAFYGMVRRLATSGGLPMPRVYVIPSDSPNAFATGRNPNHAAVAATEGILRILSLEELEGVMAHELSHVKNRDILVSTIAATFAGAISMLGNMLQWAAIFGGGRSDDDEGAGGMIGGLAMAIIAPIAAMLIQMAVSRSREYLADESGARICGNPLALANALKKLQMASQMVPMQQATPASAHLFIVNPLTGGALLNLFSTHPPMEERIARLEQMAYNRTF

SEQ ID NO: 1378 - DNA, 852 bp, Desulfovibrio desulfuricans G20
  CDS (1)..(852): transl_table=11
atgaccagtcaactgaagaccgtccttctgcttgcgctgctctccggccttatcattgtgatgggcggggtaatgggcggccggactggacttttcttcgcttttgccttcgccctgctgatgaacgtgggcagctactggtattccgacaaaatagtcctgaaaatgtacaacgcccgcgaggtcagtccttccgaggcccccatgctgcacgccatggttgacgaggtggtcatgcgcgccggcattcccaagccccgcgtgtgtatcattcccgaacagacacccaacgcatttgccacaggccgcaaccccgaacacggggtggtggcggtgacagaaggcatcatgcacctgctgacccccgaagagctaaaaggggttatcgcccatgaagttgggcacatagcaaacagagacattctggtgcagagcgttgccggtgtcatggcttcggtcattgtcatgctgggcaacatactgcagttcaccgccattttcggcggcggaaacaatgacgaggaaggcggcggaaatcccattgcagcgctggccatggcgtttctggctcccgttgccgcatcgctcatccagttcgccatttcacgctcgcgcgaattcatggcggatgaagccggagcccggtattccggcaatcccatgtatcttgccagcgccctgcagaaactgggggcctacagcggcagaatacccatgcaaagcggcaatcaggccacagcgcacatgttcattgtcaacccgttcagcggcgtgcgtatggccgaactgttcagcacgcacccgcccatggaagagcgcatccgccgtctgcagcagatggccggcagatag

SEQ ID NO: 1379 - protein, 283 aa, Desulfovibrio desulfuricans G20
MTSQLKTVLLLALLSGLIIVMGGVMGGRTGLFFAFAFALLMNVGSYWYSDKIVLKMYNAREVSPSEAPMLHAMVDEVVMRAGIPKPRVCIIPEQTPNAFATGRNPEHGVVAVTEGIMHLLTPEELKGVIAHEVGHIANRDILVQSVAGVMASVIVMLGNILQFTAIFGGGNNDEEGGGNPIAALAMAFLAPVAASLIQFAISRSREFMADEAGARYSGNPMYLASALQKLGAYSGRIPMQSGNQATAHMFIVNPFSGVRMAELFSTHPPMEERIRRLQQMAGR

SEQ ID NO: 1380 - DNA, 897 bp, Thiomicrospira crunogena XCL-2
  CDS (1)..(897): transl_table=11
atgaaacgaattggtttatttttattaacaaacatcgcggttttggctgtggccatgattacgatgaaccttttgggtgtgggcagctacatgcaagggaccagtcttgatttagggaacttgtttgcctttgccgcaatcattggttttgccgggtcttttgtttctcttgccatgtctaaatggctggcaaaaatgtcagtgggcgccaaagtgattaaggagcctcgtaatgctgacgaacaatggttggtggaaactgtgcgccgtcaagcagaaaaagcgggcatcggcatgccggaagttgcaatttatgaaggggccgagccgaatgcgtttgcaacggggatgacgaaaaattcggcattggtcgcggtgtctaccggtttgttacgtcacatgcgtcagaacgaagttgaagctgttctagggcatgaagtggctcatatcgcaaatggtgatatggtgacgatggcgttgttacaaggtgttgtgaacacattcgttattttctttgcgaagattgttgcctatgtggtggatcgtgttgttttgaaaaacgaaagcgaagggcacagtatcacctttatcgttgttgatattgtggcgcagattttattcggtattttggcgagtatgattaccatgtggttctcgcgtaaacgtgaatttcatgccgataatggcggtgcgtatctggccggtaaagaaaatatgattgcggcattacaacgtttgcaaacgatgcagccgggtgaactgcctgatcaaatggcggcctttgggatttcggcaagaccgtctaatattggtgatcttttccgttcgcatccaccgctggaaaagcgtattgaagcgctacgtgcaacaacgcaagaccaacttaaagttgcttaa

SEQ ID NO: 1381 - protein, 298 aa, Thiomicrospira crunogena XCL-2
MKRIGLFLLTNIAVLAVAMITMNLLGVGSYMQGTSLDLGNLFAFAAIIGFAGSFVSLAMSKWLAKMSVGAKVIKEPRNADEQWLVETVRRQAEKAGIGMPEVAIYEGAEPNAFATGMTKNSALVAVSTGLLRHMRQNEVEAVLGHEVAHIANGDMVTMALLQGVVNTFVIFFAKIVAYVVDRVVLKNESEGHSITFIVVDIVAQILFGILASMITMWFSRKREFHADNGGAYLAGKENMIAALQRLQTMQPGELPDQMAAFGISARPSNIGDLFRSHPPLEKRIEALRATTQDQLKVA

SEQ ID NO: 1382 - DNA, 891 bp, Lactobacillus gasseri
  CDS (1)..(891)
atgctctatcaacaaatagcacgcaataagcgtaaaacagcatttttgcttgttatattcgttattattctagctcttgttggtggtgggttaggatatttgattaacggtgaaccgctatcaggaattgtaattgccctaatcggtagcttaatttatctttttattgttcttcaaaatccgggaaatttagtcatgagcatgaatcatggccgagagattcatgaagaagatgatccagaattgtggcatattgtagaagatatggcacttgcgggacaggttccaatgccaagagtctttattatcaacgatgaaagtcctaatgcctttgcaactgggcgcgatcctaagcacagtttcgtagctgttactactggattaagaaagcgacttaatcgaagtgaattagagggtgttcttggccatgaaatttctcatattcgaaattatgacattttagtatctacaattggagtagctttagctgctgtaatttcatttatctctagttttgcgtcccgtatttggtggtggggcggcaattctgaccgtgatgacgatgactctagctctctagaaacaatttttaaaatagtggccattgttttcacattaattttaggacctcttgctgctgcactagctcagatggctctctcacgtaatcgtgaatatttagctgatgctagttcagttgagcttactagaaaccctcaagggttaatttcagctttagaaaagatttcaaatagcgagccaatgaaagatccagatccgtcaagcgctggtttatacatcgaaaatccgtttcataagcgtggcttgagctcattatttgatactcatccgcctacagcagacagaattaagagattggaaaacatgtaa

SEQ ID NO: 1383 - protein, 296 aa, Lactobacillus gasseri
MLYQQIARNKRKTAFLLVIFVIILALVGGGLGYLINGEPLSGIVIALIGSLIYLFIVLQNPGNLVMSMNHGREIHEEDDPELWHIVEDMALAGQVPMPRVFIINDESPNAFATGRDPKHSFVAVTTGLRKRLNRSELEGVLGHEISHIRNYDILVSTIGVALAAVISFISSFASRIWWWGGNSDRDDDDSSSLETIFKIVAIVFTLILGPLAAALAQMALSRNREYLADASSVELTRNPQGLISALEKISNSEPMKDPDPSSAGLYIENPFHKRGLSSLFDTHPPTADRIKRLENM

SEQ ID NO: 1384 - DNA, 894 bp, Leuconostoc mesenteroides subsp. mesenteroides ATCC 8293
  CDS (1)..(894)
atgttgtaccaacaaatacaatcaaataaacggcgcaccattgtattattatttgtattttttattttggtagccttagtcggagctgcagtaggttacctattgcttaattccttagaaactggcgtagttgcggccatagttattggtgctatttacacaattattatggttagtaattcaactaatgtagtcatggcgatgaaccatggtcacgaaatcaaaaatgctgaccaagctccagaactgtggcacacagtcgaggacatggcgatggttgctcaagtaccgatgccacgggtatttattattgatgacgatagtcctaatgcttttgctaccggaaataatcctgagcattcggcagttgccgccactactgggctactgaagattatgaaccgaagcgagttagagggtgttatcgctcacgaaatgagccatgtgcgcaactacgacatacgaatttcaactattgctttagccttagccgctgctatcacactattaactaatattggtggtaattggtggttttggggcagtggtgataggcgacggaatgatgatcgtaatggtggtggtggtttacaaatactgttgttagtattttcgattttaatgatggttttagcaccgttggctgctgcagcaattcaaatggcgatttcacgtaaccgtgaatatcttgctgatgctggtagtgcggagctaacgagaaacccacaaggattgatttcagcattacgaaaattaggtaacgcacagccgatgaaggatgtggattcttcatcagctgcattgtatattagtaatcctttgaagaacaaggagcgtttgtttgatacgcatccaccaattgaagaacgtattgatcgtttagaaaaaatgtaa

SEQ ID NO: 1385 - protein, 297 aa, Leuconostoc mesenteroides subsp. mesenteroides ATCC 8293
MLYQQIQSNKRRTIVLLFVFFILVALVGAAVGYLLLNSLETGVVAAIVIGAIYTIIMVSNSTNVVMAMNHGHEIKNADQAPELWHTVEDMAMVAQVPMPRVFIIDDDSPNAFATGNNPEHSAVAATTGLLKIMNRSELEGVIAHEMSHVRNYDIRISTIALALAAAITLLTNIGGNWWFWGSGDRRRNDDRNGGGGLQILLLVFSILMMVLAPLAAAAIQMAISRNREYLADAGSAELTRNPQGLISALRKLGNAQPMKDVDSSSAALYISNPLKNKERLFDTHPPIEERIDRLEKM

SEQ ID NO: 1386 - DNA, 870 bp, Nostoc punctiforme PCC 73102
  CDS (1)..(870)
atgggaaatcaagtgaaaacggctgctttactagctgcattaagtggtcttttgatcgcaattagttattgggtaattggcggtagtagtggcttgataattggaattggcttggcagcagtaacaaacctattttcctggtatcaatcagataagattgctctagcagtatatcaggcccagcctgtgagtgaaggagaagcaccaggactttatcgaatggtgcagagattaagcgatcgcgctaacatccctatgccgagagtttatattgtcccaagccaaggtgctaacgcctttgcgacagggcgcgatcccgaacatgctgctgtggctgtcaccgaaggcattttgaatatattgccagacgatgaactcgaaggtgttatcgctcacgaacttacccatattattaatcgtgacaccctgacacaagctgttgctgctaccgttgctggtgcgatctcattcctagcgcaaatggtgagttatagcttatggtttggcggtggttcacgagatgacaacagaggtgcaaatcctttgggcgttttgttaacagtaatgcttgcgccattagctgcaacaattattcagctagcaatttcgcgcacacgagaattctctgctgatgcaggttcagctagattaactggtaatcctcgtgcattagctagggcattacaacgcttagaagccttagcaaaacagatccctttaaatgccaatccagcttttgaaccgttattaattatcaattccatttctggacagtttttaggtaacttattttccagtcaccctgctacagaagcacgagttgcagcattattgaaattagagcaacaactgccaacaaaagcttattga

SEQ ID NO: 1387 - protein, 289 aa, Nostoc punctiforme PCC 73102
MGNQVKTAALLAALSGLLIAISYWVIGGSSGLIIGIGLAAVTNLFSWYQSDKIALAVYQAQPVSEGEAPGLYRMVQRLSDRANIPMPRVYIVPSQGANAFATGRDPEHAAVAVTEGILNILPDDELEGVIAHELTHIINRDTLTQAVAATVAGAISFLAQMVSYSLWFGGGSRDDNRGANPLGVLLTVMLAPLAATIIQLAISRTREFSADAGSARLTGNPRALARALQRLEALAKQIPLNANPAFEPLLIINSISGQFLGNLFSSHPATEARVAALLKLEQQLPTKAY

SEQ ID NO: 1388 - DNA, 867 bp, Haemophilus somnus 129PT
  CDS (1)..(867)
atgatgagaattttgctatttttagcaactaactttgccgttttatttgtttttaacattattttgacgttgaccggtattcaacgccaagatgtggtgggattgttgatttttgctactttatttggttttacgggatctattatttctttactgatgtcaaaatcaatggcattacgttcggtaaatggtcaagttattgaacaacctcgtaatgaaacggaacattggttgcttcaaacggtgcattcacaggcagaaagagcaggattacctatgccgacagttgccatttatcattcagcggatgtaaatgcttttgcaacaggtgcgacaaaaaagaattcacttgttgccgtgagtacaggattactaaatgctatgacaagagatgaggcggaagcggttttagctcacgaagtaagccatattaaaagcggtgatatggtaacgatgactttgttgcaaggcgtattaaatacgttcgtcatttttatttctcgaatgctggcaaaagttgttgctacagatcgtgatggaaataccagtcaaggtatatattttatgatttcaatggttcttgagcttgtgtttggtgtattggcaagtatgattgcaatgtggttttctcgctatcgtgaatttaaagctgatgcaggttcagcggaattagtgggtaaacataaaatgattgcagcgttacaacgtttgaaaacgttgcatgagccacaagaaatggaggggcagctagctgcgtttgccatcaatggaaaacgtgggggacttgcttctttattcttaagtcatcctccattggaaaaacgtattgaagcattacgtaatttagatagtttgaatggcaaataa

SEQ ID NO: 1389 - protein, 288 aa, Haemophilus somnus 129PT
MMRILLFLATNFAVLFVFNIILTLTGIQRQDVVGLLIFATLFGFTGSIISLLMSKSMALRSVNGQVIEQPRNETEHWLLQTVHSQAERAGLPMPTVAIYHSADVNAFATGATKKNSLVAVSTGLLNAMTRDEAEAVLAHEVSHIKSGDMVTMTLLQGVLNTFVIFISRMLAKVVATDRDGNTSQGIYFMISMVLELVFGVLASMIAMWFSRYREFKADAGSAELVGKHKMIAALQRLKTLHEPQEMEGQLAAFAINGKRGGLASLFLSHPPLEKRIEALRNLDSLNGK

SEQ ID NO: 1390 - DNA, 681 bp, Haemophilus somnus 2336
  CDS (1)..(681)
atggtcaagttatttgaacaccctcgtaatgaaacggaacattggttgcttcaaacggtgcattcacagccagaaagagcaggattacctatgccgacagttgccatttatcattcagcggatgtaaatgcctttgcaacaggtgcgacaaaaaagaattcacttgttgccgtgagtacaggattactaaatgctatgacaagagatgaggcggaagcggttttagctcacgaagtaagccatattaaaagcggtgatatggtaacgatgactttgttgcaaggtgtattaaatacgttcgtcatttttatttctcgaatgctggcaaaagttgttgctacagatcgtgatggaaataccagtcaaggtatatattttatgatttcaatggttcttgagcttgtgtttggtgtattggcaagtatgattgcaatgtggttttctcgctatcgtgaatttaaagctgatgcaggttcagcggaattagtgggtaaacataaaatgattgcagcgttacaacgtttgaaaacattgcatgagccacaagaaatggaggggcagctagctgcttttgccatcaatggaaaacgtggaggacttgcttctttattcttaagtcatcctccattggaaaaacgtattgaagcattacgtaatttagatagtttgaatggcaaataa

SEQ ID NO: 1391 - protein, 226 aa, Haemophilus somnus 2336
MVKLFEHPRNETEHWLLQTVHSQPERAGLPMPTVAIYHSADVNAFATGATKKNSLVAVSTGLLNAMTRDEAEAVLAHEVSHIKSGDMVTMTLLQGVLNTFVIFISRMLAKVVATDRDGNTSQGIYFMISMVLELVFGVLASMIAMWFSRYREFKADAGSAELVGKHKMIAALQRLKTLHEPQEMEGQLAAFAINGKRGGLASLFLSHPPLEKRIEALRNLDSLNGK

SEQ ID NO: 1392 - DNA, 960 bp, Pseudomonas aeruginosa UCBPP-PA14
  CDS (1)..(960)
atgattatcaggagcccgttcgcccgccccggcggcctgcgaaccgcgctccgtgccttcagccgtgaggagaagctttacaccatgatgcgcatcctgttgttcctggccaccaacctggcagtcctggtgattgccagcatcaccctgaaactgctcggggtggaccgcttcaccggccagaattacggcagcctgctggtcttctgcgccgtgttcggtttcgccggttcgctggtctcgctgttcatctccaagtggatggcgaagatgagcaccggtaccgaagtcatcagccagccgcgcacccgtcacgaacagtggctgctgcagaccgtcgaagagctgtcccgcgaagccggcatcaagatgccggaggtcggcatcttccccgcctacgaggccaacgccttcgccaccggctggaacaagaacgacgcgctggtcgcggtcagccagggcctgctcgaacgtttctcgcccgatgaggtgaaagccgtcctcgcccacgagatcggccacgtcgccaacggcgacatggtcaccctggcgttgatccagggcgtggtgaacaccttcgtgatgttcttcgcgcgaatcttcggcaacttcgtcgacaaggcgatcctgaagaacgaggacggcccgggcatcggctacttcgtcgcgaccatcttcgccgaactggtgctcggcatcctcgccagcatcatcgtcatgtggttctcgcgccgccgcgagttccgcgccgacgccgccggcgcccacctggctggcaccggcgcgatgatcgccgcgctgcaacgcctgcgttcggaacagggcgtgccggtgcagatgcccgacaccctgaacgccttcggcatcaatggcggcctcaagcacggcctggccggcctgctgatgagccacccgccgctggaagatcgtatcgaagcgctgcgcgccagcgcacgctga

SEQ ID NO: 1393 - protein, 319 aa, Pseudomonas aeruginosa UCBPP-PA14
MIIRSPFARPGGLRTALRAFSREEKLYTMMRILLFLATNLAVLVIASITLKLLGVDRFTGQNYGSLLVFCAVFGFAGSLVSLFISKWMAKMSTGTEVISQPRTRHEQWLLQTVEELSREAGIKMPEVGIFPAYEANAFATGWNKNDALVAVSQGLLERFSPDEVKAVLAHEIGHVANGDMVTLALIQGVVNTFVMFFARIFGNFVDKAILKNEDGPGIGYFVATIFAELVLGILASIIVMWFSRRREFRADAAGAHLAGTGAMIAALQRLRSEQGVPVQMPDTLNAFGINGGLKHGLAGLLMSHPPLEDRIEALRASAR

SEQ ID NO: 1394 - DNA, 915 bp, Listeria monocytogenes str. 1/2a F6854
  CDS (1)..(915): transl_table=11
atgctatttgaacaaattgcagcaaataagcgaaaaacaatttttattattcttggctttttcattttcgttcttatggttggcgctgctataggtataattgtttggaataactatctgaatgggcttgtactcgcggctgttattggtgcattttatattttgattatggtaatgagcagttcgtcagtcgttatggcgatgaatcatgcgaaggaagtcacatcaaaagaacaagcgccagttttgtgggataccgttgaaagtatggcaatggttgctggtattccgatgccaaaagtatatatcgttgaagatccaagtccgaacgcttttgcgacggggatttctcctgaaaaaggagccgtggcggttactagaggattgcttaataaattagaacgttatgaacttgagggcgttattgcgcatgaaatttctcatattcgtaattatgatattcggttatcaacgatcgccattgcgctagtggctgttattgcgattcttagtgatatagcaatgcgaatgattttctggggaagcctaactggtggcagaaataaccgtaaaagtgacaataataacagtggcggggcacaagcgattatctatatcgttgcactcatatttgttattttggcgcctattattgcaacagctattcaatttgcgttatctcgtaatagagagtatttagctgatgctagtgcggtagaattaaccagaaatccagatggacttatccaagctttacaaaaaatcagtggtgattcgaaaaaaatggaagaagtgagtgcttctagtgagtccatttactttgcgtcaccactaaagtcaaaaaaaaataagccaggtctttttgactcacatccgccaattagttcgcggattgaacgcttagaaaatatgtaa

SEQ ID NO: 1395 - protein, 304 aa, Listeria monocytogenes str. 1/2a F6854
MLFEQIAANKRKTIFIILGFFIFVLMVGAAIGIIVWNNYLNGLVLAAVIGAFYILIMVMSSSSVVMAMNHAKEVTSKEQAPVLWDTVESMAMVAGIPMPKVYIVEDPSPNAFATGISPEKGAVAVTRGLLNKLERYELEGVIAHEISHIRNYDIRLSTIAIALVAVIAILSDIAMRMIFWGSLTGGRNNRKSDNNNSGGAQAIIYIVALIFVILAPIIATAIQFALSRNREYLADASAVELTRNPDGLIQALQKISGDSKKMEEVSASSESIYFASPLKSKKNKPGLFDSHPPISSRIERLENM

SEQ ID NO: 1396 - DNA, 882 bp, Rhodospirillum rubrum
  CDS (1)..(882)
atgagcttcttccgcgtcgccgtgatgttggccgccatgaccggcctgttccttgccgtcggctatctgatcggcggccagagcggcatggtcatcgcctttctggtcgccggcggcatgaacctgttcgcctattggaattccgacaagatggtgctgcgcatgcacaatgcgcgcgaggtcgacgaacgcagcgcgcccgacctgtatggcatcgtccgccagttgacccagcgcggcggcctgccgatgcccaaggtctatgtgatcgacaccccccagcccaatgccttcgccaccggccgcaatccgcaaaacgccgccgtggcggcgacgaccgggctgatgcgggcgctcaccccccaggaactggccggagtgatggcccatgaactggcccatgtccgccatcatgacaccctgaccatgaccctgaccgccaccctggccggcgccatctcgatgctggcgaatttcgccttcttctttggcggcaaccgcgacaacaacaatccgctgggcgccgtcggcatgatcgtgatgatgatcctggcgcctttggcggcgatgatggtgcagatggcgatttcacgcaccgctgaataccgcgccgatcgcggcggcgccgagatctgcggtcagccgctgtggctggccagcgcccttgaaaagatcgaacgcgccgcgcgcggcatcgaaaacccctcggccgaacagaatccggccaccgcccatctgttcatcatcaatcccttgaacggccatcggatggacaatctgttcaccacccatcccagcaccgccaaccgcgtggccaagctgcgcgccctggccagtggcgacctcgctcagccccggccccagcgcggcccctggggctga

SEQ ID NO: 1397 - protein, 293 aa, Rhodospirillum rubrum
MSFFRVAVMLAAMTGLFLAVGYLIGGQSGMVIAFLVAGGMNLFAYWNSDKMVLRMHNAREVDERSAPDLYGIVRQLTQRGGLPMPKVYVIDTPQPNAFATGRNPQNAAVAATTGLMRALTPQELAGVMAHELAHVRHHDTLTMTLTATLAGAISMLANFAFFFGGNRDNNNPLGAVGMIVMMILAPLAAMMVQMAISRTAEYRADRGGAEICGQPLWLASALEKIERAARGIENPSAEQNPATAHLFIINPLNGHRMDNLFTTHPSTANRVAKLRALASGDLAQPRPQRGPWG

SEQ ID NO: 1398 - DNA, 858 bp, Burkholderia fungorum LB400
  CDS (1)..(858)
atgttcaattgggtcaaaaccgcgatgttgatggccgcgatcacggcccttttcatcgtgatcggcgggatgatcggcgggtcgcgcggcatgacgatcgcgctcgtgatcgcccttggaatgaatttcttttcgtactggttctcggacaagatggtgctgcgcatgtacaacgcgcaggaggtcgacgaaaccagcgcgccgcagttctatcgcatggtgcgcgagctttccacgcgcgccggcctgcccatgccgcgcgtgtacctgatcaatgaagatgcgccgaacgcgttcgccaccggccgcaatccggagcatgcggcggtcgccgccaccaccggcattctgcgtgtgctgtccgagcgcgaaatgcgcggcgtgatggcgcatgaactcgcgcacgtgaagcatcgcgacattctgatttcaaccgtctcggccacgatggccggcgccatttccgcgctggcgaacttcgcgatgttcttcggcgggcgcgacgaaaacggtcggcccacgaacccgatcgcgagcattgcggtcgcgctgctggcgccgatcgccggtgcgctgattcagatggcgatttcgcgggcacgtgaattcgaagccgaccgcggcggcgcacagatttccggcgacccgcaggcgctcgcttcggcgctcgacaagatccaccgttacgcgagcgggattccgtttcccaccgccgagcagcatccggccaccgcgcaaatgatgatcatgaatccgttggcgggcggcggcatcgcgaatctgttctccacgcacccggctaccgaggaacgcatcgcacgtttgatggaaatggcgcgcacggggcgcttcgaataa

SEQ ID NO: 1399 - protein, 285 aa, Burkholderia fungorum LB400
MFNWVKTAMLMAAITALFIVIGGMIGGSRGMTIALVIALGMNFFSYWFSDKMVLRMYNAQEVDETSAPQFYRMVRELSTRAGLPMPRVYLINEDAPNAFATGRNPEHAAVAATTGILRVLSEREMRGVMAHELAHVKHRDILISTVSATMAGAISALANFAMFFGGRDENGRPTNPIASIAVALLAPIAGALIQMAISRAREFEADRGGAQISGDPQALASALDKIHRYASGIPFPTAEQHPATAQMMIMNPLAGGGIANLFSTHPATEERIARLMEMARTGRFE

SEQ ID NO: 1400 - DNA, 897 bp, Pediococcus pentosaceus ATCC 25745
  CDS (1)..(897)
atgttatatcaacagattgcaagtaataagcgaaagaccgtttatgtgatgatcggttttgctatcttagtattgtttattggtgctgcagttggttatgttttctatgatagtgcaatggcagggattattatggcggcagtaattgccgctatttatatggccatgatgattgccaattctactaatgtcgtgatgggaatgaatcacgcaactgaaattagtgaagccgatcatccggaaatttggcatattgtagaagacatggccttggtagctaatataccaatgcccaaggtttatattgttaacgatgccagccctaatgcatttgcaacaggaaatagccctaaaaatgctgccgtagcagtgactactggtattttagaacggcttaatcgagaagaacttgaaggcgtaattggacacgaagtttcacacattcgaaattatgatattcgcctttcgaccatcgccttggcattatcttcggcgatcgcaatgctagtaaatattggaatgcgctcattttggtggggcgggggacgacgtcgcaatgataatgacaatgaaggcggaagtttggaaattgtgatgatgattatttccatcgtattggttattttaggtccaattgccacaactatcgctcaattggctttatcacgaaatcgagaatatctcgccgatgcctctagcgttgaattaacacgtaacccactggggctaatccatgctctacaaaagatatcggtcagtgaaccgatgaaagaagccgatccaagtagtgctgcactttatatctctgatccatttaaaaagaaacgtaccatggcacatctatttgatacgcatccaccaattgaagatcgcattcaacgtttggaaagaatgtaa

SEQ ID NO: 1401 - protein, 298 aa, Pediococcus pentosaceus ATCC 25745
MLYQQIASNKRKTVYVMIGFAILVLFIGAAVGYVFYDSAMAGIIMAAVIAAIYMAMMIANSTNVVMGMNHATEISEADHPEIWHIVEDMALVANIPMPKVYIVNDASPNAFATGNSPKNAAVAVTTGILERLNREELEGVIGHEVSHIRNYDIRLSTIALALSSAIAMLVNIGMRSFWWGGGRRRNDNDNEGGSLEIVMMIISIVLVILGPIATTIAQLALSRNREYLADASSVELTRNPLGLIHALQKISVSEPMKEADPSSAALYISDPFKKKRTMAHLFDTHPPIEDRIQRLERM

SEQ ID NO: 1402 - DNA, 912 bp, Brevibacterium linens BL2
  CDS (1)..(912)
atgaagaatcgcttcgtcaaggacaacggactcaccatgcgcatggggtggacgatattcctcaatggactcatctatgtgatcctcatcctcgccatctggtggatgctcggcggcagcaccggtggcgtgatcattgcggtcctcatcagcgccggcgcgttcttcttccagtggtacttctccgacaagatcgcgatgaaggcgatgggtgcacgggaggtctccccagaggaggccccagagctgcacaccatggtcgaccggctctgtcagctcgccgattcgaccaaaccgcgcgtcgcggtgtcgaactcagccattcccaatgctttcgccaccggccgttcgccggagcgctcggttgtgtgtgtgacacgcggcctgctcgaaaaactcgaccgtgatgaggtcgaggtcgtcctcgctcacgaactctcccacgtcgcccaccgcgatgtcaccgtcatgaccgtcgcgggagtcaccggtgtcgtggccgcgctgatgatgcgcgccggctactacatgagcttcggtcgctcgaacaacaacaacggcggcgttcccgtccagctgctgttcgtccttgtcggagccgtcgtctacggcctctcattcctcctcatccgcagcctctcgcgttaccgcgaactggccgcagacagagcagccgcgatcctcaccggtgcgccctcgaccttggcctctgcactgaccaagctcagcggagatatgagcaagatccccgagaaggatctgcgggcttcctcttccgccaatcacttggcgctcattcccgctgccagcggcaaggccgccgtcacgcagctcttctccactcacccttccctcgacaagcgcctggaacagctcgcaaagatctccgggcagctctcacagcagcagtga

SEQ ID NO: 1403 - protein, 303 aa, Brevibacterium linens BL2
MKNRFVKDNGLTMRMGWTIFLNGLIYVILILAIWWMLGGSTGGVIIAVLISAGAFFFQWYFSDKIAMKAMGAREVSPEEAPELHTMVDRLCQLADSTKPRVAVSNSAIPNAFATGRSPERSVVCVTRGLLEKLDRDEVEVVLAHELSHVAHRDVTVMTVAGVTGVVAALMMRAGYYMSFGRSNNNNGGVPVQLLFVLVGAVVYGLSFLLIRSLSRYRELAADRAAAILTGAPSTLASALTKLSGDMSKIPEKDLRASSSANHLALIPAASGKAAVTQLFSTHPSLDKRLEQLAKISGQLSQQQ

SEQ ID NO: 1404 - DNA, 900 bp, Lactobacillus delbrueckii subsp. bulgaricus ATCC BAA-365
  CDS (1)..(900)
atgctataccaacaaattgcccaaaacaagcggaagacggccggagtcctggtcgttttcgttttgatctttgccctggtgggcgcgggcctgggccagctgatgtggggcaagcccctgccgggcgtattgaccgccggcgtcattgccttgatttactctttcctggtcttccaggatccggtcaatgtcgtcatgagcatgaaccatgcccagcatttaaataaagaggacaatccccagctttttcatatcgtggaagacatggccttagtggccaatattcccatgcccgaagtctacttgattccagacaagagccccaacgctttcgcgaccggcctgtcgccggacaagtcagccattgctgttacccagggcctgctggacatgatgaacagagaagagctggaaggggtcctgggccacgagatttcccatatccgcaactatgacatccgcctgtccatggtggccctggttttagtcagcgccatcagctttatcgccgactttgcccagcgctgtgtctggttcggctttggccttgaccgggacgatgatgacgaccgagaaggcggaacgattgggatgatcatcggcgtgatcggggttattttcgttctgatcctgggtcctttggcggccagcctggcccagatggccctgtccagaaaccgggaatacctggccgacgccagttcagttgagctgacccggaacccgcacggcttgatcagtgccttaaccaagattgaaaacagccagcctatgcaggcggccagcagcgccagcgcgtccttgtatattgaggacccgatcagacggcacagcttaagccacttgtttgacacccacccagctacggctgaccggatcaagcgcttggaaaaaatgtaa

SEQ ID NO: 1405 - protein, 299 aa, Lactobacillus delbrueckii subsp. bulgaricus ATCC BAA-365
MLYQQIAQNKRKTAGVLVVFVLIFALVGAGLGQLMWGKPLPGVLTAGVIALIYSFLVFQDPVNVVMSMNHAQHLNKEDNPQLFHIVEDMALVANIPMPEVYLIPDKSPNAFATGLSPDKSAIAVTQGLLDMMNREELEGVLGHEISHIRNYDIRLSMVALVLVSAISFIADFAQRCVWFGFGLDRDDDDDREGGTIGMIIGVIGVIFVLILGPLAASLAQMALSRNREYLADASSVELTRNPHGLISALTKIENSQPMQAASSASASLYIEDPIRRHSLSHLFDTHPATADRIKRLEKM

SEQ ID NO: 1406 - DNA, 900 bp, Streptococcus thermophilus LMD-9
  CDS (1)..(900)
atgttatttgatcaaattgctcgaaataagagaaagacttggcttttgctccttgtctttttcctcttgttgggccttgttggttacggtgttggctatctttggttaggttcaggcttcggtggtctgattcttgctctagttatcggttttatctatgccgttaccatgattttccaatcaactaatgtcgttatggctatgaacggtgcacgagaggttgatgaacaaaccgctccgaacctttatcatgttgttgaggatatggctatggtggcacaaataccgatgccacgtgtctttattgtcgatgatccttctatgaatgcttttgcgactggatcaagccccaagaatgcggcagtagctgctacaacaggtcttcttgcggttatgaatcgtgaggagcttgaaggggttatcggacatgaagtgagtcatattcgtaactatgacatccgtatttcgaccattgcagttgccttggcatctgcaatcaccatgctagctgttatggcccgcaatatgatgttctggggtggaggccgtcgtcgtaatgatgatgatcgtaatggaagtagtggcttggaaattattcttctcattatttctttgattgcgattattctggcgcctttggcagctaccttggttcagttggctatttcacgccagcgtgaatttttagctgatgcttctagcgtcgaattgacacgtaacccacaaggtatgattaacgctctgctcaaacttgataatagtgcgccaatgcaacatcacgtggatgatgctagcgcagccctctttatcaatgaccctaaaaaagaatctggtttgcagaagttcttttatactcacccaccaatttcagaacgggtggaacgcttgaaacaaatgtaa

SEQ ID NO: 1407 - protein, 299 aa, Streptococcus thermophilus LMD-9
MLFDQIARNKRKTWLLLLVFFLLLGLVGYGVGYLWLGSGFGGLILALVIGFIYAVTMIFQSTNVVMAMNGAREVDEQTAPNLYHVVEDMAMVAQIPMPRVFIVDDPSMNAFATGSSPKNAAVAATTGLLAVMNREELEGVIGHEVSHIRNYDIRISTIAVALASAITMLAVMARNMMFWGGGRRRNDDDRNGSSGLEIILLIISLIAIILAPLAATLVQLAISRQREFLADASSVELTRNPQGMINALLKLDNSAPMQHHVDDASAALFINDPKKESGLQKFFYTHPPISERVERLKQM

SEQ ID NO: 1408 - DNA, 924 bp, Anaeromyxobacter dehalogenans 2CP-C
  CDS (1)..(924): transl_table=11
atgtcctggagcgaggcggcacagccgcgcggcatgtccccgaaggccggtgtgggccgcaactacgccaagaccgccatgctgatggcgctgctcatcgcgctgctcgcgatcggcggcaacgtggtcggcggcatgcaggggatgctgctcttcggcgggctcggcctggtcttcaacttcgtctcctactggttctccgaccggctcgcgctcatggcgcaccgcgcgcggccggtgacgcgcgaggagctgccgcaggtctacgagatcgtcgagcggctcacccgccgcgcgggcatgcccatgccgcgggtctacgtcattccctccgagacgccgaacgccttcgccacgggcaggaacccgtcgcacgcggcggtcgccgtcaccgaggggatcctccgcatcctcgaccggcgccagctcgagggcgtgctcgcgcacgagctcgcccacgtgcgcaaccgcgacatcctcatctccaccatcgccgcggcggtggccgggctcatctccacgctcggctacgtggtccgctggggcgcgctgctcggcggcatgcgccgcgaggacgaccgcggcggctcggcgctcgagctgctggcctgggcgatcctggcgccgctcgtggcgctcgtgatccagctcgcggtgtcccgctcgcgcgagtacggcgcggacgcgtccggcgccgagctggtgggcgaccccgagccgctcgccgaggcgctgctcgcgctggagcgcggcaacgaggccatcccgtaccagtacggcggccccgccaccgcgcacctgttcatcgtgaacccgttccacggggcgggcgcgaagatgatgagcctgttctcgacccacccgcccatcgaggagcgcgtgcgccggctccgcgagatgcggcgcggcgtgcggtacgcgtag

SEQ ID NO: 1409 - protein, 307 aa, Anaeromyxobacter dehalogenans 2CP-C
MSWSEAAQPRGMSPKAGVGRNYAKTAMLMALLIALLAIGGNVVGGMQGMLLFGGLGLVFNFVSYWFSDRLALMAHRARPVTREELPQVYEIVERLTRRAGMPMPRVYVIPSETPNAFATGRNPSHAAVAVTEGILRILDRRQLEGVLAHELAHVRNRDILISTIAAAVAGLISTLGYVVRWGALLGGMRREDDRGGSALELLAWAILAPLVALVIQLAVSRSREYGADASGAELVGDPEPLAEALLALERGNEAIPYQYGGPATAHLFIVNPFHGAGAKMMSLFSTHPPIEERVRRLREMRRGVRYA

SEQ ID NO: 1410 - DNA, 873 bp, Azotobacter vinelandii AvOP
  CDS (1)..(873): transl_table=11
atgatgcgcatcctgctgttcctggctaccaacctggcggtgctgctcatagccagcatcaccctgaaactgctcggggtcgaccggttcaccggccagaactacggcaacctgctgatctactgcgcagtgttcggcttcgccggctccctggtatcgctgttcatctccaaatggatggcgaagatgagcaccggcacggaaatcatcagccagccgcgcacccgccatgagcagtggctgctgcagaccgtcgagcaactgtcccgcgaagccgggatcaagatgccggaagtcggcatcttccccgcctacgaggccaacgccttcgccaccggctggaatcgcaacgacgcgctggtggcggtcagccagggcctgctggagcgcttctcgccggacgaggtacgtgccgtgctggcccatgagatcggccacgtggccaacggcgacatggtgaccctggcgctgatccagggcgtggtgaacaccttcgtgatgttcttcgcgcggatcttcggcaccttcgtcgacaaggtggtgctgaagaacgaggaaggcgaaggcatcggctacttcatcgcgaccatcgccgccgaactggtgctcggcatcctcgccagcaccatcgtcatgtggttctcccgtcgccgcgaattccgcgccgacgaggccggcgcccaactggccggcacccgctcgatggtcggcgccctgcagcgcctgcaggccgagcaggagatcccggtgcacatgccggacaccatgaccgccttcggcatcaacggcgcgaagaaggccagcctcgccgcgctgttcatgagccacccgccgctagaggagcgcatccgggcgctgctccagcgcggctga

SEQ ID NO: 1411 - protein, 290 aa, Azotobacter vinelandii AvOP
MMRILLFLATNLAVLLIASITLKLLGVDRFTGQNYGNLLIYCAVFGFAGSLVSLFISKWMAKMSTGTEIISQPRTRHEQWLLQTVEQLSREAGIKMPEVGIFPAYEANAFATGWNRNDALVAVSQGLLERFSPDEVRAVLAHEIGHVANGDMVTLALIQGVVNTFVMFFARIFGTFVDKVVLKNEEGEGIGYFIATIAAELVLGILASTIVMWFSRRREFRADEAGAQLAGTRSMVGALQRLQAEQEIPVHMPDTMTAFGINGAKKASLAALFMSHPPLEERIRALLQRG

SEQ ID NO: 1412 - DNA, 858 bp, Burkholderia vietnamiensis G4
  CDS (1)..(858): transl_table=11
atgttcaattgggtcaaaacggcgatgctgatggccgcgatcacggccctgttcatcgtgatcggcgggatgatcggcggctcgcgtggcatgacgatcgcgctgctgttcgcgctcggcatgaatttcttctcgtactggttctccgacaagatggtgctgcgcatgtacaacgcgcaggaagtcgacgaggccacggcgccgcagttctaccggatggtccgcgagctcgccacgcgcgccaacctgccgatgccgcgcgtctacctgatcaacgaggatgcgccgaacgcgttcgccacgggccgcaaccccgagcacgcggcggtcgccgcgacgacgggcatcctgcgcgtgctgtccgagcgcgaaatgcgcggcgtgatggcgcacgagctcgcgcacgtgaagcaccgcgacatcctgatctcgacgatcaccgcgacgatggccggcgcgatctcggcgctggccaacttcgcgatgttcttcggcggccgcgacgaaaacggccggccggccaatccgatcgcggggattgcggttgcgctgctcgcgccgatcgccggtgcgctgatccagatggcgatctcgcgggcgcgcgagttcgaggccgatcgcggcggcgcgcagatttccggcgatccgcaggcgctcgccaccgcgctcgacaagattcatcgctatgcggcgggcattccgttccaggcggccgaagcgcatccggccaccgcgcagatgatgatcatgaatccgctgcacggcggcggcctgcagaacctgttttccacgcacccggcgaccgaggagcgcatcgcgcgcttgatggagatggcgcgtaccggccgcttcgattag

SEQ ID NO: 1413 - protein, 285 aa, Burkholderia vietnamiensis G4
MFNWVKTAMLMAAITALFIVIGGMIGGSRGMTIALLFALGMNFFSYWFSDKMVLRMYNAQEVDEATAPQFYRMVRELATRANLPMPRVYLINEDAPNAFATGRNPEHAAVAATTGILRVLSEREMRGVMAHELAHVKHRDILISTITATMAGAISALANFAMFFGGRDENGRPANPIAGIAVALLAPIAGALIQMAISRAREFEADRGGAQISGDPQALATALDKIHRYAAGIPFQAAEAHPATAQMMIMNPLHGGGLQNLFSTHPATEERIARLMEMARTGRFD

SEQ ID NO: 1414 - DNA, 858 bp, Burkholderia cenocepacia AU 1054
  CDS (1)..(858): transl_table=11
atgttcaattgggtcaaaacggcgatgctgatggccgcgatcacggccctgttcatcgtgatcggcgggatgatcggcggctcgcgcggcatgacgatcgcgctgctgttcgcgctcggcatgaatttcttctcgtactggttctcggacaagatggtgctgcgcatgtacaacgcgcaggaagtcgacgagaacacggcgccgcagttctaccggatggtccgcgagctggccacgcgcgcgaacctgccgatgccgcgcgtctacctgatcaacgaggatgcgccgaacgcgttcgcgacgggccgcaaccccgagcatgcggcggtcgccgcgacgacgggcatcctgcgcgtgctgtcggagcgcgagatgcgcggcgtgatggcgcacgagctcgcgcacgtgaagcaccgcgacatcctgatctcgacgatcaccgcgacgatggcgggcgcgatctcggcactcgcgaacttcgcgatgttctttggcgggcgcgacgagaacggccggccggccaacccgatcgcggggatcgcggtcgcgctgctcgccccgatcgcgggcgccttgatccagatggcgatttcgcgagcccgcgagttcgaggccgaccgcggcggcgcgcagatttccggcgatccgcagtcgctcgccaccgcgctcgacaagattcatcgctatgcggcgggcatcccgttccaggcggccgaggcgcatccggccaccgcgcagatgatgatcatgaacccgctgcacggcggcggcctgcagaacctgttctcgacgcacccggccaccgaggagcgcatcgcgcgcctgatggagatggcgcgcaccggccgcttcgagtga

SEQ ID NO: 1415 - protein, 285 aa, Burkholderia cenocepacia AU 1054
MFNWVKTAMLMAAITALFIVIGGMIGGSRGMTIALLFALGMNFFSYWFSDKMVLRMYNAQEVDENTAPQFYRMVRELATRANLPMPRVYLINEDAPNAFATGRNPEHAAVAATTGILRVLSEREMRGVMAHELAHVKHRDILISTITATMAGAISALANFAMFFGGRDENGRPANPIAGIAVALLAPIAGALIQMAISRAREFEADRGGAQISGDPQSLATALDKIHRYAAGIPFQAAEAHPATAQMMIMNPLHGGGLQNLFSTHPATEERIARLMEMARTGRFE

SEQ ID NO: 1416 - DNA, 858 bp, Burkholderia pseudomallei 1655
  CDS (1)..(858)
atgttcaattgggtcaaaacggcgatgctgatggccgcgatcacggccctgttcatcgtgatcggcggcatgatcggcggatcgcgcgggatgacgatcgcgttgctgatcgcgctcgggatgaatttcttctcatactggttctccgacaagatggtgctgcgcatgtacaacgcgcaggaagtcgacgaggccacggcgccgcagttctatcggatggtgcgcggactcgcgacgcgcgcgaacttgccgatgccgcgcgtttatctgatcgacgagaaccagccgaacgcgtttgcgaccggccgcaatcccgagcacgcggccgtcgccgcgacgacgggcatcctgcgtgtgctgtccgagcgcgagatgcggggcgtgatggcgcacgagcttgcgcacgtgaagcatcgcgacatcctgatctcgacgatttcggcgacgatggcgggcgcgatctcggcgctcgcgaatttcgcgatgttcttcggcgggcgcgacgagaatggccggccggcaaatccgatcgcgggcatcgcggtcgcgctgctggcgccgatcgcgggcgcgctgattcagatggcgatttcgcgtgcgcgcgaattcgaggcggaccgcggcggcgcgcagatctcgggcgatccgcaggcgcttgcctcggcgctcgacaagatccaccgctatgcgtcgggcattccgtttcagacagccgaggagcatccggccaccgcgcagatgatgatcatgaatccgctgtcgggcggtgggctgcagaatctgttctcgacgcaccccgccaccgaggagcggatcgcgcggctgatggacatggcgcgcaccggccgcttcgactga

SEQ ID NO: 1417 - protein, 285 aa, Burkholderia pseudomallei 1655
MFNWVKTAMLMAAITALFIVIGGMIGGSRGMTIALLIALGMNFFSYWFSDKMVLRMYNAQEVDEATAPQFYRMVRGLATRANLPMPRVYLIDENQPNAFATGRNPEHAAVAATTGILRVLSEREMRGVMAHELAHVKHRDILISTISATMAGAISALANFAMFFGGRDENGRPANPIAGIAVALLAPIAGALIQMAISRAREFEADRGGAQISGDPQALASALDKIHRYASGIPFQTAEEHPATAQMMIMNPLSGGGLQNLFSTHPATEERIARLMDMARTGRFD

SEQ ID NO: 1418 - DNA, 903 bp, Chromohalobacter salexigens DSM 3043
  CDS (1)..(903): transl_table=11
atgatgcgaattctgcttttcctggcgaccaacctggccgtggtgctcgtggccagtattacgttgcgactgctaggcgtggaaccctacctcaacgccaacgggctcaacatgaacagcctgctgatcttctgcttcgtgatcggcatggcgggctcattggtgtcgctgttcatttccaagtggatggcgaagatgagcaccaaggccaaggtgatcgaacagcccggcaacgccaccgagcgctggttgctcgacaccgtcggcgaactggcgcgcgacgcaggcatcaagatgcccgaggtggcgattttccccgcgcaacagtccaacgccttcgccacgggctggaacaagaacgatgccctggtcgcggtttccgccggcctgctcgaacgcatgcgtcccgaggaaatccgcgcggtactggcgcacgagatcggccacgtcgccaacggcgacatggtcaccctggcgctcatccagggggttctcaacaccttcgtgatgttctttgcgcggatcgtggcgcaactggtggatagcttcctgcgtcgcgacgacgagggcggcggcctgggctttttcggctacatggcggtcgtgatcgtggcggaaatcgtcttcggcctggtggcttcgatggtagtggcctggttctcgcgcttccgcgaataccgcgccgacgccgccggtgccaagctcgccggcagcggcgcgatgatcaatgccctggcgcgcctcaaggccgagacgcaaatgcccgatcagatgccggatacgctgacggccttcgccatcaccaccggacagacccgcaagctgatggaacggctgttcgccagccacccgccgctggacgaccgcatccgtgccctcaaggaaagcgcctatcgcgaatga

SEQ ID NO: 1419 - protein, 300 aa, Chromohalobacter salexigens DSM 3043
MMRILLFLATNLAVVLVASITLRLLGVEPYLNANGLNMNSLLIFCFVIGMAGSLVSLFISKWMAKMSTKAKVIEQPGNATERWLLDTVGELARDAGIKMPEVAIFPAQQSNAFATGWNKNDALVAVSAGLLERMRPEEIRAVLAHEIGHVANGDMVTLALIQGVLNTFVMFFARIVAQLVDSFLRRDDEGGGLGFFGYMAVVIVAEIVFGLVASMVVAWFSRFREYRADAAGAKLAGSGAMINALARLKAETQMPDQMPDTLTAFAITTGQTRKLMERLFASHPPLDDRIRALKESAYRE

SEQ ID NO: 1420 - DNA, 876 bp, Polaromonas sp. JS666
  CDS (1)..(876): transl_table=11
atgaaacgcatctttttgtttatcctgaccaacattgccgtcgtggccgtgctgggcattgtggccagcctgctcggcgtcaaccgcttcctcacggccaatggcctgaacctctcggcgctgctcggctttgcgctgatcatgggtttcggcggcgcgatcatttcactgctgatcagcaagcccgtggccaagtggagcgccggcgtgcgcatcatcaacgatgcccagaacgccgacgaggcctggattgtcgagaccgtccgcaaactggctgacaaggcgcagatcggcatgcccgaagtgggcattttcgaaggcgcgcccaacgcctttgccactggcgcgttcaagaattcatcgctggtggcggtgtccaccggtttgctgcagggcatgacccgcgaagaaatcgaagccgtgatcggccatgagatcgcccacgtcgccaatggcgacatggtcaccatgacgctgatccagggcgtgatgaacacctttgtggtgttcctgtcgcgcgtcatcggctatgcggttgacagctttttgcgccgcggcagcgacaacaactccggccccggcatcggctactacgtcagcaccatcgtgctggacatcgtgctgggttttgccgccgccatcgtcgtggcctggttttcgcgtcatcgcgagttccgcgcggatgcgggttccgcccagctgctgggccgcaagcagcccatgatgaatgcgctggcccgcctcggcggcatgcagcccggcgagttgcccaaggccgtggaagccatgggcatcaccggcggcatcggcaaatggttcgccacgcatccgccgattgaagagcgcattgcggcgctgcagaatgccccagcctga

SEQ ID NO: 1421 - protein, 291 aa, Polaromonas sp. JS666
MKRIFLFILTNIAVVAVLGIVASLLGVNRFLTANGLNLSALLGFALIMGFGGAIISLLISKPVAKWSAGVRIINDAQNADEAWIVETVRKLADKAQIGMPEVGIFEGAPNAFATGAFKNSSLVAVSTGLLQGMTREEIEAVIGHEIAHVANGDMVTMTLIQGVMNTFVVFLSRVIGYAVDSFLRRGSDNNSGPGIGYYVSTIVLDIVLGFAAAIVVAWFSRHREFRADAGSAQLLGRKQPMMNALARLGGMQPGELPKAVEAMGITGGIGKWFATHPPIEERIAALQNAPA

SEQ ID NO: 1422 - DNA, 915 bp, Chlorobium limicola DSM 245
  CDS (1)..(915): transl_table=11
atgcataatcgatcaatattattacacaggagaaactggatgaagcgtgtggttctttttttgttgaccaatcttgcggtgatgctggtgctgtcggtcagtgcccgaattctgggcgttgaccgttttttgaccagcaatggactggatatgggcatgctgctggtatttgctgccctgataggtttcggcggatcctttatttcgcttctgatgtcgaaaaccatggcgaaatggagcacgggcgcacgggttatcgagcggcccgcgaaccaggacgaggcatggctggtggacaccgtgagacagctgtccaaaaaagccggcctgcagatgcccgaggtagccatctatgacggggcgccaaatgcttttgccacaggcccgagcaagtcaagatcgctggtggccgtttcgaccggtctcatgcagagcatgaataaaaaagaggtgggagccgtgctggctcacgaggtggcacatattcagaacggcgatatggtgacgctgacgctgatacagggggtggtcaataccttcgtgatttttctgtcgcgtcttgccgcatacgctgtggacagctttcttcgcagggacgacgatgagtctggaagtccgggcatcggctactggatcagcagcattgcctttgaaatcatgttcggaattctggcaagcgtcgtcgtcatgtgcttttctcgcaagcgtgaatatcgggcggacgctggagcggctgcactgatgggtgatcgagccccgatgatcgacgccctgcgggcgctgggaggcctcgaggccggccggttgccgaaggaaatggcggccagcgggatcgcgggcggcggcatgatggcgcttttcagcagccatccgccacttgagtcgcggattgccgcgctggaatcggcaagctga

SEQ ID NO: 1423 - protein, 304 aa, Chlorobium limicola DSM 245
MHNRSILLHRRNWMKRVVLFLLTNLAVMLVLSVSARILGVDRFLTSNGLDMGMLLVFAALIGFGGSFISLLMSKTMAKWSTGARVIERPANQDEAWLVDTVRQLSKKAGLQMPEVAIYDGAPNAFATGPSKSRSLVAVSTGLMQSMNKKEVGAVLAHEVAHIQNGDMVTLTLIQGVVNTFVIFLSRLAAYAVDSFLRRDDDESGSPGIGYWISSIAFEIMFGILASVVVMCFSRKREYRADAGAAALMGDRAPMIDALRALGGLEAGRLPKEMAASGIAGGGMMALFSSHPPLESRIAALESAS

SEQ ID NO: 1424 - DNA, 876 bp, Chlorobium phaeobacteroides DSM 266
  CDS (1)..(876): transl_table=11
atgaaacgggtggttctttttttgtttaccaaccttgcggtgatgctggtgttgtcggtcagtgcccgtgttctgggcgtagaccgatttttgaccggcaacggtctggatatgggcatgctgcttctgtttgctgctttaatcggttttggcggatcctttatttctcttctgatgtccaaaaccatggcgaaatggagtaccggcgcacgggttatccagcaacccgccaaccagaacgaggtatggctcgttgataccgtgagtcagctttccaaaaaagccggtttggcgatgcccgaggtggccatctacgacggtgctccgaatgccttcgccacaggccccagcaagtcgagatcgctggtggcggtctcgaccggactgttgcagagcatggatcgaaaacaggtggaagccgtgttggctcacgaggtcgcccacatcgataacggcgacatggttaccttgacgctgatacagggtgtgctcaataccttcgtgatttttctgtcgcgcgtcattgcctatgctattgacagctttcttcgcagcgacgacgacgagtccggcagtccgggtatcggctactggatcagcagcattatttttgaaatcatgttcggcattctggcaagcgtcgtcgtcatgtacttttctcgcaagcgtgagtatcgggccgacgcgggagctgctgtgctgttgggcgaccggcgcccgatgatcgacgccctgcgagcgctgggaggtcttcaggccggccagttgccgaaggaaatggctgccagcgggattgcgggtggcggtatgatggctcttttcagcagtcacccgccccttgaatcgcggattgcagcgctggaatcggcacgctga

SEQ ID NO: 1425 - protein, 291 aa, Chlorobium phaeobacteroides DSM 266
MKRVVLFLFTNLAVMLVLSVSARVLGVDRFLTGNGLDMGMLLLFAALIGFGGSFISLLMSKTMAKWSTGARVIQQPANQNEVWLVDTVSQLSKKAGLAMPEVAIYDGAPNAFATGPSKSRSLVAVSTGLLQSMDRKQVEAVLAHEVAHIDNGDMVTLTLIQGVLNTFVIFLSRVIAYAIDSFLRSDDDESGSPGIGYWISSIIFEIMFGILASVVVMYFSRKREYRADAGAAVLLGDRRPMIDALRALGGLQAGQLPKEMAASGIAGGGMMALFSSHPPLESRIAALESAR

SEQ ID NO: 1426 - DNA, 912 bp, Chlorobium phaeobacteroides BS1
  CDS (1)..(912): transl_table=11
atgaaacgagtggttctttttttgttgaccaacctggcggtgatcgcggtgctgtcaatcacagcccgtattctgggtgtcgaccgctttttgaccgccaacgggttgaatatgggtatgctgctggcatttgccgccctgataggcttcggcggcgcctttatttcgcttttgatgtccaaaaccatggcgaagtggagcactcgcgcacgggttattgaacggccgggcaaccaggacgaggcatggctggtggatactgtgagacagctttccaaaaaagcagggttgcctatgcctgaggtagctatcttcgacggagctcctaatgcttttgccaccggcgccagcaaatcgaaatcgctggtggctgtttcgaccgggctgctgcaaagcatggatcgcaagcaggttgcggctgttctggctcatgaggtcgctcatgttgaaaacggtgacatggtgaccctgacgctgatacagggggttgtcaataccttcgtgattttcctgtctcgcgctcttgggtatctggtcgataactttcttcgcggcgataatgaggagtcgactgggcccggtatcggctactggatcagcagtattgcctttgaaatcgtgttcggcgttctggcgagcatcgtcgtcatgtacttttcacgcaagcgtgagttccgggcggatgcgggtgcggcgaagctgatgggtgatcgacgtccgatgatcgacgcgctacggacgctgggcggtctccaggcgggtcagttgccgaaggaaatggctgccagcgggattaccgggggcggtatgatggcgcttttcagcagccatccaccccttgaatcgcggattgcggcgctggaatccgctactcctccatccacaccgacaccttcccgccgcgggtcctga

SEQ ID NO: 1427 - protein, 303 aa, Chlorobium phaeobacteroides BS1
MKRVVLFLLTNLAVIAVLSITARILGVDRFLTANGLNMGMLLAFAALIGFGGAFISLLMSKTMAKWSTRARVIERPGNQDEAWLVDTVRQLSKKAGLPMPEVAIFDGAPNAFATGASKSKSLVAVSTGLLQSMDRKQVAAVLAHEVAHVENGDMVTLTLIQGVVNTFVIFLSRALGYLVDNFLRGDNEESTGPGIGYWISSIAFEIVFGVLASIVVMYFSRKREFRADAGAAKLMGDRRPMIDALRTLGGLQAGQLPKEMAASGITGGGMMALFSSHPPLESRIAALESATPPSTPTPSRRGS

SEQ ID NO: 1428 - DNA, 969 bp, Frankia sp. CcI3
  CDS (1)..(969): transl_table=11
atgacgcgtgtgccgcggcggttcgccctggaccggggactgtcggcccggatggtgctgaccgtcttcctgctcgggttggtctacgtcgccttcatcgccgtcctgatcgccgtcggagtgtcaccggtcctggtcgtcgcgatcgccggcgggctgctcgccgcccagtactggttctcggaccgcatcgcgctgtacgcgaccggtgggcgcatcgtcagcccggcgcaggagccgcggctgcacggcgtcgtggatcggctctgcgcgctgtccgacctaccgaagcccgtggtggcggtcgcggacaccgacctgccgaacgcgttcgccaccggccggaccccgaaacgcgccgtcgtctgcgtgacgaccgggctgctgcgcaggctggaggtcgacgagctggagggggtgctgtcccacgagctgtcccacgtcgcgcaccgggacgtggccgtcatgaccgtcgcgtcgtttctcggggtgctcgccggtctggtcacccgattcggtctctactccgggatggccggcggcttcggccggtccgacggcggtgacggcggtgacggcggtgacgatgacgaggacagcggcgccctcgtcgtgctcgtcgttgtggtcgtctccgccgccgtctacgcgctgtcgttcctgctgaccagggcgctgtcgcggtaccgggagctcgccgccgaccggtccggggcgatcctcaccggccagccggccgcgctcgccgccgcgctcaccaaggtcaccggcgagatctcccggatcccgacccgcgacctgcgggccgccgaaccgttcaacgccttcttcttcgctcccgcgctggcgaacggcgtcagcctgtcctcgttgttctcgacccatccgccgctggatgcccgcctggcccagcttgcccggctggccgcccagttcggtgagcccgcccagttcggtgagcccgggtag

SEQ ID NO: 1429 - protein, 322 aa, Frankia sp. CcI3
MTRVPRRFALDRGLSARMVLTVFLLGLVYVAFIAVLIAVGVSPVLVVAIAGGLLAAQYWFSDRIALYATGGRIVSPAQEPRLHGVVDRLCALSDLPKPVVAVADTDLPNAFATGRTPKRAVVCVTTGLLRRLEVDELEGVLSHELSHVAHRDVAVMTVASFLGVLAGLVTRFGLYSGMAGGFGRSDGGDGGDGGDDDEDSGALVVLVVVVVSAAVYALSFLLTRALSRYRELAADRSGAILTGQPAALAAALTKVTGEISRIPTRDLRAAEPFNAFFFAPALANGVSLSSLFSTHPPLDARLAQLARLAAQFGEPAQFGEPG

SEQ ID NO: 1430 - DNA, 858 bp, Desulfitobacterium hafniense DCB-2
  CDS (1)..(858): transl_table=11
atgaatggattcggaaatcagctcaagactgtttttctgatgagtttattaactgtgcttgtgattctggccgggaatgctataggaggctccggcggtatgcagatcgcctttatctttgccatggtgatgaactttggcagctattggtttagtgataagatggctctggcgatgacgaaagcccagcccatcagccgtgaacaaagccccgagctctatgctatggtggaaaggctggcagacaacgccaatctgcccatgcccaggctttatatgaccccgtcacctcagcccaatgcttttgcaaccggccgcaaccctaatcacgcagccattgctgtaacccggggattgatgcaaatgcttaatcgtgaagagctggaaggggtattagcccacgagatggctcacattaagaatcgggatattctcatcagtaccctggcggcagtcatggccggtgtgattacgaccctggcccattgggctcagtgggccctgatgttcggaggggtaggcggaaatgacgaagaaggagcttccggactggcggccctgcccttgattattctggggcccattgcggccatgctggttcagatgggaatttcccgctcccgggaatatctggccgatgctacgggggcggagattgcggggaactcctctggtctggccaatgctctccagaaattagagagaagttcggcagccataccgatgaatgttaacccctccgcaagtcatatgtttatcgtcaatccgttgaacgcccgcagggtagcaaatctgttcagtacccacccacccatcgaagaaagggtgaaacggctttatactatggaacgccgctaa

SEQ ID NO: 1431 - protein, 285 aa, Desulfitobacterium hafniense DCB-2
MNGFGNQLKTVFLMSLLTVLVILAGNAIGGSGGMQIAFIFAMVMNFGSYWFSDKMALAMTKAQPISREQSPELYAMVERLADNANLPMPRLYMTPSPQPNAFATGRNPNHAAIAVTRGLMQMLNREELEGVLAHEMAHIKNRDILISTLAAVMAGVITTLAHWAQWALMFGGVGGNDEEGASGLAALPLIILGPIAAMLVQMGISRSREYLADATGAEIAGNSSGLANALQKLERSSAAIPMNVNPSASHMFIVNPLNARRVANLFSTHPPIEERVKRLYTMERR

SEQ ID NO: 1432 - DNA, 933 bp, Frankia sp. EAN1pec
  CDS (1)..(933): transl_table=11
atgatggtcgtgcgtgcgccgcgacgattctccgccgaccgcgggctgacggtccggatgctggtgaccgtcttcctgctcgggctggtctacgtcgccttcgtggccgtcctgatcggtatcggtctgtcgccggtcctggtcatcgtgatcgccgggggcctgctgttcgcccagtactggttctccgaccggattgcgctgtacgcgatgggcggccgggtcgtcaccccgcagcaggcgccgcagctgcatggtgtcgtcgaccggctgtgcgcgttgtccgacacgcccaaaccggccgttgccgtcgcggacgtcgatgtgcccaacgcgttcgcgaccggccggaaccccaagcgggccgtcgtctgtgccacgaccgggttgctccggcggctggacgccgaggagctcgaaggggtgctgtcccacgagctgtctcatgtcgcgcaccgggacgtggcggtgatgacggttgcgtccttcctgggggtgctcgccgggctgatcaccagattcggcctctattccggaatgtccggcggactcggccacacggacgacgacgacgaggacagcggcaccctcgtcgttctcgtggtggtactcgtatcgaccatggtctatgcgctgtcgttcgtgctgaccagggcactctcccgctaccgcgagctggccgcggaccggtccggggcgctgctcaccggccggccatccgcgctcgcgtccgcgctgaccaagatcagtggcgatatgtcccgcatcccgacccgcgacctgcgggcggccgaaccattcaacgcgttcttcttcgcgccggcggtggcgggcgggttcagcctgtcctcgctgttctccacccacccacccctggacacccggctgacgcggctcgcccggctgtcggccgaactcggcgaggccagatag

SEQ ID NO: 1433 - protein, 310 aa, Frankia sp. EAN1pec
MMVVRAPRRFSADRGLTVRMLVTVFLLGLVYVAFVAVLIGIGLSPVLVIVIAGGLLFAQYWFSDRIALYAMGGRVVTPQQAPQLHGVVDRLCALSDTPKPAVAVADVDVPNAFATGRNPKRAVVCATTGLLRRLDAEELEGVLSHELSHVAHRDVAVMTVASFLGVLAGLITRFGLYSGMSGGLGHTDDDDEDSGTLVVLVVVLVSTMVYALSFVLTRALSRYRELAADRSGALLTGRPSALASALTKISGDMSRIPTRDLRAAEPFNAFFFAPAVAGGFSLSSLFSTHPPLDTRLTRLARLSAELGEAR

SEQ ID NO: 1434 - DNA, 864 bp, Shewanella baltica OS155
  CDS (1)..(864): transl_table=11
atgaagcgtatatttttattgattgcgactaacctagctgtgttgctagtagcctcaattgtaatgtctattctaggcgtgaacacgtctactatgggtggactgctggtgttcgctgccatttttggattcggtggggcctttatcagcttagccatttcaaaatggatggcgaaaaagaccatgggttgtgaagtgatcactaccccacgtgacagtaccgaacgttggttagtagagacggttgcccgtcaagctaagcaagcgggaattaaaatgccagaagtggcgatttatcaatcacccgacatgaacgcgttcgctacaggcccaagcaaagacaattcattagtggctgtgagtacgggtctgttatatggcatgagccaagatgaaatcgaaggcgtattggcccacgaagtgagccacgttgctaacggtgacatggtgaccttgacactgatccaaggggtagttaacaccttcgtgatcttcgcggctcgtgtggttgctggcattattaacaactttgtgtcgagcaatgatgaagaaggcgaaggtttaggcatgttcgcttacatggccgtggttttcgtgctggatatgttattcggtatcttggcttcaatcatcgtcgcttacttctcacgtattcgtgagtacaaagccgatgaaggcgcggcccgtttagcgggtaaaggcaagatgattgctgcgcttgaacgtttacgccaaggtccagaaagcacggcaatgcctgcacagatgtctgcctttggtattaacggcaaacgttcaatggcggaaatgatgatgagtcatcctccattagaaaaacgtattgcagcgttaagagcaagctaa

SEQ ID NO: 1435 - protein, 287 aa, Shewanella baltica OS155
MKRIFLLIATNLAVLLVASIVMSILGVNTSTMGGLLVFAAIFGFGGAFISLAISKWMAKKTMGCEVITTPRDSTERWLVETVARQAKQAGIKMPEVAIYQSPDMNAFATGPSKDNSLVAVSTGLLYGMSQDEIEGVLAHEVSHVANGDMVTLTLIQGVVNTFVIFAARVVAGIINNFVSSNDEEGEGLGMFAYMAVVFVLDMLFGILASIIVAYFSRIREYKADEGAARLAGKGKMIAALERLRQGPESTAMPAQMSAFGINGKRSMAEMMMSHPPLEKRIAALRAS

SEQ ID NO: 1436 - DNA, 891 bp, Shewanella amazonensis SB2B
  CDS (1)..(891): transl_table=11
atgggcgatttgcccgataaaggagctgaaatgaaacgtgtatttcttttcctgttgaccaacctggcggtgctgctggttgcgtcgatagtgatgtctattctgggcgttgatacccgctctatgagtggtctgttggtgtttgcggccatctttggtttcggtggcgcctttttctcgctggccatttccaaatggatggcgaaaaagtccatgggttgtgaagttatcaccaccccacgcgatgccacagaaaaatggctgattgatacggttgcccgccaggcgcagcaagccggtatcaagatgcctgaagtggctatctataattcacctgaaatgaacgcctttgccacaggccccagcaaaaacaactcgctggttgccgtaagtaccggtctgctctacggtatgacccaggatgaagtggaaggtgttctggcacacgaagtcagccacgtggccaatggcgacatggtgacactgacccttattcagggcgtggtgaacacctttgttatcttcgccgcccgcgtagtcgctggatttatcaataacttcctctccagcgacgaagagggtgaaggtttgggcacctttgcctatatcgcggtggtgtttgtactggaaatgctgtttggtattctggcgtctatcgtggttgcttacttctcccgaatccgtgagtatcgtgccgacgaaggcggtgccaagctggcaggtcgtcacaagatggttgctgcactagagcgtttgcgtaatggtccggagaccggcgccatgccagcgcaaatggcggcgtttggtatcaatggcaagcgttcactcggtgagctgctgatgagccacccgccattggaaaaacgcattcaggcgctcaaagcgcagtaa

SEQ ID NO: 1437 - protein, 296 aa, Shewanella amazonensis SB2B
MGDLPDKGAEMKRVFLFLLTNLAVLLVASIVMSILGVDTRSMSGLLVFAAIFGFGGAFFSLAISKWMAKKSMGCEVITTPRDATEKWLIDTVARQAQQAGIKMPEVAIYNSPEMNAFATGPSKNNSLVAVSTGLLYGMTQDEVEGVLAHEVSHVANGDMVTLTLIQGVVNTFVIFAARVVAGFINNFLSSDEEGEGLGTFAYIAVVFVLEMLFGILASIVVAYFSRIREYRADEGGAKLAGRHKMVAALERLRNGPETGAMPAQMAAFGINGKRSLGELLMSHPPLEKRIQALKAQ

SEQ ID NO: 1438 - DNA, 876 bp, Pelodictyon phaeoclathratiforme BU-1
  CDS (1)..(876): transl_table=11
atgaaacgggtgattctttttttgttgacaaactttgccgtgatgctggtgctgtcggtcactgcccgtattctgggtgttgaccgctttttgaccagcaatggattgaatatgggtatgctgctggtatttgctgccctgattggctttggtggctcctttatttcgctcctgatgtccaaaaccatggcgaaatggagcactggcgcacaggttatcaaacagccttccagccaggaggaggtatggcttgtggagactgtgagaagactttccactaaagccggtttcgcaatgcccgaggtggccatttatgatggcgctcccaatgcctttgccacaggcccaagcaagtccagatcgctggtggcggtctcgaccggactgttgcacagcatggatcgcaaacaggtggaagccgtattggctcacgaggtttcccatatcaacaacggcgacatggtgaccctgacgctgatacagggagtgctcaatactttcgtgatctttctgtcgcgtatcattgcctatgcggtggacagctttcttcgcagggacgaagatgagtcgggcagtccgggcattggctattggatcagcagtattgcatgtgaaatcctcttcggtattctggccagcattgttgtcatgttcttttcacgcaagcgggaataccgggccgatgcgggagcggctgcactgatgggtgaccggcgtccgatgattgacgccctgcgtgccctggggaacctcgatgccggtcagttgccgaaagagatggcagccagtgggattgccggcggtggcatgatggcgcttttcagcagccacccgccccttgaatcccggattgcagcgctggaatcggcacgttga

SEQ ID NO: 1439 - protein, 291 aa, Pelodictyon phaeoclathratiforme BU-1
MKRVILFLLTNFAVMLVLSVTARILGVDRFLTSNGLNMGMLLVFAALIGFGGSFISLLMSKTMAKWSTGAQVIKQPSSQEEVWLVETVRRLSTKAGFAMPEVAIYDGAPNAFATGPSKSRSLVAVSTGLLHSMDRKQVEAVLAHEVSHINNGDMVTLTLIQGVLNTFVIFLSRIIAYAVDSFLRRDEDESGSPGIGYWISSIACEILFGILASIVVMFFSRKREYRADAGAAALMGDRRPMIDALRALGNLDAGQLPKEMAASGIAGGGMMALFSSHPPLESRIAALESAR

SEQ ID NO: 1440 - DNA, 876 bp, Prosthecochloris aestuarii DSM 271
  CDS (1)..(876): transl_table=11
atgaaacgaatagtactttttttgttgaccaactttgccgtgatactggtgctgtcgatcagtgcccgtcttctgggggtcgaccgatttttgaccagcaatgggttgaatatgggcatgctgctggcatttgctgccctgattggtttcggcgggtcttttatctctctgatgatgtctaaaactatggcaaaatggagcactggtgcgagggttatcgagcgacccggcaatcaggatgaggcctggcttatggataccgtgagacagctttccaaaaaagccggttttccgatgcccgaggtggctgtttttgatggtgctccgaatgcttttgctaccggtcccagcaagtcaaaatcacttgtagctgtttcgaccggattgctgcaaagcatgaatcgaaaagaggttgaggccgtgctggcccatgaggttgcccatatccaaaatggtgatatggtgaccctgacgctcatccagggagtggtcaatacgttcgtgatttttctggcgcgtgctcttgcctatgtggttgacaactttcttcgcggtgacgaaaaggagtccagcggtccagggataggctactgggtcagcagcattgcctttgaaatcatgttcggtattctggcaagtattgtcgttatgttcttttcgcgcaagcgtgaatacagggcggacgctggagcggctgcgctgatgggtgagcggcgttcgatgatcgatgccctgagggtgcttggtgggcttgaggcaggggcgttgccaaaggaaatggctgccagcggaattgccgggggcggtatgatggctctgttcagcagccacccgcctattgaagcgcggattgctgcgctggaatcggcacgttga

SEQ ID NO: 1441 - protein, 291 aa, Prosthecochloris aestuarii DSM 271
MKRIVLFLLTNFAVILVLSISARLLGVDRFLTSNGLNMGMLLAFAALIGFGGSFISLMMSKTMAKWSTGARVIERPGNQDEAWLMDTVRQLSKKAGFPMPEVAVFDGAPNAFATGPSKSKSLVAVSTGLLQSMNRKEVEAVLAHEVAHIQNGDMVTLTLIQGVVNTFVIFLARALAYVVDNFLRGDEKESSGPGIGYWVSSIAFEIMFGILASIVVMFFSRKREYRADAGAAALMGERRSMIDALRVLGGLEAGALPKEMAASGIAGGGMMALFSSHPPIEARIAALESAR

SEQ ID NO: 1442 - DNA, 879 bp, Ralstonia metallidurans CH34
  CDS (1)..(879): transl_table=11
atgaaacgtatctttctgttcctggcgaccaacctcgccgtcatgcttgtcctcagtgtcacggccagcctgctgggcgtgaatcgcttcctgacctcgaacggcctcaacctcggaatgttgctggcattcgcggcgttgatgggcttcggtggctcgttcatctcgttgctgatgtccaagaccatcgccaagtggtcgaccggcgcccaggtcatcacccacccgagcaccagcacggagctctggctcgtgcagaccgtcgagaagctggccacgcgcgccggcctgccgatgccagaggtggcgatctacgatggcgagcccaacgcattcgctaccggcgcgtcgaagagcagctcgctggtggctgtgtccacgggcctgctgcagtcgatgtcgcacgacgaggtcgaggccgtgctcgcgcacgaagtggcccacatcgccaatggcgacatggtcacgctgacgttgattcaaggcgtggtgaacacgttcgtgatcttcatggcacgcgtggtcggctacttcgtcgattcgtggctgcgccgcaatgacgaggagtcgagcggccccggtatcggctacatggtcaccgtggtggtctgcgagatcgtcttcggcatcctggccagcgtcatcgtcgccacgttctcgcgtcatcgcgaatatcgtgccgacgccggcgcggcgaagctgctcggcacgccgagcccgatggtggcggcattgcgccgcctgggtggtctggacgccgacggcctgccgcagaacatgcaggcgatgggtatctcgggcggcaagtcgtggctggcgctgtttgcaagccacccgccgatcgaatcgcgcatcgcggccctgcaaggcacccgctaa

SEQ ID NO: 1443 - protein, 292 aa, Ralstonia metallidurans CH34
MKRIFLFLATNLAVMLVLSVTASLLGVNRFLTSNGLNLGMLLAFAALMGFGGSFISLLMSKTIAKWSTGAQVITHPSTSTELWLVQTVEKLATRAGLPMPEVAIYDGEPNAFATGASKSSSLVAVSTGLLQSMSHDEVEAVLAHEVAHIANGDMVTLTLIQGVVNTFVIFMARVVGYFVDSWLRRNDEESSGPGIGYMVTVVVCEIVFGILASVIVATFSRHREYRADAGAAKLLGTPSPMVAALRRLGGLDADGLPQNMQAMGISGGKSWLALFASHPPIESRIAALQGTR

SEQ ID NO: 1444 - DNA, 960 bp, Rubrobacter xylanophilus DSM 9941
  CDS (1)..(960): transl_table=11
gtgcccgcctccggcgagatggtcggcaccttccgcgaccgcatcgcggtcaacaggcgcaacagcctgctgctcgtcgccgtctttctggccttcgtgacggcgcttggctatgtcgtcgggtacgcgtgggtcggggacccggcgggggccgtcttcgggctcctcctcgccctcgccgccgggaccgtctccgggttcgccacctactacgccggcgacaggatggtgctcgccgcctcccgggcgcgggagatcacgcacgacgacgcccccgtgctcttcaacgtcgtcgaggagatggccatagccggtgggctgccgatgccggaggtctacatcatcgaggactccgcgccgaacgccttcgccacgggacgcgacccggagcacgccaagatcgccgtcacccgcgggctgctcgagaagctcgaccgcgacgagctgcagggcgtgatcgctcacgagatggcccacgtcggcaactacgacatccgctacgcgatgctcgtcggcgtactcgtcggcaccacggtcctcatctccgacttcttcctgcgcggcctgtggttcggcagggggcagcgtcgcggcgagggcggcgggcagatacagctcgtcatgttcctcatcgccctggtgctcgccatcctcgcccccctcttcgcgcggctcctccagctctccataagccgccagcgcgagtacctcgcggacgccaccgccgtgcagctcacccgcaaccccaagggcctggccgacgccctgcagaagataagctccgacagggaggtgctggaggtggccaaccgcgccaccgcccacctctacattgtcaaccccatcaagaagttcgagagacgggccaggggcctcttctccacccacccgcccatagaggagcgcataaggatcctgcgctccatggagaccggcggcataccgcagcaggcccgctga

SEQ ID NO: 1445 - protein, 319 aa, Rubrobacter xylanophilus DSM 9941
MPASGEMVGTFRDRIAVNRRNSLLLVAVFLAFVTALGYVVGYAWVGDPAGAVFGLLLALAAGTVSGFATYYAGDRMVLAASRAREITHDDAPVLFNVVEEMAIAGGLPMPEVYIIEDSAPNAFATGRDPEHAKIAVTRGLLEKLDRDELQGVIAHEMAHVGNYDIRYAMLVGVLVGTTVLISDFFLRGLWFGRGQRRGEGGGQIQLVMFLIALVLAILAPLFARLLQLSISRQREYLADATAVQLTRNPKGLADALQKISSDREVLEVANRATAHLYIVNPIKKFERRARGLFSTHPPIEERIRILRSMETGGIPQQAR

SEQ ID NO: 1446 - DNA, 846 bp, Magnetococcus sp. MC-1
  CDS (1)..(846): transl_table=11
atgaacaccatgaagacagccatgttgttggcggcattaacggcgctgtttatgatgattgggtttgccttgggtggccagggtggcatgctcatcgccctgctgtttgcggggggtatgaacctctatgcctactggaactcggatcagatggtgctgcgcatgcacaatgcccaggaggtaggcccccgagaggctcccgaactctacgggttggtccaatccttggcaaaacggggcaagatgcccatgcccaaggtctatgtcatccatgatccttcgcccaacgcttttgccacggggcgggatcctgaacatgcggcggtggcggctaccaccggtttgatgcagatactcacccgcgaggagctggccggggtgatggcccatgagttgggccatgtgatgaaccgagataccctgattagcaccatctcggccacctttgccggggccattaccgccatcgccaacatggcgcagtttgcggccatttttggcaaccgggatgaagaggagggtggtggtggcccgatgggcttgattatgatgatcctagcacccattgcggcggcactgatccagatggccatctcccgtacccgtgagtataaggcggatcgtgtgggtgcggagctgtgcggcaatcccctgtggttagccagcgctttgcataagctggagcgtggggtgcaacagattcccagcccggtggctcaggcgcatcctgaggcggcgcacttgtacatttgcaaccctttggcggggggtttgggttcgttgttctccacccatccacccatcccggagcgcattcgtaaactgcaacggatgaccggtcgctaa

SEQ ID NO: 1447 - protein, 281 aa, Magnetococcus sp. MC-1
MNTMKTAMLLAALTALFMMIGFALGGQGGMLIALLFAGGMNLYAYWNSDQMVLRMHNAQEVGPREAPELYGLVQSLAKRGKMPMPKVYVIHDPSPNAFATGRDPEHAAVAATTGLMQILTREELAGVMAHELGHVMNRDTLISTISATFAGAITAIANMAQFAAIFGNRDEEEGGGGPMGLIMMILAPIAAALIQMAISRTREYKADRVGAELCGNPLWLASALHKLERGVQQIPSPVAQAHPEAAHLYICNPLAGGLGSLFSTHPPIPERIRKLQRMTGR

SEQ ID NO: 1448 - DNA, 903 bp, Magnetococcus sp. MC-1
  CDS (1)..(903): transl_table=11
atgaaacgtattgtgctgttcctaatcaccaaccttgccatcatggcggtgttgatggtggtgcttaacgtgatctttagcctgtttgggctaaatcatggttctataggaggtattgtggtactggcgctggtctttggtatggggggatcgtttatctcgctgtttatgtccaaatggttggccaaacgctccaccggtgcggtggtgattgagcgaccacaagacgccaccgagcagtggttgctcgaaacggtgcggcggcagagtcagcaggccggtattggtatgcccgaggtggcaatttttgaatcagccgaggtcaacgcttttgccacaggggcgagccgcaacaatgctttggtggcggtgagcacggggctgctgcatggcatgcgtaaagaggaagccgaggcggtattggcccatgaggtcagccacattgccaatggtgacatggtgaccttggcgttgattcaaggggtgttgaatacctttgtgatcttgttggcccgtctcattgctggagcggtggatagcgtgttgtccagccaaagtgatgaggaagaggagcaggtcagcggtggcgaagggggcggcatggcctattttgtgacctcgctgctggctgagattgtgttgggggtgttggccagtgtggtggtgatgtggttttcgcgcaagcgtgagttccgcgccgacgccggcggggccaaactggccgggcgtgaggccatgattgccgccctggagcgtctgcaaaagagcccggtggagtctcacctgcccgctgaaaccgccgcgtttgccattgccggtaagcggggtggtttaatggcgctgtttgctacccatcatcccctggaagagcgtatcgaggcgctgcgtcacgctcggtcgtga

SEQ ID NO: 1449 - protein, 300 aa, Magnetococcus sp. MC-1
MKRIVLFLITNLAIMAVLMVVLNVIFSLFGLNHGSIGGIVVLALVFGMGGSFISLFMSKWLAKRSTGAVVIERPQDATEQWLLETVRRQSQQAGIGMPEVAIFESAEVNAFATGASRNNALVAVSTGLLHGMRKEEAEAVLAHEVSHIANGDMVTLALIQGVLNTFVILLARLIAGAVDSVLSSQSDEEEEQVSGGEGGGMAYFVTSLLAEIVLGVLASVVVMWFSRKREFRADAGGAKLAGREAMIAALERLQKSPVESHLPAETAAFAIAGKRGGLMALFATHHPLEERIEALRHARS

SEQ ID NO: 1450 - DNA, 942 bp, Mesorhizobium sp. BNC1
  CDS (1)..(942): transl_table=11
atgaatatgattcgcacggcaatgcttctggcgttcatgacggcgctgttcatggccgtcggctatctcatcggcggcagcggcggaatgatgatcgcgctggtcatcgccgcggccatgaacctgttcagctactggaatgcggacaagatggtgctgaggatgcaccatgctgtcgaggtggacgaacgcagcgcaccggaatactaccgcatcgtaagcgatcttgcgcaaagagcaggattgccgatgccgcgcgtctacgtcatcgacaatccgcagccgaacgcttttgcaaccgggcgcaatcctcagaacgcagctgttgccgcgaccaccggcctgcttcatagcctgacccctgaggaagtggcgggagttatggctcatgagttggcgcacgtacagaaccgcgacaccttgaccatgaccattaccgccacgctggccggcgcgatttcaatgcttggcaactttgccttctttttcggcggcaaccgtgacaacaacaatcctttcggctttatcggcatccttgtcgcgatgatcgtcgcgccgctggcggctatggttgtgcaaatggcgatcagccgcacgcgcgaatacgccgcggatcgccgaggtgcggaaatctgcggtcagccgctctggcttgcctctgcgctggccaagatctcccgcgccgcgcatcgcgtcgtcaatgtcgatgccgaacgcaatccggcaacggcgcatcttttcatcattaacccgctatcgggtcagcgcatggataatctcttctcaacgcatcccaatacggaaaaccgcatcgccgcgcttcaggccatggcgggcgaattcggcaatgcaccgcctgcttctctgcgagaggatgagcccggcgccgacgggccttggggccgctccgcaagtcgtgcccgcaagggcccctggtcgtga

SEQ ID NO: 1451 - protein, 313 aa, Mesorhizobium sp. BNC1
MNMIRTAMLLAFMTALFMAVGYLIGGSGGMMIALVIAAAMNLFSYWNADKMVLRMHHAVEVDERSAPEYYRIVSDLAQRAGLPMPRVYVIDNPQPNAFATGRNPQNAAVAATTGLLHSLTPEEVAGVMAHELAHVQNRDTLTMTITATLAGAISMLGNFAFFFGGNRDNNNPFGFIGILVAMIVAPLAAMVVQMAISRTREYAADRRGAEICGQPLWLASALAKISRAAHRVVNVDAERNPATAHLFIINPLSGQRMDNLFSTHPNTENRIAALQAMAGEFGNAPPASLREDEPGADGPWGRSASRARKGPWS

SEQ ID NO: 1452 - DNA, 879 bp, Paracoccus denitrificans PD1222
  CDS (1)..(879): transl_table=11
atgaccgggaacctgcgcaccttcatcctgatggccgccctgaccgcactggtcatgggcatgggcgggctgatcggcggccggggcggagcggtgatcgcactggcgatcgccggggcgggcaatctcttcgcctggtggaacagcgacaagatggtcctgcgccagcagggcgcgcatctggtcacccgccagcaggcgccggaactggtcgacatggtggcggcgctggcgcagcgcgcgaacctgccgatgcccaaggtctatgtgctggaaaccgaacagcccaacgccttcgccaccggccgcaacccggaaaacgccgccgtcgcggtgacgcagggcatcatgcgggtgctgaaccgcgacgagctggccggcgtgatcgcgcatgagctggcgcatatcaagcatcgcgacacgctgaccatgaccgtcaccgccaccatggccggcgccatcgccatgctgggcaacatgctgatgttttcgtccatgttcggcgggcgcgacgacaatcgcggcagcgggctggcggcgatcctcgccatgatcttcgcgcccatggcggcggggctggtgcagatggcgatctcgcgcacccgcgaatacgaggccgaccgcatgggcgccgagatctgcggccggccgatggcgctggccggcgcgctggccaagatctcgcgcgcggcaggccaggttgtgaacatcccggccgaaaggaaccccgcctcggccagcatgttcatcgtgaacccgctgcacgcgctgcgcatggaccgccttttcgccacccacccgccgaccgaagagcgcatcgcccggctgcaggccatggcctcgggcgccccggcctcgggcccctggggcgcgcgatga

SEQ ID NO: 1453 - protein, 292 aa, Paracoccus denitrificans PD1222
MTGNLRTFILMAALTALVMGMGGLIGGRGGAVIALAIAGAGNLFAWWNSDKMVLRQQGAHLVTRQQAPELVDMVAALAQRANLPMPKVYVLETEQPNAFATGRNPENAAVAVTQGIMRVLNRDELAGVIAHELAHIKHRDTLTMTVTATMAGAIAMLGNMLMFSSMFGGRDDNRGSGLAAILAMIFAPMAAGLVQMAISRTREYEADRMGAEICGRPMALAGALAKISRAAGQVVNIPAERNPASASMFIVNPLHALRMDRLFATHPPTEERIARLQAMASGAPASGPWGAR

SEQ ID NO: 1454 - DNA, 864 bp, Shewanella frigidimarina NCIMB 400
  CDS (1)..(864): transl_table=11
atgaagcgtatatttttgttgattgcaaccaactttgccatcttactggttgcctcaattgtaatgtctattcttggggttaatacctcaacgatgggtggactgttagtatttgctgccatttttggttttggtggctcgtttatcagtttagccatttcaaaatggatggctaagaaaaccatgggttgtgaagttatcactcaaccacgtgacagtatggaacgttggttagtcgaaacggttgcacgccaagctgaaaagtctggtattaagatgccagaagtggctatataccagtcgccagaaatgaacgcatttgcaaccggtccaagtaaaaataatgcccttgttgctgtgagttctggtttgctttacggcatgacccaagatgaaattgaaggcgtacttgcccatgaagtgagccacgtggcaaacggtgacatggtgacattaaccttaatccaaggtgtggtgaatacctttgttatttttgctgcacgcgttgttgctggtattattaacaattttgtttccagtaatgatgaagaaggtgaaggcctaggtatgttcgcgtacatggccgtagtatttgtgcttgatatgttatttggtattttggcatcaatgatagtggcttacttttcacgtattcgtgagtttaaagctgatgaaggcgcggcacgtttagcaggcaaaaataaaatgattgccgcattagaacgattacgtcaaggccctgaatccggtgcaatgccagcgcaaatgtcagcctttggtattaatggtaaacgttcaattgctgagttaatgatgagccatccgccactagagaagcgcatcgctgcactaaaaaatagctag

SEQ ID NO: 1455 - protein, 287 aa, Shewanella frigidimarina NCIMB 400
MKRIFLLIATNFAILLVASIVMSILGVNTSTMGGLLVFAAIFGFGGSFISLAISKWMAKKTMGCEVITQPRDSMERWLVETVARQAEKSGIKMPEVAIYQSPEMNAFATGPSKNNALVAVSSGLLYGMTQDEIEGVLAHEVSHVANGDMVTLTLIQGVVNTFVIFAARVVAGIINNFVSSNDEEGEGLGMFAYMAVVFVLDMLFGILASMIVAYFSRIREFKADEGAARLAGKNKMIAALERLRQGPESGAMPAQMSAFGINGKRSIAELMMSHPPLEKRIAALKNS

SEQ ID NO: 1456 - DNA, 870 bp, Xylella fastidiosa Dixon
  CDS (1)..(870): transl_table=11
atgttgactcgtattgtcttatttgccatcaccaatcttgcagtattgattttagctagcatcgtgatgtcgttgctgggtgtcaatccgacacaaatgagtgggctgttggttatggctttaattttgggcttcggtggttcgcttatctcgctattgatgtctaaagccatcgctaagcatacgactggtgcctatgtgattgagcaacccaggaatccaagtcagcgctggttactagacactgtaaggcggcaagccgagattgttggcatcggcatgcctgaggtagctatctatgagggacctgagatcaatgcttttgcaactggtgctgatcgcaacaatgcgctggtggcagtatctaccggcttgttgcagaacatgagtcaggatgaggccgaggcagtgttggggcatgagatcgcacatgttgccaacggtgacatggtgactatggcgttgctgcagggtgtgcttaatacatttgtgatcgtactagcgcgggtcgttggagggtttattgacagtctgctttccggaaatcgtggtagtggtcgtggtgttgcttactacgggattgtattggtattggaattattgtttggtctttttgcaacgataattaccatgtggttttcgcgtcgtcgtgagtttcgtgctgatgagggcggtgcatacttggccggccgcaataaaatgattgctgcattagagcggcttgggattaaccatggtcaaagtacgttaccgacgcaggtgcaagcttttggtatttatggcggtatcggtgaagggctgcgtaagcttttcttgagtcatccgcctttgagtgagcgtattgctgcgcttcgtatggctagagagtaa

SEQ ID NO: 1457 - protein, 289 aa, Xylella fastidiosa Dixon
MLTRIVLFAITNLAVLILASIVMSLLGVNPTQMSGLLVMALILGFGGSLISLLMSKAIAKHTTGAYVIEQPRNPSQRWLLDTVRRQAEIVGIGMPEVAIYEGPEINAFATGADRNNALVAVSTGLLQNMSQDEAEAVLGHEIAHVANGDMVTMALLQGVLNTFVIVLARVVGGFIDSLLSGNRGSGRGVAYYGIVLVLELLFGLFATIITMWFSRRREFRADEGGAYLAGRNKMIAALERLGINHGQSTLPTQVQAFGIYGGIGEGLRKLFLSHPPLSERIAALRMARE

SEQ ID NO: 1458 - DNA, 876 bp, Prosthecochloris vibrioformis DSM 265
  CDS (1)..(876): transl_table=11
atgaaacgcgtatttcttttcctcataaccaaccttgctgtgatactggtgctgtccttcagcgcccggcttctcggcgtagaccggtttctgacttcgaatggactggatatgggcatgctgctggcgtttgctgccctcatcggcttcggcggctcgttcatatcgctgttgatgtcgaaaaccatggcaaaatggagcaccggtgcccaggttatcctgcgcccgtccaacgaggaagagtcatggctgctgaataccgtccgtcagctttccaaaaaagctgaccttgcaatgcctgaagtagccatctacgagggtgctcccaatgcgttcgcgaccggaccgagccgttcgaagtcgcttgttgccgtttcgagcggtcttctccgcagcatggaccgcaaacaggtggaagcggtactggctcatgaggtggcccatatccagaacggcgacatggtcaccctcaccctcatccagggcgtggtcaatacctttgtgatttttctggcgcgcgtttttgcctacgccctcgacagcttcctcaggagggacgaggatgagtcgggcagtccgggcatcggctactggatcagcagcattgcctttgaaatcgtcttcggcatcctggcaagcatcgttgtcatgtacttctcgcgcaaacgtgaattccgggccgatgccggtgccgcagccctgatcggcgaccgccgcccgatgattgaggcactccgtgcactcgggagccttgaggccggcaaactgcctaaagagatggcggcaagcggcattgccggtggtggcatgatggcgctcttcagcagccacccccctcttgaatcccggatcgcagctcttgaatcagcacgctga

SEQ ID NO: 1459 - protein, 291 aa, Prosthecochloris vibrioformis DSM 265
MKRVFLFLITNLAVILVLSFSARLLGVDRFLTSNGLDMGMLLAFAALIGFGGSFISLLMSKTMAKWSTGAQVILRPSNEEESWLLNTVRQLSKKADLAMPEVAIYEGAPNAFATGPSRSKSLVAVSSGLLRSMDRKQVEAVLAHEVAHIQNGDMVTLTLIQGVVNTFVIFLARVFAYALDSFLRRDEDESGSPGIGYWISSIAFEIVFGILASIVVMYFSRKREFRADAGAAALIGDRRPMIEALRALGSLEAGKLPKEMAASGIAGGGMMALFSSHPPLESRIAALESAR

SEQ ID NO: 1460 - DNA, 849 bp, Syntrophobacter fumaroxidans MPOB
  CDS (1)..(849): transl_table=11
atgggaagcaggtttcgcacgacagttctcctggcggcactcaccgcgttgatcatatggatcgggggtgcggtcggaggttctcacggcatgatgatagccttcgttttggcgctcgtcatgaacgtgggcagttattggttctcggacaagatcgttttggccatgtaccgggcgcagccgttgagtgaggccgacgccccgcagatttaccggattgtcagagagctctccgcgtcggccaacctgccgatgccgagggtctacctgattccggaatccgcgccgaacgctttcgcgaccggcagaaacccggaaaatgcagtgattgctgtgactgaaggcctgtggcgcattctcaccccggatgaaattcgaggggtgctcgcacacgaactggctcatgtgaaaaatcgcgacatcctggtgagctcaatcgcggcgaccctggccggtgtggtcatgattctcgccaggatggcgcagtggggagccttgttcggcggggggcgcagcagcagtgacgaagacagcggcggagggatgctcgggctggtggttactgcgatcctggcacccattgcggccatgctgatacagctcgccatttcgaggtcgcgcgaatatctcgccgacgagaccggggccgccttctcgcacaacccggaatcccttgcgcgggcgctggaaaaactggccatggcctcgcaccagaaccccatggaggacgccagcccgtccacggcgcatctcttcatcgtgaatcctctttccggacggtcactcgccaacctcttcagcactcatccccccatcgaagagcgcatacggcgactgcgctccatgtga

SEQ ID NO: 1461 - protein, 282 aa, Syntrophobacter fumaroxidans MPOB
MGSRFRTTVLLAALTALIIWIGGAVGGSHGMMIAFVLALVMNVGSYWFSDKIVLAMYRAQPLSEADAPQIYRIVRELSASANLPMPRVYLIPESAPNAFATGRNPENAVIAVTEGLWRILTPDEIRGVLAHELAHVKNRDILVSSIAATLAGVVMILARMAQWGALFGGGRSSSDEDSGGGMLGLVVTAILAPIAAMLIQLAISRSREYLADETGAAFSHNPESLARALEKLAMASHQNPMEDASPSTAHLFIVNPLSGRSLANLFSTHPPIEERIRRLRSM

SEQ ID NO: 1462 - DNA, 879 bp, Nitrosomonas eutropha C71
  CDS (1)..(879): transl_table=11
atgaaacggatttttctttttattgtaacgaacttggccatactggtaatgctgagtataaccctgcgtttgctcggtgttgaccgcatactggatgctgaaggcagtggattaaattttaatgctctactggttttatcggctgtaataggatttggcggttcgctcatttcgcttgccatgtccaaatggagtgccaagcacatgactggtgccacggtcattgaaattccttcaaattccaccgaaggttggctggtagaaactgtccgccggcaggccaaagcagctggcgtgggtatgcctgaagtggccatttacgattcacccgatattaatgcattcgcaacaggaatgaatagaaacaatgcgttggtagcagtcagctcaggattgctgcaaaaaatgagtcgtgatgaggctgaagcggtactggctcatgaagtcagtcatattgccaatggcgacatggtaacgctggcattgattcagggcgtggtgaatacatttgtgattttcctctcccgtatcatcggccatgtaattgatcgcgctgtcttcagaacggaagaaggacatggccccgcctatttcgttaccagccttgtcgcacaactggtactgggcatactcgccacgataattgtgatgtggttcagtcgtcagcgtgaattccgcgcagatgccgggagtgcacagctttccggaagaaataaaatggttgccgcactgcggcgattgcaacaggaatatgagccatctcatttgccagataagatcgctgcttttggaatctctggacaaaagagccagattgggcgtctgtttatgtcacacccccctctggaagagcgcatccaggcattacaatctgcctga

SEQ ID NO: 1463 - protein, 292 aa, Nitrosomonas eutropha C71
MKRIFLFIVTNLAILVMLSITLRLLGVDRILDAEGSGLNFNALLVLSAVIGFGGSLISLAMSKWSAKHMTGATVIEIPSNSTEGWLVETVRRQAKAAGVGMPEVAIYDSPDINAFATGMNRNNALVAVSSGLLQKMSRDEAEAVLAHEVSHIANGDMVTLALIQGVVNTFVIFLSRIIGHVIDRAVFRTEEGHGPAYFVTSLVAQLVLGILATIIVMWFSRQREFRADAGSAQLSGRNKMVAALRRLQQEYEPSHLPDKIAAFGISGQKSQIGRLFMSHPPLEERIQALQSA

SEQ ID NO: 1464 - DNA, 849 bp, Pelobacter propionicus DSM 2379
  CDS (1)..(849): transl_table=11
atgaacacactgaagacgactttcctgatggcgctgcttacggtcatgatggtcatgctggggggggcgctggggggcaggaacggcatgaccctggcttttgtcatggctgccggtatgaacttcttctcctactggttttcggacaagatggtgctctccatgtatggggcgcatgagatcagcgagcgggacgatccgcgcttctacggcctggtgcgccgcctggcccagcgggccggcctgcccatgcccaaggtgtatgtgatcgattccgatacccccaatgcctttgccacgggtcgtaatcccgagcacgccgcggtggcggccaccagcggcatcctgcgcatcctcagcgaagaggagttggccggggtcatggcccacgaactggcccacgtcaagaaccgcgacatcctgatccagaccattgcagccacctttgccggcgccatcacctacatggcccacatggcccagtggggcgccatgttcggcggccggggcgatgatgacgacggtgggggcatgggtgcgctggtgatggccatcctggcacctctggccgccatgctggtgcagatggccatctcccgctcccgcgagtacggtgccgatgcaggtggagccagcatctgcggtaatccgctctccctggccaatgccctggcaaagctggagatgggcaaccgccagattcccatgcatgccaatgccgccacggcgcacatgttcatcgtaaaccccctgaccggtggtggcctgatgacgctcttctccacccatccccccatgcaggagcgcatcgcgcgtctgcaggagatggcccggatgggccgctcgtga

SEQ ID NO: 1465 - protein, 282 aa, Pelobacter propionicus DSM 2379
MNTLKTTFLMALLTVMMVMLGGALGGRNGMTLAFVMAAGMNFFSYWFSDKMVLSMYGAHEISERDDPRFYGLVRRLAQRAGLPMPKVYVIDSDTPNAFATGRNPEHAAVAATSGILRILSEEELAGVMAHELAHVKNRDILIQTIAATFAGAITYMAHMAQWGAMFGGRGDDDDGGGMGALVMAILAPLAAMLVQMAISRSREYGADAGGASICGNPLSLANALAKLEMGNRQIPMHANAATAHMFIVNPLTGGGLMTLFSTHPPMQERIARLQEMARMGRS

SEQ ID NO: 1466 - DNA, 870 bp, Xylella fastidiosa Ann-1
  CDS (1)..(870): transl_table=11
atgttgactcgtattgtcttatttgccatcactaatcttgcagtattgattttagctagcatcgtgatgtcgttgctgggtgtcaatccgacacaaatgagtgggctgttggttatggctttaatttttggttttggtggttcgcttatctcgctattgatgtctaaagccatcgctaagcatacgactggtgcctatgtgattgagcaacccaggaatccaagtcagcgctggttactagacactgtaaggcggcaagccgagattgttggcatcggcatgcctgaggtagctatctatgagggacctgagatcaatgcttttgcaactggtgctgatcgcaacaatgcgctggtggcagtatctaccggtttgttgcagaacatgagtcaggatgaggccgaggcagtgttggggcatgagatcgcacatgttgccaacggtgacatggtgactatggcgttgctgcagggtgtgcttaatacatttgtcatcgtactagcgcgggtcgttggagggtttattgacagtctgctttccggaaatcgtggtggtggtcgtggtgttgcttactacgggattgtattggtattggaattattgtttggtctttttgcaacgataattaccatgtggttttcgcgtcgtcgtgagtttcgtgctgatgagggcggtgcatacttggccggccgcaataaaatgattgctgcattagagcggcttgggattaaccatggtcaaagtacgttaccgacgcaggtgcaagcttttggtatttatggcggtatcggtgaaggtctgcgtaagcttttcttgagtcatccgcctttgagtgagcgtattgctgcgcttcgtatggctagagagtaa

SEQ ID NO: 1467 - protein, 289 aa, Xylella fastidiosa Ann-1
MLTRIVLFAITNLAVLILASIVMSLLGVNPTQMSGLLVMALIFGFGGSLISLLMSKAIAKHTTGAYVIEQPRNPSQRWLLDTVRRQAEIVGIGMPEVAIYEGPEINAFATGADRNNALVAVSTGLLQNMSQDEAEAVLGHEIAHVANGDMVTMALLQGVLNTFVIVLARVVGGFIDSLLSGNRGGGRGVAYYGIVLVLELLFGLFATIITMWFSRRREFRADEGGAYLAGRNKMIAALERLGINHGQSTLPTQVQAFGIYGGIGEGLRKLFLSHPPLSERIAALRMARE

SEQ ID NO: 1468 - DNA, 858 bp, Burkholderia ambifaria AMMD
  CDS (1)..(858): transl_table=11
atgttcaattgggtcaaaacggcgatgctgatggccgggatcacggccctgttcatcgtgatcggcggcatgatcggcggcacccgcggcatgacgatcgcgctgctgttcgcgctcgccatgaatttcttctcgtactggttctccgacaagatggtgctgcgcatgtacaacgcgcaggaagtcgacgagaacacggcgccgcagttctaccggatggtgcgcgagcttgccacgcgcgcgaacctgccgatgccgcgcgtctacctgatcaacgaggatgcgccgaacgcgttcgccacgggccgcaacccggagcacgcggcggtggccgcgacgacgggcatcctgcgcgtgctgtccgagcgcgagatgcgcggcgtgatggcgcacgagcttgcgcacgtgaagcaccgcgacatcctgatctcgacgatcaccgcgacgatggcaggcgcgatctcggcgctggccaacttcgcgatgttcttcggcggccgcgatgaaaacggccgtccggccaaccccatcgcggggattgcggtcgcgctgctcgcgccgattgccggcgcgctgatccagatggcgatctcgcgggcgcgcgaattcgaggccgatcgcggcggcgcgcagatctccggcgatccgcagtcgctcgccaccgcgctcgacaagatccatcgctatgcggcgggcatcccgttccaggcggccgaagcgcatccggccaccgcgcagatgatgatcatgaacccgctgcacggcggcggcctgcagaacctgttctccacgcacccggcgaccgaggagcgcatcgcgcgcctgatggagatggcgcgcaccggccgcttcgactaa

SEQ ID NO: 1469 - protein, 285 aa, Burkholderia ambifaria AMMD
MFNWVKTAMLMAGITALFIVIGGMIGGTRGMTIALLFALAMNFFSYWFSDKMVLRMYNAQEVDENTAPQFYRMVRELATRANLPMPRVYLINEDAPNAFATGRNPEHAAVAATTGILRVLSEREMRGVMAHELAHVKHRDILISTITATMAGAISALANFAMFFGGRDENGRPANPIAGIAVALLAPIAGALIQMAISRAREFEADRGGAQISGDPQSLATALDKIHRYAAGIPFQAAEAHPATAQMMIMNPLHGGGLQNLFSTHPATEERIARLMEMARTGRFD

SEQ ID NO: 1470 - DNA, 876 bp, Rhodoferax ferrireducens DSM 15236
  CDS (1)..(876): transl_table=11
atgaaacgtattctcttgtttgttttgaccaatgtcgccgtggtcgcggtgctgggcatcgttgccagcttgctgggggtgaaccgttacctgacggcaagcgggcttgacctgggctccttgctcggctttgccttggtcattggttttggcggcgccatcatttcgctgttgatcagcaagccgatggccaaatggaccacgggcgtgcgcatcatcagccagccgcaaaacgtcgacgaggcctggattgtggagaccgtgcgcaaattggccgacacagctggcattggtatgccggaagtgggtatttttgacggtgcgcccaatgccttcgccaccggagcgttcaagaactcggcgctggtggctgtgtccaccggcttgttgcagggtatgacgcgtgaagagattgaggccgtgatcggccacgaagttgcccacgttgccaatggtgacatggtcaccatggccctgattcaaggcgtgatgaacacctttgtggtgttcctgagccgcgtgatcgcctttgccatcgacggcttcttgcgcaaaggcgacgagcgctccagcggccccggcattggctacatgatcaccaccgtcgtgcttgacatcgtgctcggttttgcggccgccatcgtggtggcctggttctcccgtcaccgtgaattccgggccgatgctggcgctgccaagctcatgaatcgcaagcagccgatgatcaacgcgctggcgcggctcggtggcatgacgccgggcgagttgcccaagagcatggcggccatgggcattgcgggtggcattggcaagctgttctcgacccacccgccgattgaagagcgcatcgcggctttgcaaaacgcgccgctgtga

SEQ ID NO: 1471 - protein, 291 aa, Rhodoferax ferrireducens DSM 15236
MKRILLFVLTNVAVVAVLGIVASLLGVNRYLTASGLDLGSLLGFALVIGFGGAIISLLISKPMAKWTTGVRIISQPQNVDEAWIVETVRKLADTAGIGMPEVGIFDGAPNAFATGAFKNSALVAVSTGLLQGMTREEIEAVIGHEVAHVANGDMVTMALIQGVMNTFVVFLSRVIAFAIDGFLRKGDERSSGPGIGYMITTVVLDIVLGFAAAIVVAWFSRHREFRADAGAAKLMNRKQPMINALARLGGMTPGELPKSMAAMGIAGGIGKLFSTHPPIEERIAALQNAPL

SEQ ID NO: 1472 - DNA, 777 bp, Escherichia coli E110019
  CDS (1)..(777)
atgatcatggccttgctgttcggttttggtggttccttcgtttcgcttctgatgtccaaatggatggcattacgatctgttggcggggaagtgatcgagcaaccgcgtaacgaaagggaacgttggctggttaatactgtagcaacccaggctcgtcaggcagggatcgctatgccgcaagtggctatctaccatgcgccggacatcaacgcttttgcaaccggtgcgcgccgtgatgcctctctggttgctgtcagcaccggtttgctgcagaacatgagcccggatgaagccgaggcggtaattgctcacgaaatcagccacatcgccaatggtgatatggtcaccatgacgctgattcagggcgtggtgaacaccttcgttatctttatttcccgtattctggcgcagcttgccgcgggttttatgggcggaaatcgtgatgaaggtgaagagagcaacggcaacccgctgatctactttgcggttgcaacggttctggaactggtgtttggtattctggcgagcattatcaccatgtggttctcgcgtcatcgtgaattccatgctgatgccggttcggcaaaactggttggtcgcgagaaaatgattgccgcgctgcagcgcctgaaaaccagctatgaaccgcaagaagcaaccagcatgatggctttctgcattaacggtaagtcgaaatcgctcagtgagttgttcatgactcacccgccgctggataaacgaattgaagctctgcgtacgggtgaatacctgaagtaa

SEQ ID NO: 1473 - protein, 258 aa, Escherichia coli E110019
MIMALLFGFGGSFVSLLMSKWMALRSVGGEVIEQPRNERERWLVNTVATQARQAGIAMPQVAIYHAPDINAFATGARRDASLVAVSTGLLQNMSPDEAEAVIAHEISHIANGDMVTMTLIQGVVNTFVIFISRILAQLAAGFMGGNRDEGEESNGNPLIYFAVATVLELVFGILASIITMWFSRHREFHADAGSAKLVGREKMIAALQRLKTSYEPQEATSMMAFCINGKSKSLSELFMTHPPLDKRIEALRTGEYLK

SEQ ID NO: 1474 - DNA, 858 bp, Vibrio sp. Ex25
  CDS (1)..(858)
atgttattcctagcaactaacctagctgtcgtgctagtgcttagtgttgttctgaatattgtttacgctaccactggaatgcaacctggcagtctttctggtttgctagttatggccgccatatttggttttggtggtgcacttatttcgttgatgatgtcaaagggcatggcactgcgctcggttggcggtatggtcattgaaagtccgcgtaacgaaactgagcattggttagtcgaaactgtgggtcgtcaagctcagcaagcgggtattggtatgccaacggtggctatttatgactcaccagatatcaatgcattcgcgacgggggcaaagcgagatgactctcttgtcgcggtttccactggccttttacacaatatgactcgtgatgaagcagaagcggtactggcccacgaagtgagccatattgcaaatggtgacatggtcacgatgacattgatgcaaggcgttgtgaacacgtttgttatcttcctatcccgttttatcgccaatattgtggcatcgaacgatgatgaagaaggtcaaggtacaaacatgatggtttacttcggtgtatctatggtgcttgagctagtgtttggtttcttggcaagctttattaccatgtggtacagccgtcatcgcgaattccatgccgacgcaggtgctgctcacttagttggtaaagagaaaatgatcgcggcattggaacgtttgaagatgagtcacgaatctcaacttgatggcacaatgatggcattcggtatcaatggcaagcagtcattgactgagctactgatgagccaccctccgctagataaacgtattgcagcgttacgtagtcagcaatactag

SEQ ID NO: 1475 - protein, 285 aa, Vibrio sp. Ex25
MLFLATNLAVVLVLSVVLNIVYATTGMQPGSLSGLLVMAAIFGFGGALISLMMSKGMALRSVGGMVIESPRNETEHWLVETVGRQAQQAGIGMPTVAIYDSPDINAFATGAKRDDSLVAVSTGLLHNMTRDEAEAVLAHEVSHIANGDMVTMTLMQGVVNTFVIFLSRFIANIVASNDDEEGQGTNMMVYFGVSMVLELVFGFLASFITMWYSRHREFHADAGAAHLVGKEKMIAALERLKMSHESQLDGTMMAFGINGKQSLTELLMSHPPLDKRIAALRSQQY

SEQ ID NO: 1476 - DNA, 1890 bp, Vibrio sp. Ex25
  CDS (1)..(1890)
atggatttctttgaccatcaagataccgcgcgtcaacgcactgggcttttggtgttcctgttttccttagcagttgtcaccatcactggtttggtaagcgtattatcgattggtatctattacggagtaacaggcgaacactttgatcaagaaaccgcacttacctacgtcttgttgtgctttgccggtgtattgctggttgttgcgataagttcaatggttcgcttgtccgccctcacctccaatggaggccgaggtgttgctgagagcataggtggcaagctgatttcctcaaacaccttagatgcaaaacatagacaactgctcaacgttgtggaagagatggctattgcatctggcattccggttcctcccgtctatgtgatgcaggaagagcgcggtatcaatgctttcgcagcaggcatgagcattgatgatgccgtcatcggcgtcacacaaggcgcactggatagcttctcgcgagatgaactacaaggtgtcattgctcatgaattcagccatatcttaaacggagatatgcgtttgaatacgcgtcttatcggcgtactgtttggcatcacttgcattgcacattttggacacttggtcttagataacactcatcatacgagtcgcgtatcaagaagttcttccgattccgataaaggctttgcggttatcatgctgattgcgattatctgtttggttctgggctggattggcaccttgtttggctcgatgatcaaagccgcaatctctcgtcaacgtgaatttctcgctgatgccagtgccgttcaatttactcgaaacgatcaaggcattgctggtgcactcaagaaaattggtagtcatatggcgggttcttcattgaatacaaaagcaagcgatgagatgagccatatgatgtttggtcaaagcaaactctccggcttttctggcctatttgctactcaccctccactagaagaacggattcgccgaattgaacctggttgggatggaagtttttctcaaagttcgcatcgtccaacgacaagctttgagaatgataacgttagtggattcacatcagggacatcgacacaaccggagaaaccaaccactgcagaactcagcgaagtaggtcaacaactacttaaccaacttccttccgaacttgtcgacatcgctcgtgaaccatacagtgcgcgctttattgcttttgccttgatatttgatggcagtgaactccagcgagagatgataaaaagtcatatcccaaatgtgtctcaagcacaattattaccatggctagattatgatttgcctcttcacctacgctttccattactcgaactctccatccctgccttgaaatcgctgagtgagggtcagaaaaacagactgtgccaggtgctacgtgaactctctcaaactgatgaccactactcactcgcagaatggtgtgtcatcaacttattggagaaacaactactcgaatcgtatggatgtacaaaacagatccagtctttaaagcaattaaaagagagtgtgttttggctactgcgcgaattggcttgggttagtcactctcaaccggaagacgctcaacgtgcatttagcagcgccctaacctgtttgggctttaatgatgcagagttacaacccgcaaataagaactggggcctaaatcgcgccgctttagagctcctactgcaactcaaaccgaaaagtcgtcgcttgttcgtaaaagcgtgtcgattagcgattaaatcggatggaaaggttaccgttgcggaaggagaactctatagagtaatcgcctgcttcttagaagttccagagccaccactaacagtatcagtcaatacaggacaaaccctaccgagccaaacacaacaagctaactga

SEQ ID NO: 1477 - protein, 629 aa, Vibrio sp. Ex25
MDFFDHQDTARQRTGLLVFLFSLAVVTITGLVSVLSIGIYYGVTGEHFDQETALTYVLLCFAGVLLVVAISSMVRLSALTSNGGRGVAESIGGKLISSNTLDAKHRQLLNVVEEMAIASGIPVPPVYVMQEERGINAFAAGMSIDDAVIGVTQGALDSFSRDELQGVIAHEFSHILNGDMRLNTRLIGVLFGITCIAHFGHLVLDNTHHTSRVSRSSSDSDKGFAVIMLIAIICLVLGWIGTLFGSMIKAAISRQREFLADASAVQFTRNDQGIAGALKKIGSHMAGSSLNTKASDEMSHMMFGQSKLSGFSGLFATHPPLEERIRRIEPGWDGSFSQSSHRPTTSFENDNVSGFTSGTSTQPEKPTTAELSEVGQQLLNQLPSELVDIAREPYSARFIAFALIFDGSELQREMIKSHIPNVSQAQLLPWLDYDLPLHLRFPLLELSIPALKSLSEGQKNRLCQVLRELSQTDDHYSLAEWCVINLLEKQLLESYGCTKQIQSLKQLKESVFWLLRELAWVSHSQPEDAQRAFSSALTCLGFNDAELQPANKNWGLNRAALELLLQLKPKSRRLFVKACRLAIKSDGKVTVAEGELYRVIACFLEVPEPPLTVSVNTGQTLPSQTQQAN

SEQ ID NO: 1478 - DNA, 888 bp, Chloroflexus aurantiacus J-10-fl
  CDS (1)..(888): transl_table=11
atgctggtaaatagtttgaagaccgttggtttgcttggactgctcaccggtctcttcatcatgattggtggtgcaattggtggtcagattgggatgatcatcgcgctcgttctggctgtcgtgatgaatatgggtgcctggtggttctccgacaaactggcactcaagatgagcggtgcgcaggaagtgacacccgatcaggcacctgagcttcatgcgatggtggaagagctatcacggcgggctggtattcccaaaccgcgcgtgtacatcatcgaaactgacgctcccaacgcctttgctaccggtcgtgatccggcgcacggcgcagtagccgtaaccaccgggattgcacgcctgctcacacgcgaggagctggccggcgtcatcgcacacgagctggcacacatcaagcatcgtgacaccctgatctcatccatcgcagccactattgccggtgctatcggtatgctggccgatatggtgatgtggagcatgatcttcgccggtttcggtggtaatgatgaagaagaaggtggtggcgttgccggactggttggtggcatcctgacggccatgctggcaccaattatggcccttatcattcagatggcaatttcgcgttcgcgtgagtacatggcagatgccggcggcgcgcagattctcggcaatccattgccgttagccagtgcccttgagaagctggaatgggctgctgggcggatgccaatggatgaagcacgtccggcgacggcacacatgtacattgtcaatccggtgctgggtggcctggccagcctcttccgcacccaccccgaaacccacaagcgtatctcgcgcctgcgtgcgatggccaatcgcagtggtaacacagcgatggcggcgtaa

SEQ ID NO: 1479 - protein, 295 aa, Chloroflexus aurantiacus J-10-fl
MLVNSLKTVGLLGLLTGLFIMIGGAIGGQIGMIIALVLAVVMNMGAWWFSDKLALKMSGAQEVTPDQAPELHAMVEELSRRAGIPKPRVYIIETDAPNAFATGRDPAHGAVAVTTGIARLLTREELAGVIAHELAHIKHRDTLISSIAATIAGAIGMLADMVMWSMIFAGFGGNDEEEGGGVAGLVGGILTAMLAPIMALIIQMAISRSREYMADAGGAQILGNPLPLASALEKLEWAAGRMPMDEARPATAHMYIVNPVLGGLASLFRTHPETHKRISRLRAMANRSGNTAMAA

SEQ ID NO: 1480 - DNA, 873 bp, Pseudoalteromonas atlantica T6c
  CDS (1)..(873): transl_table=11
atgtttcgaatactaatgtttttagccactaacattgccgttatggtattgattagtttggtctttagcctgtttggttttcaaggtttgttagcacaaaacggggttgatttagacttgcaggctctgcttgtttactcggccgttattggctttagtggctcgatcatctccttgttaatctcaaagtttatggccaagcgcagtatgaatgtgcatgtgcttgagcatcctgaaaatgacactgaacgttggttactacgcacggttgagcgccaagcagaacaagcgaatatcggcatgcctgaggtgggtatattcgtgcacgcaagccccaatgcctttgccactgggtggaacaaaaacaatgcattagtggcagtcagtaccggcttacttgaaaacatgacccaaagcgaagttgaagctgtgctagctcacgaaattagccatgttgccaacggcgatatggtaaccatgaccctaatccagggcgtgctgaatacctttgtggtgtttttgtcgcgggttatcggccatgtggtagaccgagtcgtgtttaaagtcgaacggggtcacgggccagcgttttggatagtgtcgattatcagccaagtaatactcggcatcttagcatcgatgatcgtaatgtggttttcacgttaccgtgaatttagagccgatgctggcggtgcaagtatcgcggggcgcaacaatatgattgctgcacttaagcgtttaaagcaaaaccaagatgcgccgcccatgccagaggaaatggctgcgtttgccattagtgcaggcaaggtgcaaaagttgttttccagccaccctccgctggacaaacgcatagaggcactgcagaaaggttag

SEQ ID NO: 1481 - protein, 290 aa, Pseudoalteromonas atlantica T6c
MFRILMFLATNIAVMVLISLVFSLFGFQGLLAQNGVDLDLQALLVYSAVIGFSGSIISLLISKFMAKRSMNVHVLEHPENDTERWLLRTVERQAEQANIGMPEVGIFVHASPNAFATGWNKNNALVAVSTGLLENMTQSEVEAVLAHEISHVANGDMVTMTLIQGVLNTFVVFLSRVIGHVVDRVVFKVERGHGPAFWIVSIISQVILGILASMIVMWFSRYREFRADAGGASIAGRNNMIAALKRLKQNQDAPPMPEEMAAFAISAGKVQKLFSSHPPLDKRIEALQKG

SEQ ID NO: 1482 - DNA, 900 bp, Thermoanaerobacter ethanolicus ATCC 33223
  CDS (1)..(900): transl_table=11
atgtctagaaaaactctatatgaacttcaagcagaaaatgtaaggaaaacttatctatttatagttacattttctcttatactttttgctataggttatttttttgtatggtatttcaactggggacttacaggaatagttcttttagcaattttcattgtgctgtataattggatagcgtatgaacagtcagataaaatagctctcgcgtcggtgggagccattccggcaaatccagaggagtattatgttcttcataatattgtggaagaagtcgctctcgcagcaggtataccaaagcccaatgtttatataatggaagaatcccaacctaatgcttttgctacgggcaaagacccaaagcatgcttctgtttgtgtcacaaccggtctacttcaaatgatgaatagagaagagctccaaggagtaatagctcatgaaatatctcacatcagaaatagagatatacttttaatgacggttgttgcagttgttgcaggacttataattttactcagggatgtaatgctaagaagtatgtggtggggaatgggagaaagcagaagaagagataaaaatgacaatggagctataattctcctcattattgggcttattttttctattattgctcctcttattgtattaattataaggtctgcaatttcaagacaaagagaatatttggcagatgcaactggtgcctttattgtaagagatccctatggtcttgcatcagctcttgaaaaaataggtagttatactagacccatgagagttacctctgacgcaacagctcatttgtttatatcaaatccttttggaagagcggaaaagttatttgcaactcatccaccgattgaagagagaattaagaggttgaagagccttacaatgtaa

SEQ ID NO: 1483 - protein, 299 aa, Thermoanaerobacter ethanolicus ATCC 33223
MSRKTLYELQAENVRKTYLFIVTFSLILFAIGYFFVWYFNWGLTGIVLLAIFIVLYNWIAYEQSDKIALASVGAIPANPEEYYVLHNIVEEVALAAGIPKPNVYIMEESQPNAFATGKDPKHASVCVTTGLLQMMNREELQGVIAHEISHIRNRDILLMTVVAVVAGLIILLRDVMLRSMWWGMGESRRRDKNDNGAIILLIIGLIFSIIAPLIVLIIRSAISRQREYLADATGAFIVRDPYGLASALEKIGSYTRPMRVTSDATAHLFISNPFGRAEKLFATHPPIEERIKRLKSLTM

SEQ ID NO: 1484 - DNA, 891 bp, Streptococcus agalactiae H36B
  CDS (1)..(891): transl_table=11
ttgctgtatcaacaaattgcaagtaataagagaaaaacggttgtcttgttaattgtcttcttcggtcttttagcagctattggagcagctgtaggttatttggtattaggcagctaccaatttgggcttgttctagctctaattattggggttatctatgcagtaagtatgatttttcaatcaactaatgttgttatgtcaatgaacaatgcgcgtgaagttacagaagatgaggcgccaaattattttcatattgttgaagatatggcaatggtagctcagatacctatgccacgcgttttcattgttgaagatgactccctaaatgcctttgccacaggctctaagccagaaaatgctgctgttgcagcaacaacgggcctattagctgttatgaaccgcgaagagctagagggtgttattggacatgaggttagtcatattcgtaattatgatatccgtatttcaaccattgcagtagctttagcgagtgctgtaactctaatatcaagcattggtagccgtatgttattttacggcggaggtcgtaggcgtgatgatgacagagaagatggtggaaacatcttggttttgattttctctattttatcactaatccttgcaccattagctgctagtttagttcaattagctatttcaagacagcgcgaatacttagcagacgctagttctgttgagttaacaagaaatccacaagggatgatctctgctttagaaaaacttgatcgttctgaacctatggggcatccagtagatgatgctagtgcggctctctatatcaatgacccaacgagaaaagaagggttaaagtctttattttatacgcatccaccaattgcagatcgtattgagcgtttgcgtcatatgtag

SEQ ID NO: 1485 - protein, 296 aa, Streptococcus agalactiae H36B
MLYQQIASNKRKTVVLLIVFFGLLAAIGAAVGYLVLGSYQFGLVLALIIGVIYAVSMIFQSTNVVMSMNNAREVTEDEAPNYFHIVEDMAMVAQIPMPRVFIVEDDSLNAFATGSKPENAAVAATTGLLAVMNREELEGVIGHEVSHIRNYDIRISTIAVALASAVTLISSIGSRMLFYGGGRRRDDDREDGGNILVLIFSILSLILAPLAASLVQLAISRQREYLADASSVELTRNPQGMISALEKLDRSEPMGHPVDDASAALYINDPTRKEGLKSLFYTHPPIADRIERLRHM

SEQ ID NO: 1486 - DNA, 930 bp, Rhodopseudomonas palustris BisA53
  CDS (1)..(930): transl_table=11
atgagctatttcaagaccgcaatcctgctggccgggctgaccgctttgttcatgggcgtcggctatctgatcggcggtgcttccggcgccatgatcgcgctggtggtcgcggctgccaccaacatctttgcctactggaattcggacaagatggtgctgtcgatgtacggcgcccagcaggtcgatgagcgctccgcgcccgatctggtgcggatggtggccggtctggccggcaacgcgcaattgccgatgcccaaagtgttcatcatggacaatccgcagcccaacgcgttcgccaccggccgcaatccggagaacgccgcggtcgcggtcaccaccggcctgatgcagagcctcagccgcgaagaactcgccggcgtgatcgcgcatgagctggcgcatgtgaagaaccacgacacgctgttgatgaccgtcaccgcgaccattgccggtgcggtgtcgatgctggcgcagttcggcatgtttttcggcggcaaccgcgacaacaacaatggcgggctcggcgtcatcggctcgatcgcgatgatgatcctggccccgatcgccgcgatgctggtgcagatggcgatcagccgcagccgcgaatacgccgccgacgatctcggcgcgcggatctgcggccagccgacttggctcgcctcggccttggccaagatcgagaacgccgcgcatcaggtgccgaactacgacgccgaacgggcacctgccaccgcgcatatgttcatcatcaatcccttgaccgggcagggcatggacaatctgttcgccacccatccctcgacgcagaaccgcatcgcggcgctgcagcagctcgccaccacgctcggcatccgcgccccgcaacgcgccgccgctcccgcgcgcggcctgtggggcggcgcaccgcgcagccgcggtccgtggggctga

SEQ ID NO: 1487 - protein, 309 aa, Rhodopseudomonas palustris BisA53
MSYFKTAILLAGLTALFMGVGYLIGGASGAMIALVVAAATNIFAYWNSDKMVLSMYGAQQVDERSAPDLVRMVAGLAGNAQLPMPKVFIMDNPQPNAFATGRNPENAAVAVTTGLMQSLSREELAGVIAHELAHVKNHDTLLMTVTATIAGAVSMLAQFGMFFGGNRDNNNGGLGVIGSIAMMILAPIAAMLVQMAISRSREYAADDLGARICGQPTWLASALAKIENAAHQVPNYDAERAPATAHMFIINPLTGQGMDNLFATHPSTQNRIAALQQLATTLGIRAPQRAAAPARGLWGGAPRSRGPWG

SEQ ID NO: 1488 - DNA, 864 bp, Shewanella putrefaciens CN-32
  CDS (1)..(864): transl_table=11
atgaagcgtatttttttattaattgcgactaacctagccgtattgctagtagcctcaattgtgatgtccattttgggcgttaacacgtctactatgggtggattattggtgtttgctgcaatttttggatttggcggggcttttatcagcttagcgatttcaaaatggatggcgaaaaaagccatgggttgtgaagtgattacaatgccccgcgatggcactgaacgttggttagttgagacggttgcccgccaagcacagcaagctggaattaaaatgccagaagtggcgatttatcagtctccagaaatgaatgcatttgccacaggtccaagcaaagacaattcattagtcgccgtgagtactggtctactgtatggcatgagccaagatgaagtagaagcggtgttagcccatgaagtgagccatgttgccaatggtgatatggtgactttgacactgatccaaggggtagtgaacacctttgttatcttcgctgctcgtgttgttgcagggattattaataatgttgtctccagtaatgatgaagaaggcgaaggcttaggtatgtttgcctatatggccgtagtatttgtgttagatatgttgttcggtattttggcttcaatcattgttgcttatttctcacgtattcgcgaataccgtgcagatgaaggtgcagcgcgtttagcaggcaaacataagatgattgcggctttagagcgtttacgccaaggcccagagagcactgcaatgcctgcgcaaatgtcagcatttggtattaatggtaagcgttcaatggctgagatgatgatgagtcatccaccattagagaagcgtattgcggctttacaagcccgctaa

SEQ ID NO: 1489 - protein, 287 aa, Shewanella putrefaciens CN-32
MKRIFLLIATNLAVLLVASIVMSILGVNTSTMGGLLVFAAIFGFGGAFISLAISKWMAKKAMGCEVITMPRDGTERWLVETVARQAQQAGIKMPEVAIYQSPEMNAFATGPSKDNSLVAVSTGLLYGMSQDEVEAVLAHEVSHVANGDMVTLTLIQGVVNTFVIFAARVVAGIINNVVSSNDEEGEGLGMFAYMAVVFVLDMLFGILASIIVAYFSRIREYRADEGAARLAGKHKMIAALERLRQGPESTAMPAQMSAFGINGKRSMAEMMMSHPPLEKRIAALQAR

SEQ ID NO: 1490 - DNA, 882 bp, Marinobacter aquaeolei VT8
  CDS (1)..(882): transl_table=11
atgcgtattctgttgtttctggccaccaacctggccgttattctggttgccagttttaccctgcgactgctgggggtcgatagttatctggcacaacaaggcatcgactacggctcgctactggcgtttgcggcggtgttcggcttcgctggtgcgtttatctcgctgtttctctccaagcccatggcgaagtggagcaccaaagcccgggtgatcgactcgcctcgcacgccggcggagcgctggctggttgaaaccgtcgcggagctggcaaagaaagccggcatcggcatgcccgaagtggcgatcttccctgctcagcaatccaatgcctttgccaccggatggaataaaaacgactctctggtggcggtcagcgaggggctgttaagccgcttcgacaaggaccagatccgggccgtactgggccatgagattggccatgtggccaatggcgacatggtgactctgacgctgatccagggcgtggtaaacacctttgttatcttcgcatcgcgggtgatcggctcgttcgtggaccgggtcatcttcaagaatgagaacggccatggtatcggcttttttgtcgtgagcatcgtggcagaaatcgtgctcggcatcctggccagcaccatcgtattctggttctcccgtcgccgggaataccgtgccgacattgccggtgcccaactggcagggcgaggcgccatgatcagcgccctgtcgcacctgaaaaaggaaagcgaggttccggatcagatgccggacaccctgcaggcattcggtatcaaccggggcgcccgcgaaggtctggcagcaatgttcatgacccacccgccgctggaggaccgaattgcagcgctacagaacgccaaactgtaa

SEQ ID NO: 1491 - protein, 293 aa, Marinobacter aquaeolei VT8
MRILLFLATNLAVILVASFTLRLLGVDSYLAQQGIDYGSLLAFAAVFGFAGAFISLFLSKPMAKWSTKARVIDSPRTPAERWLVETVAELAKKAGIGMPEVAIFPAQQSNAFATGWNKNDSLVAVSEGLLSRFDKDQIRAVLGHEIGHVANGDMVTLTLIQGVVNTFVIFASRVIGSFVDRVIFKNENGHGIGFFVVSIVAEIVLGILASTIVFWFSRRREYRADIAGAQLAGRGAMISALSHLKKESEVPDQMPDTLQAFGINRGAREGLAAMFMTHPPLEDRIAALQNAKL

SEQ ID NO: 1492 - DNA, 882 bp, Yersinia bercovieri ATCC 43970
  CDS (1)..(882)
atgatgcgtatcgctctgttcctactcaccaacttagccgtcatgttggtgttcgggttggtgctaagcttgacaggcattcagtccagcagtgtgcaggggctgatgatcatggctggcctatttggtttcggcggcgcatttgtttcgttgctgatgtccaaatggatggctttgcgctcagtgggtggtgaagtgattgaacagccacgtaatgagacggaacgctggttgctggagaccgtgcgtcggcagtctcagcaggtgggtattgccatgccacaagtcgctatttatcaggcaccggatattaacgcctttgccaccggcgcacgtcgtgatgcctcgctggtagccgtcagtaccgggctgttgcagaatatgagccgtgatgaggctgaagcggttattgcccatgaaattagtcatgtggcgaatggtgatatggtcaccatgaccttgattcaagggattgtgaatacattcgtgatcttcatttcacgtctgattgcgcaagttgccgccggcttcttatctggcgatcgtgataatgaagggagcagcgccggtaacccgatggtctactttgctgtttccatggtgttggagttggtgtttggtattctggcgagcattatcaccatgtggttctcacgtcatcgtgaattccacgcggatgcaggttccgcgagattagtggggcgtgagaagatgattgccgcactgcaacggctgaaaaccagttatgagccgcaggaggcgggcaacctgatggccttctgcattaacgggaagtccaaaactttcagcgagctgtttatgtcccatccgccgttggataaacgcattgaggcgctgcgctctggccagtatctgaagtaa

SEQ ID NO: 1493 - protein, 293 aa, Yersinia bercovieri ATCC 43970
MMRIALFLLTNLAVMLVFGLVLSLTGIQSSSVQGLMIMAGLFGFGGAFVSLLMSKWMALRSVGGEVIEQPRNETERWLLETVRRQSQQVGIAMPQVAIYQAPDINAFATGARRDASLVAVSTGLLQNMSRDEAEAVIAHEISHVANGDMVTMTLIQGIVNTFVIFISRLIAQVAAGFLSGDRDNEGSSAGNPMVYFAVSMVLELVFGILASIITMWFSRHREFHADAGSARLVGREKMIAALQRLKTSYEPQEAGNLMAFCINGKSKTFSELFMSHPPLDKRIEALRSGQYLK

SEQ ID NO: 1494 - DNA, 882 bp, Yersinia mollaretii ATCC 43969
  CDS (1)..(882)
atgatgcgtatcgctctgttccttctcaccaacctggccgtgatgttggtgttcgggttggtgctaagcctgacaggcattcagtccagcagcgtgcaggggctgatgatcatggctggtctatttggtttcggcggcgcatttgtttcgttgctgatgtctaaatggatggccttacgttcagtgggcggtgaagtcattgaacagccacgtaatgaaacggaacgctggttgttggaaaccgtgcgtcggcagtctcagcaggcgggtatcgccatgccacaagtggctatttatcaggcaccggatatcaacgcctttgccacaggtgcacgtcgtgatgcctcgctggttgccgtcagtaccggcctattgcagaacatgagccgcgatgaagcggaagcggttattgcccatgaaatcagccatgtggcaaatggtgatatggtcaccatgacgctgattcaagggattgtgaatacattcgtgatcttcatttcacgtcttattgcacaaatcgctgccggattcttatcgggcgatcgtgacaatgaagggagcagcgcgggtaacccgatggtctactttgctgtctcaatggtgctggaattggtgtttggtattctggcgagcattatcaccatgtggttctcacgccatcgtgaattccacgccgatgccggttcagcacgattggtgggccgtgagaagatgattgccgcactgcaacggctgaaaaccagctatgagccgcaggaagcgggcaacctgatggccttctgcattaatggcaagtccaaaactttcagcgagctgtttatgtcccacccgccgctggataaacgtattgaggcgttgcgttctggtcagtacctgaagtaa

SEQ ID NO: 1495 - protein, 293 aa, Yersinia mollaretii ATCC 43969
MMRIALFLLTNLAVMLVFGLVLSLTGIQSSSVQGLMIMAGLFGFGGAFVSLLMSKWMALRSVGGEVIEQPRNETERWLLETVRRQSQQAGIAMPQVAIYQAPDINAFATGARRDASLVAVSTGLLQNMSRDEAEAVIAHEISHVANGDMVTMTLIQGIVNTFVIFISRLIAQIAAGFLSGDRDNEGSSAGNPMVYFAVSMVLELVFGILASIITMWFSRHREFHADAGSARLVGREKMIAALQRLKTSYEPQEAGNLMAFCINGKSKTFSELFMSHPPLDKRIEALRSGQYLK

SEQ ID NO: 1496 - DNA, 882 bp, Yersinia frederiksenii ATCC 33641
  CDS (1)..(882)
atgatgcgtatcgctctgttccttctcaccaacctggccgttatgttggtgttcgggttggtacttagcctgacaggtattcagtccagcagtgtgcaggggctgatgattatggccggtctgtttggttttggcggcgcattcgtttcgttgctgatgtccaaatggatggctttgcgttcagtgggtggtgaagttattgaacagccacgtaatgagactgagcgttggttgctggagaccgtacgtcgccagtctcagcaggctggcattgctatgccacaagtcgctatttatcaggccccggatattaatgcctttgcgacgggggctcgccgtgatgcttcactggtcgccgtcagtactggcctactacaaaatatgagtcgtgatgaggctgaagccgttattgcccatgaaattagtcatgtggctaacggtgatatggtcaccatgaccttgattcaagggattgtgaatacatttgttatcttcatttcacgcctgattgcgcaagttgccgctggcttcttgtctggcgaccgtgacaatgagggcagcagttccggcaacccaatggtttactttgccgtatcaatggtattggagttagtgtttggtattcttgccagtatcattaccatgtggttctcgcgtcatcgtgagttctacgccgatgcgggttcagcaaaattggtagggcgcgagaagatgattgccgcattgcagcgtttgaagactagctatgagccccaggaagcaggcagcatgatggctttttgcattaacggtaaatctaaatcattcagcgagttgttcatgtcacatccaccgttggataaacgtattgaagcgttgcgctctgggcaatatctgaaatag

SEQ ID NO: 1497 - protein, 293 aa, Yersinia frederiksenii ATCC 33641
MMRIALFLLTNLAVMLVFGLVLSLTGIQSSSVQGLMIMAGLFGFGGAFVSLLMSKWMALRSVGGEVIEQPRNETERWLLETVRRQSQQAGIAMPQVAIYQAPDINAFATGARRDASLVAVSTGLLQNMSRDEAEAVIAHEISHVANGDMVTMTLIQGIVNTFVIFISRLIAQVAAGFLSGDRDNEGSSSGNPMVYFAVSMVLELVFGILASIITMWFSRHREFYADAGSAKLVGREKMIAALQRLKTSYEPQEAGSMMAFCINGKSKSFSELFMSHPPLDKRIEALRSGQYLK

SEQ ID NO: 1498 - DNA, 882 bp, Yersinia intermedia ATCC 29909
  CDS (1)..(882)
atgatgcgtatcgctctgttccttctcaccaacctggccgttatgttggtgttcgggttggtactaagcctgacaggtattcagtccagcagtgtacaagggctgatgatcatggctggtctgttcggcttcggcggcgcatttgtttcgttgctgatgtccaaatggatggctttgcgttcagtgggtggtgaggttatcgaacaaccgcgcaatgaaactgagcgctggttgctggatacggtacgtcgccaatctcagcaagccggtattgccatgccacaagttgctatctaccaggcaccggatattaacgcctttgcgaccggggctcgtcgtgatgcctctttggtggcggtgagtacaggtttattgcagaacatgagccgcgatgaagcggaagccgttatcgctcatgaaattagccacgtcgctaacggcgatatggtcaccatgaccttgattcaggggattgtgaatacctttgtgatcttcatttcacgcttaattgcgcaagtcgctgccggtttcttatcgggtgatcgtgataatgaaagcagtagcgccggtaacccgatggtctactttgccgtatcaatggtcttggaattggtctttggtattctggccagcattatcaccatgtggttctcgcgccatcgcgaattccacgctgatgccggctcagcgaagctggtagggcgtgagaagatgatagccgccttgcaacggctgaaaacaagctatgagccacaggaagcaggcaacatgatggctttctgcattaatggtaagtccaagactttcagcgagctgtttatgtcgcatccgccgctggacaaacgtattgaagcgctgcgttcaggccagtatctgaagtag

SEQ ID NO: 1499 - protein, 293 aa, Yersinia intermedia ATCC 29909
MMRIALFLLTNLAVMLVFGLVLSLTGIQSSSVQGLMIMAGLFGFGGAFVSLLMSKWMALRSVGGEVIEQPRNETERWLLDTVRRQSQQAGIAMPQVAIYQAPDINAFATGARRDASLVAVSTGLLQNMSRDEAEAVIAHEISHVANGDMVTMTLIQGIVNTFVIFISRLIAQVAAGFLSGDRDNESSSAGNPMVYFAVSMVLELVFGILASIITMWFSRHREFHADAGSAKLVGREKMIAALQRLKTSYEPQEAGNMMAFCINGKSKTFSELFMSHPPLDKRIEALRSGQYLK

SEQ ID NO: 1500 - DNA, 864 bp, Shewanella sp. PV-4
  CDS (1)..(864): transl_table=11
atgaagcgtattttcttattgatcgcgacaaacatggtaatcttgctggtcgcttcaattgtgatgtctattttagggggttacacctcgaccatgggcggactattggtctttgccgccatcttcggtttcggcggcgcctttatcagcttagcgatctctaagtggatggcgaagaagaccatgggctgtgaagtgatcaccacaccgcgcgacaacatggagcgctggttggtcgataccgttgcgcgtcaggctgagcaggcgggcatcaagatgcctgaggtggccatctaccagtcacccgagctgaacgcctttgccacaggccctagcaaggacaactcgctggtcgccgtcagtagcggactgctttacggcatgacgcaagatgagatcgaaggcgtattggcccacgaagtgagccatgtggccaacggcgacatggtgactctgacgcttattcaaggcgtggtgaacaccttcgtgatctttgcggcccgcgtggtggcgagcattatcgataacttcgttgccagcaacgacgaagagggcgaaggcctgggcatgtttgcctacatggcagtggtcttcgtgttggatatgctgtttggtatcctggcctcgatgatagtggcttacttctcacgtgttcgtgagttcaaggccgatgccggcggcgctcagttggcaggcaagcataagatgattgcggcgctggacagattgcgtcaaggcccagaaaccggtgccatgccagcacagatggcggctttcggtatcaatggtaagaagtcgatggccgaactgatgatgagccatccaccacttgaaaagcgtatcgaagcactgcgcgcacaataa

SEQ ID NO: 1501 - protein, 287 aa, Shewanella sp. PV-4
MKRIFLLIATNMVILLVASIVMSILGGYTSTMGGLLVFAAIFGFGGAFISLAISKWMAKKTMGCEVITTPRDNMERWLVDTVARQAEQAGIKMPEVAIYQSPELNAFATGPSKDNSLVAVSSGLLYGMTQDEIEGVLAHEVSHVANGDMVTLTLIQGVVNTFVIFAARVVASIIDNFVASNDEEGEGLGMFAYMAVVFVLDMLFGILASMIVAYFSRVREFKADAGGAQLAGKHKMIAALDRLRQGPETGAMPAQMAAFGINGKKSMAELMMSHPPLEKRIEALRAQ

SEQ ID NO: 1502 - DNA, 933 bp, Rhodopseudomonas palustris BisB18
  CDS (1)..(933): transl_table=11
atgagctatttcaagaccgcaattctgctggccgggctgaccgcgctgttcatgggcgtcggctatctgatcggcggggcctcgggcgccgcgatcgcgctcgtggtcgccgcggccaccaacatcttcgcctattggaactcggacaagatggtgctgtcgatgtacggcgcccaacaggtcgacgcgcgcaacgcgccggatctgctgcggctggtcgccgacctcgccagcaacgcgcaattgccgatgccgcgggtgttcatcatggacaatccgcagccgaatgcgtttgcgacagggcgcaatccggagaacgccgcagtcgcggtgaccaccggcctgatgcagcagttgtcccgcgaagaactcgccggcgtgatcgcccatgaactcgcgcatgtgaagaaccacgacaccctgctgatgaccgtcaccgcgaccatcgccggcgcaatctcgatgctggcgcagttcggcatgttcttcggcggcaaccgcgacaacaacaatggcgggctcggcatcatcggctcgatcgtgatgatgatcgtggcgccgttggccgcgatgctggtgcagatggcgatcagccgcagccgcgaatacgccgccgacgatctcggcgcgcggatctgcggcgagccgcgctggctggcttcggcgctggccaagatcgacaacgccgcgcatcaggtgccgaactacgaggccgaacgggcgcccgccaccgcgcatatgttcatcatcaacccgctcaccggccagggcatggacaatctgttcgccacccacccctcgaccgaaaaccgcatcgccgcgctgacgcggcttgccggcgaactcgcgccgcgcggaccggcgcgcgccgccaccgccgcgccgcgcgggccgtggagcggccagccgcgtagccgcgggccgtggggttag

SEQ ID NO: 1503 - protein, 310 aa, Rhodopseudomonas palustris BisB18
MSYFKTAILLAGLTALFMGVGYLIGGASGAAIALVVAAATNIFAYWNSDKMVLSMYGAQQVDARNAPDLLRLVADLASNAQLPMPRVFIMDNPQPNAFATGRNPENAAVAVTTGLMQQLSREELAGVIAHELAHVKNHDTLLMTVTATIAGAISMLAQFGMFFGGNRDNNNGGLGIIGSIVMMIVAPLAAMLVQMAISRSREYAADDLGARICGEPRWLASALAKIDNAAHQVPNYEAERAPATAHMFIINPLTGQGMDNLFATHPSTENRIAALTRLAGELAPRGPARAATAAPRGPWSGQPRSRGPWG

SEQ ID NO: 1504 - DNA, 864 bp, Shewanella sp. ANA-3
  CDS (1)..(864): transl_table=11
atgaagcgtatttttttattaattgcgactaacctagccgtgttgctggtagcctcaattgtgatgtctattctgggcgtgaatacgtcgactatgggtggactgcttgtgttcgctgcgatttttggattcggcggagccttcatcagcttagccatttcaaaatggatggcgaaaaagaccatgggctgtgaagtgatcaccactccccgtgatagcacagagcgttggttattagacactgttgcccgtcaagcgcagcaagctgggattaaaatgccagaagtggcaatttaccaatcgccagagatgaatgccttcgccacaggcccaagcaaagacaactcattagttgccgtgagtaccggtctgttgtatggcatgagccaagacgaagttgaaggcgtactcgcccacgaagtgagccacgttgccaacggcgacatggtgaccttgaccttaattcaaggcgtggtgaacacctttgttatcttcgcggcacgtgttgttgcgggcattatcaacaacttcgtctcgagcaacgatgaagagggtgaaggtttaggcatgttcgcctatatggcggtcgtgtttgtcctcgacatgttgtttggtatcttggcctcgatcatcgtggcttacttctcacgtatccgtgaataccgtgctgacgaaggtgcggcgcgtttagcgggcaaacataagatgattgcagcgcttgagcgtttacgccaaggccctgaaagctcggcaatgccagcacaaatgtcggcttttggtattaacggtaagcgttcaatggctgagctgatgatgagccacccgccattagagaagcgtatcgccgccttacaaactcgttaa

SEQ ID NO: 1505 - protein, 287 aa, Shewanella sp. ANA-3
MKRIFLLIATNLAVLLVASIVMSILGVNTSTMGGLLVFAAIFGFGGAFISLAISKWMAKKTMGCEVITTPRDSTERWLLDTVARQAQQAGIKMPEVAIYQSPEMNAFATGPSKDNSLVAVSTGLLYGMSQDEVEGVLAHEVSHVANGDMVTLTLIQGVVNTFVIFAARVVAGIINNFVSSNDEEGEGLGMFAYMAVVFVLDMLFGILASIIVAYFSRIREYRADEGAARLAGKHKMIAALERLRQGPESSAMPAQMSAFGINGKRSMAELMMSHPPLEKRIAALQTR

SEQ ID NO: 1506 - DNA, 864 bp, Shewanella sp. MR-7
  CDS (1)..(864): transl_table=11
atgaagcgtatttttttattaattgcgactaacctagccgtgttgctggtagcctcaattgtgatgtctattctgggcgtgaatacgtctactatgggtggactgttagtgttcgctgcaatttttggattcggcggagccttcatcagcttagccatttcaaaatggatggcgaaaaagaccatgggctgtgaagtgatcaccacgccacgtgatagcactgagcgttggttattggagacggttgcccgtcaagcgcagcaagcagggattaaaatgccagaagtggcaatttaccaatcgccagagatgaacgcttttgccactggcccaagtaaagacaactcattagttgccgtgagtaccggtctgttgtacggcatgagccaagatgaagttgaaggggttctcgcccacgaagtgagccacgtcgctaacggcgatatggtgacactgaccttaattcaaggcgtagtgaacacctttgttatctttgcagcgcgtgttgttgcgggtattatcaataacttcgtatcgagcaacgacgaagaaggcgaagggttaggcatgttcgcttatatggcggtcgtgtttgtcctcgacatgttgtttggtatcttggcctcgattatcgtggcttacttctcacgtatccgtgaataccgtgcagacgaaggtgcagcacgtttagcgggtaagcataagatgattgcagcgcttgagcgtttacgccaaggccctgaaagctcggcaatgccagcacaaatgtcagccttcggtattaacggcaagcgttcaatggctgagctgatgatgagccacccgccattagagaagcgtatcgccgctttacagacccgttaa

SEQ ID NO: 1507 - protein, 287 aa, Shewanella sp. MR-7
MKRIFLLIATNLAVLLVASIVMSILGVNTSTMGGLLVFAAIFGFGGAFISLAISKWMAKKTMGCEVITTPRDSTERWLLETVARQAQQAGIKMPEVAIYQSPEMNAFATGPSKDNSLVAVSTGLLYGMSQDEVEGVLAHEVSHVANGDMVTLTLIQGVVNTFVIFAARVVAGIINNFVSSNDEEGEGLGMFAYMAVVFVLDMLFGILASIIVAYFSRIREYRADEGAARLAGKHKMIAALERLRQGPESSAMPAQMSAFGINGKRSMAELMMSHPPLEKRIAALQTR

SEQ ID NO: 1508 - DNA, 906 bp, Alkalilimnicola ehrlichei MLHE-1
  CDS (1)..(906): transl_table=11
atgaagcgcatagggctctttctgctcactaacctggcgatcctggtggtcctgggtgtggtgttgttcatcctgcaggccgtgttcggggtgcggaccctggatgaggccggtgtgggtctggactatacggggttgctcatcatcgccgcggtgatcggtttcggcggctcgttcatctccctggccatgtccaagttcatcgccaagcggatgaccggggcccgcgttatcgaaaagccgcgcagcgaggccgagcagtggctggtggataccgtgcgccgctttgcccgccaggagggcatcggtatgccggaggtggcgatctacgacgccccggacatgaacgcctttgccaccggggcccggcgcaataactccctggtggcggtgagcaccggcctgctgcagagcatgacccgggacgaggccgaggcggtgatcggccacgagatcgcccacatcagcaacggcgatatggtcaccctgaccctgatccagggggtggtgaacacctttgtggtcttcttctcgcgcatcatcggccatttcgtcgaccgcgtggtattcaagaccgagcaagggcacggcccggcctatttcatcacctccatcttcgcccagatcgtgctgggcatcctcgcctcggtgatcgtcatgtggttctcccgtcagcgggagtaccgggccgatgccggtggcgccaagctggccgggcgcgacaagatgatagccgcgctggagcggctaaagcgctcggtggaccaggagcacctgccggaccagctggaggccttcggcatcaacggcaaccgcggtggcggcatgaaggagtggttcatgtcccacccgccgctggacgaccgcatcgccgcgctgaaggagggccgtcacctgcgcggatga

SEQ ID NO: 1509 - protein, 301 aa, Alkalilimnicola ehrlichei MLHE-1
MKRIGLFLLTNLAILVVLGVVLFILQAVFGVRTLDEAGVGLDYTGLLIIAAVIGFGGSFISLAMSKFIAKRMTGARVIEKPRSEAEQWLVDTVRRFARQEGIGMPEVAIYDAPDMNAFATGARRNNSLVAVSTGLLQSMTRDEAEAVIGHEIAHISNGDMVTLTLIQGVVNTFVVFFSRIIGHFVDRVVFKTEQGHGPAYFITSIFAQIVLGILASVIVMWFSRQREYRADAGGAKLAGRDKMIAALERLKRSVDQEHLPDQLEAFGINGNRGGGMKEWFMSHPPLDDRIAALKEGRHLRG

SEQ ID NO: 1510 - DNA, 879 bp, Methanospirillum hungatei JF-1
  CDS (1)..(879): transl_table=11
atgaagtggaaacgtgatgcaggcctgacaggacgaattttcctgacctgggcactgctcttactcgtgtatcttgtgttcatgggtatcctgatggccctgggacttccgtccggatttattatcctgattgcagtcgtcatgggtcttgttcagtatttcttctccgacaagctggtgctcatgaccaccggttcaaagattgttgaatatgatgaagcaccggaccttcaccgcactattgagaagttatgccaggaagcagatcttccaaagccacggatagctgtcatgcactccccgatgccaaatgcatttgcaaccggcagaagcccgaatcatgccgtggtggcagtgacggattccatcatgcagaccttaaaccgcgatgaacttgaggcggtcctggcacatgaactctctcatgtaaaaaaccgtgatatcctgaccatgacggttgccagctttgttgccatgattgcatccatgatcatgaacaatttcctgttcgcatcaatattcagtaaccgggaacagggaggagcatggatcattgcaggtattgttgcagcagtggtatgggttattgcaacgcttttgatgatggcactctccaggtaccgggaatttgcagccgaccggggagccgcatatattaccaataatcccgatgccctgatctcagctcttcagaagatcagcggtaagatggaacgtctgccaacacaggcaaaagttcaggcagaaggagcaaatgcattttacatcatccccgctctgtctggaaaaactcttgcagggctcttctcaactcacccggctcttgagaagcggattgaaaaccttgaaaaagtcagggcagaaattcgcggatattaa

SEQ ID NO: 1511 - protein, 292 aa, Methanospirillum hungatei JF-1
MKWKRDAGLTGRIFLTWALLLLVYLVFMGILMALGLPSGFIILIAVVMGLVQYFFSDKLVLMTTGSKIVEYDEAPDLHRTIEKLCQEADLPKPRIAVMHSPMPNAFATGRSPNHAVVAVTDSIMQTLNRDELEAVLAHELSHVKNRDILTMTVASFVAMIASMIMNNFLFASIFSNREQGGAWIIAGIVAAVVWVIATLLMMALSRYREFAADRGAAYITNNPDALISALQKISGKMERLPTQAKVQAEGANAFYIIPALSGKTLAGLFSTHPALEKRIENLEKVRAEIRGY

SEQ ID NO: 1512 - DNA, 876 bp, Methanospirillum hungatei JF-1
  CDS (1)..(876): transl_table=11
atgaaatggaaacgtgacaccggattgtcgggaaggatctttttcacctggattctgttattatttgtttatcttgtctttatgggagttctcattgctctggggcttccttctgtgttcattatagttatcgctgtaggaatgggtctggttcagtacttcttttcagataaactggtactgatgacaacaggtgccagaatcatcgagaatgatgaatatcctgagctgcaccgcacggtagaaaatttatgttcaattgcacagatcccaaaacccagaatcgccatcatgcaatctcccatgccaaatgcctttgccactggcagaagcccgaaccatgcagttgttgcggttactgattcaataatggcgacgctgaaccgaaatgaactagaagcagttctggctcatgaacttgcccatgtcaaaaaccgtgacatccttaccatgaccgtcgctggatttcttgccatgattgcatccatgattatgaataatttcctatttgcttcaatatttaaccgtgagcagggaggagcatggataattgcaggtattgttgcagcagttgtctgggttatcgcaacgttgctcatgatggcattatcacggtaccgtgaatttgctgcagaccggggagcagcatatattacagaggatcctgatgcactcatctctgctctgcaaaaaatcagcggaaagatggatcgggtacctgtacagaccagagcagcagcggaaggggctaatgcattttatattattcctgcaatatcaggtaaatctctcgctgctctcttttctactcatccggcacttgaaaaaaggatagaaaatctcgagaaggtccgcgaagaaattcgtggttattaa

SEQ ID NO: 1513 - protein, 291 aa, Methanospirillum hungatei JF-1
MKWKRDTGLSGRIFFTWILLLFVYLVFMGVLIALGLPSVFIIVIAVGMGLVQYFFSDKLVLMTTGARIIENDEYPELHRTVENLCSIAQIPKPRIAIMQSPMPNAFATGRSPNHAVVAVTDSIMATLNRNELEAVLAHELAHVKNRDILTMTVAGFLAMIASMIMNNFLFASIFNREQGGAWIIAGIVAAVVWVIATLLMMALSRYREFAADRGAAYITEDPDALISALQKISGKMDRVPVQTRAAAEGANAFYIIPAISGKSLAALFSTHPALEKRIENLEKVREEIRGY

SEQ ID NO: 1514 - DNA, 915 bp, Streptomyces coelicolor
  CDS (1)..(915): transl_table=11
atgcagagccgcttccggagcgaccggcggttgaccgtgcgcatgggggtcaccctcttcctgctcggcctgttgtacgtgggtttcgtcgccgcgctgatcgcgctgctgaagtcctgggtcctggtcgtggtgatcgtggcgctggtgttcggggcgcagtactggttctccgaccggatcgcgctgttcgcgatgcgcggccgggtcgtggagcgggaggagtatccggagctgcacggggtggtggaccggctggcggcgatggccgacatgccgaagccggtggtcgcggtgtcggagatggagatgccgaacgccttcgccaccggccgcaatccggacaacgcggtggtctgcgtcacgaccgggctgctgcggcggctggagcccgcggagctggagggggtgctggcgcacgagctgtcgcacgtggcgcacaaggacgtcgcggtgatcacggtggcgtccttcctcggcgtgatcgcgggcctgatcgtgcggttcgccttctactcccagctcttcggcgggcgccgggaccagaacacgctggccgtgctggcggtggtgatgggcgtctcggcggccgtgtacgcgctcagcttcctgctgatccgagccctgtcccggtaccgggagctggcggccgaccgggccgcggccctgctcaccgggcgcccctcggcgctggcggcggcgctcaccaaggtcaccggcgacatcgcccgcatcccgaccaaggacctgcgcacggcccaggccttcaacgccttctacttcaccccggccttcggcagcgaccccggcctcggccggttcttcgcgacccaccccagcctggagcagcggctcgaccagctgggccggatctccaccgagctgggcgaggcaccggcccccggcaaggcctga

SEQ ID NO: 1515 - protein, 304 aa, Streptomyces coelicolor
MQSRFRSDRRLTVRMGVTLFLLGLLYVGFVAALIALLKSWVLVVVIVALVFGAQYWFSDRIALFAMRGRVVEREEYPELHGVVDRLAAMADMPKPVVAVSEMEMPNAFATGRNPDNAVVCVTTGLLRRLEPAELEGVLAHELSHVAHKDVAVITVASFLGVIAGLIVRFAFYSQLFGGRRDQNTLAVLAVVMGVSAAVYALSFLLIRALSRYRELAADRAAALLTGRPSALAAALTKVTGDIARIPTKDLRTAQAFNAFYFTPAFGSDPGLGRFFATHPSLEQRLDQLGRISTELGEAPAPGKA

SEQ ID NO: 1516 - DNA, 885 bp, Methanosarcina acetivorans
  CDS (1)..(885): transl_table=11
atgaaaagaaaatgggaacgggacctgggacttcagggacggatgctctttactatgttccttctggcggcagtttacctcttcttcctagcttttctctcgtacagcgggaccccgccagtgtttatgctgctttttgtaggtgcattcatgggcattcagtacttctattcggacaaaatggtactctggacaacaggggcgcatattgtctccgaaagcgaagccccgcagctgcatgatatggtcaccaggctgtgtgtaatagccgacatccctaaaccgcagatagcaattgtccagacccgggtgccgaatgcttttgccacgggcaggagcccgaataaagccgttgttgcggtcacaacagggattatggacaaactcacgcctgccgaacttgaggcagtgcttgcccacgaactgagccatgtaaagaacagggatatggctgtcctgacaattgccagttttatctcaaccatagctttctacattgtccgctacagtctctattttggaggcatgggaggagacaggcggcgggacggcggaggcattttacttgtctggctggtctcaattgcagtctgggttgtcagtttcctgctgatccgtgccctttcccgctacagggaatttgccgcagacaggggatcggcaatcatcaccgggcagcctgcaaaccttgcttctgccctgatgaagataagcgggcttatggatagagtgccgagtgaggacctcaggaaggtcgagggcatgaatgccttcttcattatccccgcaatctcgggctcttcgttcatggacatcttttccactcacccctccgtggaaaagaggttagcccagcttgaaaagatgcagaaggaaatgagttaa

SEQ ID NO: 1517 - protein, 294 aa, Methanosarcina acetivorans
MKRKWERDLGLQGRMLFTMFLLAAVYLFFLAFLSYSGTPPVFMLLFVGAFMGIQYFYSDKMVLWTTGAHIVSESEAPQLHDMVTRLCVIADIPKPQIAIVQTRVPNAFATGRSPNKAVVAVTTGIMDKLTPAELEAVLAHELSHVKNRDMAVLTIASFISTIAFYIVRYSLYFGGMGGDRRRDGGGILLVWLVSIAVWVVSFLLIRALSRYREFAADRGSAIITGQPANLASALMKISGLMDRVPSEDLRKVEGMNAFFIIPAISGSSFMDIFSTHPSVEKRLAQLEKMQKEMS

SEQ ID NO: 1518 - DNA, 885 bp, Methanosarcina mazei
  CDS (1)..(885): transl_table=11
atgaaaagaaaatgggaacgggaccttgggcttcagggaagaatgctcttcacgatgtttcttctggcagcagtttacctttttttccttgcattcctttcatactacggaacatctcagattttcataattctattcatcggtcttttcatggccgcccagtatttttattcggataagatggtgctctggacaacaggggcgcagattgtttctgaaagtgaagccccgcagctccacgggatgattaccaggctctgcgcaatagctgacctcccgaaacctcaggttgcaattgtaaggacgcaggtcccaaacgcctttgctacaggcaggaaccagaataaagctgttgttgcggttacgacagggcttatggacaaactctctcctgctgaacttgaagcagtacttgcgcatgaattgagccatgtaaagaacagggacatggctgtcctgacgattgccagttttctctcatcagtggctttctatattgtacgctacagcctttatttcgggaatatgggaggaggcagaaggaaggaaggcggaggtattatgcttgtctggcttgtttccatcgtggtctggattgtcagctttttactgatccgcgccctttcccgttacagagaattctctgctgacaggggagcggctgttatcaccgggcagcctgcaaatcttgcttctgcccttatgaagataagcggagttatggatagagtgccaggtgatgacctcagaaaagtcgaaggcatgaacgccttttttattatacctgcaatctcaggctcttctataatggacatcttttccacccacccttcagtggaaaagaggatagcaaagcttgagaaaatgcagcaggaaatgagttga

SEQ ID NO: 1519 - protein, 294 aa, Methanosarcina mazei
MKRKWERDLGLQGRMLFTMFLLAAVYLFFLAFLSYYGTSQIFIILFIGLFMAAQYFYSDKMVLWTTGAQIVSESEAPQLHGMITRLCAIADLPKPQVAIVRTQVPNAFATGRNQNKAVVAVTTGLMDKLSPAELEAVLAHELSHVKNRDMAVLTIASFLSSVAFYIVRYSLYFGNMGGGRRKEGGGIMLVWLVSIVVWIVSFLLIRALSRYREFSADRGAAVITGQPANLASALMKISGVMDRVPGDDLRKVEGMNAFFIIPAISGSSIMDIFSTHPSVEKRIAKLEKMQQEMS

SEQ ID NO: 1520 - DNA, 1101 bp, Aeropyrum pernix
  CDS (1)..(1101): transl_table=11
atgctggagttcatattcgcctggtggtggcttggcctggtcgagtcgctgatactagccggggtcatagccctggtggcggtgaacgcccacaggatagtgggtgacgcgccccagagcctcgccgccctgagggctagcatggggcttactgttctcgccctcatcggcgggtacattgttgtgctgggcgttgcggcctgggctctagacgccttcacaggcctctctggcaccggggtggcgttcatgctatccctgctagccctggccatggtgctggtgcagtggctcttctcaccctacataataaacatggtgtacaggacccgggagcccctcccaggcgaggagtggatagttgctgaggtcgagcagctggccaggaggagcgggctgaagccgcccaaggttgtggtcagcgagatgaacatgcccaacgccttcgcctacggaagccccatagccggaagctacgtcgccgtcacacgcggcctcctaaggcttctgcccaaagacgaggttagagccgtcctggcccacgaggtgggccaccttaagcacagggacgtcaccgtcatactcgccctgagcctcataccgattgcagccttcctcataggccgcaccctagtctgggccggcatactcggcgggggcgggggcgagaggaggggcaacccgatggcccttgtggcggtgggcgccgccctcctagccgcgggcatggtattccagctcatagtatcccacttcaacaggctcagggagtactacgccgatgcccacagcgccctggtgacggggagcccaaggagcctccagagggccctggcgaggatccacgccgcctacgagcacaatccccacctggtggaggaggctaggagcaacgagatggccagcatgctgttcatagtagcccctctaaccagcctgacggcctcgccgctggtggacgtcgactacctggtcgagaggctgaaggagcaggagaccaaccccctggtggagctgttcagcacacacccgccggtctccaagaggctgaggttcctggacaggcttgcgtcgaggataggagggatagagcattactag

SEQ ID NO: 1521 - protein, 366 aa, Aeropyrum pernix
MLEFIFAWWWLGLVESLILAGVIALVAVNAHRIVGDAPQSLAALRASMGLTVLALIGGYIVVLGVAAWALDAFTGLSGTGVAFMLSLLALAMVLVQWLFSPYIINMVYRTREPLPGEEWIVAEVEQLARRSGLKPPKVVVSEMNMPNAFAYGSPIAGSYVAVTRGLLRLLPKDEVRAVLAHEVGHLKHRDVTVILALSLIPIAAFLIGRTLVWAGILGGGGGERRGNPMALVAVGAALLAAGMVFQLIVSHFNRLREYYADAHSALVTGSPRSLQRALARIHAAYEHNPHLVEEARSNEMASMLFIVAPLTSLTASPLVDVDYLVERLKEQETNPLVELFSTHPPVSKRLRFLDRLASRIGGIEHY

SEQ ID NO: 1522 - DNA, 966 bp, Agrobacterium tumefaciens
  CDS (1)..(966): transl_table=11
atgaacatgatgcgcacggcaatgcttctggccttcatgacggcattgttcatgggtgtcggttttctgatcggtggtaaaggcggcatgatgatagcgctgctgattgcggccggtatgaaccttttttcctattggaattcggacaagatggtcctttcggcctatcgcgcccgggagatcgacgaggcgaatgcgcccgagttctttcacatgatccgggatctgtcgcagaatgccggtctgcccatgccgaaggtctatatttacgacagtccgcagccaaacgccttcgcgaccggtcgaaatcctgagaatgcggctgttgccgcttcgaccgggctgctggagcgtctgacgcccgaggaagtggccggtgtcatggcgcatgaactcgcccatgtgcagaaccgcgataccctgaccatgacaatcaccgccacgctcgcgggtgcgatctccatgctcggcaattttgccttcttctttggcggcaacagggaaaacaacaataaccccttgggcttcatcggtgtgctggtggcgatgatagtggcgccgcttgcggcaatgttggtgcagatggctatcagtcgcacccgcgaatattccgccgaccggcgcggcgcggaaatatgcggcaacccgctctggcttgcctctgccctgcagaagatttcaggcatggcacagcaaattcacaatgacgatgccgagcgcaatccggcaacggcgcatatgttcatcatcaatccgctctccggcgagcgtatggacaatcttttttccacccatccgaacacggaaaaccgcgtggcggcgctgcacgcgatggcgcaggagttttctccgcgagcatcgacgccgccgccatcgggtgatagaccggtgcgcaaatcaggctccgttcccacaacgggctggagacgaggcaatgaaaacgagcgcaaggggccgtggtcttga

SEQ ID NO: 1523 - protein, 321 aa, Agrobacterium tumefaciens
MNMMRTAMLLAFMTALFMGVGFLIGGKGGMMIALLIAAGMNLFSYWNSDKMVLSAYRAREIDEANAPEFFHMIRDLSQNAGLPMPKVYIYDSPQPNAFATGRNPENAAVAASTGLLERLTPEEVAGVMAHELAHVQNRDTLTMTITATLAGAISMLGNFAFFFGGNRENNNNPLGFIGVLVAMIVAPLAAMLVQMAISRTREYSADRRGAEICGNPLWLASALQKISGMAQQIHNDDAERNPATAHMFIINPLSGERMDNLFSTHPNTENRVAALHAMAQEFSPRASTPPPSGDRPVRKSGSVPTTGWRRGNENERKGPWS

SEQ ID NO: 1524 - DNA, 870 bp, Anabaena sp
  CDS (1)..(870): transl_table=11
atgggaaatcaatttaaaacgcttgctttgcttgctgccctcagtggcttactaattgctatcagttattgggtaattggcggtagtagcggcttgatgattggtattggcttggcggcagtgacaaacctgctttcatggtatcaatcagataagattgccttggcagtttaccgcgctcaagctgtgagcgaaagtcaagcgccaaaactttatcgcacggtgcagagattatcacaacgcgctaatattcccatgccaggagtgtatattgttccaggtcaaactgctaatgcttttgcgacaggaagagatccagaacacgcggcggtggctgtcaccgaaggtattttaaatatattgccagaggatgaattagaagctgtcatcgcccacgaacttacacatattattaaccgagacacattaacacaagctgtagctgctactgttgccggtgctatctctttcttggcacaaatggtgagttatagcttatggttcggtgggataggtggacgagataacgaaagaggcggaaatcctttaggtgttttgttaactgttgtacttgcacctatagcagccactatcattcagctagccatatcccgcactagagaattttctgctgatgctggttctgccagattaacaggtaatccccgcgccctagcccgcgcattacaaagactggaagccacagcgcgacaaatgcccttaaatgctaacccagcttttgagccgctattaattatcaaccccatttctgggcagtttttaggtaacttattttccagccatccatccaccgaagcaagagttcaagcactgctgaagttagaaaaacaactgccaacaatagcttag

SEQ ID NO: 1525 - protein, 289 aa, Anabaena sp
MGNQFKTLALLAALSGLLIAISYWVIGGSSGLMIGIGLAAVTNLLSWYQSDKIALAVYRAQAVSESQAPKLYRTVQRLSQRANIPMPGVYIVPGQTANAFATGRDPEHAAVAVTEGILNILPEDELEAVIAHELTHIINRDTLTQAVAATVAGAISFLAQMVSYSLWFGGIGGRDNERGGNPLGVLLTVVLAPIAATIIQLAISRTREFSADAGSARLTGNPRALARALQRLEATARQMPLNANPAFEPLLIINPISGQFLGNLFSSHPSTEARVQALLKLEKQLPTIA

SEQ ID NO: 1526 - DNA, 909 bp, Aquifex aeolicus
  CDS (1)..(909): transl_table=11
atgagtgagagagaatttctgaggtttggtgatgagctggacgttaagaactgtaatacttctcggagttttaacggtcttttaatggctataggcgggattatcggtggaactgccggaatgttaatcgcccttattatcgcaggttttatgaactttatgagttactggttctcagacaagatagtcctctccatgtacggtgcgagggaaataccgtatgaagaagctccgtggctacaccagatagtggaagagctcgcaagaagggctaacatgccaaagccaaaaatctacttagttcccatggaacagccaaatgcctttgcaacgggaagaggaccggggcacgcagctgttgcggtaacgagaggaattcttgaaatactggatcaggaggaattgaagggtgttctcgctcacgaacttgcacacattaaaaacagggacgtcctcgttgcaaccatagcggcaaccatagcgggagcgataggattcctcgcaaacatggcacagtgggcactattcttcggaggactcaacaggaatgaagaagaggaaggtggcggttttgcagaaatgataggtgcaatacttatgatcataatcgttcccataatagccacgatcgtacagctcgcaatatcccgttcaagggagtacttcgcggacgagaccggagccaagatatgcggttgtccagtggcacttgcgagggcactcaaaaagattgaagagtacgtaatgcaggttcccgcaaatgtaaatcccggaacagcacacctcttcatagaaaatcccctaaagggcggtggaataatggaactactctctacacacccttcaacggaaaagagaatacagagactctgtgagcttgcaaggaagatgggacaggagtgtatataa

SEQ ID NO: 1527 - protein, 302 aa, Aquifex aeolicus
MSEREFLRFGDELDVKNCNTSRSFNGLLMAIGGIIGGTAGMLIALIIAGFMNFMSYWFSDKIVLSMYGAREIPYEEAPWLHQIVEELARRANMPKPKIYLVPMEQPNAFATGRGPGHAAVAVTRGILEILDQEELKGVLAHELAHIKNRDVLVATIAATIAGAIGFLANMAQWALFFGGLNRNEEEEGGGFAEMIGAILMIIIVPIIATIVQLAISRSREYFADETGAKICGCPVALARALKKIEEYVMQVPANVNPGTAHLFIENPLKGGGIMELLSTHPSTEKRIQRLCELARKMGQECI

SEQ ID NO: 1528 - DNA, 915 bp, Bacillus halodurans
  CDS (1)..(915): transl_table=11
atggggaagcgtattttattttttcttttaacgaacgttctagtcatgacaacaattgttattgtctggtcgatcatctcgaggtttacgaactttggaggctcgtttgaaactggtggccctggcttagggattgactacgcgtcgctcatggtctttagtttactcgttggtttcacaggggccttcatctcccttgcgatgtcacgttggatggcaaagaaaatgatgaacgtcaaagtgctagatccaaatggcccgttaaccgagcgggaacgttttgtcgttgaaaaggttcatcgcttgtctcgcgcagctggacttatgcacatgccagaggtagggatctaccaatcagccgaagtgaatgcatttgcgacaggcccttcgaaaaaacgttcacttgtggcggtttcatctggactgttggatgcaatggatgatgacgcggtcgaaggggttattgcccacgaggttgcccatatttccaatggagatatggtaaccatgacattgctccaaggagttgtcaacacgtttgtcgtcttcctctcaagagttgctgccatcattgtgtcgcgctttgttcgttccgagttgcaatggatcgtacagtttgcggcgatcatcgtgttccaaattttgttctctattctcggaagtattgtcgtaagtgcattctctcgttaccgagagtatcatgctgaccgaggtggagctgatttagctgggcgtgataaaatggctcatgcgctccgttcattaaaagcttatttggaccgaacgaagctgaacgatggcacggatgactcagcggtgcaaacgatgaaaattagtggtagaggtggcgtcatgaaactgttttccacccatcctgatttagatgatcgtattgctcgattagaacaacgataa

SEQ ID NO: 1529 - protein, 304 aa, Bacillus halodurans
MGKRILFFLLTNVLVMTTIVIVWSIISRFTNFGGSFETGGPGLGIDYASLMVFSLLVGFTGAFISLAMSRWMAKKMMNVKVLDPNGPLTERERFVVEKVHRLSRAAGLMHMPEVGIYQSAEVNAFATGPSKKRSLVAVSSGLLDAMDDDAVEGVIAHEVAHISNGDMVTMTLLQGVVNTFVVFLSRVAAIIVSRFVRSELQWIVQFAAIIVFQILFSILGSIVVSAFSRYREYHADRGGADLAGRDKMAHALRSLKAYLDRTKLNDGTDDSAVQTMKISGRGGVMKLFSTHPDLDDRIARLEQR

SEQ ID NO: 1530 - DNA, 897 bp, Bacillus subtilis
  CDS (1)..(897): transl_table=11
atggcgaaaagaatttttctgtttattctaacgaatattttggtgcttacaacaatcgggatcgttttgtctgttttaagctctgttacaggagtcgggacgtactttacagctgatggcggtatcgatccaatggcgcttcttgtgttcagtttagtcgttggatttgtcggttcctttacgtctcttgcgatatccagatggatggcaaagacgatgatgggcgtcagagtgctgaatccgaaaaaacactcgctcagctatgaggaacagcaattggttgatcgtgttcacagattaagccgctctgccggtttaacgaaaatgccggaagtcgggatttaccgttcacctgaagtaaacgcgtttgcgactggaccgtcaaaacgccgttcacttgtcgcagtatcgtcagggctgctggagcagatggatgacgcagcagttgaaggtgtgcttgcccacgaggtcgcgcatatcacaaatggtgatatggtaacaatgacgcttttacaaggtatcgttaatacctttgtcgtctttttatcgcgtatcgccgcttggatagcaagccgttttgtcaaagaagatctagcgccgatcgttcattttattgcaatgattatttttcagattgtcttttcgatacttggcagcctggttgtgtttgcgtattcacgccatcgtgaattccatgctgacaggggaggagcggatcttgccggcaaggacaagatgattcatgcgctgcggacgcttaaaagctattcttcccggattttggaagacgatcagacagctgtccaaacgttaaagattaatggcaagaagcgctcttcacttttctctactcatcctgatttagatgagcgaatcagacggctggaagctaaataa

SEQ ID NO: 1531 - protein, 298 aa, Bacillus subtilis
MAKRIFLFILTNILVLTTIGIVLSVLSSVTGVGTYFTADGGIDPMALLVFSLVVGFVGSFTSLAISRWMAKTMMGVRVLNPKKHSLSYEEQQLVDRVHRLSRSAGLTKMPEVGIYRSPEVNAFATGPSKRRSLVAVSSGLLEQMDDAAVEGVLAHEVAHITNGDMVTMTLLQGIVNTFVVFLSRIAAWIASRFVKEDLAPIVHFIAMIIFQIVFSILGSLVVFAYSRHREFHADRGGADLAGKDKMIHALRTLKSYSSRILEDDQTAVQTLKINGKKRSSLFSTHPDLDERIRRLEAK

SEQ ID NO: 1532 - DNA, 978 bp, Brucella suis
  CDS (1)..(978): transl_table=11
atgaatatgacgaaaactgccatgctgatcgccctcatgacggtgatgttcatgagtattggctatttgctgggcggcggcggcggcatgatgatcgcgcttgtgatcgccgtcgccatgaacctgttcggctactggaattccgacaaaatggtgctgcgcatgtacaatgcgcaggaagtggacgagcgcagcgcacccgaatattaccgtatggtgagcggtcttgccgctaatgcgggcctgcccatgccgaaggtctatatcatccatgaagaccagccgaatgcctttgccacgggccgcaacccggaaaatgctgccgtggcggccacaaccggcctcctcaaccggctttcgccggaagaagtcgcaggcgtgatggcgcacgagctggcccacgtccagaaccgcgacacgctgaccatgaccatcgtggcaacacttgccggtgccatatccatgctcggcaattttgctttcttcctcggcggcaatcgcgaaaacggcaatggcgtcatgggcgtcgtcggcacgcttcttgccatgatcgtcgcacccttcgcggcaatgattgtgcagatggcggtgagccgcacccgcgaatatgccgccgacaagcgcggcgcggaaatctgcggcaatccgctgtggctctcctccgcgctaggcaagatcgcgcgtggtgccaaggtcatcccgaatgaagaagccgaacacaacccggcgaccgcgcatatgttcatcatcaacccgctgagcggacgtggcgcggacaatcttttctcgacccacccggataccgacaaccgcattgccgcacttgaacagatggctgctgaaatgggtatccgctcggccgcaatgacggcgcgcgccgccgccccttcacaaaacagtggtccctgggggcaaagaagtgataatgcaggcggcaacagcaatggcggttcccgctatcgggggccgtggtcgtaa

SEQ ID NO: 1533 - protein, 325 aa, Brucella suis
MNMTKTAMLIALMTVMFMSIGYLLGGGGGMMIALVIAVAMNLFGYWNSDKMVLRMYNAQEVDERSAPEYYRMVSGLAANAGLPMPKVYIIHEDQPNAFATGRNPENAAVAATTGLLNRLSPEEVAGVMAHELAHVQNRDTLTMTIVATLAGAISMLGNFAFFLGGNRENGNGVMGVVGTLLAMIVAPFAAMIVQMAVSRTREYAADKRGAEICGNPLWLSSALGKIARGAKVIPNEEAEHNPATAHMFIINPLSGRGADNLFSTHPDTDNRIAALEQMAAEMGIRSAAMTARAAAPSQNSGPWGQRSDNAGGNSNGGSRYRGPWS

SEQ ID NO: 1534 - DNA, 879 bp, Buchnera aphidicola subsp
  CDS (1)..(879): transl_table=11
atgactcgtattgttcttttcttattaactaatttagcagttatgttaatatttagtctaattcttttcctgacaggtattcaatctaatactatttatggtttattaattatgtcaggtttatttggttttagtggttctattttatcgttaattttatcaaagtggattgcgttgcgttctgtaaatggggaaatcatcactcatccacgaaatgaagtagaaagttggcttattaatactgtacgtcaacaatcaattcaaaaaggtattattatgccccaaattgcagtatatcatgcgactgatattaatgcatttgcaacaggtgcacgtcgtaattctgctctaattgctgtttctacaggattattagaaaatatgactcatcatgaagcagaagcagtaattgctcatgaaattagtcatatcgcaaatggtgacatgattactatgaccttagtacaaggtgttgttaacacttttgtgatttttatatctcgttttctttcacaaatcataagcaatgtcatgtcaagcaatcgaaatgagaataatacagaagaaaaaaactctttcgtatattttttagtttctacatttctagaattaatttttggaattttagccagtattattactatgtggttctccagacatcgtgaattttatgctgatgctagttctgcgaaaatggtaggtcgcgaaaaaatgattgctgctttgaatcgtttaaaaacaagtcatgaaccccaagaatctgatagtatgattgcattttgtatcaacggaaaatccaaatcttttttaaaattatttgcatctcatccttctttagaaaacaggatagaggcattatataatcaagaatatatgtag

SEQ ID NO: 1535 - protein, 292 aa, Buchnera aphidicola subsp
MTRIVLFLLTNLAVMLIFSLILFLTGIQSNTIYGLLIMSGLFGFSGSILSLILSKWIALRSVNGEIITHPRNEVESWLINTVRQQSIQKGIIMPQIAVYHATDINAFATGARRNSALIAVSTGLLENMTHHEAEAVIAHEISHIANGDMITMTLVQGVVNTFVIFISRFLSQIISNVMSSNRNENNTEEKNSFVYFLVSTFLELIFGILASIITMWFSRHREFYADASSAKMVGREKMIAALNRLKTSHEPQESDSMIAFCINGKSKSFLKLFASHPSLENRIEALYNQEYM

SEQ ID NO: 1536 - DNA, 879 bp, Buchnera aphidicola subsp
  CDS (1)..(879): transl_table=11
atgatacgtattattcttttcttattaactaatttagcagttatgctaacattcagtctgattcttgctgtgacaggaattcagtctgaaagtatttacggtctattgattatgtcaagtctatttggttttagtggatctatcttatcacttattatgtctaaatggattgcattgcgttctgtaaatggtagaatcattaatcatcctagcaatgaaacagaaagttggctaattgatactattcgtcaacaatctataaaaaaaaatattattatgccacaaatagcaatatatgaagctgctgatatcaatgcatttgctacaggtgctcgtcgtaatgcagctttgattgctatatcaacaggattactagaaaatatgacacgtagtgaggcagaagcagtaattgctcatgaaattagtcatgtttcaaatggtgatatgatcacaatgactttagttcaaggtgttgtaaacacttttgtaatctttatatctcgtattatttcacaagcattgagcagcttattatcgagtaatagaaatgaaaatagtgaagatgaaaaagattcatttttattttttttaatttctacatttctagaaataatttttggtgtacttgcaagtattattactatgtggttttctagacatcgagaattttatgctgacgcaagttcagcaaaattagtcggaaaagaaaaaatgatttctgccctaaatcgtttaaagtcaagtcatgagcctcaagaatcagatagcataattgcattttgtattaacggaaaatctaattcatttatagaattattcgcctcccatccatctttagaaaaaagaatacaggcgctaaaaaataaaaaatatatgtaa

SEQ ID NO: 1537 - protein, 292 aa, Buchnera aphidicola subsp
MIRIILFLLTNLAVMLTFSLILAVTGIQSESIYGLLIMSSLFGFSGSILSLIMSKWIALRSVNGRIINHPSNETESWLIDTIRQQSIKKNIIMPQIAIYEAADINAFATGARRNAALIAISTGLLENMTRSEAEAVIAHEISHVSNGDMITMTLVQGVVNTFVIFISRIISQALSSLLSSNRNENSEDEKDSFLFFLISTFLEIIFGVLASIITMWFSRHREFYADASSAKLVGKEKMISALNRLKSSHEPQESDSIIAFCINGKSNSFIELFASHPSLEKRIQALKNKKYM

SEQ ID NO: 1538 - DNA, 876 bp, Buchnera aphidicola subsp
  CDS (1)..(876): transl_table=11
atgatgcgtataattctttttttattaactaatttggccgttgtatgcgtttttggatttattttaagttttacaaaaataccacctgaaagtattagtggattactcattttctctagcatattcggatttagtgggtcaataatatcattattaatgtcaaaatggattgctttaaagtctgttaatggacaagttatttatcaaccatcaaataataccgaacaatggttaatagatactattaattctcaatctaaaaaaatgggcataaaaactccaactatagcaatatatcatgcatttgacatgaatgcttttgcaacaggtgcatataaaaattcagcattaattgctgtttctactggattactggaaaacatgagttatgatgaagcagaagcagttttagcccatgaaataaatcatatttcaaacggtgacatggtaactatgacgttagttcaaggtatagttaatactttcgttatatttatctctcgaattattgctcaatttgcatcgtctattttatctgaaaatagagaagataataattctaacaggaatacatgggtttatataatttgttcaacaattttagagctcatttttggaatttttgctagcataattacaatgtggttctcacggcatcgtgaattttatgctgatgcaggatcggcaaaattagtaggtcgcaaaaaaatgatttctgcattacaaaaattaaaattaagttatgaacctcaagaaaaaagcaacataattgcattttgtataaatggaaaacacagttcttttttaaatttatttatgtcacatccatcactagacaaaagaattcaagctttatacaatagagactacatgtaa

SEQ ID NO: 1539 - protein, 291 aa, Buchnera aphidicola subsp
MMRIILFLLTNLAVVCVFGFILSFTKIPPESISGLLIFSSIFGFSGSIISLLMSKWIALKSVNGQVIYQPSNNTEQWLIDTINSQSKKMGIKTPTIAIYHAFDMNAFATGAYKNSALIAVSTGLLENMSYDEAEAVLAHEINHISNGDMVTMTLVQGIVNTFVIFISRIIAQFASSILSENREDNNSNRNTWVYIICSTILELIFGIFASIITMWFSRHREFYADAGSAKLVGRKKMISALQKLKLSYEPQEKSNIIAFCINGKHSSFLNLFMSHPSLDKRIQALYNRDYM

SEQ ID NO: 1540 - DNA, 951 bp, Caulobacter crescentus
  CDS (1)..(951): transl_table=11
atgaaccacttcaagacctacatgctgctggcgggcctgacggccctgttcatgggcgcaggcttcctgatcggcggcgccaccggcatgatgatcgcgctggtcttcgccctggccatgaacgcgttctcgtactggaacgccgacaagatcgtgctgcggacctatggcgcggtcgaggtcgacgagagccatcccgagccgctgatccgcaactatgtgatcgacacggtcgagatggcccgctcggccggcctgccgcgtccgcgcatcacggtcatcgacagcgcccagcctaacgccttcgccaccggccgtgaccccgatcacgccgccgtggccgccagcaccggcctgctgcagcttctgacgcgcgaggagatccgtggcgtcatggcccacgagctggcccacgtgaagaaccgcgacaccctggtcatgaccgtgacggcgaccatcgccggcgcgatctcggccctggccaacttcgccttcttcttcggcggttcgcgcgacgaagagggcaacggcggtggtctgggcggcatgatcggcgcgatcctgatcgccatcctggctccgatcgcggccatgctggtgcagatggcgatcagccgcgcgcgcgagtacgaagccgaccgcatcggcgcgcagatcgccggcgactctgagtctctggcccgcgcgctgcagaagatcgaggcctatgcccgcggcggctatgagaacgtccaggccgagcgcaatccggccaccgcccacatgttcatcatcaacccgctggccgggaagggcgctgacaacctgttctcgacccacccggcgacccacaaccgcgtcgaggccctgatgcgcctgggcgtggagcggggcgcgcgtcgcccggttatggcggcgacgacgtcgtccagcgtgccgctgagcggcgagcgcggcggcccctggagctga

SEQ ID NO: 1541 - protein, 316 aa, Caulobacter crescentus
MNHFKTYMLLAGLTALFMGAGFLIGGATGMMIALVFALAMNAFSYWNADKIVLRTYGAVEVDESHPEPLIRNYVIDTVEMARSAGLPRPRITVIDSAQPNAFATGRDPDHAAVAASTGLLQLLTREEIRGVMAHELAHVKNRDTLVMTVTATIAGAISALANFAFFFGGSRDEEGNGGGLGGMIGAILIAILAPIAAMLVQMAISRAREYEADRIGAQIAGDSESLARALQKIEAYARGGYENVQAERNPATAHMFIINPLAGKGADNLFSTHPATHNRVEALMRLGVERGARRPVMAATTSSSVPLSGERGGPWS

SEQ ID NO: 1542 - DNA, 930 bp, Fusobacterium nucleatum subsp
  CDS (1)..(930): transl_table=11
atgaaaggtttagctgaattaaaaaataaaattgttaaagcacctcatctaaatatatttaaaataggaacatgggtaacaatggggttatttgctacttttttattagtttatatatttgtaggagatgaaatgttaaattattatccattattaatattatttgcttttggaactccttttatatcattgatgatatcaaaagctactgtgaagagagcatataatataagaatgataggagatggaggagcaagcaccgaaaaagaaaagttagtagttgatacagtaactttattaagtcaaaaattagatttacaaaaatttccagagattggagtttatccctctaatgatatcaatgcctttgcaactggagcaagtaaaaattctgctatggttgcagtttcacaaggacttttaaacagtatgaatgaaactgaaattataggagtgttagcgcatgaaatgtcgcatgtagtcaatggagatatgttaacttcttctatcttagaaggatttgtatctgcttttggagtgattgcaactttacccttcttaatgggagaaaataataacagaggtagaagagcagcatcaagtatggcaacatattatatggtaagaaatgttgcgaatatttttgggaaaatagtttcaagtgcctattcaagaagaagagaatatggagctgataaactagcagcagaaataacagatcctagttatatgaaaagtgctttgcttcgtttgcaagaaataagtgaaggaagaatttcacttcaaaatagtgatagagaatttgcaagttttaaaattactaataatttttcaatgggtaatatttttggaaatttatttgcctctcatcctagtttagcaaaaagaatagcagctattgaaagaatggaaaaaactacaaaaaaatga

SEQ ID NO: 1543 - protein, 309 aa, Fusobacterium nucleatum subsp
MKGLAELKNKIVKAPHLNIFKIGTWVTMGLFATFLLVYIFVGDEMLNYYPLLILFAFGTPFISLMISKATVKRAYNIRMIGDGGASTEKEKLVVDTVTLLSQKLDLQKFPEIGVYPSNDINAFATGASKNSAMVAVSQGLLNSMNETEIIGVLAHEMSHVVNGDMLTSSILEGFVSAFGVIATLPFLMGENNNRGRRAASSMATYYMVRNVANIFGKIVSSAYSRRREYGADKLAAEITDPSYMKSALLRLQEISEGRISLQNSDREFASFKITNNFSMGNIFGNLFASHPSLAKRIAAIERMEKTTKK

SEQ ID NO: 1544 - DNA, 870 bp, Haemophilus ducreyi
  CDS (1)..(870): transl_table=11
atgtcaaaaagagtgattttatttttattaactaacttagccattacttttgtacttggtatcgtattgaatattatttttcaagtgacaggtattaaaggcacaagtacgaccggtattttaatgatgtctttgttatttggttttaccggatcgttaatttcgctatttatgtcaaaatcgatggcattacgttctgtaggcgctgaagtgattcaacaaccgagaaaccaagcagaacagtggttatttaatacggtgcaacgtcaatcacaaaaagcaggtattccaatgccagatattgccatttatcattctgctgatgtcaatgcgtttgcaacgggtgcgactaaaaataattctttagtcgcggtgagtaccggtctgttagataatatgactgaagatgaagctgaggcggtcgtagcacatgaaattgcgcatattgctaatggtgatatggtcacaatgactttattgcaaggcgtgctaaacacgtttgtgatttttttatctagaatgatttcaacggcggtttcaggctcacgtgatgaaaatggcaattcaactcaaaatacattagtgttttgggtagtggatattgcactacaaatgattttcggcatattagcgacaatgattgctatgtggttttcacgttatcgagaatatcgtgcagatatgggctcggcacaattagttggcaaagagaaaatgattgccgctttagagcgcctaagacatgtacacgaaccacaagaaatgcaaggttcattatctgcatttatgatcaatggtattcgttctaaagagttgtttatgagtcatccaccgcttgaaaagcgcattgaagcattgagaaatttataa

SEQ ID NO: 1545 - protein, 289 aa, Haemophilus ducreyi
MSKRVILFLLTNLAITFVLGIVLNIIFQVTGIKGTSTTGILMMSLLFGFTGSLISLFMSKSMALRSVGAEVIQQPRNQAEQWLFNTVQRQSQKAGIPMPDIAIYHSADVNAFATGATKNNSLVAVSTGLLDNMTEDEAEAVVAHEIAHIANGDMVTMTLLQGVLNTFVIFLSRMISTAVSGSRDENGNSTQNTLVFWVVDIALQMIFGILATMIAMWFSRYREYRADMGSAQLVGKEKMIAALERLRHVHEPQEMQGSLSAFMINGIRSKELFMSHPPLEKRIEALRNL

SEQ ID NO: 1546 - DNA, 852 bp, Haemophilus influenzae
  CDS (1)..(852): transl_table=11
atgatgcgtattcttcttttcttggcaaccaatatggctgtaatgctggtattaggtattattttaagtgtgactggaattgcaggaaatagcaccggcggtattttaattatggctttgctatttggttttgctggctcattaatttccttattcctgtctaaaacgatggcattacgttctgtagatggagaggtgattactcaacctcgtaatcaaactgaacgttggttaattgataccgttagtcgccaagcgcagaaagcgggtattcctatgccagacgtggcgatttatcattcacccgatgtgaatgcttttgcgacaggtgcgacaaaaagcaattctttggtggctgtgagtacgggattattaaacaacatgacggaggctgaagctgaagctgttttagcgcacgaaatttctcatatttccaatggggatatggtgacgatggcgttattgcaaggcgtattaaatactttcgtgattttcttatctcgcgttatcgcaacggcggtagcaagttcgcgtaacaataatggagaagaaacgcgcagttcaggtatttatttcttggtttcgatggtattggaaatgctctttggtgtgcttgcaagtattatcgcaatgtggttctcgcgctaccgcgaatttcgtgcagatgcaggttccgcaagtttagtaggcaaagaaaagatgattatggcattgcaacgtttgcaacaacttcacgaaccccaaaatcttgaaggttctttaaatgcctttatgattaatggtaaacgcagtgaactctttatgagccatccaccactcgaaaagcgtattgaagccttacgtaatctttaa

SEQ ID NO: 1547 - protein, 283 aa, Haemophilus influenzae
MMRILLFLATNMAVMLVLGIILSVTGIAGNSTGGILIMALLFGFAGSLISLFLSKTMALRSVDGEVITQPRNQTERWLIDTVSRQAQKAGIPMPDVAIYHSPDVNAFATGATKSNSLVAVSTGLLNNMTEAEAEAVLAHEISHISNGDMVTMALLQGVLNTFVIFLSRVIATAVASSRNNNGEETRSSGIYFLVSMVLEMLFGVLASIIAMWFSRYREFRADAGSASLVGKEKMIMALQRLQQLHEPQNLEGSLNAFMINGKRSELFMSHPPLEKRIEALRNL

SEQ ID NO: 1548 - DNA, 900 bp, Lactobacillus plantarum
  CDS (1)..(900): transl_table=11
atgttatttgagcaaattgcccgcaacaagcggcacacgttatacgtgatggccgcttttgtcatattacttgcagtgattggtttagcagttggctacgtgttttttaatagtgcgattgcagggttactagtagccttgattgcagcggtattttatatggtattaatgattagtcagtcgaccgacattgtcatgagcatgaatcatggacgtgagctgcatcaagctgacgatgatcccgagctctggcacattgtggaagacatggcgttggttgctaaagtaccgatgccacgcgtctttattattgatgatgagagccccaatgcgtttgcgacaggaaatgaccctgagcatgcggcagttgcagtgacaactggtattcaggcacgattaacgcgtgaagagatggaaggcgtcattggtcacgagatgagtcatgtgcgtaactatgatattcggttacagaccattgccttggctctgacagcggccatcagtttgttagtcaattggggtatgaacgccttttggtggggcggtggccggcgcagtcgggataatgatcgtgacggcaacggtgcccaggtcttactaatgatcctagcgattgttgtcattattttagcgccactagcagctagtttagtgcagatggcgctatcccgtaatcgcgaatacttagcggatgctggcagtgtggaactgactcgtaatccgttgggcttaatcagtgcacttgaaaaaatcgatgacagccaacccatgcaagcggcggatcctagtagcgcggccctctatatttctgatccgtttaaggcgaagaaatcatggacgcacttattcgatacccacccaccgatggctgatcgcatcactcgtttaaaaaacatgtaa

SEQ ID NO: 1549 - protein, 299 aa, Lactobacillus plantarum
MLFEQIARNKRHTLYVMAAFVILLAVIGLAVGYVFFNSAIAGLLVALIAAVFYMVLMISQSTDIVMSMNHGRELHQADDDPELWHIVEDMALVAKVPMPRVFIIDDESPNAFATGNDPEHAAVAVTTGIQARLTREEMEGVIGHEMSHVRNYDIRLQTIALALTAAISLLVNWGMNAFWWGGGRRSRDNDRDGNGAQVLLMILAIVVIILAPLAASLVQMALSRNREYLADAGSVELTRNPLGLISALEKIDDSQPMQAADPSSAALYISDPFKAKKSWTHLFDTHPPMADRITRLKNM

SEQ ID NO: 1550 - DNA, 888 bp, Leptospira interrogans serogroup Icterohaemorrhagiae serovar
  CDS (1)..(888): transl_table=11
atgtggtttaaacgaattgggttatttttactgaccaacatactcgttgtcgttacgatttcaattgtaacgagtgtacttggaatcggtccgtacctggatgcaaatggaatcaatctgagttctttgctcgtattctgtttcctttggggaatgggaggtgcgttcgtatcattgcttctgtccaaatttatggcgaagatgatgatgggagtgcaggtcatagatcctagatctgcttccggggcagaaagagaattgtattctagagttgaaaggcttgcgagaacggccaatcttcctatgcctgaagtaggaatttatcattctccagaagtaaatgcatttgcaactggaccttctaaatctagttctttagtagcggtgtccagcggtctacttcaaacaatggataacgcggaagtagaaggagtacttgcacatgagttggcacacgtagctaacggagacatggtgactatgactctgatccaaggagttgttaacgcttttgtaatgttcttttctagaattatcagctacgctctcagtacgatggtcaaagatgaacttcaatatacggtccgtttaattgcaaatatcgtattgagtattttattcagtattctaggatcgattatagtagcatatttttctagaactagagaatatcgagcagatgcaggtggagcgaaactcgccggacgtcagaatatgattgctgcgttagaaaaactaaaacgtacatttgacgcgccggaagacgaacgaggaagagaagctcttgctacaatgaaaatatccggacataacaaatggatggccttattttccactcatcctcctttagaagcaagaattgcggctttgaaaaactctggatattga

SEQ ID NO: 1551 - protein, 295 aa, Leptospira interrogans serogroup Icterohaemorrhagiae serovar
MWFKRIGLFLLTNILVVVTISIVTSVLGIGPYLDANGINLSSLLVFCFLWGMGGAFVSLLLSKFMAKMMMGVQVIDPRSASGAERELYSRVERLARTANLPMPEVGIYHSPEVNAFATGPSKSSSLVAVSSGLLQTMDNAEVEGVLAHELAHVANGDMVTMTLIQGVVNAFVMFFSRIISYALSTMVKDELQYTVRLIANIVLSILFSILGSIIVAYFSRTREYRADAGGAKLAGRQNMIAALEKLKRTFDAPEDERGREALATMKISGHNKWMALFSTHPPLEARIAALKNSGY

SEQ ID NO: 1552 - DNA, 915 bp, Listeria innocua
  CDS (1)..(915): transl_table=11
atgctatttgaacaaattgcagcaaataagcgaaaaactgtttttatcattcttggcttttttattttcgttcttatggttggggctgctataggtataattgtttggaataactatctaaatggactcatacttgcggcggctattggtgcggtttatattttgataatggttatgagcagttcgtcggttgtcatggcgatgaatcatgcgaaagaagtcacctcaaaagagcaagcaccagttttatgggatactgttgaaagcatggcgatggttgctggtatcccaatgccaaaagtttatattgttgaagatccaagtccgaatgcatttgcaaccggtatttctcctgaaaaaggcgccgtagctgtcactagaggattgttaaataaattagaacgatatgagttagagggcgttattgcgcatgagatttctcatattcgtaactatgatattcgcttgtcgactattgcgattgccttagtcgcggttattgctatcctaagtgatttagctatgcgtttgattttctggggtagcttaacaggcggaagaaatagccgcaaaagtgacaataataatggcggcggggcacagataattatctatgtagtagcactaatttttgttattttagctccgattattgctacggcgattcagttcgctttatctagaaatagggagtatttggctgatgcaagtgcagtagaattaactcggaatccagatgggcttatccaagcattacaaaaaattagcggtgatacgaaaaaaatggaagaagttagcgcttctagcgagtccatttacttttcgtcgccattgaagtctaaaaaagataaaccaggtcttttcgattcccatccgccgattagttcgcgaattgagcggttggaaaatatgtaa

SEQ ID NO: 1553 - protein, 304 aa, Listeria innocua
MLFEQIAANKRKTVFIILGFFIFVLMVGAAIGIIVWNNYLNGLILAAAIGAVYILIMVMSSSSVVMAMNHAKEVTSKEQAPVLWDTVESMAMVAGIPMPKVYIVEDPSPNAFATGISPEKGAVAVTRGLLNKLERYELEGVIAHEISHIRNYDIRLSTIAIALVAVIAILSDLAMRLIFWGSLTGGRNSRKSDNNNGGGAQIIIYVVALIFVILAPIIATAIQFALSRNREYLADASAVELTRNPDGLIQALQKISGDTKKMEEVSASSESIYFSSPLKSKKDKPGLFDSHPPISSRIERLENM

SEQ ID NO: 1554 - DNA, 915 bp, Listeria monocytogenes serotype 4b
  CDS (1)..(915): transl_table=11
atgctatttgaacaaattgcagcaaataagcgaaaaacaatttttattattcttggctttttcattttcgttcttatggttggcgctgctataggtataattgtttggaataactatctgaatgggctcatactcgcggcagtgattggtgcattttatattttgattatggtaatgagcagttcatctgttgtcatggcgatgaaccatgcgaaagaagttacatccaaagatcaagcgccagttttgtgggatacagtagagagtatggcaatggttgctggtattccgatgccaaaagtatatatcgttgaagatgcaagtccgaacgcatttgcgacggggatttctcctgaaaaaggagccgtggcggttactagaggattgcttaataaattagaacgttatgaacttgagggcgttattgcgcatgaaatttctcatattcgtaattatgatattcgattatcaacgattgccattgcgctagtagctgttattgcgattcttagtgatttagctatgcgaatgattttctggggaagcctaactggtggcagaaataatcgtaagagtgacaataataacagtggtggggcacaagcgattatctatatcgttgcactcatatttgttattttggcgcctattattgcaacagctatccaatttgctttatctcgtaatagagagtatttagctgatgctagtgcggtagaattaaccagaaatcctgatggacttatccaagctttacaaaaaatcagcggagattcgaaaaaaatggaagaagttagtgcttctagtgagtccatttactttgcgtcacctctaaagtctaaaaaaaataagccaggtctttttgactctcatccgccaattagttcgcggattgaacgcttagaaaatatgtaa

SEQ ID NO: 1555 - protein, 304 aa, Listeria monocytogenes serotype 4b
MLFEQIAANKRKTIFIILGFFIFVLMVGAAIGIIVWNNYLNGLILAAVIGAFYILIMVMSSSSVVMAMNHAKEVTSKDQAPVLWDTVESMAMVAGIPMPKVYIVEDASPNAFATGISPEKGAVAVTRGLLNKLERYELEGVIAHEISHIRNYDIRLSTIAIALVAVIAILSDLAMRMIFWGSLTGGRNNRKSDNNNSGGAQAIIYIVALIFVILAPIIATAIQFALSRNREYLADASAVELTRNPDGLIQALQKISGDSKKMEEVSASSESIYFASPLKSKKNKPGLFDSHPPISSRIERLENM

SEQ ID NO: 1556 - DNA, 915 bp, Listeria monocytogenes
  CDS (1)..(915): transl_table=11
atgctatttgaacaaattgcagcaaataagcgaaaaacaatttttattattcttggctttttcattttcgttcttatggttggcgctgctataggtataattgtttggaataactatctgaatgggcttgtactcgcggctgttattggtgcattttatattttgattatggtaatgagcagttcgtcggtcgttatggcgatgaatcatgcgaaggaagtcacatcaaaagaacaagcgccagttttgtgggataccgttgaaagtatggcaatggttgctggtattccgatgccaaaagtatatatcgttgaagatccaagtccgaacgcttttgcgacggggatttctcctgaaaaaggagccgtggcggttactagaggattgcttaataaattagaacgttatgaacttgagggcgttattgcgcatgaaatttctcatattcgtaattatgatattcggttatcaacgatcgccattgcgctagtggctgttattgcgattcttagtgatatagcaatgcgaatgattttctggggaagcctaactggtggcagaaataaccgtaaaagtgacaataataacagtggcggggcacaagcgattatctatatcgttgcactcatatttgttattttggcgcctattattgcaacagctattcaatttgcgttatctcgtaatagagagtatttagctgatgctagtgcggtagaattaaccagaaatccagatggacttatccaagctttacaaaaaatcagtggtgattcgaaaaaaatggaagaagtgagtgcttctagtgagtccatttacttttcgtcacctctaaagtcaaaaaaaaataagccaggtctttttgactcacatccgccaattagttcgcggattgaacgcttagaaaatatgtaa

SEQ ID NO: 1557 - protein, 304 aa, Listeria monocytogenes
MLFEQIAANKRKTIFIILGFFIFVLMVGAAIGIIVWNNYLNGLVLAAVIGAFYILIMVMSSSSVVMAMNHAKEVTSKEQAPVLWDTVESMAMVAGIPMPKVYIVEDPSPNAFATGISPEKGAVAVTRGLLNKLERYELEGVIAHEISHIRNYDIRLSTIAIALVAVIAILSDIAMRMIFWGSLTGGRNNRKSDNNNSGGAQAIIYIVALIFVILAPIIATAIQFALSRNREYLADASAVELTRNPDGLIQALQKISGDSKKMEEVSASSESIYFSSPLKSKKNKPGLFDSHPPISSRIERLENM

SEQ ID NO: 1558 - DNA, 861 bp, Mycobacterium bovis
  CDS (1)..(861): transl_table=11
atgacttggcatccgcatgccaaccggctgaagacgttcctgctgttggtcggtatgtccgcgttgatcgtggccgtcggcgcgttgtttggcaggacggcgctgatgctggcggcgctgttcgccgtcggaatgaacgtctacgtctacttcaatagcgacaagctggcgctgcgggcgatgcatgcgcaaccggtttccgaactgcaggcgccggcgatgtaccggatcgttcgagagctggcgaccagcgctcaccagccgatgccccggctgtacatcagcgacaccgccgcacccaacgcgttcgccaccggccgcaacccgcgcaatgccgcggtgtgttgcacgactggcatcctgcgtatcctcaatgagcgtgagctgcgtgccgtgctgggccacgagctgtctcacgtctacaaccgcgacatcctgatctcttgtgtggcaggtgcgctggcagcggtgattaccgcgctggccaacatggccatgtgggccggcatgttcggcggcaaccgagacaacgccaatccctttgcactgcttctggttgcgctgctgggcccgatcgcggcaaccgtgatacggatggccgtgtcgcgatcgcgggagtaccaggccgacgagtcgggtgccgtcctgaccggggacccgctggcgttggcgtcggcattgcgcaagatctccggcggcgtccaggcggcgccgctgccgccggagccgcagctggccagccaggcgcacctgatgatcgccaacccgttccgggcgggtgagcggatcggatcgctgttttcgactcacccaccgatcgaggaccgcattcgccggctggaggcgatggcgcgcggctga

SEQ ID NO: 1559 - protein, 286 aa, Mycobacterium bovis
MTWHPHANRLKTFLLLVGMSALIVAVGALFGRTALMLAALFAVGMNVYVYFNSDKLALRAMHAQPVSELQAPAMYRIVRELATSAHQPMPRLYISDTAAPNAFATGRNPRNAAVCCTTGILRILNERELRAVLGHELSHVYNRDILISCVAGALAAVITALANMAMWAGMFGGNRDNANPFALLLVALLGPIAATVIRMAVSRSREYQADESGAVLTGDPLALASALRKISGGVQAAPLPPEPQLASQAHLMIANPFRAGERIGSLFSTHPPIEDRIRRLEAMARG

SEQ ID NO: 1560 - DNA, 840 bp, Neisseria meningitidis serogroup A
  CDS (1)..(840): transl_table=11
gtgaaacgaatttttctgtttttggctaccaatatcgctgttttggtcgtaatcaacattgttttggcggttttgggcatcaacagccagggcggcacgggcagcctgttggcgtattccgccgtcgtcggcttcactggttcgattatttcgctgctgatgtccaaattcatcgccaaacaatcggtcggcgcggaagttatcgacacgccgcgcaccgaagaagaagcctggcttttgaacactgtcgaagcccaagcgcggcaatggaacctgaaaacgcccgaagtcgccatctaccactcccccgaacccaatgcctttgccacgggcgcatcgagaaacagctccctgatcgccgtcagcaccggtttgctcgaccatatgacgcgtgacgaagtggaagccgtattggcgcacgaaatggcacacgtcggcaacggcgatatggttacgctgacgctgattcaaggcgtggtcaatacctttgtcgtgttcctgtcgcgcattattgccaacctgattgcccgaaacaacgacggcagccagtcccagggaacttatttcctggtcagcatggtattccaaatcctgttcggcttccttgccagcttaattgtcatgtggttcagccgacaacgcgaataccgcgccgacgcgggcgcggcaaaactggtcggcgcgccgaaaatgatttccgccctgcaaaggcttaaaggcaacccggtcgatttgcccgaagaaatgaacgcaatgggcatcgccggagatacgcgcgactccctgctcagcacccacccttcgctggacaaccgaatcgcccgcctcaaatcgctttaa

SEQ ID NO: 1561 - protein, 279 aa, Neisseria meningitidis serogroup A
MKRIFLFLATNIAVLVVINIVLAVLGINSQGGTGSLLAYSAVVGFTGSIISLLMSKFIAKQSVGAEVIDTPRTEEEAWLLNTVEAQARQWNLKTPEVAIYHSPEPNAFATGASRNSSLIAVSTGLLDHMTRDEVEAVLAHEMAHVGNGDMVTLTLIQGVVNTFVVFLSRIIANLIARNNDGSQSQGTYFLVSMVFQILFGFLASLIVMWFSRQREYRADAGAAKLVGAPKMISALQRLKGNPVDLPEEMNAMGIAGDTRDSLLSTHPSLDNRIARLKSL

SEQ ID NO: 1562 - DNA, 861 bp, Pasteurella multocida
  CDS (1)..(861): transl_table=11
atgatgcgaattttgctatttcttgccacgaacatggcagttttagttgtttttaacattattttaagtttgacggggatccaagcacaagatgcgacagggctattgctcatggcggcattatttggtttttctggttctttaatttctctgtttttatctaaaaccatggctctacgcgctgtgggggcggaagtgatcaaacagccacgtaatgacatggaacgttggttagtgaatacagttcgttcgcaagctgaacgcgcgaatttaccgatgcctgatgtcgcgatttatcactctgaagatgtgaatgcgtttgcgacaggaccaagtaaaaataattccttagtggccgtgagtactggcttattacgtgccatgacacaagatgaagcagaagcagtacttgcgcatgaagtggcacatattaaaaatggtgatatggtgaccatgaccttattacaaggtgtattgaacacattcgtgatttttgtgtcacgcatgatcgcgaaagtcgtgtcaagcaatcgagatggtgaaagtagcacagggatttattttcttgtgtctatggtcttggaaatcttatttggtttcttagccagcatgatcgccatgtggttctctcgctatcgagaatttcgtgcggatgcagggtctgcaaagttagtcggtaaacacaaaatgattgccgcgttacaacgtttgcaacgtttacatgaaccacaagagttagaaggacagcttgccgcttttgcgattaacggtaaacgtggtggtttagcggctttatttatgagccatccgccattagaaaaacgtattgcggcattacaacaattagatagttttaaataa

SEQ ID NO: 1563 - protein, 286 aa, Pasteurella multocida
MMRILLFLATNMAVLVVFNIILSLTGIQAQDATGLLLMAALFGFSGSLISLFLSKTMALRAVGAEVIKQPRNDMERWLVNTVRSQAERANLPMPDVAIYHSEDVNAFATGPSKNNSLVAVSTGLLRAMTQDEAEAVLAHEVAHIKNGDMVTMTLLQGVLNTFVIFVSRMIAKVVSSNRDGESSTGIYFLVSMVLEILFGFLASMIAMWFSRYREFRADAGSAKLVGKHKMIAALQRLQRLHEPQELEGQLAAFAINGKRGGLAALFMSHPPLEKRIAALQQLDSFK

SEQ ID NO: 1564 - DNA, 876 bp, Pseudomonas aeruginosa
  CDS (1)..(876): transl_table=11
atgatgcgcatcctgttgttcctggccaccaacctggcagtcctggtgattgccagcatcaccctgaaactgctcggggtggaccgcttcaccggccagaattacggcagcctgctggtcttctgcgccgtgttcggtttcgccggttcgctggtctcgctgttcatctccaagtggatggcgaagatgagcaccggtaccgaagtcatcagccagccgcgcacccgtcacgaacagtggctgctgcaaaccgtcgaagagctgtcccgcgaagccggcatcaagatgccggaggtcggcatcttccccgcctacgaggccaacgccttcgccaccggctggaacaagaacgacgcgctggtcgcggtcagccagggcctgctcgaacgtttctcgcccgatgaggtgaaagccgtcctcgcccacgagatcggtcacgtcgccaacggcgacatggtcaccctggcattgatccagggcgtggtgaacaccttcgtgatgttcttcgcgcggatcttcggcaacttcgtcgacaaggccatcctgaagaacgaggacggcccgggcatcggctacttcgtcgcgaccatcttcgccgaactggtgctcggcatcctcgccagcatcatcgtcatgtggttctcgcgccgccgcgagttccgcgctgacgccgccggcgcccacctggccggcaccggcgcgatgatcgccgcgctgcaacgcctgcgttcggaacagggcgtgccggtgcagatgcccgacaccctgaacgccttcggcatcaatggcggcctcaagcacggcctggccggcctgctgatgagccacccgccgctggaggatcgtatcgaagcgctgcgcgccagcgcacgctga

SEQ ID NO: 1565 - protein, 291 aa, Pseudomonas aeruginosa
MMRILLFLATNLAVLVIASITLKLLGVDRFTGQNYGSLLVFCAVFGFAGSLVSLFISKWMAKMSTGTEVISQPRTRHEQWLLQTVEELSREAGIKMPEVGIFPAYEANAFATGWNKNDALVAVSQGLLERFSPDEVKAVLAHEIGHVANGDMVTLALIQGVVNTFVMFFARIFGNFVDKAILKNEDGPGIGYFVATIFAELVLGILASIIVMWFSRRREFRADAAGAHLAGTGAMIAALQRLRSEQGVPVQMPDTLNAFGINGGLKHGLAGLLMSHPPLEDRIEALRASAR

SEQ ID NO: 1566 - DNA, 888 bp, Pseudomonas putida
  CDS (1)..(888): transl_table=11
atgatgcgcattctgttgtttgtagccaccaacctcgcggtggtgctggttgcaagcattaccctgagcctgttcggtttcaacgggttcatggccgccaacggggtcgacctgaacctcagcagcctgctggtgttctgcgccgtgttcggctttgccggctccctcgtttcgctgttcatctccaagtggatggcgaagatgaccaccggcacccagatcatcagccagccgcgcacccgccacgagcagtggctgctgcaaacggtcgaagagctgtcccgcgaagcgggcatcaaaatgcctgaagtgggtatcttcccggcttacgaggccaacgccttcgccaccggctggaaccgcaacgacgcgctggtcgcagtgtcccagggcctgctggagcgcttctcgcccgatgaagtgcgcgcggtactggcccacgaaatcggccacgttgccaacggcgacatggtcaccctggcgctggtgcagggcgtggtgaacaccttcgtgatgttctttgcccgcatcatcggcaactttgtcgacaaggtcatcttcaagaacgaagagggccaaggcattgcctactatgtggcgaccatcgttgccgagctgatccttggcatcctggccagcatgatcgtgatgtggttctcgcgccgccgcgaattccgcgccgacgaagccggtgcgcagctggccggtaccgcagcaatgatcggcgccctgcagcgcctgcgcgtggaacaaggcctgccagtgcacatgccggacaccatgaaggccttcggcatcaatggcggcctcaagcacggcctggccgggttgctgatgagccacccaccgctggaagaccgcatcgaggccctgcgtcagcgcggctga

SEQ ID NO: 1567 - protein, 295 aa, Pseudomonas putida
MMRILLFVATNLAVVLVASITLSLFGFNGFMAANGVDLNLSSLLVFCAVFGFAGSLVSLFISKWMAKMTTGTQIISQPRTRHEQWLLQTVEELSREAGIKMPEVGIFPAYEANAFATGWNRNDALVAVSQGLLERFSPDEVRAVLAHEIGHVANGDMVTLALVQGVVNTFVMFFARIIGNFVDKVIFKNEEGQGIAYYVATIVAELILGILASMIVMWFSRRREFRADEAGAQLAGTAAMIGALQRLRVEQGLPVHMPDTMKAFGINGGLKHGLAGLLMSHPPLEDRIEALRQRG

SEQ ID NO: 1568 - DNA, 888 bp, Pseudomonas syringae pv
  CDS (1)..(888): transl_table=11
atgatgcgcattttgctgtttttggccactaaccttgcggtcgtgctgattgccagcatcaccctgagcctttttggcttcaatgggttcatggcggccaacggggttgatctgaacctcaatcagctgctggtcttctgcgctgtgttcggtttcgccggctcgctgttctcgctgttcatctccaagtggatggcgaaaatgagcaccggtactcagatcatcacccagccacgtactcgccatgagcaatggttactgcagaccgttgaacaactgtcccgcgatgcgggcatcaagatgccggaagtcggtatttttccggcgtatgaagccaatgcgttcgctaccggctggaacaagaacgacgcactggttgccgtcagccagggcctgctcgagcggttctcgccagatgaggtaaaggctgtactggcgcacgaaatcggccatgttgccaacggcgacatggtcacgctggccctggtgcagggtgtggtgaacacctttgtgatgttcttcgcccgtatcatcggcaattttgtcgacaaagtgatcttcaagaccgagaacggtcagggtatcgcctactacatcacgacgatctttgccgagctggtactgggctttctggccagtgcgattgtcatgtggttctcgcgcaaacgcgaattccgcgctgacgatgccggtgcacgactggccggtacggacgcgatgatcggtgcgctgcaacgcttgcgctcggaacagggcgtaccggtgaacatgcctgacagcctgacggcgttcggtatcaacgccggcctcaagaaaggcctcgccggcctgttcatgagccacccgccgctggaacaacgcatcgaggcactgcgccgccgcggttga

SEQ ID NO: 1569 - protein, 295 aa, Pseudomonas syringae pv
MMRILLFLATNLAVVLIASITLSLFGFNGFMAANGVDLNLNQLLVFCAVFGFAGSLFSLFISKWMAKMSTGTQIITQPRTRHEQWLLQTVEQLSRDAGIKMPEVGIFPAYEANAFATGWNKNDALVAVSQGLLERFSPDEVKAVLAHEIGHVANGDMVTLALVQGVVNTFVMFFARIIGNFVDKVIFKTENGQGIAYYITTIFAELVLGFLASAIVMWFSRKREFRADDAGARLAGTDAMIGALQRLRSEQGVPVNMPDSLTAFGINAGLKKGLAGLFMSHPPLEQRIEALRRRG

SEQ ID NO: 1570 - DNA, 870 bp, Pyrococcus abyssi
  CDS (1)..(870): transl_table=11
atgggcctaggcctgtggatcaggacaggggttttaatggccttcctcacagcgctgctcgttggcataggctacctgataggtggaaggggagggatgataatagccttcaccatagcattgttcatgaacctgataagctactggttcagcgattccatagtgctgagctggtacaacgccaggatagttagtgaggaggaagctcctgagctccactacatagtggagaagcttgccagacaggctggaatacccaagccaaaggtggcaatagttccaacaatggttccgaatgcgttcgcaactggaagaggcccggggaatgctgtcgttgcagtgaccgaggggctgcttcatttattgaacagagatgagcttgaaggggtcatagcccatgagataagccatataaagaacagggacaccctgatccaaaccctcgccgcagttctggctggagctataatgatactcgtcgacttcgccaggtggtccctgtggttcggtgcctacgacgatgaaagggattcaggaagcgttataggcctaatcttggctatagtactggctccactagctgccacattgattcaacttgcgataagcaggtcaagggagtacttagccgatgaaactggtgccaggataagcggtaagccccacgctttggccagcgcgctgatgaagattgaagaagcgataaggtacaggcccctgagaagaggaaacccggccacagcccacatgttcatagtgaacccgttcaggggagttgactttgcagagctattctcaacccatccaccgacagagaagaggattgagaggctcaggaagatagcactcgagatgggcatagtcttctag

SEQ ID NO: 1571 - protein, 289 aa, Pyrococcus abyssi
MGLGLWIRTGVLMAFLTALLVGIGYLIGGRGGMIIAFTIALFMNLISYWFSDSIVLSWYNARIVSEEEAPELHYIVEKLARQAGIPKPKVAIVPTMVPNAFATGRGPGNAVVAVTEGLLHLLNRDELEGVIAHEISHIKNRDTLIQTLAAVLAGAIMILVDFARWSLWFGAYDDERDSGSVIGLILAIVLAPLAATLIQLAISRSREYLADETGARISGKPHALASALMKIEEAIRYRPLRRGNPATAHMFIVNPFRGVDFAELFSTHPPTEKRIERLRKIALEMGIVF

SEQ ID NO: 1572 - DNA, 870 bp, Pyrococcus furiosus
  CDS (1)..(870): transl_table=11
gtgggcattggattatgggtgagaactggattattgatggcatttcttactggcctattggtgggtattggatatctaataggcggtcaaggtggtatgataatagccttcaccatagcccttttcatgaacttcttcagctactggttcagtgactcaatagtcttgagttggtacaatgccagaatagttagtgaagaggaagcgccagaactccacaggatagttgaaaagcttgccatgcaggcgggaattcccaagcccagagttgctatagtcccaacattagtgccaaatgcatttgcaaccggaagaagtccagagcatgcggtagttgccgtgactgagggattactgagaattttgaatagggatgaattggaaggagttattgcacacgagataagccatataaagaacagagacactctaattcaaacgatagcagctgttcttgcgggcgcaataatggttctcgttaactttgcgaggtggtctttatggttcggggcttacgatgaagatagagatggtggaaacatagtagctctaatcttggcaataatccttgctccaattgcagcaacactaattcagctcgctataagcagatcaagggaatacttagctgatgaaacgggagccaagataagcggaaagcctcacgctctagcgagtgcgttaatgaagatcgaagaagccgtgaggtacaggcccctaaagaatggaaatccagccacagcccacatgttcatagtaaacccattcagaggagtggactttgtagagctattttctactcacccaccaactgaaaagagaattgaaaggctaaggaagatagctatggagatgggtataatcttttga

SEQ ID NO: 1573 - protein, 289 aa, Pyrococcus furiosus
MGIGLWVRTGLLMAFLTGLLVGIGYLIGGQGGMIIAFTIALFMNFFSYWFSDSIVLSWYNARIVSEEEAPELHRIVEKLAMQAGIPKPRVAIVPTLVPNAFATGRSPEHAVVAVTEGLLRILNRDELEGVIAHEISHIKNRDTLIQTIAAVLAGAIMVLVNFARWSLWFGAYDEDRDGGNIVALILAIILAPIAATLIQLAISRSREYLADETGAKISGKPHALASALMKIEEAVRYRPLKNGNPATAHMFIVNPFRGVDFVELFSTHPPTEKRIERLRKIAMEMGIIF

SEQ ID NO: 1574 - DNA, 873 bp, Pyrococcus kodakaraensis
  CDS (1)..(873): transl_table=11
atgggactcgtgatgtggctgagaaccggagtgctcatggcgatcctaactggcctgctaatggggataggctacctcttcggcgggccgaatgtggcgttcataatgttcctgttctcaatgttcttcaacttcataacatactggtacagcgacaggatagtgctgagctggtacaacgcgaggatagttgatgagtacgaagctccagagctgtacgcgatagtgagggatctcgcccagagggccggccttccaacgcccagggtggcgataatcccgagcgagactcccaacgccttcgcgactggaagggatcccaagcacgccgtagtggccgtaacccagggactcctcaggatactcaacagggacgagcttgagggagtcatagggcacgagctgacccacataaagaacagggacatactaatagggacggtcgctgccgcaatggcaggtgcaataatgcagctcgcctactgggccaggtggatagccatattcggaggatttaaccgggacagggacgatggcggagacatcattggggctatactcgtggctatcctggccccaatagcggcaatgctcatccaggctgcgataagcaggtcaagggagttcttagcggatgagggtggagcaaggataagcggcaagccgcacgccctcgccagcgcgctgatgaagatagagcaggcagttaactaccgcccgatgagggaaggcaacccagcaacggcccacatgttcatcgtgaacccgttcaggggcatgagcatagcgaacctcttctcaacccacccgccgaccgaggcgagaatagagaggctcaggaagatagcggaggagatggggatttacttctga

SEQ ID NO: 1575 - protein, 290 aa, Pyrococcus kodakaraensis
MGLVMWLRTGVLMAILTGLLMGIGYLFGGPNVAFIMFLFSMFFNFITYWYSDRIVLSWYNARIVDEYEAPELYAIVRDLAQRAGLPTPRVAIIPSETPNAFATGRDPKHAVVAVTQGLLRILNRDELEGVIGHELTHIKNRDILIGTVAAAMAGAIMQLAYWARWIAIFGGFNRDRDDGGDIIGAILVAILAPIAAMLIQAAISRSREFLADEGGARISGKPHALASALMKIEQAVNYRPMREGNPATAHMFIVNPFRGMSIANLFSTHPPTEARIERLRKIAEEMGIYF

SEQ ID NO: 1576 - DNA, 861 bp, Ralstonia solanacearum
  CDS (1)..(861): transl_table=11
atgttcaactggatcaagaccttcatgctgatggcagcgatcaccgcgctgttcatcgtcatcggcggcatgatcggcggacgcagcgggatgatgctggcgctgctgttcgcgctgggcatgaatttcttctcgtactggttctccgacaagatggtcctgcgcatgtacaacgcgcaggaagtcagcgagaccaccgcgccgcagttctaccgcatggtgcaggagctggcggggcgcgccggcctgccgatgccgcgcgtctacctgatcgacgaagcccagcccaacgcctttgccaccggccgcaacccggagcatgcggcggtcgcggccaccaccggcatcctcaacatcctgagcgagcgcgagctgcgcggcgtgatggcgcacgaactggcacacgtgcagcaccgcgacatcctgatctccaccctctcggccaccatggccggcgcgatctcggcgctggccaactttgcggtgttcttcggcgggcgcgatgaggaaggccggccggtcaacccgatcgccgggattgccgtggcgatcctcgcgccgctggcggcatcgctgatccagatggcgatctcccgcgcgcgcgagttcgaagccgaccgcggcggcgcggtcatcagcggcgatccgcaggcgctggcgtcggcgctggacaagatccatcgctttgccgccggcattccgttcgcggcggcggaggcgcatccggccaccgcgcagatgatgatcatgaacccgctgcacggcggcggcctggccaacctgttcagcacgcacccggccaccgaggagcgcatcgcgcgcctgatgcacatggcgcagacagggacctatccggcctga

SEQ ID NO: 1577 - protein, 286 aa, Ralstonia solanacearum
MFNWIKTFMLMAAITALFIVIGGMIGGRSGMMLALLFALGMNFFSYWFSDKMVLRMYNAQEVSETTAPQFYRMVQELAGRAGLPMPRVYLIDEAQPNAFATGRNPEHAAVAATTGILNILSERELRGVMAHELAHVQHRDILISTLSATMAGAISALANFAVFFGGRDEEGRPVNPIAGIAVAILAPLAASLIQMAISRAREFEADRGGAVISGDPQALASALDKIHRFAAGIPFAAAEAHPATAQMMIMNPLHGGGLANLFSTHPATEERIARLMHMAQTGTYPA

SEQ ID NO: 1578 - DNA, 1011 bp, Rhizobium loti
  CDS (1)..(1011): transl_table=11
atgaacactcttcgcaccgccatgcttctagccgcgatgacggcgctgttcatgggcgtcggcttcctgatcggcggttcgggcggcatgatgatcgcgctgctgatcgccgccggcaccaatctgttcagctactggaacgccgacaagatggtgctgtcgatgaaccgcgccgtcgaggtcgacgagaagaatgcgccggaatattacgccatcgtccaggcgctggccaagcaggccgggctgccgatgcccaggacctatctgatcgacaatccgcagcccaatgccttcgccaccggccgcaatccgcagaacgcggcggtcgccgcctccaccggcctgttgcagcggctgacccatgaagaggtcgcggctgtcatggcgcacgaactcgcgcacgtccagcaccgcgacacgctgaccatgaccatcgtcgccacctttgccggtgccatctcgatgctgggcaatttcgcttttttcctcggcggcaaccgcgacaacaacccgttcggctttgtcggcgtgttggcggcgatgatcgtggcgccctttgccgcgatgatcgtgcagatggcggtcagccgcacccgcgaatacgaggccgaccggcgcggcgccgaaatctgtggacacccgctctggctggcatcggcgcttgacaagatcgcccgcggcgccgaacgcattcccaaccccgatgcggagcgcaatccggcgatggcgcatctcttcatcatcaatcctctgcacggcgagcgcatggacaatctgttctccacccaccccagcaccgacaaccgcatcgccgcgttgcaggagatggcacagcagatggcgggcggcacccaagccgccccgcgcccgacacctaggcaggccggggaacaacagccgtccggcccgtggggccaggcccctcaagcagaacagccggcggagccggaaaggccgaaggccaacccatggggacgcaatccgaccgggcccaaaggccgatggtcgtga

SEQ ID NO: 1579 - protein, 336 aa, Rhizobium loti
MNTLRTAMLLAAMTALFMGVGFLIGGSGGMMIALLIAAGTNLFSYWNADKMVLSMNRAVEVDEKNAPEYYAIVQALAKQAGLPMPRTYLIDNPQPNAFATGRNPQNAAVAASTGLLQRLTHEEVAAVMAHELAHVQHRDTLTMTIVATFAGAISMLGNFAFFLGGNRDNNPFGFVGVLAAMIVAPFAAMIVQMAVSRTREYEADRRGAEICGHPLWLASALDKIARGAERIPNPDAERNPAMAHLFIINPLHGERMDNLFSTHPSTDNRIAALQEMAQQMAGGTQAAPRPTPRQAGEQQPSGPWGQAPQAEQPAEPERPKANPWGRNPTGPKGRWS

SEQ ID NO: 1580 - DNA, 960 bp, Rhizobium meliloti
  CDS (1)..(960): transl_table=11
atgaatctcatgcgcaccgcaatgctgctcgccttcatgaccgtcctcttcatggccgtcggctatgtcatcggcggccgcggtggcatgatgatcgccctcgtcatcgccgcaggcatgaacttcttctcctactggaattccgaccggatggtcctgcggatgtaccgggcgcaggaggtggacgagcacagcgcgccggaatattacgggatcgtccgcgatctggcgaagaatgccggcctgccgatgccgcgcgtctacgtcatcgacagcccgcagccgaatgccttcgccaccggtcgcaatccggagaatgccgcggtcgccgcttcgacgggactgctgcattcgctttcctacgaggaggttgccggggtcatggcgcatgagctcgcccatatccagtatcgcgacactttgacgatgacgctgacggcgacgctcgccggtgcgatttccatgcttggcaacttcgccttcttcttcggtggcaaccgcgagaacaacaatccgctcggcttcatcggcgtgctgatcgcgatgatcgttgccccgctcgcggccatgctggtacagatggcgatcagccgtacacgcgaatattccgccgaccgccgcggtgcggagatatgcggcaatccgctctggctttcctcggcgctccgcaagatcgccggtgccgctcaggtcatccataacaatgacgccgagcgcaatccggcgacggcgcatatgttcatcatcaatcctctctcgggcgagcggatggacaatctgttctcgacccatccgaacacggagaaccgggttgcggctctggagagaatggcccgcgagacgtccacgggctcgacggcgccggtccgccctgataatgcagggcgcaaatcgcgctctgtcccgagaaccggctggggtcgcggtggttccgaaccgccgaaaggcccctggtcctga

SEQ ID NO: 1581 - protein, 319 aa, Rhizobium meliloti
MNLMRTAMLLAFMTVLFMAVGYVIGGRGGMMIALVIAAGMNFFSYWNSDRMVLRMYRAQEVDEHSAPEYYGIVRDLAKNAGLPMPRVYVIDSPQPNAFATGRNPENAAVAASTGLLHSLSYEEVAGVMAHELAHIQYRDTLTMTLTATLAGAISMLGNFAFFFGGNRENNNPLGFIGVLIAMIVAPLAAMLVQMAISRTREYSADRRGAEICGNPLWLSSALRKIAGAAQVIHNNDAERNPATAHMFIINPLSGERMDNLFSTHPNTENRVAALERMARETSTGSTAPVRPDNAGRKSRSVPRTGWGRGGSEPPKGPWS

SEQ ID NO: 1582 - DNA, 882 bp, Salmonella typhi
  CDS (1)..(882): transl_table=11
atgatgcgaatcgcgctcttcctgctgacgaacctggccgtgatggtcgttttcgggctggttctgagcctgacagggatacagtcgagcagcgtgcaaggcttgctgatcatggcgctgctgtttggttttggcggttcttttatttcattgctgatgtccaaatggatggcgttaaaatccgtaggaggggaagttattgaacagcctcgcaatgaaagagaacgctggttgatgaacaccgtagcaacgcaagcgcgccaggctggtatcgccatgccgcaggttgctatctaccatgcgccggacattaacgcgtttgcgacgggcgcacgccgtgacgcctcattggtcgctgtgagcaccggtctgttgcaaaatatgagccctgacgaggcggaagccgtcattgcgcatgaaatcagccatattgccaatggcgatatggtgacgatgacgttgattcagggggtggttaacaccttcgttatctttatttcgcgcattatcgcgcaaattgctgctggttttctgggcggcaaccgtgatgaaggcgaaggaagtaacggtaatccgctaatctatttcgccgttgcgacggtgctggaactggtcttcggtattctggcaagcattatcaccatgtggttctcccgttaccgtgagtttcatgccgatgcgggatcggcgaagctggtgggccgtgaaaaaatgattgccgcgttgcagcgcctgaaaaccagctacgagccgcaagaagcgaccagcatgatggcgttttgtattaacggtaaatcgaaatcgttaagcgagctgtttatgacgcacccaccgctggataaacgcattgaagcgctgcgtagcggcgagtacctgaaataa

SEQ ID NO: 1583 - protein, 293 aa, Salmonella typhi
MMRIALFLLTNLAVMVVFGLVLSLTGIQSSSVQGLLIMALLFGFGGSFISLLMSKWMALKSVGGEVIEQPRNERERWLMNTVATQARQAGIAMPQVAIYHAPDINAFATGARRDASLVAVSTGLLQNMSPDEAEAVIAHEISHIANGDMVTMTLIQGVVNTFVIFISRIIAQIAAGFLGGNRDEGEGSNGNPLIYFAVATVLELVFGILASIITMWFSRYREFHADAGSAKLVGREKMIAALQRLKTSYEPQEATSMMAFCINGKSKSLSELFMTHPPLDKRIEALRSGEYLK

SEQ ID NO: 1584 - DNA, 864 bp, Shewanella oneidensis
  CDS (1)..(864): transl_table=11
atgaagcgtatatttttattgatagtgaccaacctagcggtgttgctggtcgcctcaattgtgatgtcaattttgggcgtgaatacgtctactatgggtggactcttagtgttcgctgcgatttttggatttggcggagctttcatcagcttagcgatttcaaaatggatggcgaaaaaaaccatgggctgtgaagtgatcactactccccgtgatagcactgagcgttggttattggatacggttgcccgccaagcacagcaagcaggtattaaaatgccagaagtggcgatttatcagtcgccagagatgaatgcctttgccacaggtccaagcaaagacaactcgttagttgccgtgagtaccggtttgttgtatggaatgagccaagatgaaatagaaggcgtactcgcccatgaagtcagccacgtcgctaacggcgatatggtgaccttgaccttaatccaaggcgtggtaaacacctttgtgatctttgcggctcgtgtggtggcgggtatcatcaacaatttcgtatcgagcaacgatgaagaaggcgaaggtttaggtatgtttgcctacatggctgtggtgtttgttctcgatatgttgtttggtattttggcttctattattgtggcttacttctcacgcattcgtgaatatcgcgccgacgagggtgctgctcgtttagcgggcaagaataagatgattgctgcgcttgagcgtttacgtcaaggcccagaaagctcggcgatgccagcgcaaatgtctgcttttggtattaacggtaagcgttcaatggctgagctaatgatgagccacccgccattagaaaagcgtattgcggcactgcagtctcgctaa

SEQ ID NO: 1585 - protein, 287 aa, Shewanella oneidensis
MKRIFLLIVTNLAVLLVASIVMSILGVNTSTMGGLLVFAAIFGFGGAFISLAISKWMAKKTMGCEVITTPRDSTERWLLDTVARQAQQAGIKMPEVAIYQSPEMNAFATGPSKDNSLVAVSTGLLYGMSQDEIEGVLAHEVSHVANGDMVTLTLIQGVVNTFVIFAARVVAGIINNFVSSNDEEGEGLGMFAYMAVVFVLDMLFGILASIIVAYFSRIREYRADEGAARLAGKNKMIAALERLRQGPESSAMPAQMSAFGINGKRSMAELMMSHPPLEKRIAALQSR

SEQ ID NO: 1586 - DNA, 891 bp, Streptococcus agalactiae serotype III
  CDS (1)..(891): transl_table=11
ttgctgtatcaacaaattgcaagtaataagagaaaaacagttgtcttgttaattgtcttcttctgtcttttagcagctattggagcagctgtaggttatttggtattaggcagctaccaatttgggcttgttctagctctaattattggggttatctatgcagtaagtatgatttttcaatcaactaatgttgttatgtcaatgaacaatgcgcgtgaagttacagaagatgaggcgccaaattattttcatattgttgaagatatggcaatggtagctcagatacctatgccacgcgttttcattgttgaagatgactccctaaatgcctttgccacaggctctaagccagaaaatgctgctgttgcagcaacaacgggcctattagctgttatgaaccgcgaagagctagagggtgttattggacatgaggttagtcatattcgtaattatgatatccgtatttcaaccattgcagtagctttagcgagtgctgtaactctaatatcaagcattggtagccgtatgttattttacggcggaggtcgtaggcgtgatgatgacagagaagatggaggaaacatcttggttttgattttctctattttatcactaatccttgcaccattagccgctagtttagttcaattagctatttcaagacagcgcgaatacttagcagacgctagttctgttgagttaacaagaaatccacaagggatgatctctgctttagaaaaacttgatcgttctgaacctatggggcatccagtagatgatgctagtgcggctctctatatcaatgacccaacgaaaaaagaagggttaaagtctttattttatacgcatccaccaattgcagatcgtattgagcgtttgcgtcatatgtag

SEQ ID NO: 1587 - protein, 296 aa, Streptococcus agalactiae serotype III
MLYQQIASNKRKTVVLLIVFFCLLAAIGAAVGYLVLGSYQFGLVLALIIGVIYAVSMIFQSTNVVMSMNNAREVTEDEAPNYFHIVEDMAMVAQIPMPRVFIVEDDSLNAFATGSKPENAAVAATTGLLAVMNREELEGVIGHEVSHIRNYDIRISTIAVALASAVTLISSIGSRMLFYGGGRRRDDDREDGGNILVLIFSILSLILAPLAASLVQLAISRQREYLADASSVELTRNPQGMISALEKLDRSEPMGHPVDDASAALYINDPTKKEGLKSLFYTHPPIADRIERLRHM

SEQ ID NO: 1588 - DNA, 891 bp, Streptococcus agalactiae serotype V
  CDS (1)..(891): transl_table=11
ttgctgtatcaacaaattgcaagtaataagagaaaaacagttgtcttgttaattgtcttcttctgtcttttagcagctattggagcagctgtaggttatttggtattaggcagctaccaatttgggcttgttctagctctaattattggggttatctatgcagtaagtatgatttttcaatcaactaatgttgttatgtcaatgaacaatgcgcgtgaagttacagaagatgaggcgccaaattattttcatattgttgaagatatggcaatgatagctcagatacctatgccacgcgttttcattgttgaagatgactccctaaatgcctttgccacaggctctaagccagaaaatgctgctgttgcagcaacgacaggcctattagctgttatgaaccgcgaagagttagagggtgttattggacatgaggttagtcatattcgtaattatgatatccgtatttcaaccattgcagtagctttagcgagtgctgtaactctaatatcaagcattggtagccgtatgttattttacggcggaggtcgtaggcgtgatgatgacagagaagatggtggaaacatcttggttttgattttctctattttatcactaatccttgcaccattagccgctagtttagttcaattagctatttcaagacagcgcgaatacttagcagacgctagttctgttgagttaacaagaaatccacaaggaatgatctctgctttagaaaaacttgatcgttctgaacctatggggcatccagtagatgatgctagtgcggctctctatatcaatgacccaacgaaaaaagaagggttaaagtctttattttatacgcatccaccaattgcagatcgtattgagcgtttgcgtcatatgtag

SEQ ID NO: 1589 - protein, 296 aa, Streptococcus agalactiae serotype V
MLYQQIASNKRKTVVLLIVFFCLLAAIGAAVGYLVLGSYQFGLVLALIIGVIYAVSMIFQSTNVVMSMNNAREVTEDEAPNYFHIVEDMAMIAQIPMPRVFIVEDDSLNAFATGSKPENAAVAATTGLLAVMNREELEGVIGHEVSHIRNYDIRISTIAVALASAVTLISSIGSRMLFYGGGRRRDDDREDGGNILVLIFSILSLILAPLAASLVQLAISRQREYLADASSVELTRNPQGMISALEKLDRSEPMGHPVDDASAALYINDPTKKEGLKSLFYTHPPIADRIERLRHM

SEQ ID NO: 1590 - DNA, 894 bp, Streptococcus gordonii Challis
  CDS (1)..(894): transl_table=11
atgttatttgaacaaattgctgcaaataaaaggcggacctggtttctcttggtcgccttctttgctcttttagctcttatcggagcggctgctggctatctttggatgaattctcctctgggtggggtgattattgccttcattattggacttatttatgcaatcacgatgatttttcaatctactgaggtagtcatgtccatgaatggtgctcgccaagtgtctgagcaagaagcacctgaactttatcatattgttcaagatatggcgatggttgctcagattccaatgcctagggtttatattgtggaagatgattctcctaatgcttttgcgacgggttctaatcctgaaaatgctgctgtcgcagcgacaaccggtcttttaagactgatgaatcgcgaggaattagaaggtgtcatagggcatgaagttagccatattcgcaactatgatattcgtatttcaactattgcagtcgccctagctagtgctattaccatgatatcgagtgttgctggacggatgatgtggtacggtggaggacgaagaaggaatgaccgtgatgatgatagtggtcttggccttttgatgttagtcttttcattaattgcgattatattagcccctttggcagctaccttggttcagttggccatttcccgtcaacgtgaatttttagcagatgcttcaagtgttgagttgactagaaatcctcaaggaatgattagggccctgcaaaaattagataatagtgagcccatgcatcgacatgtggatgatgctagtgcagccttatatattagcgatcctaagaaaaaaggtggcctgcaaaaacttttctacactcacccaccaatctctgagcgggtagaaagattaagaaaaatgtaa

SEQ ID NO: 1591 - protein, 297 aa, Streptococcus gordonii Challis
MLFEQIAANKRRTWFLLVAFFALLALIGAAAGYLWMNSPLGGVIIAFIIGLIYAITMIFQSTEVVMSMNGARQVSEQEAPELYHIVQDMAMVAQIPMPRVYIVEDDSPNAFATGSNPENAAVAATTGLLRLMNREELEGVIGHEVSHIRNYDIRISTIAVALASAITMISSVAGRMMWYGGGRRRNDRDDDSGLGLLMLVFSLIAIILAPLAATLVQLAISRQREFLADASSVELTRNPQGMIRALQKLDNSEPMHRHVDDASAALYISDPKKKGGLQKLFYTHPPISERVERLRKM

SEQ ID NO: 1592 - DNA, 900 bp, Streptococcus mutans
  CDS (1)..(900): transl_table=11
atgctatttaatcaaattgctagcaataaaagaaaaacaatcgttcttctgattgttttctttatgcttttagctgctattggtgcggcagtcggttatctctggttggatagtttggtaggcggcatggctattgctttgattatcggctttatttatgcctttagtatgatttttcagtcaaccaatattgtcatggccatgaataatgccaaagaaattacagtagatgaaatgccagactattatcatattgttgaggatatggctatggtggcacaaatccctatgccccgtgtttatgtgattgacgatccttcgctcaatgcttttgctacaggatccagtccccaaaatgctgcagtggctgcaaccactggactcttagctattatgaatcgtgaagaattagaaggcgttattgggcatgaggttagtcatatcaggaattatgacattcgaatttcaactattgctgttgctcttgctagtgctgtcaccttgatttcgagtataggcggtcgaatgatgtggtttggtggcggcaggagccgccgttcaaatgataatgaaggcggcggttacctacaaattatccttcttattttttctcttctggccattatcttagctcctttggcagccagtcttgttcaattagctatttcacgtcagcgagaatatttggcagatgccagttctgttgaactaacacgcaatccgcaaggaatgattagggctctgcaaaaattagaacagtctcagcccatggctcactctgttgataatgccagtgctgcgctatatatcaatgatcctaagaaaaaatcgggtttaaagcaccttttttatactcatccgccaattgctgatagaattagacgtttagaacaagtgtag

SEQ ID NO: 1593 - protein, 299 aa, Streptococcus mutans
MLFNQIASNKRKTIVLLIVFFMLLAAIGAAVGYLWLDSLVGGMAIALIIGFIYAFSMIFQSTNIVMAMNNAKEITVDEMPDYYHIVEDMAMVAQIPMPRVYVIDDPSLNAFATGSSPQNAAVAATTGLLAIMNREELEGVIGHEVSHIRNYDIRISTIAVALASAVTLISSIGGRMMWFGGGRSRRSNDNEGGGYLQIILLIFSLLAIILAPLAASLVQLAISRQREYLADASSVELTRNPQGMIRALQKLEQSQPMAHSVDNASAALYINDPKKKSGLKHLFYTHPPIADRIRRLEQV

SEQ ID NO: 1594 - DNA, 897 bp, Streptococcus pyogenes serotype M3
  CDS (1)..(897): transl_table=11
atgctttatcaacagatttcacaaaataagcaacgaacagttgttttattagttgttttcttcgctctcttagcacttattggagcgtcagcaggctatctgctgttagataattatgccatgggcttggttcttgctcttgtcattggggtgatttatgctaccagtatgatttttcaatccaccagtcttgtaatgagtatgaacagtgctagagaagttacagaaaaagaggctccaggctttttccatattgtcgaggatatggctatggtggcccagattccgatgccgagagtttttattattgaagatccttctttaaatgcttttgcgacaggatctagccctcaaaatgctgctgttgcagcaacgacaggtttacttgaagtcatgaatcgtgaagaacttgaaggtgttatcggccatgaaattagccacatccgaaattatgatatccgtatttcgactattgctgtagctttggcgagtgctgttaccgttatttctagtatcggtgggcgtatgctatggtatggtggcggttctcgcaggcaaagagatgacggagatgatgatgttttaagaatcattacattacttttgtcgttattatctttgcttttagcgcccctggtagcaagtttgattcagttggctatttctcgtcaaagagaatatctagctgatgctagttctgttgaactaacaagaaatccccaaggtatgattaaggctcttgaaaaattgcagttatctcagccaatgaagcatcctgttgatgatgctagtgcagccttgtatattaatgagcctcgcaaaaaaaggagcttcagttcattattcagcacccatcctcctattgaggagaggattgaaaggttaaaaaacatgtga

SEQ ID NO: 1595 - protein, 298 aa, Streptococcus pyogenes serotype M3
MLYQQISQNKQRTVVLLVVFFALLALIGASAGYLLLDNYAMGLVLALVIGVIYATSMIFQSTSLVMSMNSAREVTEKEAPGFFHIVEDMAMVAQIPMPRVFIIEDPSLNAFATGSSPQNAAVAATTGLLEVMNREELEGVIGHEISHIRNYDIRISTIAVALASAVTVISSIGGRMLWYGGGSRRQRDDGDDDVLRIITLLLSLLSLLLAPLVASLIQLAISRQREYLADASSVELTRNPQGMIKALEKLQLSQPMKHPVDDASAALYINEPRKKRSFSSLFSTHPPIEERIERLKNM

SEQ ID NO: 1596 - DNA, 897 bp, Streptococcus pyogenes serotype M6
  CDS (1)..(897): transl_table=11
atgctttatcaacagatttcacaaaataagcaaggaacagttgttttattagttgttttcttcgctctcttagcacttattggagcgtcagcaggctatctgctgttagataattatgccatgggcttggttcttgctcttgtcattggggtgatttatgctaccagtatgatttttcaatccaccagtcttgtaatgagtatgaacaatgctagagaagttacagaaaaagaggctccaggcttcttccatattgtcgaggatatggctatggtagctcagattccgatgccgagagtttttattattgaagatccttctttaaatgcttttgcgacaggatctagccctcaaaatgctgctgttgcagcaacgacaggtttacttgaagtcatgaatcgtgaagaacttgaaggtgttatcggccatgaaattagccacatccgaaattatgatatccgtatttcgactattgctgtagctttggcgagtgctgttaccgttatttctagtatcggtgggcgtatgctatggtatggtggcggttctcgcaggcaaagagatgacggagatgatgatgttttaagaatcattacattacttttgtcgttattatctttgcttttagcgcccctagtagcaagtttgattcagttggctatttctcgtcaaagagaatatctagctgatgctagttctgttgaactaacaagaaatccccaaggtatgattaaggctcttgaaaaattgcagttatctcagccaatgaagcatcctgttgatgatgctagtgcggccttgtatattaatgagcctcgcaaaaaaaggagcttcagttcattattcagcacccatcctcctattgaggagaggattgaaaggttaaaaaacatgtga

SEQ ID NO: 1597 - protein, 298 aa, Streptococcus pyogenes serotype M6
MLYQQISQNKQGTVVLLVVFFALLALIGASAGYLLLDNYAMGLVLALVIGVIYATSMIFQSTSLVMSMNNAREVTEKEAPGFFHIVEDMAMVAQIPMPRVFIIEDPSLNAFATGSSPQNAAVAATTGLLEVMNREELEGVIGHEISHIRNYDIRISTIAVALASAVTVISSIGGRMLWYGGGSRRQRDDGDDDVLRIITLLLSLLSLLLAPLVASLIQLAISRQREYLADASSVELTRNPQGMIKALEKLQLSQPMKHPVDDASAALYINEPRKKRSFSSLFSTHPPIEERIERLKNM

SEQ ID NO: 1598 - DNA, 897 bp, Streptococcus pyogenes serotype M18
  CDS (1)..(897): transl_table=11
atgctttatcaacagatttcacaaaataagcaacgaacagttgttttattagttgttttcttcgctctcttagcacttattggagcttcagcaggctatctgctgttagataattatgccatgggcttggttcttgctcttgtcattggggtgatttatgctaccagtatgatttttcaatccaccagtcttgtaatgagtatgaacaatgctagagaagttacagaaaaagaggctccaggcttcttccatattgtcgaggatatggctatggtggctcagattccgatgccgagagtttttattattgaagatccttctttaaatgcttttgcgacaggatctagccctcaaaatgctgctgttgcagcaacgacaggtttacttgaagtcatgaatcgtgaagaacttgaaggtgttatcggccatgaaattagccacatccgaaattatgatatccgtatttcgactattgctgtcgctttggcgagtgctgttaccgttatttctagtatcggtgggcgtatgctatggtatggtggcggttctcgcaggcaaagagatgacggagatgatgatgttttaagaatcattacgttacttttgtcgttattatctttgcttttagcgcccctagtagcaagtttgattcagttggctatttctcgtcaaagagaatatctagctgatgctagttctgttgaactaacaagaaatccccaaggtatgattaaggctcttgaaaaattgcagttatctcagccaatgaagcatcctgttgatgatgctagtgcagccttgtatattaatgagcctcgcaaaaaaaggagcttcagttcattattcagcacccatcctcctattgaggagaggattgaaaggttaaaaaacatgtga

SEQ ID NO: 1599 - protein, 298 aa, Streptococcus pyogenes serotype M18
MLYQQISQNKQRTVVLLVVFFALLALIGASAGYLLLDNYAMGLVLALVIGVIYATSMIFQSTSLVMSMNNAREVTEKEAPGFFHIVEDMAMVAQIPMPRVFIIEDPSLNAFATGSSPQNAAVAATTGLLEVMNREELEGVIGHEISHIRNYDIRISTIAVALASAVTVISSIGGRMLWYGGGSRRQRDDGDDDVLRIITLLLSLLSLLLAPLVASLIQLAISRQREYLADASSVELTRNPQGMIKALEKLQLSQPMKHPVDDASAALYINEPRKKRSFSSLFSTHPPIEERIERLKNM

SEQ ID NO: 1600 - DNA, 900 bp, Streptococcus pneumoniae
  CDS (1)..(900): transl_table=11
atgttgtttgatcaaattgcaagcaataaacgaaaaacctggattttgttgctggtatttttcctactcttagctcttgttggttatgcggttggttatctctttataagatctggacttggtggtttggttattgcactgattatcggctttatctacgctttgtctatgatttttcaatcgacagagattgtcatgtccatgaatggagcgcgtgaggtggatgagcaaacggcaccagacctctaccatgtagtggaagatatggctctggtcgctcagattcctatgccccgtgttttcatcattgatgatccagccttaaatgcctttgcgacaggttctaatcctcaaaatgcggctgttgctgcgacttcaggtctactagctatcatgaatcgtgaagaactagaagctgttatgggacatgaagtcagtcatattcgtaattatgatatccgtatttcgactattgcagttgcccttgctagtgctatcaccatgctttctagtatggcaggtcgtatgatgtggtggggtggagcaggtcgcagacgaagtgatgatgaccgagatggaaatggtcttgaaatcattatgctagtggtttccctactagctattgtactggcacctctcgctgcaaccttggttcagctcgctatttctcgtcagagggaatttctggcagatgcatctagtgtcgagctgactcgcaatccccagggaatgattaatgccctagataagttggacaatagcaaacctatgagtcgccacgtcgatgatgctagcagtgccctttatatcaatgatcctaagaaaggtggggggttccaaaaactcttttatacccacccacctatctcagaacggattgaacgtttaaaacagatgtaa

SEQ ID NO: 1601 - protein, 299 aa, Streptococcus pneumoniae
MLFDQIASNKRKTWILLLVFFLLLALVGYAVGYLFIRSGLGGLVIALIIGFIYALSMIFQSTEIVMSMNGAREVDEQTAPDLYHVVEDMALVAQIPMPRVFIIDDPALNAFATGSNPQNAAVAATSGLLAIMNREELEAVMGHEVSHIRNYDIRISTIAVALASAITMLSSMAGRMMWWGGAGRRRSDDDRDGNGLEIIMLVVSLLAIVLAPLAATLVQLAISRQREFLADASSVELTRNPQGMINALDKLDNSKPMSRHVDDASSALYINDPKKGGGFQKLFYTHPPISERIERLKQM

SEQ ID NO: 1602 - DNA, 900 bp, Thermoanaerobacter tengcongensis
  CDS (1)..(900): transl_table=11
atgacaaagaggacattgtatgaacttcaggcagaaaatgtgaggaaaacatatctttttatagttctcttttccctcatactctttgcagtgggctatttttttgtctggtattttaactggggaattacaggcatcatctttttagcaatttttattgtgctatacaactggatagcctatgagcagtctgataaaatagctttaacgtcggtaggagctgtgcccgccgatccggagaaattttatgtacttcacaacatagtggaggaagtggctcttgcggctggagtgcctaagccgaaagtgtatgtaatgaatgaacctcagccaaacgcttttgctaccggaaaagaccccaaacatgcttccatatgtgttactacagggcttttgcagatgatgaatagggaagaactgcagggagttatagcccatgagatgtctcacataagaaatagagatatactccttatgaccgtggtagcaatagtagctgggctcatcatacttctaagggatgtctttttaagaagcatgtggtggggaataggaggggaaagaagaagagataaaaatgacaaccttggcattattcttctcctaatagggcttatactctctataatagcacctatagtagttttaataataaggtcggctatttcaaggcaaagggaatatctggcggatgctacaggggcttacattgtgagggacccttacggactcgcttccgctttagaaaagataggaaattatacaaggccgatgagaactgcttccagtgccactgcccacatgtttatatcaaacccttttggaaaagtagaatatctttttgcaactcatccaccaattgaagagagaataaaaaggttgaagagtcttacaatttga

SEQ ID NO: 1603 - protein, 299 aa, Thermoanaerobacter tengcongensis
MTKRTLYELQAENVRKTYLFIVLFSLILFAVGYFFVWYFNWGITGIIFLAIFIVLYNWIAYEQSDKIALTSVGAVPADPEKFYVLHNIVEEVALAAGVPKPKVYVMNEPQPNAFATGKDPKHASICVTTGLLQMMNREELQGVIAHEMSHIRNRDILLMTVVAIVAGLIILLRDVFLRSMWWGIGGERRRDKNDNLGIILLLIGLILSIIAPIVVLIIRSAISRQREYLADATGAYIVRDPYGLASALEKIGNYTRPMRTASSATAHMFISNPFGKVEYLFATHPPIEERIKRLKSLTI

SEQ ID NO: 1604 - DNA, 864 bp, Vibrio cholerae
  CDS (1)..(864): transl_table=11
atgaaacgtatattgttattcttagcaaccaaccttgctgtcgtattggtgcttagtgttgttttgaatattgtttatgccgtcacgggcatgcagccagggagtttgtctggtctgttggtgatggcggctgtgtttggctttggcggtgcatttatttcactgctgatgtcaaaaagtatggccctacgctcagtgggtggtgtcgtcattgatactccacgcaatgagatggaacattggctattggaaacggtacgtcgccaagcaaaccaagcgggtatcggtatgccaacggtggcgatttatgatgcgccagacatgaatgcgtttgccacgggtgcaaagcgtgatgattctctggtcgcggtctcaacgggattgctgcacaacatgacgcgtgatgaggccgaagctgtgttggcgcatgaagttagccacattgctaacggtgacatggtcaccatgacgctgatgcaaggggtggtgaacaccttcgtgatcttcttgtcgcgctttattgccaatatcgtggcttcacgtgattcggaagaaggtgaaggtagcaacatgatggtctatttcggtgtatctatggtgcttgaattggtgtttggtttcttagccagcttcatcaccatgtggtatagccgccaccgtgagttccatgccgatgcgggtgccgctcagttagtcggtaagcacaagatgattgcggcgttagaacgcctgaaaatgggtcaggagtcgcatcttgaaggttcgatgatggcgtttggcatcacaggtaaacgctctctatccgaattaatgatgactcacccaccccttgaaaaacgtatcgcagcactgcgcaatatgtaa

SEQ ID NO: 1605 - protein, 287 aa, Vibrio cholerae
MKRILLFLATNLAVVLVLSVVLNIVYAVTGMQPGSLSGLLVMAAVFGFGGAFISLLMSKSMALRSVGGVVIDTPRNEMEHWLLETVRRQANQAGIGMPTVAIYDAPDMNAFATGAKRDDSLVAVSTGLLHNMTRDEAEAVLAHEVSHIANGDMVTMTLMQGVVNTFVIFLSRFIANIVASRDSEEGEGSNMMVYFGVSMVLELVFGFLASFITMWYSRHREFHADAGAAQLVGKHKMIAALERLKMGQESHLEGSMMAFGITGKRSLSELMMTHPPLEKRIAALRNM

SEQ ID NO: 1606 - DNA, 864 bp, Vibrio parahaemolyticus
  CDS (1)..(864): transl_table=11
atgaagcgaattatgttattcctagcaactaacctagctgttgtgctggttcttagtgttgttctgaatattgtttacgcgaccactggaatgcaaccaggcagtctgtctggtttacttgtcatggcagccgtatttggctttggtggcgcattgatttcgttaatgatgtcaaagggcatggcactacgctcagttggcggcatggtgattgaaagcccacgtaacgaaacagagcattggttgcttgagacggtaggccgtcaagcgcaacaagcgggcattggtatgccaacagtagcgatttatgattctgcagacatcaacgcattcgcgacaggggctaagcgtgatgattcactggttgctgtatcgactggtcttctacacaacatgacgcgtgatgaagctgaagctgttctggcgcacgaagtgagccacattgcgaatggtgacatggtcacgatgacgctaatgcaaggtgttgtgaacacgtttgttatcttcctatcgcgttttatcgccaatatcgtggcatcgaacgacgatgaagaaggccaaggcacgaacatgatggtgtactttggtgtgtctatggtgttggaacttgtctttggtttcttagcaagcttcatcactatgtggtacagccgtcaccgtgaattccatgccgatgcaggtgcagcgcgtttagtaggtaaagagaaaatgattgctgctcttgagcgtttgaagatgagccaagaatcgaaactcgatggcacaatgatggcgttcggtatcaacggtaagcagtctctaacagagctactgatgagccacccaccactagataaacgtattgcggcgctacgcaaccagtaa

SEQ ID NO: 1607 - protein, 287 aa, Vibrio parahaemolyticus
MKRIMLFLATNLAVVLVLSVVLNIVYATTGMQPGSLSGLLVMAAVFGFGGALISLMMSKGMALRSVGGMVIESPRNETEHWLLETVGRQAQQAGIGMPTVAIYDSADINAFATGAKRDDSLVAVSTGLLHNMTRDEAEAVLAHEVSHIANGDMVTMTLMQGVVNTFVIFLSRFIANIVASNDDEEGQGTNMMVYFGVSMVLELVFGFLASFITMWYSRHREFHADAGAARLVGKEKMIAALERLKMSQESKLDGTMMAFGINGKQSLTELLMSHPPLDKRIAALRNQ

SEQ ID NO: 1608 - DNA, 867 bp, Vibrio vulnificus
  CDS (1)..(867): transl_table=11
atgaagcgagtcatgttgtttttaattaccaacttagctgtggttctagtcctcagcgtcgtgttgaacattgtttatgctgtaactggaatgcagccagggagcctctcaggtttattggtgatggctgcggtatttggttttggtggtgcatttatctccttgatgatgtcaaaggggatggcactacgctctgtcggtggaatggtgatcgagagccctcgtaacgagacagagcactggttattggaaacggtgagccgccaagctcaacaagcgggcattggtatgccaaccgttgccatttatgattcgccggacatcaacgcgtttgcaactggggcaaaacgtgacgattcgctggtcgcggtttctacgggtctgttgcacaacatgacgcgtgatgaagcagaagcggtgctggcgcatgaggtgagccatattgccaatggtgacatggtgaccatgacgttgatgcagggtgttgtgaacaccttcgttatcttcttgtctcgctttattgccaacatggtggcttctaataacagcgatgaagaaggtgaaggttcaaacatgatggtgtatttcgcggtttctatcgcgcttgagctggtgtttggtttcctcgcgagcttcatcaccatgtggtatagccgtcatcgtgaattccatgccgatgcgggagccgcccgtctagttggtaaagagaaaatgatagcggctctagagcgtctaaaaatgagccaagaatcaaaactggatggcaccatgatggcatttggtattaacggtaagcaatctctaacagaactgcttatgagccacccgccactcgataagcgtatcgctgcccttcgcaatttctaa

SEQ ID NO: 1609 - protein, 288 aa, Vibrio vulnificus
MKRVMLFLITNLAVVLVLSVVLNIVYAVTGMQPGSLSGLLVMAAVFGFGGAFISLMMSKGMALRSVGGMVIESPRNETEHWLLETVSRQAQQAGIGMPTVAIYDSPDINAFATGAKRDDSLVAVSTGLLHNMTRDEAEAVLAHEVSHIANGDMVTMTLMQGVVNTFVIFLSRFIANMVASNNSDEEGEGSNMMVYFAVSIALELVFGFLASFITMWYSRHREFHADAGAARLVGKEKMIAALERLKMSQESKLDGTMMAFGINGKQSLTELLMSHPPLDKRIAALRNF

SEQ ID NO: 1610 - DNA, 885 bp, Wigglesworthia glossinidia brevipalpis
  CDS (1)..(885): transl_table=11
atgatgcgtattttactttttatactgactaatttatctgtaatgataatatttggaataatattatttattactggaattaaatcatctagctcatttggattaataataatgtctggagtttttggttttggtggatctataatatctttattattatctaagtatatagcaataaattcagtaaatgcaaaaattataaaaaatccaaaaaatgatattgaaaattggttgtttaatacaataaagttgcaatcacaaaaagcaaatattggaactccagatatagctatttacgacgctgaagatattaatgcttttgctacaggcccaaaaaaaaattctgcattaattgcagttagtactggtttgttgaataatatgagcaaaaaagaagcagaagcagttttagctcatgaaattagtcatatttccaacggagatatgataacaatgacacttattcaaggcgtagtaaatacatttgttatattcttatctcgagttatttctaaatttatagtaaatttattttctacaaacaaagaagatgaaaattcatatgaatctgaaaattcatggtcatatttttttatttctatggctttagaagtagtatttggaattttagctagtattattactttttggttttctagaaaacgagaattttacgctgatgcaggatcagctgaaatagttggtaaaaataatatgatagctgctttacaaaaaataaaaaatacttgtgagcctaatgttggaaaagaattattagctttttgcattaatggaaaaaaatcatttaatgaaatttttatgtctcatccacctatagataaaagaatacaagcattaattcaagaaaaatatatgaaaaaataa

SEQ ID NO: 1611 - protein, 294 aa, Wigglesworthia glossinidia brevipalpis
MMRILLFILTNLSVMIIFGIILFITGIKSSSSFGLIIMSGVFGFGGSIISLLLSKYIAINSVNAKIIKNPKNDIENWLFNTIKLQSQKANIGTPDIAIYDAEDINAFATGPKKNSALIAVSTGLLNNMSKKEAEAVLAHEISHISNGDMITMTLIQGVVNTFVIFLSRVISKFIVNLFSTNKEDENSYESENSWSYFFISMALEVVFGILASIITFWFSRKREFYADAGSAEIVGKNNMIAALQKIKNTCEPNVGKELLAFCINGKKSFNEIFMSHPPIDKRIQALIQEKYMKK

SEQ ID NO: 1612 - DNA, 879 bp, Xanthomonas axonopodis pv
  CDS (1)..(879): transl_table=11
atgttcaaccgcattttcctgttcctgctgaccaatcttgcggtgctgatgctcgccggcatcgtcatgtcgttgcttggcgtcaatcccgcgcagatgagtggcctgttggtgatggccgccatcttcggtttcggcggctcgttcatttccttgctgctgtccaagttcatggccaagcgcagcaccggtgcgcaggtcatcaccgagccgcgcacgccgaccgaacgctggttgctggagaccgtgcgccgtcaggcccaggctgccggtatcggcatgccggaagtagcggtctacgagggaccggaaatcaacgcgttcgccaccggcgccaaccgcaacaacgcccttgtggcggtgtccaccggcctgctgcagaacatggaccaggatgaagccgaagcggtgcttggccacgagatcgcccacgttgccaatggcgacatggtcaccatggcactgctgcagggcgtactcaataccttcgtgatcgtgctcgcccgcgtggtcggcggcatcatcgacagcaccttgtcgggcaaccgcgaaggcggtcgtggctttgcgtactacatcatcgtgtttgcgttggagatggtgttcggcctgttcgcgaccatgattgcgatgtggttctcgcgacgccgcgaattccgcgccgatgccggtggcgcgcagctggccggccgcagcaagatgatcgctgcactggagcggctgtcgctcaaccatggccagaacaccttgccctcgcaagtgcaggcgttcggcatctccggcggggtgggcgagggcttgcgccgcctgttcctgagccatccgccgctcacagaacgcatcgctgcgctgcgcgcggccagcggtagcgccaggtaa

SEQ ID NO: 1613 - protein, 292 aa, Xanthomonas axonopodis pv
MFNRIFLFLLTNLAVLMLAGIVMSLLGVNPAQMSGLLVMAAIFGFGGSFISLLLSKFMAKRSTGAQVITEPRTPTERWLLETVRRQAQAAGIGMPEVAVYEGPEINAFATGANRNNALVAVSTGLLQNMDQDEAEAVLGHEIAHVANGDMVTMALLQGVLNTFVIVLARVVGGIIDSTLSGNREGGRGFAYYIIVFALEMVFGLFATMIAMWFSRRREFRADAGGAQLAGRSKMIAALERLSLNHGQNTLPSQVQAFGISGGVGEGLRRLFLSHPPLTERIAALRAASGSAR

SEQ ID NO: 1614 - DNA, 879 bp, Xanthomonas campestris pv
  CDS (1)..(879): transl_table=11
atgttcaaccgtgtcgtcctgtttctcttgaccaactttgcggtgctgatcctggccggcattgtgatgtcggtgctgggcgtgaatccgacacagatgagtggcctgctggtgatggccgccatcttcggcttcggcggctcgttcatttcgttgctgctgtccaagttcatggccaagcgcagcaccggcgcgcaggtgatcaccgagccgcggacgcagaccgagcgctggctggtggacacggtgcgccgccaggcccaggcggccggtatcggcatgccggaagtggccatctacgacggaccggaaatcaacgccttcgccaccggtgccaaccgcaacaatgcgctggtggcggtttccacgggcttgctgcagcacatgcgcgaagacgaggccgaggccgtgctgggccacgagattgcccacattgccaatggcgacatggtcaccatggccttgctgcagggcgtgctgaacaccttcgtgatcgtgctggcgcgcgtggtgggcggcatcatcgacagcgcgctgtctggcaatcgcgacagcgggcgtggatttgcctactacatcattgtgttcgtgctggagatggtgttcggcctgttcgccacgatgatcgcgatgtggttctcgcgccgccgcgagttccgtgccgatgccggtggcgcgcagctggccgggcgcaacaagatgatcgccgcattggagcgcctatcgctcaatcacggccagaacaccttgccctcgcaggtgcaggcgttcggcatttccggcggtgtgggtgagggcttgcgtcgcctgttcctgagccacccgccgctgaccgagcgcattgccgccttgcgtgcgtccaacggtacggcgatgtaa

SEQ ID NO: 1615 - protein, 292 aa, Xanthomonas campestris pv
MFNRVVLFLLTNFAVLILAGIVMSVLGVNPTQMSGLLVMAAIFGFGGSFISLLLSKFMAKRSTGAQVITEPRTQTERWLVDTVRRQAQAAGIGMPEVAIYDGPEINAFATGANRNNALVAVSTGLLQHMREDEAEAVLGHEIAHIANGDMVTMALLQGVLNTFVIVLARVVGGIIDSALSGNRDSGRGFAYYIIVFVLEMVFGLFATMIAMWFSRRREFRADAGGAQLAGRNKMIAALERLSLNHGQNTLPSQVQAFGISGGVGEGLRRLFLSHPPLTERIAALRASNGTAM

SEQ ID NO: 1616 - DNA, 870 bp, Xylella fastidiosa
  CDS (1)..(870): transl_table=11
atgttgactcgtattgtcttgtttgccatcaccaatcttgcagtgttgattttagctagcatcgtgatgtcgttgctgggtgtcaatccgacacaaatgagtgggctgttggttatggccttaatttttggcttcgctggttcgtttatctcgctattgatgtctaaagccatcgctaagcgtacgactggtgcctatgtgattgatcaaccccggaatctaagtgagcgctggttactagacacggtaagtcggcaagccgagattgttggcatcggcaggcctgagatagctatctatgagggagttgagatcaatgcttttgcaactggtgctgatcgcaacaatgcactggtggcagtgtctaccggtttattacagaacatgagtcaggatgaggtcgaggcagtgttggggcatgagatcgcgcatgttgctaacggtgacatggtgactatggcgttgctgcagggcgtgcttaatacatttgtgatcgtactagcgcgggtcgtcggagggtttattgacagtctgctttccggaaatcgtggcggtgctcgtggtgttgcttactacgcgattgtattggtattggaattattgtttggcctttttgcaacgatgattaccatgtggttttcgcgtcgtcgtgagtttcgtgctgatgagggcggcgcatacttggccggtcgtaataaaatgattgctgcattagagcggcttgggattaaccatggtcaaagtacgttaccgacgcaagtgcaagcttttggtatttatggcggtatcggtgaagggctgcgtaagctttttttgagtcatccgcctttgagtgagcgtattgctgcgcttcgtgtggctagacaataa

SEQ ID NO: 1617 - protein, 289 aa, Xylella fastidiosa
MLTRIVLFAITNLAVLILASIVMSLLGVNPTQMSGLLVMALIFGFAGSFISLLMSKAIAKRTTGAYVIDQPRNLSERWLLDTVSRQAEIVGIGRPEIAIYEGVEINAFATGADRNNALVAVSTGLLQNMSQDEVEAVLGHEIAHVANGDMVTMALLQGVLNTFVIVLARVVGGFIDSLLSGNRGGARGVAYYAIVLVLELLFGLFATMITMWFSRRREFRADEGGAYLAGRNKMIAALERLGINHGQSTLPTQVQAFGIYGGIGEGLRKLFLSHPPLSERIAALRVARQ

SEQ ID NO: 1618 - DNA, 870 bp, Xylella fastidiosa
  CDS (1)..(870): transl_table=11
atgttgactcgtattgtcttatttgccatcaccaatattgcagtattgattttagctagcatcgtgatgtcgttgctgggtgtcaatccgacacaaatgagtgggctgttggttatggctttaattttgggttttggtggttcgcttatctcgctattgatgtctaaagccatcgctaagcatacgactggtgcctatgtgattgagcaacccaggaatccaagtcagcgctggttactagacactgtaaggcggcaagccgagattgttggcatcggcatgcctgaggtagctatctatgagggacctgagatcaatgcttttgcaactggtgctgatcgcaacaatgcgctggtggcagtatctaccggtttgttgcagaacatgagtcaggatgaggccgaggcagtgttggggcatgagatcgcacatgttgccaacggtgacatggtgactatggcgttgctgcagggtgtgcttaatacatttgtgatcgtactagcgcgggtcgttggagggtttattgacagtctgctttccggaaatcgtggtggtggtcgtggtgttgcttactacgggattgtattggtattggaattattgtttggtctttttgcgacgataattaccatgtggttttcgcgtcgtcgtgagtttcgtgctgatgagggcggtgcatacttggccggccgcaataaaatgattgctgcattagagcggcttgggattaaccatggccaaagtacgttaccgacgcaggtgcaagcttttggtatttatggtggtatcggtgaagggctgcgtaagcttttcttgagtcatccgcctttgagtgagcgtattgctgcgcttcgtatggctagagagtaa

SEQ ID NO: 1619 - protein, 289 aa, Xylella fastidiosa
MLTRIVLFAITNIAVLILASIVMSLLGVNPTQMSGLLVMALILGFGGSLISLLMSKAIAKHTTGAYVIEQPRNPSQRWLLDTVRRQAEIVGIGMPEVAIYEGPEINAFATGADRNNALVAVSTGLLQNMSQDEAEAVLGHEIAHVANGDMVTMALLQGVLNTFVIVLARVVGGFIDSLLSGNRGGGRGVAYYGIVLVLELLFGLFATIITMWFSRRREFRADEGGAYLAGRNKMIAALERLGINHGQSTLPTQVQAFGIYGGIGEGLRKLFLSHPPLSERIAALRMARE

SEQ ID NO: 1620 - DNA, 882 bp, Yersinia pestis
  CDS (1)..(882): transl_table=11
atgatgcgtatcgctctgttccttctcaccaacctggcggtgatgctagtgttcgggttggtgttaagtctgacgggaattcagtcaagcagtgtgcaggggctgatgattatggcgggtctgtttggtttcggcggcgcatttgtttcgttactgatgtccaaatggatggctttacgttcagtaggcggggaggttattgaacggccacgtaatgaaacagaatattggttgttggaaaccgtacgtcgccagtctcaacaggtagggatcgccatgccacaagtggctatttatcaggcaccggatattaacgcctttgcgacgggggcacgtcgagatgcctctctggtggcggtcagtaccggtttattgcaaaatatgagccgtgatgaggctgaagccgtgattgcccatgaaatcagtcatgtggctaatggtgatatggtaaccatgactttgattcaaggggtcgtgaatacgttcgtgatctttatttcacgactgattgcacaaattgccgctggtttcttatcaggtgaccgagacggtgaaagtaacagccccggtaatccaatggtctattttgccgtatcaatggtactagaattagtgttcggcattcttgccagtattattaccatgtggttttcacgccatcgtgagttccatgcagatgccggttccgcaaaattggttgggcgtgaaaaaatgattgcggcattacaacggctgaaaaccagctatgaaccgcaggaagcgggtagcatgatggctttctgtattaatggtaaatctaaaacgtttagtgaattgtttatgtcacacccgcctttagataaacgtatagaggcattacgttctggtcagtatctgaagtaa

SEQ ID NO: 1621 - protein, 293 aa, Yersinia pestis
MMRIALFLLTNLAVMLVFGLVLSLTGIQSSSVQGLMIMAGLFGFGGAFVSLLMSKWMALRSVGGEVIERPRNETEYWLLETVRRQSQQVGIAMPQVAIYQAPDINAFATGARRDASLVAVSTGLLQNMSRDEAEAVIAHEISHVANGDMVTMTLIQGVVNTFVIFISRLIAQIAAGFLSGDRDGESNSPGNPMVYFAVSMVLELVFGILASIITMWFSRHREFHADAGSAKLVGREKMIAALQRLKTSYEPQEAGSMMAFCINGKSKTFSELFMSHPPLDKRIEALRSGQYLK

SEQ ID NO: 1622 - DNA, 22 bp, Artificial sequence
  primer
atgatgcgaatcgcgctcttcc

SEQ ID NO: 1623 - DNA, 24 bp, Artificial sequence
  primer
ttacttcaggtattcacccgtacg

SEQ ID NO: 1624 - protein, 348 aa, Artificial sequence
  consensus sequence
  Variant (2)..(16): Xaa in position 2 to 16 is any amino acid
  Variant (17)..(20): Xaa in position 17 to 20 is any or no amino acid
  Variant (22)..(22): Xaa in position 22 is any amino acid
  Variant (23)..(69): Xaa in position 23 to 69 is any or no amino acid
  Variant (71)..(87): Xaa in position 71 to 87 is any amino acid
  Variant (88)..(100): Xaa in position 88 to 100 is any or no amino acid
  Variant (102)..(107): Xaa in position 102 to 107 is any amino acid
  Variant (109)..(112): Xaa in position 109 to 112 is any amino acid
  Variant (113)..(113): Xaa in position 113 is any or no amino acid
  Variant (115)..(115): Xaa in position 115 is any amino acid
  Variant (117)..(123): Xaa in position 117 to 123 is any amino acid
  Variant (124)..(124): Xaa in position 124 is any or no amino acid
  Variant (131)..(136): Xaa in position 131 to 136 is any amino acid
  Variant (137)..(137): Xaa in position 137 is any or no amino acid
  Variant (140)..(142): Xaa in position 140 to 142 is any amino acid
  Variant (146)..(151): Xaa in position 146 to 151 is any amino acid
  Variant (153)..(155): Xaa in position 153 to 155 is any amino acid
  Variant (157)..(158): Xaa in position 157 to 158 is any amino acid
  Variant (161)..(162): Xaa in position 161 to 162 is any amino acid
  Variant (164)..(165): Xaa in position 164 to 165 is any amino acid
  Variant (167)..(167): Xaa in position 167 is any amino acid
  Variant (169)..(214): Xaa in position 169 to 214 is any amino acid
  Variant (215)..(239): Xaa in position 215 to 239 is any or no amino acid
  Variant (241)..(247): Xaa in position 241 to 247 is any amino acid
  Variant (250)..(250): Xaa in position 250 is any amino acid
  Variant (253)..(254): Xaa in position 253 to 254 is any amino acid
  Variant (257)..(259): Xaa in position 257 to 259 is any amino acid
  Variant (261)..(270): Xaa in position 261 to 270 is any amino acid
  Variant (271)..(271): Xaa in position 271 is any or no amino acid
  Variant (274)..(290): Xaa in position 274 to 290 is any amino acid
  Variant (291)..(300): Xaa in position 291 to 300 is any or no amino acid
  Variant (302)..(304): Xaa in position 302 to 304 is any amino acid
  Variant (305)..(333): Xaa in position 305 to 333 is any or no amino acid
  Variant (336)..(337): Xaa in position 336 to 337 is any amino acid
  Variant (340)..(343): Xaa in position 340 to 343 is any amino acid
  Variant (346)..(347): Xaa in position 346 to 347 is any amino acid
TXXXXXXXXXXXXXXXXXXXGXXXXXXXXXXXXXXXXXXXXXXXXXXXXXXXXXXXXXXXXXXXXXXXXSXXXXXXXXXXXXXXXXXXXXXXXXXXXXXXVXXXXXXAXXXXXPXVXXXXXXXXNAFATGXXXXXXXVAXXXGLLXXXXXXEXXXVXXHEXXHXXNXDXXXXXXXXXXXXXXXXXXXXXXXXXXXXXXXXXXXXXXXXXXXXXXXXXXXXXXXXXXXXXXXXXXXXXXXAXXXXXXXSRXREXXADXXXAXXXXXXXXXXXALXXXXXXXXXXXXXXXXXXXXXXXXXXXIXXXXXXXXXXXXXXXXXXXXXXXXXXXXXXXXLFXXHPXXXXRIXXL

SEQ ID NO: 1625 - DNA, 2205 bp, Escherichia coli
  CDS (1)..(2205)
atgcgcagaagatcgggtattaacaccagtgccgtaaggtactgtctaagaaagagaaaggatattacattgcttaatccgatcgttcgtaaattccagtacggccaacacaccgtgactctggaaaccggcatgatggctcgtcaggctactgccgctgttatggttagcatggatgacaccgcggtattcgttaccgttgttggccagaaaaaagccaaaccaggtcaggacttcttcccactgaccgttaactatcaggagcgtacctacgctgctggtcgtatcccgggtagcttcttccgtcgtgaaggccgcccaagcgaaggcgaaaccctgatcgcgcgtctgattgaccgcccgattcgcccgctgttcccggaaggcttcgtcaacgaagttcaggttatcgccaccgtggtttctgttaacccgcaagttaacccggatatcgtcgcgatgattggtgcttccgcagcgctgtctctgtctggtattccgttcaatggcccgattggtgctgcccgcgtaggttacatcaatgaccagtacgtactgaacccgactcaggacgagctgaaagagagcaaactggatctggttgttgccggtactgaagccgctgtactgatggttgaatctgaagctcaactgctgagcgaagaccagatgctgggcgcagtagtgttcggtcatgaacaacagcaggttgttattcagaacatcaatgaactggtgaaagaagccggtaaaccgcgttgggactggcagccggagccggtaaacgaagcgctaaacgcgcgcgttgctgcactggctgaagctcgcctgagcgatgcttaccgcatcaccgacaaacaagagcgttatgcgcaggttgatgtcatcaaatctgaaaccatcgcgacgctgcttgctgaagacgaaaccctggacgaaaacgaactgggtgaaattctgcacgcgatcgagaaaaacgttgttcgtagccgcgtactggcaggcgaaccgcgtatcgacggtcgtgaaaaagatatgatccgtggtctggatgtgcgtactggcgtgctgccgcgtactcacggttctgcgctgttcacccgtggtgaaacgcaggcgctggttaccgcaacgctgggtactgctcgtgacgcgcaggttcttgatgaactgatgggcgaacgtaccgataccttcctgttccactacaacttccctccgtactccgtaggcgaaaccggcatggtcggttctccgaagcgtcgtgaaattggtcacggtcgtctggcgaagcgcggcgtgctggcagtcatgccggatatggacaaattcccgtacaccgtacgtgttgtgtctgaaatcactgaatccaacggttcctcttctatggcttccgtgtgcggcgcgtctctggcgctgatggacgcaggtgtgccgatcaaagctgccgttgcgggtatcgcaatgggtctggtgaaagaaggcgacaactacgttgtactgtctgacattttgggcgacgaagatcacctgggcgatatggacttcaaagttgcaggttcccgcgacggtatctctgcactgcagatggatatcaaaattgaaggtatcaccaaagagatcatgcaggttgcgctgaaccaggctaaaggtgcgcgtctgcatatcctgggcgtaatggaacaggcgatcaacgcgccgcgtggcgatatctctgagttcgcaccgcgtatccataccatcaagatcaacccggacaagatcaaagatgttatcggtaaaggcggttctgtaatccgtgctctgaccgaagaaactggcaccaccatcgaaatcgaagatgacggtactgtgaagattgcagcgaccgacggcgagaaagcgaaacatgctattcgtcgtatcgaagagatcactgcagaaatcgaagtgggccgcgtctacactggtaaagtgacccgtatcgttgactttggcgcatttgttgccatcggcggcggtaaagaaggtctggtccacatctctcaaatcgctgacaaacgcgttgagaaagtgaccgattacctgcagatgggtcaggaagtaccggtgaaagttctggaagttgatcgccagggccgtatccgtctgagcattaaagaagcgactgagcagtctcaacctgctgcagcaccggaagctccggctgctgaacagggcgagtaa

SEQ ID NO: 1626 - protein, 734 aa, Escherichia coli
MRRRSGINTSAVRYCLRKRKDITLLNPIVRKFQYGQHTVTLETGMMARQATAAVMVSMDDTAVFVTVVGQKKAKPGQDFFPLTVNYQERTYAAGRIPGSFFRREGRPSEGETLIARLIDRPIRPLFPEGFVNEVQVIATVVSVNPQVNPDIVAMIGASAALSLSGIPFNGPIGAARVGYINDQYVLNPTQDELKESKLDLVVAGTEAAVLMVESEAQLLSEDQMLGAVVFGHEQQQVVIQNINELVKEAGKPRWDWQPEPVNEALNARVAALAEARLSDAYRITDKQERYAQVDVIKSETIATLLAEDETLDENELGEILHAIEKNVVRSRVLAGEPRIDGREKDMIRGLDVRTGVLPRTHGSALFTRGETQALVTATLGTARDAQVLDELMGERTDTFLFHYNFPPYSVGETGMVGSPKRREIGHGRLAKRGVLAVMPDMDKFPYTVRVVSEITESNGSSSMASVCGASLALMDAGVPIKAAVAGIAMGLVKEGDNYVVLSDILGDEDHLGDMDFKVAGSRDGISALQMDIKIEGITKEIMQVALNQAKGARLHILGVMEQAINAPRGDISEFAPRIHTIKINPDKIKDVIGKGGSVIRALTEETGTTIEIEDDGTVKIAATDGEKAKHAIRRIEEITAEIEVGRVYTGKVTRIVDFGAFVAIGGGKEGLVHISQIADKRVEKVTDYLQMGQEVPVKVLEVDRQGRIRLSIKEATEQSQPAAAPEAPAAEQGE

SEQ ID NO: 1627 - DNA, 2370 bp, Xenopus tropicalis
  CDS (1)..(2370)
atggcagcccccattagatgccggtgttacgcgatgaaacgatttctgtacagagctggaggcgctgtctgtgcccgttgggcgggggtacatcgctctgggctgctttgttaccggatcccactcacaccgagcagcagggaagcgagcggagccgtgacagtggatttgggagccaggaagctggaaatttcttctgggaagctggcacggtttgcagatggctgtgccgttgtcaagttaggtgattcttctgtgatggtaactgctgtcagcagaactaagccttctccgtcacagttcatgccattggtggttgattatcgtgaaaaatctgctgctgctggaagaatacctacaaatcatctcagaagagaagtaggcatcacccctgatgaaattcttaccagtagaataatagatcgttctgtacgacctctctttcctgctggctatttttatgaaacacaaatcctgtgcaatttattagcagtggatggggtgaataaaccagatgttttggcaataaatggagcttcagctgcacttgcactctcagacataccatggaatgggcctgttggtgcagtgagagttggtctggttgatggagaattcattattaaccctaccagaaaagaaatgtcttccagtctattaaacttggtcatagctggtggagtgcaaagccagatagtcatgatggaagcggctgcagaaaatgttctacagcaggacttttgccatgcagtcaaactgggtgtgaaacactcacagcagatcatacaaggcatccagcagctggctaaggaacatgggaaggaaaagagaaccatacagaagatttttcaggctccagtggatattgtggagtctgcaaggcagtatgcttctgaaaagatatacgctgtgttttctgattttacacatgacaaaatttctagagatgaagctataaacaagattagacttgagacagaggaaaccctaagagagaggtttcccgatgcagagccgtttgaaataatggaggcgtttagtgctgtttctaaggacgtttttagaaacataattttgaatgaatacagaaggtgtgatgggagagatttgacttctctaagaaatataaactgtgaagttgacctctttaaaccccttcatggatctgccttatttcaacggggccaaacacaggttctgtgcacagttacatatgactcaatagaatcaagcatgaaatctgatcacatcactacagcactgagtggtgtgaaagataaaaattttatgctacactatgagtttccaccatatgcgactaatgaaattggtaaagtgacggggattaacagacgtgaactaggtcatggcgcccttgcagagaaagcattaagaccagttatccccaaagattttcctttcacaataagagtgacctctgaagtattggagtctaatggctcatcatctatggcttcagcttgcggtggaagtttggcattaatggatgcaggggtgcctatttctgctgctgttgctggagtcgcaataggtctaataacaaaatacagccctgacaaaaatggagagattcaagattatcgcttacttacagatatcctgggaatagaagattataacggtgatatggattttaaaatggcgggtacgagcaaaggtataactgctttacaggctgatattaaaatcccaggattgccgctcaaaattgtaatggaggctattcaacaggcaacagtggcaaagaaagaaattatacaaattatgaataaagttatttcaaaaccaagaccaagcaagaaagaaaacagcccagtaacagaaacagttcaggtgcctttgtctaaaagaatgcgatttgttggcccgggcggatataatttaaagaagatacaagctgaaacaggtgtcactgtaagccaaatagatgaggaaactttttctgtttttgctcctacacccagtgcaatgcatgaagcaagagagttcattaacgaaatctgcaaagatgatcaagaacaacagttagagtttggagcggtatatacagccacaattactgaaatcagggatattggcgtgatggtgaagctttatcctaatatgacacctgtgttacttcataattcacagcttgatcatcgaaagataagacacccaagtgccttgggtcttgaaattgggcaacaaattcaggtgaagtactttggccgtgatccaacagatgggagaatgaggctctccagaaaagtccttcagtctcctgcagcaactgtaattaaaagcctgaatgacaggaacagtattaccatgggaacaggggaccctcatacatccgcttcctcttag

SEQ ID NO: 1628 - protein, 789 aa, Xenopus tropicalis
MAAPIRCRCYAMKRFLYRAGGAVCARWAGVHRSGLLCYRIPLTPSSREASGAVTVDLGARKLEISSGKLARFADGCAVVKLGDSSVMVTAVSRTKPSPSQFMPLVVDYREKSAAAGRIPTNHLRREVGITPDEILTSRIIDRSVRPLFPAGYFYETQILCNLLAVDGVNKPDVLAINGASAALALSDIPWNGPVGAVRVGLVDGEFIINPTRKEMSSSLLNLVIAGGVQSQIVMMEAAAENVLQQDFCHAVKLGVKHSQQIIQGIQQLAKEHGKEKRTIQKIFQAPVDIVESARQYASEKIYAVFSDFTHDKISRDEAINKIRLETEETLRERFPDAEPFEIMEAFSAVSKDVFRNIILNEYRRCDGRDLTSLRNINCEVDLFKPLHGSALFQRGQTQVLCTVTYDSIESSMKSDHITTALSGVKDKNFMLHYEFPPYATNEIGKVTGINRRELGHGALAEKALRPVIPKDFPFTIRVTSEVLESNGSSSMASACGGSLALMDAGVPISAAVAGVAIGLITKYSPDKNGEIQDYRLLTDILGIEDYNGDMDFKMAGTSKGITALQADIKIPGLPLKIVMEAIQQATVAKKEIIQIMNKVISKPRPSKKENSPVTETVQVPLSKRMRFVGPGGYNLKKIQAETGVTVSQIDEETFSVFAPTPSAMHEAREFINEICKDDQEQQLEFGAVYTATITEIRDIGVMVKLYPNMTPVLLHNSQLDHRKIRHPSALGLEIGQQIQVKYFGRDPTDGRMRLSRKVLQSPAATVIKSLNDRNSITMGTGDPHTSASS

SEQ ID NO: 1629 - DNA, 2148 bp, Mesorhizobium loti MAFF303099
  CDS (1)..(2148): transl_table=11
atgttcaatcagcacaaagtggaaatcgaatggggcggtcgcccgctcatcctcgaaaccggcaagatcgcccgtcaggctgacggcgctgtgctcgccacctacggcgagaccaaggttctggccaccgtcgtttcgatgaaggagcccaagcccggcctcgatttctttccgctgaccgtcaactaccaggaaaagacctatgccgccggcaagatcccgggcggctatttcaagcgcgaaggccgtccgagcgaaaaggaaacgctggtttcgcgcctcatcgaccgccccatccgtccgctcttcgccgacggctacaagaacgacacccagatcgtcgtcaccgtcgttcagcatgacctcgagaacgatccggacatcctgtcgatcgttgccacctcggccgctttgaccctgtcgggcgttcccttcatgggcccggtcggcggcgcgcgcgtcggctacatcaacggcgaatacgtcctcaacccgcacatcgacgaaatgcaggaatccaagctcgacctcgtcgtcgccggcaccgccgacgccgtgctgatggttgagtcggaagccaaggaacttggcgaagaactgatgctcggcgccgtcatgttcggccacaagggctttcagccggtcatcgacgccatcatcaagctggccgaagtcgccgccaaggagccacgcgacttcaccgcgccggactattccgcgctcgaaggcgagatgctgaagatcgtcggcgacgagctcagcaatgcctacaagatcaccgacaagcagcaacgctatgccgccgtcgacgccgtcaaggcgaaggtcaaggcagcctttgctccggccgaaggcgaagagcccaaatacacctccgagcagatcggctcggtgttcaaggaactccaggccaaggtcgtgcgctggaacatcctcgacaccggctcgcgcatcgatggccgcgacctgaagacggtccgcaagatcgtttcggaagtcggcgtcctgccgcgcacccatggttcggcactgttcacccgcggcgaaacccaggcgctggtcgtggccacgctcggcaccggcgaagacgagcagtatgtcgattcgctgaccggcatgtacaaggagaagttcctccttcactacaacttccctccctattccgtcggtgagaccggccgcatgggttcgccgggccgccgcgaaatcggccacggcaagctcgcctggcgcgccatccggccgatgctgccgagcgctgaccagttcccctacacgctgcgtgtcgtctcggagattaccgagtccaacggctcgtcctcgatggccaccgtctgcggcacctccctggcgctgatggatgccggcgtgccgctggcgaagcccgttgccggtatcgccatgggcctgatcaaggaaggcgagcgcttcgccgtgctctccgacatcctgggcgacgaggatcacctcggcgacatggacttcaaggtcgccggcaccgccaacggcatcacttcgctgcagatggacatcaagatcgagggcatcaccgaggagatcatgaagatcgcgctggaccaggccaaggatggccgccagcatatcctcggcgaaatggcgcatgctctgaccggcgcacgccccgaactcggcgaattcgcaccgcgcatcgaggtcatgcacatcccgaccgacaagatccgcgatgtcatcggttcgggcggcaaggtcatccgcgagatcgtcgagaagaccggcgccaagatcaacatcgaggacgacggcacggtgaagatcgcttcctcgaacgccaaggagatcgaggcggcgaagaagtggatccacaccattgtcgccgagccggaagtcggcgagatctacgaaggcacggtcgtcaagaccgccgacttcggcgctttcgtcaacttcttcggtccgcgtgacggcctcgtccacatctcgcagctcgccaatgagcgcgttgccaagacctcggacgttgtcaaggaaggcgacaaggtttgggtcaagctgatgggcttcgacgagcgcggcaaggttcgcctgtcgatgaaggtcgtcgaccaggccaccggcaaggaaatcgtgcgcgacaagagggccgaaggcgaagaagacgccgcctga

SEQ ID NO: 1630 - protein, 715 aa, Mesorhizobium loti MAFF303099
MFNQHKVEIEWGGRPLILETGKIARQADGAVLATYGETKVLATVVSMKEPKPGLDFFPLTVNYQEKTYAAGKIPGGYFKREGRPSEKETLVSRLIDRPIRPLFADGYKNDTQIVVTVVQHDLENDPDILSIVATSAALTLSGVPFMGPVGGARVGYINGEYVLNPHIDEMQESKLDLVVAGTADAVLMVESEAKELGEELMLGAVMFGHKGFQPVIDAIIKLAEVAAKEPRDFTAPDYSALEGEMLKIVGDELSNAYKITDKQQRYAAVDAVKAKVKAAFAPAEGEEPKYTSEQIGSVFKELQAKVVRWNILDTGSRIDGRDLKTVRKIVSEVGVLPRTHGSALFTRGETQALVVATLGTGEDEQYVDSLTGMYKEKFLLHYNFPPYSVGETGRMGSPGRREIGHGKLAWRAIRPMLPSADQFPYTLRVVSEITESNGSSSMATVCGTSLALMDAGVPLAKPVAGIAMGLIKEGERFAVLSDILGDEDHLGDMDFKVAGTANGITSLQMDIKIEGITEEIMKIALDQAKDGRQHILGEMAHALTGARPELGEFAPRIEVMHIPTDKIRDVIGSGGKVIREIVEKTGAKINIEDDGTVKIASSNAKEIEAAKKWIHTIVAEPEVGEIYEGTVVKTADFGAFVNFFGPRDGLVHISQLANERVAKTSDVVKEGDKVWVKLMGFDERGKVRLSMKVVDQATGKEIVRDKRAEGEEDAA

SEQ ID NO: 1631 - DNA, 2769 bp, Arabidopsis thaliana
  CDS (1)..(2769)
atgttgacgagtcccagtaacgcacttcacagtagtactccacaattctggccacttcgccggagcaagctttgccgttcccggaatttccctcgttttcactccggcgaacgcagcagcggcggaggaggaaaattgtgctcgctctctcttctctccggaagtggcgccggtaaattcagtgtcagagctctagttaggcctgatgataccgacgacgctgactccgtcggcgatgggtctctggcttttcctaaccacgtttctgtcaaaattccattcggaaatagagagattttagttgagactggtctcatggggagacaagcaagttctgcagtcacggtcacagatggagaaactattgtctacacatccgtttgtctagctgatgttccgagtgagccatcagattttcttcccctttatgttcactatcaggagcgattctcagctgtaggtcgaactagtggtggattttttaagcgagaagggagaaccaaagatcacgaggttctgatttgtaggttgatcgatagacctctacgccccactatgcccaaaggtttctacaatgaaactcagattttatcctgggttttgagctacgatggattacacgcacctgatgctttagctgttacatctgctggaattgctgtagctctttcagaagtaccaaatgcgaaagcgattgcaggagttcgggttggtcttattgggggtgaattcattgtcaatccaaccgtgaaggagatggaagaatcacagctagatttgtttctagctggaacagatactgcaattctaacgatagagggatacagtaattttcttcctgaggaaatgcttctccaagctgttaaagttggacaggatgctgtacaggctacatgcattgctattgaagttttagcaaagaaatatggaaagcctaaaatgcttgacgctatcagattaccacctccagagctatacaagcatgtgaaagaacttgctggtgaggaattgacaaaagcgttacaaattaagagtaaaatatcgagaaggaaagccatatcgtccctggaagaaaaggtcttgacaatactgacagagaagggatatgttattgatgaggtagcttttggaaccatagaagcacaaccggatctgttggaggatgaagacgaggatgaggaagttgttcctgaaggtgaggtggaccaaggcgatgttcacattagacccatccctcggaaacctattcctttactattttctgaagtagatgtcaagctagtcttcaaagaagtatcgtcgaagcttctacgtaggcgaattgttgagggaggtaaaagaagtgatggtcggactctggatgagattcgtccaattaattcaagatgtggactgcttcccagggcacatggaagtactctgttcacacgtggggaaacacaggcactggcagttgttacgcttggtgataaacaaatggcgcagagaattgacaaccttgagggttctgatgaatacaagaggttctatcttcagtacacttttcctccatcgtctgttggtgaagttggacgaattggtgcacccagtagaagagaaataggtcatgggacactagcagagcgagcattggagaccattctacctagtgatgatgactttccttacacaatacgtgttgaaagtacagtaattgaaagcaatggttcttcaagtatggcatctgtttgtggcggttgcttggctttgcaagatgctggagttccagtcaaatgttctgttgctgggatagcaatgggaatggtttgggatactgaagaatttggaggtgatggatctccccttatcctttctgacatcactggagctgaagatgcatctggtgatatggactttaaggttgctgggaatgaagatggcgttaccgcctttcagatggacatcaaggtaggaggaattactttagagataatggaaaaggctctaatacaggcaaaagctgggcgtcgccatattcttgctgaaatggcaaagtgctcaccgcctcccacgctaagcctctcaaaatatgctccattgatacttattatgaaggttcatccaagcaaagtatactctcttattggttctggaggtaagaaagtaaagagcatcattgaagaatctggagttgaggccattgacatgcaagatgatggaactgtcaaaattatggcaattgatgtagcgagtctagaaagggcgaaagcgattattagtggattgacaatggttccctctgttggtgatatctacaggaattgtgaaatcaagtcaatggctccttatggtgcatttgtagagatagcgcctgggcgggaaggtctttgccatatcagtgagctgagtgctgaatggcttgcaaaaccagaggatgcctataaagtaggagaccgcattgacgtcaaattaatagaggtaaatgaaaagggtcagcttcgacttagtgtacgggctttacttcccgaatcagagacagacaaagacagtcagaaacaacagccggcaggtgattctaccaaagacaagagttcgcaaaggaaatatgtaaatacttcgtcaaaggaccgtgcagctgcaggagcatcaaaggtttcatctggggatgaacttgtcctgaagaagaaagatgtaaggagagcaactggtggtagtagtgacaagacaatgaatagcaatagcagtaccaacgaagaaagtttagtcaacggtgaagctacaatcagctag

SEQ ID NO: 1632 - protein, 922 aa, Arabidopsis thaliana
MLTSPSNALHSSTPQFWPLRRSKLCRSRNFPRFHSGERSSGGGGKLCSLSLLSGSGAGKFSVRALVRPDDTDDADSVGDGSLAFPNHVSVKIPFGNREILVETGLMGRQASSAVTVTDGETIVYTSVCLADVPSEPSDFLPLYVHYQERFSAVGRTSGGFFKREGRTKDHEVLICRLIDRPLRPTMPKGFYNETQILSWVLSYDGLHAPDALAVTSAGIAVALSEVPNAKAIAGVRVGLIGGEFIVNPTVKEMEESQLDLFLAGTDTAILTIEGYSNFLPEEMLLQAVKVGQDAVQATCIAIEVLAKKYGKPKMLDAIRLPPPELYKHVKELAGEELTKALQIKSKISRRKAISSLEEKVLTILTEKGYVIDEVAFGTIEAQPDLLEDEDEDEEVVPEGEVDQGDVHIRPIPRKPIPLLFSEVDVKLVFKEVSSKLLRRRIVEGGKRSDGRTLDEIRPINSRCGLLPRAHGSTLFTRGETQALAVVTLGDKQMAQRIDNLEGSDEYKRFYLQYTFPPSSVGEVGRIGAPSRREIGHGTLAERALETILPSDDDFPYTIRVESTVIESNGSSSMASVCGGCLALQDAGVPVKCSVAGIAMGMVWDTEEFGGDGSPLILSDITGAEDASGDMDFKVAGNEDGVTAFQMDIKVGGITLEIMEKALIQAKAGRRHILAEMAKCSPPPTLSLSKYAPLILIMKVHPSKVYSLIGSGGKKVKSIIEESGVEAIDMQDDGTVKIMAIDVASLERAKAIISGLTMVPSVGDIYRNCEIKSMAPYGAFVEIAPGREGLCHISELSAEWLAKPEDAYKVGDRIDVKLIEVNEKGQLRLSVRALLPESETDKDSQKQQPAGDSTKDKSSQRKYVNTSSKDRAAAGASKVSSGDELVLKKKDVRRATGGSSDKTMNSNSSTNEESLVNGEATIS

SEQ ID NO: 1633 - DNA, 2976 bp, Arabidopsis thaliana
  CDS (1)..(2976)
atgtcatcgattgtgaatcgagctagttcagcttctcttcctaatttcctcgcatggcgtgctctggggtttcgcaccatctgctccggccgccttggtttcgctccgtctgttccagactcgccggtctccgcaggaaccaaaattttggaatcatttaaggaggaattcgaagtcggatcccgcgtggtctcgtttgagactggaaaaatcgctcgctttgctaatggttcagttgttctcggcatggacgagaccaaagttctctctactgttacttgtgctaagaccgactcgcctcgggacttcttacctctcactgttgactatcaagagaagcaatacgctcagggattgattccaaatacgtatatgcgaagagagggtgcaccaaaggagcgggagctgttatgtggccggctcattgatagaccaatcagaccattgtttcctacagggttttaccatgaagttcagataatggcaagtgttctatcgtcagatgggaagcaggatccagatatactggcagctaatgcatcatcagctgcgctcatgctatcagatgttccatggggagggcccattggagtcatccggataggaaggatatgtgggcaatttgttgtcaatccaactatggatgagcttagctcaagtgatctcaatttgatatacgcttgcacaagggataagactatgatgattgatgttcaatcccgagaaatctcagagaaagatttagcagctgctctgaggctagctcatccagaggctgtcaagtaccttgatccccaaattagattggcagaaaaagctgggaaacaaaagaaggagtacaaattgtccatgctttctgataaaactttagaaaaagtggctgacttggctgcaacgcgtattgaatccgtctttaccgacccttcatatggaaagtttgaacgtggagaggctctagataacattggaaaagatgtaagaaaggtatttgaagaagagggtgatcaagaaagcttgagcatccttccaaaggctgttgatacagtgagaaagaaggtagtccgttcaaggatgatatcagatggatttcgagtcgacgggagacatgttgatgaagttaggcccatctactgcgaatcgcattacttacctgcgctgcatggatcagcacttttctcacgtggagatacgcaggtgctctgtactgtaacacttggagccccagcagaagcacaaagcttggattctcttgttggccccccgaagaagagattcatgcttcactacagctttcctccatattgtacaaatgaagtcggaaaacgaggaggccttaacaggcgtgaagttggtcatggaacacttgctgagaaagcattgcttgctgtattgccccctgaagaggcttttccttataccattcgtataaattcagaagtaatgtcctcagatggatccacgtcgatggcaagcgtttgtggaggtagtatggcattgatggatgctggaattcctctgcgagctcatgttgcgggtgtatctgttggtcttatcaccgatgtagatccatcaagtggtgaaataaaggactaccgtattgtaaccgatattctcggtttggaagatcatcttggagatatggatttcaagattgctggcacacgagatggtgtgacagcaattcagctggatataaagccagctggaataccgttggatatagtttgtgaatccttagaaaatgcacgtgaagcccgtcttcagattcttgaccacatggagagaaacataaattccccacgaggccaggatggggcttactctcctcggctagcaacgctcaagtactccaatgactcacttcgtaccttgatcggacctatgggtgtactcaaaagaaagattgaagtggaaacaggtgcaagattgtctattgataatggaacattaactattgttgccaagaatcaggatgtgatggaaaaggcccaagaacaagttgacttcatcattggtcgtgaactagttgttggtggtgtgtacaaaggcacagtgtcatctataaaagagtatggtgcatttgttgagttccctggtggtcagcaaggtctactacatatgtctgagctatcccatgaaccagtctccaaggtttcagatgtattagatattggccagtgcatcactacgatgtgcattgaaaccgatgtccgtggtaacattaaattatcccgcaaagcactgttgcccaaacccaaacgcaaacccgcatctgatgctggaaaagatccggtgatgaaagagtcgtcaacagtctacatagaaaattctagtgttggagagattgttgcaagcatgcccagtatcgtaacgccacttcagaaatctagattatcagttcctgcagttgtcatccgtactgctgtggagtgtaatgaggcagagaaatcttcccctgtgaacgacaacgacaaacccagacgcgctgctacatcaaagccagaccggaaacccaaatccacagcctctaaactgattgcgacacagaaggaagaggaggcactcgaatccattgctccagaagaaacttcagctgaatgtggtgagatactgaagcaggacgggaagctaaaatccgtttctcccaaaaacaatagcactgcttctaacctagtatcattttcaaaagctaagaaatcaactatgaaggagaatctatcagagaacaaggctgaagagagtgcatcggttagtacccgaaaactgaaaataggaacggagatgacagccacggtcgaccatgttcgagcccttggattggttcttgatttaggtggtgaaatccgcggtatgtacatattccagggagataaagataagttcaaaaaaggagacacattgcgagtgaaatgtacaagttttaacaccaaaggagtccctgtgatggctttggttgacgaagagggagaagaatag

SEQ ID NO: 1634 - protein, 991 aa, Arabidopsis thaliana
MSSIVNRASSASLPNFLAWRALGFRTICSGRLGFAPSVPDSPVSAGTKILESFKEEFEVGSRVVSFETGKIARFANGSVVLGMDETKVLSTVTCAKTDSPRDFLPLTVDYQEKQYAQGLIPNTYMRREGAPKERELLCGRLIDRPIRPLFPTGFYHEVQIMASVLSSDGKQDPDILAANASSAALMLSDVPWGGPIGVIRIGRICGQFVVNPTMDELSSSDLNLIYACTRDKTMMIDVQSREISEKDLAAALRLAHPEAVKYLDPQIRLAEKAGKQKKEYKLSMLSDKTLEKVADLAATRIESVFTDPSYGKFERGEALDNIGKDVRKVFEEEGDQESLSILPKAVDTVRKKVVRSRMISDGFRVDGRHVDEVRPIYCESHYLPALHGSALFSRGDTQVLCTVTLGAPAEAQSLDSLVGPPKKRFMLHYSFPPYCTNEVGKRGGLNRREVGHGTLAEKALLAVLPPEEAFPYTIRINSEVMSSDGSTSMASVCGGSMALMDAGIPLRAHVAGVSVGLITDVDPSSGEIKDYRIVTDILGLEDHLGDMDFKIAGTRDGVTAIQLDIKPAGIPLDIVCESLENAREARLQILDHMERNINSPRGQDGAYSPRLATLKYSNDSLRTLIGPMGVLKRKIEVETGARLSIDNGTLTIVAKNQDVMEKAQEQVDFIIGRELVVGGVYKGTVSSIKEYGAFVEFPGGQQGLLHMSELSHEPVSKVSDVLDIGQCITTMCIETDVRGNIKLSRKALLPKPKRKPASDAGKDPVMKESSTVYIENSSVGEIVASMPSIVTPLQKSRLSVPAVVIRTAVECNEAEKSSPVNDNDKPRRAATSKPDRKPKSTASKLIATQKEEEALESIAPEETSAECGEILKQDGKLKSVSPKNNSTASNLVSFSKAKKSTMKENLSENKAEESASVSTRKLKIGTEMTATVDHVRALGLVLDLGGEIRGMYIFQGDKDKFKKGDTLRVKCTSFNTKGVPVMALVDEEGEE

SEQ ID NO: 1635 - DNA, 2067 bp, Helicobacter pylori 26695
  CDS (1)..(2067): transl_table=11
atggattttatcaccatcaattctagtaacaaaaccgaagagttcgctctcaaacaagtggccaaacaagccaccagctctcttttataccgattaggaaaaaccattattttagcgagcgtgtgcgtggaaagagagcctgtgagtgaagattttctgcctttagtggtgcagtttttagaaaaatcttatgcagccggaaagatcccgggcggttttgttaaaagagaaggcagggcgcaagattttgaaatcttaacctctaggctcatagacaggactttacgccctttattccctaaagactaccgctaccctacacagatcactttaatggttttaagccatgatattgaaaatgacttgcaggtttctgctttaaacgccgcttcagccgctctctttttggcccatatcgctcctattaaaagcgtgagcgcttgcaggatcgctaggatggataacgaatttatcattaaccctagcgcaagccttttgaatcaatccagtttggatttgttcgtgtctggaacgaaagagagtttgaacatgatagaaatgcgctctttggggcaaaaattgaacgctttagaagagcctttaatgttagaagctttagaattggctcaaaaaagtttggaagaaacttgcacgctttatgaagagattttcacgccccaccaaaacgagctgtttttcaaagagagccaaggaatagtctttaatgaaaggctgttagatttattgaaaaatcagtattttgatgaaatcatcaaaggcattgaaagttctgctttgagcgagcgagaaaatgttttcaatgaaattgccagaaaaatcagtgaagcccactcagaattcagtttagaagaaattgaattgtctttagaaaaagtgaaaaagactgagataagacgcatgatcattaaggataaaatccgcccggataagcgcgcgttagaagaagtgcggcccattttgatagagagcgatttgctccctatggcgcatagctccattttattcactagggggcaaactcaaagcttagtggtaggggttttaggcacggataatgacgctcaaacccatgagagtttggagcataaagctcccattaaagagcgcttcatgtttcattataatttccctcctttctgcgtgggcgaagcgagttctattggcgcggcttcaaggcgtgaattagggcatgggaatttggctaaaagagccttagaaacgagcattaaaaataaagagcaggtgatacgattggtttctgagattttagaaagcaatggttcaagctcaatggcgagcgtgtgcgcaggctctttagccctttatgcaagcggtgtggaaatttacgatttagtcgctggggtggctatgggcatggtgagcgaagggcaagatcacgctattttaagcgatattagcggcttagaagacgcagaaggcgatatggattttaagattgctgggaatttagaaggcattacggccatgcaaatggataccaaaatgagcggtatcaagctagaaattttataccaagccttactccaagccaaagaagcacggaaacatattttaaaaatcatgcatgaagcgaaagaaaagattgtgatcaatttttcccatttgcccacaacggagatttttaatgtcgcacccgataaaattgtagaaattatcggtcaaggggggcgtgtgattaaagagatagtagaaaagtttgaagttaaaattgatttgaacaaaccgagcggtgaagtgaaaatcatggggaataaagagcgcgttttaaagactaaggaatttattttaaactacttgcattctttagatcaagaattggagcaatacgctattgatgaggtattagaagctcaagtgaaacgaatcgtggattttggggcgtttttaagcttgcctaaggggggcgaaggcttgttaagaaagcaaaacatggacaagtgtcaagtggttttaaaagaaggcgatagcatcaggtgtagggtgattagcttcaataagggtaaaatcgctttagatttggcttaa

SEQ ID NO: 1636 - protein, 688 aa, Helicobacter pylori 26695
MDFITINSSNKTEEFALKQVAKQATSSLLYRLGKTIILASVCVEREPVSEDFLPLVVQFLEKSYAAGKIPGGFVKREGRAQDFEILTSRLIDRTLRPLFPKDYRYPTQITLMVLSHDIENDLQVSALNAASAALFLAHIAPIKSVSACRIARMDNEFIINPSASLLNQSSLDLFVSGTKESLNMIEMRSLGQKLNALEEPLMLEALELAQKSLEETCTLYEEIFTPHQNELFFKESQGIVFNERLLDLLKNQYFDEIIKGIESSALSERENVFNEIARKISEAHSEFSLEEIELSLEKVKKTEIRRMIIKDKIRPDKRALEEVRPILIESDLLPMAHSSILFTRGQTQSLVVGVLGTDNDAQTHESLEHKAPIKERFMFHYNFPPFCVGEASSIGAASRRELGHGNLAKRALETSIKNKEQVIRLVSEILESNGSSSMASVCAGSLALYASGVEIYDLVAGVAMGMVSEGQDHAILSDISGLEDAEGDMDFKIAGNLEGITAMQMDTKMSGIKLEILYQALLQAKEARKHILKIMHEAKEKIVINFSHLPTTEIFNVAPDKIVEIIGQGGRVIKEIVEKFEVKIDLNKPSGEVKIMGNKERVLKTKEFILNYLHSLDQELEQYAIDEVLEAQVKRIVDFGAFLSLPKGGEGLLRKQNMDKCQVVLKEGDSIRCRVISFNKGKIALDLA

SEQ ID NO: 1637 - DNA, 2169 bp, Borrelia burgdorferi B31
  CDS (1)..(2169): transl_table=11
ttgaggaaaatattaaagttgaaaataggcagagacgagttagtgtttgagaccggatttatggctaaacaggctaatggatcggttcttgcaacttatggtggatcttcggttcttgcaactgtttgttgctcgagtaacgtgagagaagatttagattttgttccgctttctgttgaatataatgagaaatattatgcagccggtaaaattccgggaggatttatcaaaagagaaggaaagccaaaggataaagaaatacttgtttccagactaatagacaggccgatgagacctctttttgataaaagatttggtcgagaaattcaagtaattcctacaactttagctacagatcagcttaatcctcctgatattgttggaatgaatgctgcttttacggcagtttttttgtcagatattccgtttaatggtccaattgcagctgttagaatggtttatttgaatggtaagtttatagtaaacccttcgtttgaagagattcatgattctgatcttgatattgttgttgccggaagtttaaatggaattactatggtagaaggtggtgctaatgaggttggtgaggatattttgctctcagcaatagatggtgctcatgaatatattaagcaaatttgtaatgctcaaaaagaatttttagatattgtaggcaagaaggaaaaacttcctttagcttttgaagaaaaaatatttgaatttaaagatgagcttagggattttgtttatgctgatcttaaagaagcttgttttgttaagggaaagcttaatagagataaagccataactttgctgcgaaataaatcttatgagtacttttcttctcttgagaaattgactgatagcaatgaatctctttttcataaggcttttgatgattttgagaaggagattgttagaagctctattcttaacgataatattagaacagatggcagaactcctaatgagataagagatattatctcagaagttgatattttaagtagaacgcatggatctgcgctttttacaaggggagagacgcaagctttagcggtaactactcttggtacaagcattgatgaacaaataatggatgatattgatggcgataaacgccttaattttatgctccactacaattttcccccattttcagttggtgagaccggtagactaatgactggcaggcgcgagattggccatggtcatttagctcaaagagctttagaatcaatggttcctggaaaaaatgattttccttataccattagggtagtttctgaggttttagagtctaacggatcttcttcaatggctactgtttgtgctgggagcatgtctttaatgtcagcaggggttcctgttaaagggcaggttgcggggatagccatggggcttattagcgaaggggataaatatgtagttttaagtgatattcttggagaagaagatcatctaggtgatatggactttaaagtggccggtacaaaaaatggaattactggatttcaaatggatattaagattgaaaatgttactaaagatttaatgagagatgctcttgagcaagcaagaataggtagaatacatatattatctattatgaatactgtaatttctaattcaagagttggtatatctaagtatgctcctaaaattgttcaacttcaaattgacattgacaagatatctcttgtgataggatctactggaaaaactgttaaggctataacagatgaatttgaagttaaggttcaaattgagcagaatggaaaaatcattcttttcggggatgatgattttaagatgcaaaaagctaaagaaagaatagagagtattgtaagagagccaaaggtaggcgaaatttatgaaggaactgtcaaaaagattaatagctttggggcttttattgaacttactcctgcaaaggaaggatttttaagtactcgtttgaaacccagagacagtaagtatggttctggaagatttgggaatagtaatagatattctagatttggtggcggtggagagaatataagaggtaatgcggggttagttcgacccccaaaattagaagaaggtcagcgaattaaggtcaaaataattgatatagacaagtttggaaaaattgatcttgaaattgttagagataaagattattaa

SEQ ID NO: 1638 - protein, 722 aa, Borrelia burgdorferi B31
MRKILKLKIGRDELVFETGFMAKQANGSVLATYGGSSVLATVCCSSNVREDLDFVPLSVEYNEKYYAAGKIPGGFIKREGKPKDKEILVSRLIDRPMRPLFDKRFGREIQVIPTTLATDQLNPPDIVGMNAAFTAVFLSDIPFNGPIAAVRMVYLNGKFIVNPSFEEIHDSDLDIVVAGSLNGITMVEGGANEVGEDILLSAIDGAHEYIKQICNAQKEFLDIVGKKEKLPLAFEEKIFEFKDELRDFVYADLKEACFVKGKLNRDKAITLLRNKSYEYFSSLEKLTDSNESLFHKAFDDFEKEIVRSSILNDNIRTDGRTPNEIRDIISEVDILSRTHGSALFTRGETQALAVTTLGTSIDEQIMDDIDGDKRLNFMLHYNFPPFSVGETGRLMTGRREIGHGHLAQRALESMVPGKNDFPYTIRVVSEVLESNGSSSMATVCAGSMSLMSAGVPVKGQVAGIAMGLISEGDKYVVLSDILGEEDHLGDMDFKVAGTKNGITGFQMDIKIENVTKDLMRDALEQARIGRIHILSIMNTVISNSRVGISKYAPKIVQLQIDIDKISLVIGSTGKTVKAITDEFEVKVQIEQNGKIILFGDDDFKMQKAKERIESIVREPKVGEIYEGTVKKINSFGAFIELTPAKEGFLSTRLKPRDSKYGSGRFGNSNRYSRFGGGGENIRGNAGLVRPPKLEEGQRIKVKIIDIDKFGKIDLEIVRDKDY

SEQ ID NO: 1639 - DNA, 2328 bp, Aquifex aeolicus VF5
  CDS (1)..(2328): transl_table=11
atgagtgtggaggaaaaagcgaggataggaaactccgaagagcctattattatagagactggaaagtacgcaaaactcaccgacggttccgtagtagtcaggcagggcggtaccgcggttctcgtgaccgcggttatgtcggacgagcccataacggacgttgactttacccccctggcggtagactacagggaaagggcttctgcgtacggtaggatacccggaggcttcacaaagagggaaggaaaacccaccgacagggagatattggtctccagagtaatagacagaccaataagacctctctttcccgaaggatttttccacgatgttataataaccgccctcactttatccgcggatgataagtacgacccggacgttcttgcaataaccggtgcttccgcagccctccacatatccagaattcccttcgaaggtcccatcgcgggagtcagagtctgtagggtaaacggggagttcgtggctaaccccacctacgaacagaggaaggaagcggatctcgacatagtaatggcgggaacaaaagacgccatcgtaatggtggaaggcggaggaaaggagataccagaagaggttctcgcagacgccctgttcttcggacttgacgcaataaaggaggttatagaagctcaggaaagactgagggaaaaggtagggaaacccaagtttgagtatcagaaggttgaacttcccgaagatatactcaaggcccttgaagaagagtgtactccaaaaatccttgaggcctttaacataaaagataaaaaagaaaggtattcaaccttagacaagatagttgaggaatttatagaagctcaccaaatccccgaagaacttcactttgcggttaagtacttctacaagaaactcgaaagcaggttaatgcgtgaaaaggttctaaaagaaggcgtaaggatagacggaaggaaacccaacgagataagacctatatggatagaggtacatcccttcgaaagaccccacggaaatgccatatttacaagaggacagacgcaggcttacgttacggtaaccctcggaacaccggacgaagccctgataatagaaaccatagcggaaggggaagtcttcaagagattcatgctccactacagtatgcctcccttttccgttggtgaggcaaaaccctggggtcctccgaggagaagggaaatcggacacggagcccttgcggagagggcaatagaaccattacttcctcccgaagaggagtaccccttcataataagggttgtgtccgacatactcgagtctaacggctccacttccatggccacggtttgtggtgcatccttggctctctttgacgccggcgttcccatgaaggacaacaaacatgtggccggcatagccatgggacttatccttgaaaaggacagatacgttatactctctgacatactgggggacgaggaccacctcggcgatatggacttcaaggttgcgggaactaaagacggaattacttccgttcaaatggacataaaggtaaagggaattacaaaagagataatgctcgacgctcttaaacaggcaagggaaggaaggctctacatacttgagaagatgtacgaagctatacccgagccgagaaaagagcctcacccctacacgccgaaggttgaagttgtagacgttcccgaagaaaaagctcccctcataatagggccgggcggttcaaccgttaagaagatttacgacgagacgggcgttaaggtatgggtaggtgaacaaggaaaggtttacctttttgtatttcccggcggtgacgtggaaaaagccaaacaaatgattcaggacatagtaagggaagttgaggtaggtgccgtttacaagggaaccataacgagggtagaaccgtacggagtgttcgttgaactctggccaggaaagataggactcctccacgtttccaagatggcagaacccgtaaggagcgcaaccgaaaagtacaaagtaggagaggaaataatagttaaggttctagacctcgacgaacttggaagaccgaggtttacaacaatagggatagaagacgtaggtaccgaaaagaaggaggtaaaacctaaagtaggagatgtatacgaaggtaaagttgttagagtagagccatacggtgccttcatagagtacgcccccggaaaggtgggactcttgcatgtttcaaagatgaaggaaagggtaaaggatgcaaggcaaaagtacaaggtaggagacgtagtaaaagtcaaagttgttgaaatagacgaacagggaagacccaagttcacggacgatgtctaa

SEQ ID NO: 1640 - protein, 775 aa, Aquifex aeolicus VF5
MSVEEKARIGNSEEPIIIETGKYAKLTDGSVVVRQGGTAVLVTAVMSDEPITDVDFTPLAVDYRERASAYGRIPGGFTKREGKPTDREILVSRVIDRPIRPLFPEGFFHDVIITALTLSADDKYDPDVLAITGASAALHISRIPFEGPIAGVRVCRVNGEFVANPTYEQRKEADLDIVMAGTKDAIVMVEGGGKEIPEEVLADALFFGLDAIKEVIEAQERLREKVGKPKFEYQKVELPEDILKALEEECTPKILEAFNIKDKKERYSTLDKIVEEFIEAHQIPEELHFAVKYFYKKLESRLMREKVLKEGVRIDGRKPNEIRPIWIEVHPFERPHGNAIFTRGQTQAYVTVTLGTPDEALIIETIAEGEVFKRFMLHYSMPPFSVGEAKPWGPPRRREIGHGALAERAIEPLLPPEEEYPFIIRVVSDILESNGSTSMATVCGASLALFDAGVPMKDNKHVAGIAMGLILEKDRYVILSDILGDEDHLGDMDFKVAGTKDGITSVQMDIKVKGITKEIMLDALKQAREGRLYILEKMYEAIPEPRKEPHPYTPKVEVVDVPEEKAPLIIGPGGSTVKKIYDETGVKVWVGEQGKVYLFVFPGGDVEKAKQMIQDIVREVEVGAVYKGTITRVEPYGVFVELWPGKIGLLHVSKMAEPVRSATEKYKVGEEIIVKVLDLDELGRPRFTTIGIEDVGTEKKEVKPKVGDVYEGKVVRVEPYGAFIEYAPGKVGLLHVSKMKERVKDARQKYKVGDVVKVKVVEIDEQGRPKFTDDV

SEQ ID NO: 1641 - DNA, 2109 bp, Treponema pallidum subsp. pallidum str. Nichols
  CDS (1)..(2109): transl_table=11
atgaaacacagcataaccggcactattggggaccacccccttctccttgaaagtgggtatctggcgcggcaagcgaacgggtccgtgtatttacagtgtgaaggtacggcgattctcgcgaccgtatgctcctctgctcagcgacaggaagggctcgactatgtcccgctcactgttgacttcaacgaaaagtattatgcggtggggaagatgcctggcggcttcatcaagcgtgaaggccgtccgaaagacagagagattctcatttcgcgcctcattgatcgtccgatgcggccgctctttgaaaaggagtttggacgtgatatacacgttgtccctacgtgcatatcgtcggatatggtccatcctcatgacgtcttggctattgttgccagttcagctgccgttactctttcggatatccccttccatggaccggttgctgcagtccgcgttgcatatctgaacggttcctatgttattaatcctaccttttctcagattgatgccgccagtatggaggttgtcgttgcaggcactaggcagggcattaccatggtggaaggtggtgcgcgagaggtgtccgaggacctcatgctcggcgcgctcgaacaggcacaagagcatattaaagccctttgcgatatgcaggagcgtctgcgtggactgtgtggcaaggagaaacagacggttatcccttcttctgcgcagcttgtaggtcgcgatcgtatttatgagctcgcctatccgcgtcttgcgcaggctttgtatgcacaggggaagggtgagcggcgcagtgcctgcgacgcggtgaagcgtgatgttgcacagcagtatgctgctcagcttgagaacgatgtgcagcgcaggttgttcgacgcgttgttccacgagatggagtatgagatactacggctgaacattcttgacaggggtttgcgcatcgatggccgtgccattgatgccattcggcccatcgcctgtgaggtcggggtgttgccgcgtccgcatgggtctgcggtgtttacccggggggagactcaatcgctcgcggtggtcacgctcggtgctatgtcggacgggcaagtgtacgacgacatcgaaggggatagacgggagaattttatccttcactataattttcctcctttttcagtgggggaaatagggagaatgggggttggtcggagggagattgggcacgggtgtctagcgcatcgttccctctcggcagtcattccggatccagaacagtttccttacaccgtgcgtgtggtttcagaaattttggagtcgaatggatcttcctccatggcgactgtgtgctcagggacgctttctcttctccatgcaggggtcccaatcaaaaagcctgttgcgggaatcgcgatggggctcatcaccgatggcgtgcgatatgcgattctttcggatattttgggtgaggaggaccatctcggtgatatggatttcaaggtagcaggtacgtgtgacggcattaccggttttcagatggatgtgaaggtagaggcggtgtctgcgtctctgatgaaggaggctttgcagcaagctcgtgtaggtaggctccatattctttctgtcatgaatcagacaatcagcgcaccgagcgtgcacatttctcgctatgcgccgcatattgagagttttaaaatagcggttgaaaaaatcggcgcgctcatcggtcctggggggaaaaccgttaagtcgctttctgaccagtatcgggtgactatcaacactgatagtgacggtaccgtaaccgtctccggaagggatgcgcagtccgttttcgacgcaaaggtcgccgtggtgggccttactgaagatcctcgggtagggagggtgtatcagggtgtagtgaaacgaatcgtagagttcggtgcttttgtggagatctttccagggaaggaaggactctgccacgtttcaaagctgtcgcgcagccgcgtgtccaaagtcagcgatgtgctgcaagagggtcagcggatatgtgtgaagttgattgatatcgacaggatgggtcgtttgaatctttcctatatcgatgctcttgaggggaagtctggaggtctggacacgacgaaatga

SEQ ID NO: 1642 - protein, 702 aa, Treponema pallidum subsp. pallidum str. Nichols
MKHSITGTIGDHPLLLESGYLARQANGSVYLQCEGTAILATVCSSAQRQEGLDYVPLTVDFNEKYYAVGKMPGGFIKREGRPKDREILISRLIDRPMRPLFEKEFGRDIHVVPTCISSDMVHPHDVLAIVASSAAVTLSDIPFHGPVAAVRVAYLNGSYVINPTFSQIDAASMEVVVAGTRQGITMVEGGAREVSEDLMLGALEQAQEHIKALCDMQERLRGLCGKEKQTVIPSSAQLVGRDRIYELAYPRLAQALYAQGKGERRSACDAVKRDVAQQYAAQLENDVQRRLFDALFHEMEYEILRLNILDRGLRIDGRAIDAIRPIACEVGVLPRPHGSAVFTRGETQSLAVVTLGAMSDGQVYDDIEGDRRENFILHYNFPPFSVGEIGRMGVGRREIGHGCLAHRSLSAVIPDPEQFPYTVRVVSEILESNGSSSMATVCSGTLSLLHAGVPIKKPVAGIAMGLITDGVRYAILSDILGEEDHLGDMDFKVAGTCDGITGFQMDVKVEAVSASLMKEALQQARVGRLHILSVMNQTISAPSVHISRYAPHIESFKIAVEKIGALIGPGGKTVKSLSDQYRVTINTDSDGTVTVSGRDAQSVFDAKVAVVGLTEDPRVGRVYQGVVKRIVEFGAFVEIFPGKEGLCHVSKLSRSRVSKVSDVLQEGQRICVKLIDIDRMGRLNLSYIDALEGKSGGLDTTK

SEQ ID NO: 1643 - DNA, 2088 bp, Chlamydia trachomatis D/UW-3/CX
  CDS (1)..(2088): transl_table=11
atggcttttgagactttttctgttgcgttagacaaagataaaacattaattttcgagacagggaaaatagctcgccaggccagtggggctgttctcgtcaaaatgaacgagacttgggttttttcttcagcgtgtgcagcctccttgtcagaggctgtcgattttctgcctttcagagtagactatcaagagaagttttcctccgcaggaagaacctctggaggatttctaaaacgtgaaggacggccttccgagagagaaattcttgtttctcggctaatggatcgctctttgcgtccgtcgtttcctaatagactcatgcaagatattcaagtcttgtcctacgtttggtcttacgacgggaaaactttacctgatcctctagctatttgcggagcttctgccgctttagctatctcagaggttcctcaaaattgtatcgttgcgggtgtacgcgttgggctcgtcggaggaaagtgggtcattaacccaaccagagatgagttaagtgcctccaagctggatctcgtcatggcaggaacagcttctgcagttttaatgattgaaggacattgcgactttttaacagaagagcaagttctagaagccattgcttttgggcaaacctatatagctaaaatatgcgatgctattgaagcatggcagaaagctatcggcaaacaaaagaatttctctgccgttcttgatatgccagaagacgtacaaaatgtagtttcagattttattagagaaaaattcgaaaaagcattgtcttttagagataaagaagctctagagcaagcctcgaaagaattagaggaatccgttattgctaacttggttcaagaagaaaacagtgatttttctttgttgaacgttaaggctgcatttaagacagcaaaatccaatcaaatgcgagctcttatccaagatcttggtattcgtgtagatggacgaaccaccacagagattcgccccatttccatagagactccttttcttccaagaacacacggaagttgcttatttactcgcggagagacgcaaagcatggccgtatgtacgcttggaggcgaaaatatggcgcagcgattcgaagatctgaatggagatggagccgctcgcttctatctacagtatttcttccctcctttctccgtaggagaagttggcagaattggttccccaggaagacgtgaaattggacatgggaaattagctgagaaagctttaagtcatgttcttcctgagacatcacgattcccttatatcattcgcctagaatctaatattactgagtctaatggatcttcctccatggcatccgtatgtggaggctgtcttgcactcatggatgctggagttcctatcaaagctcccgtggcaggtattgctatgggcttaatcttagatcgagatcaagccatcatcttgtctgatatttccggtatagaagatcatctaggagatatggactttaaagtagccggaacagctaaaggtattacagctttccaaatggatatcaagatagagggaatcactcataagattatggagcaagctctagcgcaagctaaacaagggcgtagtcatatccttaatcttatgacacaggttctggcctcccctaagggaactgtttctaaatatgctccgcgcattgaaactatgcagatcaatacctcaaaaatcgcaacggtcattggtcccggaggaaaacaaatccgtcaaattatcgagcgttctggtgcgcaagttgacatcaatgatgacggcgtcattaacatagctgcaagcacccaagaatcgattaacaaagctaaagaacttatcgaaggattaactggagaagttgaagtcggtaaagtttataatggccgtgttacatctatcgcaacatttggggtattcgtagaagtcctcccaggaaaagaagggctctgtcatatttctgaattgtctaaacaaaaagtagacaatatctctgactttgtcaaagaaggagacaagcttgctgttaaactccttagcattaacgaaaaaggccagttgaagctgagccataaggcaacgctggaagattag

SEQ ID NO: 1644 - protein, 695 aa, Chlamydia trachomatis D/UW-3/CX
MAFETFSVALDKDKTLIFETGKIARQASGAVLVKMNETWVFSSACAASLSEAVDFLPFRVDYQEKFSSAGRTSGGFLKREGRPSEREILVSRLMDRSLRPSFPNRLMQDIQVLSYVWSYDGKTLPDPLAICGASAALAISEVPQNCIVAGVRVGLVGGKWVINPTRDELSASKLDLVMAGTASAVLMIEGHCDFLTEEQVLEAIAFGQTYIAKICDAIEAWQKAIGKQKNFSAVLDMPEDVQNVVSDFIREKFEKALSFRDKEALEQASKELEESVIANLVQEENSDFSLLNVKAAFKTAKSNQMRALIQDLGIRVDGRTTTEIRPISIETPFLPRTHGSCLFTRGETQSMAVCTLGGENMAQRFEDLNGDGAARFYLQYFFPPFSVGEVGRIGSPGRREIGHGKLAEKALSHVLPETSRFPYIIRLESNITESNGSSSMASVCGGCLALMDAGVPIKAPVAGIAMGLILDRDQAIILSDISGIEDHLGDMDFKVAGTAKGITAFQMDIKIEGITHKIMEQALAQAKQGRSHILNLMTQVLASPKGTVSKYAPRIETMQINTSKIATVIGPGGKQIRQIIERSGAQVDINDDGVINIAASTQESINKAKELIEGLTGEVEVGKVYNGRVTSIATFGVFVEVLPGKEGLCHISELSKQKVDNISDFVKEGDKLAVKLLSINEKGQLKLSHKATLED

SEQ ID NO: 1645 - DNA, 2067 bp, Helicobacter pylori J99
  CDS (1)..(2067): transl_table=11
atggattttatcaccatcaactctggtaacagaaccgaagagttcgctctcaaacaagtggccaaacaagccactagctctttaatgtatcgcttaggaaaaacccttattttagcgagcgtgtgcgtagaaagagagcctgtgagtgaagattttttgcctttagtggtgcagtttttagaaaaatcgtatgcagccggtaaaatcccgggcggttttgttaaaagagaaggcagggcgcaagattttgaaatcttaacctctaggctcatagacaggactttacgccctttattccctaaagattaccgctaccctacgcaaatcactttaatggttttaaaccatgatattgaaaacgatttgcaagtttctgctttaaacgccgcttcagccaccctctttttagcccatatcgctcctattaaaagcgtgagcgcttgcaggatcgctagggtggataacgaatttatcattaaccctagcgcaagccttttgaatcaatccagtttggatctgttcgtgtccggcaccaaagagagtttgaacatgatagaaatgcgctctttggggcaaaaattaaacgctttagaagagcctttaatgttagaagctttagaattggctcaaaaaagtttgaaagaaacctgcgcgctttatgaagaggctttcacgccctatcaaaacgagctcctttttaaagagggcgaagggatagtccttaatgaaaggctgttggatttattaaaaaatcagtattttgatgaaatcatcaaaggcattgaaagttctgctttgagcgagcgagaaaatgttttcaaagaagtggctaaaaaaatcagcgaagcccactcagaattcagtttagaagaaattgaattgtctttagaaaaagtgaaaaaaaccgagatcagacgcatgattattcaagataagatccgcccggataagcgcgcgttagaagaagtgcggcccatttcaatagagagcaacttgctccctatggcacacagctccattttattcactagggggcaaactcaaagcttagtggtaggggttttaggcatggataatgacgctcaaacccatgagaatttggagcataaagcccctatcaaagaacgcttcatgtttcattacaatttccctcctttttgcgtgggcgaagcgagctctattggcgcgacttcaaggcgcgaattagggcatgggaatttagctaaaagagctttagaaacgagcattaaaaataaagagcaggtgatacgattggtttctgagattttagagagcaatggttcaagctcaatggcgagcgtgtgcgcagggtctttagccctttatgcaagcggtgtggaaattcatgatttagtcgctggggtggctatgggcatggtgagcgaaaggcaagatcacgccattttaagcgatattagcggtttagaagacgccgaaggcgatatggattttaagattgctgggaatttagaaggcattacggctatgcaaatggataccaaaatgagcggtatccaattagaggttttataccaagccttacttcaagccaaaagagcacggaaacacattttaaaaatcatgcatgaagcgaaagaaaagatcgtgatcaatttttcccatttgccccagactgaaatttttaatgtcgcaccagataaaattatagaaattatcggtcaaggggggcgtgtgattaaagagatagtggaaaaatttgaggttaagattgatttgaacacaccgagcggtgaagtgaaaatcatggggaataaagagcgtgttttaaaaactaaagaatttattttaaactatttgcattctttagatcaagaattggagcaatacgctattgatgaggtgctagaagctcaagtgaagagaatcgtggattttggggcgtttttaagcttgcctaaggggggcgaaggcttgttaagaaagcaaaacatggacaagtgtcaagtgatcttaaaagaaggcgatagcatcaggtgtagggtgattagtttcaataagggtaaaatcgctttggatttggcttaa

SEQ ID NO: 1646 - protein, 688 aa, Helicobacter pylori J99
MDFITINSGNRTEEFALKQVAKQATSSLMYRLGKTLILASVCVEREPVSEDFLPLVVQFLEKSYAAGKIPGGFVKREGRAQDFEILTSRLIDRTLRPLFPKDYRYPTQITLMVLNHDIENDLQVSALNAASATLFLAHIAPIKSVSACRIARVDNEFIINPSASLLNQSSLDLFVSGTKESLNMIEMRSLGQKLNALEEPLMLEALELAQKSLKETCALYEEAFTPYQNELLFKEGEGIVLNERLLDLLKNQYFDEIIKGIESSALSERENVFKEVAKKISEAHSEFSLEEIELSLEKVKKTEIRRMIIQDKIRPDKRALEEVRPISIESNLLPMAHSSILFTRGQTQSLVVGVLGMDNDAQTHENLEHKAPIKERFMFHYNFPPFCVGEASSIGATSRRELGHGNLAKRALETSIKNKEQVIRLVSEILESNGSSSMASVCAGSLALYASGVEIHDLVAGVAMGMVSERQDHAILSDISGLEDAEGDMDFKIAGNLEGITAMQMDTKMSGIQLEVLYQALLQAKRARKHILKIMHEAKEKIVINFSHLPQTEIFNVAPDKIIEIIGQGGRVIKEIVEKFEVKIDLNTPSGEVKIMGNKERVLKTKEFILNYLHSLDQELEQYAIDEVLEAQVKRIVDFGAFLSLPKGGEGLLRKQNMDKCQVILKEGDSIRCRVISFNKGKIALDLA

SEQ ID NO: 1647 - DNA, 2127 bp, Thermotoga maritima MSB8
  CDS (1)..(2127): transl_table=11
atgaaggaatggcgacgtaacatccttggaagagaactcgtagttcagtacggaaaagtagcgaaacaatcgagtggttcagccctggtgaggtttggtgacacagttgttctggcaaccgcaaacatttcagacaaagcagtggaaggaatcgactttgtacctctcaccgttgagttccaggaaaggttctacgctgccggaaagatccccggtggtttcataaagagggaaggtaaacccagcgaatccgctattctctcagcccgcctcatcgacagaccgataaggcctctctttccaaaaaaactcagaaacgaggtccaggttatcgtgaccgtgctttcggtggatccgaacgttccaccggacgttgtgggaatctttgccgcgtccctcgcattgaacgtttcaaagataccgtttgaaggtatagtggcgggtattagggttggttacagagacggacagttcatagccttacccagtgaggaagacatagaaaagggtctgatggatatcaccgttgctggaacaaaagacgctgtcaccatggtcgaaggtgaagcaaaagaagtaacagaagaagatatggtgaaggccttgagattcgcccactccgtcataaaagaactagtcgatttccaggaagagattctctcagagttcaacgtggagaaaatccccgttgtcgagcccacaccacctgaaggcctcgttgaggctttcaaagatcttctaaacaaagaagaactggaaagaagaatcctcgtaaaggtgaagaaggaaagagaagtggctctcaaagagtacgaagaacagcttctgaatcagattgcagaaaaattgtccgtaaccgatttggaaggaatcaaaccctttgtctcggaactctatgaagatgccgtcaaaaaaacaatgaggagattgatagtggagaagggtatcagagcggacgggagaaaaccgaccgagatcagacccatctcctgcgaggttggattgttcccgagaacacatggctctgctcttttcaccagaggggaaacacagagtctcggtatcgttactctcggcgctcccatggacgttcagatcatagacacactcctcgaagaaggcgttaagaggttcatgctgcactacaactttcctccgttctgtacaggagaggtgaagccgctcagaggtcccagcagaagggaaatcgggcatggacatctggcagaaagagctctgaagaacatgcttccacccgaagaagagttcccctacaccataagagtggtttctgagatcctggagtccaacggttcttcctcaatggccacggtgtgttcaggatccctggcgctgatggatgctggagttcctatcaagaaacacgttgcaggaatagcgatggggctcattcttgaagaagacgccgagatcatactcacagacatcattggaatggaagaccactacggtgatatggacttcaaagtggctggaacgagagatggaataactgccttccagatggactgtaaggtctcaggtgtctcagatgaactcctcatgaaagcgctcatgcaggcaagggaagcgagaatgtacattctcgacaggatgtatgaaaccatctctgctccaagaccgcatctgtccaagtatgcaccgatcataaaggtaaccaaggtcgatccagaaaaagtggcagatgtcataggacctggaggcagagtgataaagaagatcataaaagacttcgatgtgaaggtggagatcgacgacgaaacaggcctcgtcaaggtcgttggaagttctgaagaaaacgttgacaaggccatcgaactcataagggaaatagccaaagaaatagaagtgggagaagttctggaaggaaaggtcacaaggatagaaccttacggactgttcatagaggtgagaccaggtaagataggcctccttcatcagagcaaagtaggagaagatatgaggcagttcttgaaaaaggtgaaagtcggtgataccataaaggtacaggtgatcaacatagacgacctcggaagactgcagttcaaacgtgtcacagagggggaaaacactcagcatggaaagacacacagtaaacgaaattga

SEQ ID NO: 1648 - protein, 708 aa, Thermotoga maritima MSB8
MKEWRRNILGRELVVQYGKVAKQSSGSALVRFGDTVVLATANISDKAVEGIDFVPLTVEFQERFYAAGKIPGGFIKREGKPSESAILSARLIDRPIRPLFPKKLRNEVQVIVTVLSVDPNVPPDVVGIFAASLALNVSKIPFEGIVAGIRVGYRDGQFIALPSEEDIEKGLMDITVAGTKDAVTMVEGEAKEVTEEDMVKALRFAHSVIKELVDFQEEILSEFNVEKIPVVEPTPPEGLVEAFKDLLNKEELERRILVKVKKEREVALKEYEEQLLNQIAEKLSVTDLEGIKPFVSELYEDAVKKTMRRLIVEKGIRADGRKPTEIRPISCEVGLFPRTHGSALFTRGETQSLGIVTLGAPMDVQIIDTLLEEGVKRFMLHYNFPPFCTGEVKPLRGPSRREIGHGHLAERALKNMLPPEEEFPYTIRVVSEILESNGSSSMATVCSGSLALMDAGVPIKKHVAGIAMGLILEEDAEIILTDIIGMEDHYGDMDFKVAGTRDGITAFQMDCKVSGVSDELLMKALMQAREARMYILDRMYETISAPRPHLSKYAPIIKVTKVDPEKVADVIGPGGRVIKKIIKDFDVKVEIDDETGLVKVVGSSEENVDKAIELIREIAKEIEVGEVLEGKVTRIEPYGLFIEVRPGKIGLLHQSKVGEDMRQFLKKVKVGDTIKVQVINIDDLGRLQFKRVTEGENTQHGKTHSKRN

SEQ ID NO: 1649 - DNA, 2130 bp, Vibrio cholerae O1 biovar eltor str. N16961
  CDS (1)..(2130): transl_table=11
atgttcgaaaaaccagtagtaaaaacgtttcagtacggtaaccacaccgttactctcgaaacgggtgtaatggctcgccaagcaacggcagcagtaatggctaccatggatgacactgcggtgtttgtctctgtggtcggtaagaaagaagcggtagtgggtcaagatttcttccctctgactgtaaactaccaagagcgtacttacgcggcaggtaaaatccctggcggtttctttaagcgcgaaggtcgtccttctgaaggcgaaacgctgattgctcgtctgattgaccgtccaattcgtccgctgttccctgatggtttcactaacgaagtgcaagtgatcgcgactgtggtttcagtaaacccagacgtgcaacctgacatcatctcgatgatcggtacttctgcagcactggcgatttctggactcccattcaatggtccaatcggtgcggctcgcgtaggtcacattgatggtcaattggttctgaacccaagtgaaaaagagctgaaacagtctcgtttggatctggtggttgcgggtactgacaacgcagtactgatggtggaatcagaagcacaaattctgactgaagaagagatgctggctgccgttgtgtttggtcacgatcaacaacaagccgtgatcaaagcaatcaatgaattcgcagcggaagttgcaacaccagcatgggaatgggttgcaccagccgagaacactgagctgaaagcgaaagtggctgctctggcagaaactcgtttggtggaagcgtaccaaatcactgagaaaatggcgcgttatgatcgtatccatgaaatcagtgcagaagtcacggcggctctgctggctgaaaacgaagctttagacaccaaagaaattcacaccattttccacgatctggaaaaaaccgttgttcgtcgcagcatcatcgcgggtaacccacgtatcgatggccgtgaaaaagacatggttcgtgctctggacgttcgtactggcgttctgccacgtactcacggctctgctctgttcacacgtggtgaaactcaggctctggttaccgcaactctaggcactcagcgtgatgcgcaaatcatcgatgagctgactggcgagaagaaagatcacttcctactgcactacaacttccctccatactgtgtgggtgaaacgggttttgtgggttctcctaagcgtcgcgaaatcggtcacggccgtttggcgaagcgtggtattgctgcggttatgccatcaccagaagagttcccgtacacagtacgtgtcgtttctgaaatcacggaatctaacggttcatcttcaatggcttctgtgtgtggttcatcgcttgctctgatggatgccggtgttccaatcaaggcttctgttgcgggtatcgcaatgggtctggtgaaagaagaaaatgatttcgtggttctgtctgacatcctaggtgatgaagatcaccttggcgacatggactttaaagtcgcgggtaccgcgacaggtgttactgcactgcagatggacatcaagatcgaaggtatcaccaaagagatcatgcaaatcgctctgaaccaagcgaaaggtgctcgtctacacattctgtctgtgatggatcaagcgatctctgcagcgcgtagcgatatctctgaatttgcgccacgtatccacacgatgaagatcagcgttgagaagatcaaagacgtgatcggtaaaggcggtgcggtaattcgtcagttgacggaagaaacgggtaccaccatcgagatcgaagatgacggcacgatcaagattgctgcgactgacggcgatcaagcgaaagaagcgatccgccgtattcaagagatcaccgccgaagttgaagtgggcgtgatctacactggtaaagtagctcgtttggcagactttggtgcgtttgtaacgattcttcctggtaaagatggtctagtacacatctctcaaatcgctgacaagcgcgtagagaaagtgtctgactacctgactgaaggccaagaagttcaagttaaagtgctggaaatcgaccgccaaggccgtgtacgtctaagcatgaaagaagcggttgaaacttctgatgctgcagcagcagaagtggcaccacaagcggaataa

SEQ ID NO: 1650 - protein, 709 aa, Vibrio cholerae O1 biovar eltor str. N16961
MFEKPVVKTFQYGNHTVTLETGVMARQATAAVMATMDDTAVFVSVVGKKEAVVGQDFFPLTVNYQERTYAAGKIPGGFFKREGRPSEGETLIARLIDRPIRPLFPDGFTNEVQVIATVVSVNPDVQPDIISMIGTSAALAISGLPFNGPIGAARVGHIDGQLVLNPSEKELKQSRLDLVVAGTDNAVLMVESEAQILTEEEMLAAVVFGHDQQQAVIKAINEFAAEVATPAWEWVAPAENTELKAKVAALAETRLVEAYQITEKMARYDRIHEISAEVTAALLAENEALDTKEIHTIFHDLEKTVVRRSIIAGNPRIDGREKDMVRALDVRTGVLPRTHGSALFTRGETQALVTATLGTQRDAQIIDELTGEKKDHFLLHYNFPPYCVGETGFVGSPKRREIGHGRLAKRGIAAVMPSPEEFPYTVRVVSEITESNGSSSMASVCGSSLALMDAGVPIKASVAGIAMGLVKEENDFVVLSDILGDEDHLGDMDFKVAGTATGVTALQMDIKIEGITKEIMQIALNQAKGARLHILSVMDQAISAARSDISEFAPRIHTMKISVEKIKDVIGKGGAVIRQLTEETGTTIEIEDDGTIKIAATDGDQAKEAIRRIQEITAEVEVGVIYTGKVARLADFGAFVTILPGKDGLVHISQIADKRVEKVSDYLTEGQEVQVKVLEIDRQGRVRLSMKEAVETSDAAAAEVAPQAE

SEQ ID NO: 1651 - DNA, 2115 bp, Bacillus halodurans C-125
  CDS (1)..(2115): transl_table=11
atggaacaagaaagacatgagttttctattgattgggcaggacggaagctcacagtggagacaggccagttggcgaaacaggcaaacggtgccgtactagttcgttacggagataccgcggttctttcgacagctactgcatccaaggagccaaaggaccttccgttttttccacttacagtcaattacgaagagcgactttatgcagccggaaaaatccctggtggcttcattaagcgggaaggtcgaccaagtgaaaaagcgattttggcgagtcgtttaatcgaccgtccgatccgaccgttgttcccagaaggatttcgtaatgaagtgcaagtgatcagcattgtcatgagtgtggatcaagattgttcctctgaaatggcagcgatggtaggatcatctttagccctatccatctctgatatcccgtttgaaggacctatagcaggtgtgacggttggtcggattgacggacaatttgtcattaacccaacgcaggatcagctcgagaaaagcgatattcacttagtggtggcaggaacaaaagacgcgattaacatggtagaggccggagctgaagaagtaccggaagatgttatgttagaagcgatcatgtttggtcataacgaaattaaacgcctaattgaattccaagagaagattgcagctgaagttggaaaatcgaaaaccgatgtggtgttaaagcaagtagatccgatgcttgaacaagaagttcgcgtaaaagcggaggaggatttaaagcaagcagttcaagtgccagaaaaacatgcccgtcaagatgcgattgaagctgtgatggataaagtattagagacgtatgaagacaatgaggacgttcctttatctgaagtgaatgaaatcttacataaaattgtcaaggaagaagtacgtcgtctcatcacagtggaaaagattcgcccggatggtcgtgagattgatgaaatccgtccactctcatcacaagtggggatcttaccgcgaacacacggatctggcttgttcacacgtggacaaacccaagcgctcagcatttgtacactcggtgcgttaggtgatgtgcaaattcttgatggccttgggattgaagaatcgaagcggtttatgcaccattataacttcccacaattcagtgtgggtgaaactgggcctattcgtggaccaggacgtcgggaaattggtcacggtgcattaggggagcgagcgctagagccggtcattccgagcgaacaggattttccatacacgatccgtctcgtttctgaagttttagaatcgaacgggtccacatcacaagcgagcatttgtgcctctaccttagccatgatggatgcaggggttccaatcaaagcacccgttgcgggcattgcgatggggctcgtcaagcaagatgagcatgtgagcgtccttacggatattcaaggaatggaagatgcccttggtgatatggactttaaagtggcgggtacgagaaaaggtgtaacggccttacagatggatattaaaatttctggtattgatcgagctattctcgaacaagctctggaacaagcacgcaaaggccggatgatcatcctagataacatgcttgaagccattagtgaatctcgcagtgagctttcaccatatgcgccaaaaatcttaacaatgacaatcaatcctgataaaattcgtgatgttattggaccaagtggaaagatgatcaacaaaatcattgaagatacaggtgtaaagattgacattgagcaagatgggacgatctacatctcatcagctgatacaaacatgaacaacaaagcccgtgaaattattgaggacatcgttcgggaagtagaagttggacaaatgtacctcgggaccgtcaaacggattgaaaagttcggtgccttcgttgaactatttaaaggaaaagacggacttgttcatatttcacaactagcagaagagcgagtaaataaggtcgaagatgttgtgaaaatcggcgatgaaattctcgtaaaagttatggaaattgacaaccaaggccgagtcaacctgtcgcgcaaagcagtgttgaaggagcaaaaaaaggcggaagagcagaaccagaagtaa

SEQ ID NO: 1652 - protein, 704 aa, Bacillus halodurans C-125
MEQERHEFSIDWAGRKLTVETGQLAKQANGAVLVRYGDTAVLSTATASKEPKDLPFFPLTVNYEERLYAAGKIPGGFIKREGRPSEKAILASRLIDRPIRPLFPEGFRNEVQVISIVMSVDQDCSSEMAAMVGSSLALSISDIPFEGPIAGVTVGRIDGQFVINPTQDQLEKSDIHLVVAGTKDAINMVEAGAEEVPEDVMLEAIMFGHNEIKRLIEFQEKIAAEVGKSKTDVVLKQVDPMLEQEVRVKAEEDLKQAVQVPEKHARQDAIEAVMDKVLETYEDNEDVPLSEVNEILHKIVKEEVRRLITVEKIRPDGREIDEIRPLSSQVGILPRTHGSGLFTRGQTQALSICTLGALGDVQILDGLGIEESKRFMHHYNFPQFSVGETGPIRGPGRREIGHGALGERALEPVIPSEQDFPYTIRLVSEVLESNGSTSQASICASTLAMMDAGVPIKAPVAGIAMGLVKQDEHVSVLTDIQGMEDALGDMDFKVAGTRKGVTALQMDIKISGIDRAILEQALEQARKGRMIILDNMLEAISESRSELSPYAPKILTMTINPDKIRDVIGPSGKMINKIIEDTGVKIDIEQDGTIYISSADTNMNNKAREIIEDIVREVEVGQMYLGTVKRIEKFGAFVELFKGKDGLVHISQLAEERVNKVEDVVKIGDEILVKVMEIDNQGRVNLSRKAVLKEQKKAEEQNQK

SEQ ID NO: 1653 - DNA, 2145 bp, Pasteurella multocida subsp. multocida str. Pm70
  CDS (1)..(2145): transl_table=11
gtgaatccaattgttaaacaatttaaatatggtcaacatactgttacgttagaaacgggtgcaattgcacgccaagcaacggcagcagtgatggcaagtatggatgatactactgtgtttgtcacagtggttgctaaaaaagatgtgaaagaaggtcaagacttcttcccattaaccgttaactatcaagagcgtacttatgctgcgggtcgtattcctggtggctttttcaaacgtgaaggtcgtccttctgaaggcgaaaccttaattgcacgcttaattgaccgtccaattcgtcctcttttcccagaaggtttttataacgaaatccaaatcgtggcgacagtggtgtctgttaatccgcaaatttgcccagatttagtggcaatgatcggtgcatctgcggcactttctttatcaggtgtgccatttaatggccctatcggtgcagcacgtgttggttttattgatgatcaatttgtgttaaacccaaccatgaacgagcaaaaacaaagccgtttagacttggttgtcgcgggaacagataaagcagtgttaatggtggaatctgaagccgatgtattaaccgaagaacaaatgttagctgcggtggtgtttggtcatcagcaacaacaagtggtgattgacgcgatcaaagaatttaccgcagaagccggtaaaccgcgttgggattgggtggcacctgaaccaaataccgcgttaattgaaaaagtgaaagcgattgcagaagcgcgtctaggcgaagcataccgtatcactgaaaaacaagcacgttatgaacaaattgatgcgattaaagctgatgtgattgcacaaatcacagctgaagtggcagaaggcgaagacatcagtgaagggaaaattgtcgatattttcaccgcacttgaaagccaaatcgtacgtagccgtattattgctggtgaaccacgtattgatggtcgtacagtagatactgttcgtgcattagatatttgtactggtgttttaccacgtacacacggttctgcgattttcacccgtggtgaaacacaggcgttagctgttgcgacattaggtacagaacgtgatgcacaaattattgatgaattaacaggtgagcgttcagatcatttcttattccactacaacttcccgccatattctgtgggtgaaaccggtatgattggttcaccaaaacgtcgtgaaattggtcatggtcgtttagcgaaacgcggtgtggctgcagtgatgccaacacttgccgagttcccgtatgtggtacgtgttgtctctgaaatcacagaatcaaatggttcttcttctatggcatcggtttgtggtgcgtctttagcattaatggatgcgggtgtaccaattaaagcggcggttgcaggtattgcaatgggcttagtcaaagaagacgaaaaatttgtggtgctttcagacatcttaggtgatgaagatcacttaggtgacatggattttaaagtggcgggtacacgtactggtgtaacggcattacaaatggatatcaaaatcgaaggtatcacagcagaaatcatgcaaattgcgttaaaccaagcgaaaagtgcacgtttacacattttaggtgtgatggagcaagcgattcctgcgccacgtgcggatatttctgattttgcaccgcgtatttacaccatgaaaattgatccgaagaaaatcaaagatgtgatcggtaaaggtggtgcaaccattcgtgccttaacagaagaaacaggtacctcaattgatatcgatgatgatggtacagtgaagattgcggcggttgatggcaattcagcaaaagaggtgatggcgcgtattgaagatattactgcagaagttgaagcgggtgcagtgtataaaggcaaagttactcgtttagctgattttggtgccttcgtttctatcgtaggtaacaaagaaggcttagtgcatatttctcaaatcgcggaagagcgtgttgagaaagtgagtgattatcttgcggtgggacaagaagtgactgttaaagtggttgagattgatcgtcaaggtcgtattcgtttaaccatgaaagaagttgcaccaaagcaagaacacgttgattctgttgtcgcagacgttgccgcagaagaaaacgcataa

SEQ ID NO: 1654 - protein, 714 aa, Pasteurella multocida subsp. multocida str. Pm70
MNPIVKQFKYGQHTVTLETGAIARQATAAVMASMDDTTVFVTVVAKKDVKEGQDFFPLTVNYQERTYAAGRIPGGFFKREGRPSEGETLIARLIDRPIRPLFPEGFYNEIQIVATVVSVNPQICPDLVAMIGASAALSLSGVPFNGPIGAARVGFIDDQFVLNPTMNEQKQSRLDLVVAGTDKAVLMVESEADVLTEEQMLAAVVFGHQQQQVVIDAIKEFTAEAGKPRWDWVAPEPNTALIEKVKAIAEARLGEAYRITEKQARYEQIDAIKADVIAQITAEVAEGEDISEGKIVDIFTALESQIVRSRIIAGEPRIDGRTVDTVRALDICTGVLPRTHGSAIFTRGETQALAVATLGTERDAQIIDELTGERSDHFLFHYNFPPYSVGETGMIGSPKRREIGHGRLAKRGVAAVMPTLAEFPYVVRVVSEITESNGSSSMASVCGASLALMDAGVPIKAAVAGIAMGLVKEDEKFVVLSDILGDEDHLGDMDFKVAGTRTGVTALQMDIKIEGITAEIMQIALNQAKSARLHILGVMEQAIPAPRADISDFAPRIYTMKIDPKKIKDVIGKGGATIRALTEETGTSIDIDDDGTVKIAAVDGNSAKEVMARIEDITAEVEAGAVYKGKVTRLADFGAFVSIVGNKEGLVHISQIAEERVEKVSDYLAVGQEVTVKVVEIDRQGRIRLTMKEVAPKQEHVDSVVADVAAEENA

SEQ ID NO: 1655 - DNA, 2106 bp, Pseudomonas aeruginosa PAO1
  CDS (1)..(2106): transl_table=11
gtgaacccggtaaccaagcaattccagttcggtcagtcgaccgtcactctcgagaccggccgtatcgctcgccaggccaccggcgccgtactggtcaccatggacgacgtcagcgtgctggtcaccgtggtcggcgccaagtcgccggccgaaggccgcgacttcttcccgctgtccgtgcactaccaggaaaagacctacgccgcaggccgtatccccggtggtttcttcaagcgtgaaggacgtccttccgagaaggaaaccctgacctcgcgcctgatcgaccgtccgatccgtccgctgttccccgaaggtttcatgaatgaagtgcaggtcgtctgcaccgtcgtctccaccaacaagaagtccgatccggacatcgccgcgatgatcggcacctccgccgccctggcgatctccggcattccgttcgccggcccgatcggcgccgcccgcgtcggtttccatccggaaatcggctacatcctcaaccccacctacgagcaactgcagagttccagcctcgacatggtcgtggccggtaccgaagacgccgtgctgatggtggagtccgaggccgacgaactgaccgaagaccagatgctcggtgccgtgctgttcgcccatgacgagttccaggcggtgatccgtgccgtcaaggagctggccgccgaagctggcaagccggcctgggactggaaagccccggcggaaaacaccgtgctggtcaacgccatcaaggcagagctgggcgaagcgatctcccaggcctataccatcaccatcaagcaggaccgctacaaccgtctgggcgagctgcgcgaccaggccgtggccctgttcgccggcgaggaagagggcaagttcccggcttccgaggtcaaggacgtattcggcctgctggaataccgcaccgttcgcgagaacatcgtcaacggcaagccgcgtatcgacggtcgtgacacccgtaccgtgcgtccgctgcgcatcgaagtcggcgtgctcggcaagacccacggttccgcgctgttcacccgtggcgaaacccaggccctggtcgttgcgaccctcggcaccgcgcgtgatgcccagctgctggataccctggaaggcgagcgcaaggacgccttcatgctgcactacaacttcccgccgttctcggtaggcgagtgcggccgcatgggcagcccgggtcgtcgtgaaatcggccatggccgtctggcccgtcgtggcgtcgccgccatgctgccgacccaggacgagttcccctacaccattcgcgtggtttccgagatcaccgagtccaacggttccagctcgatggcctccgtgtgcggcgcctccctggcgctgatggatgccggtgtgccggtcaaggcgccggtcgccggtatcgccatgggcctggtcaaggaaggcgagaagttcgccgtcctgaccgacatcctcggtgacgaggaccacctgggcgacatggacttcaaggttgccggtaccgacaagggcgtcaccgccctgcagatggacatcaagatcaacggtatcaccgaagagatcatggagatcgccctgggccaggccctggaagctcgcctgaacatcctcggccagatgaaccaggtcatcgccaagccgcgcgccgagctgtccgagaacgccccgaccatgctgcagatgaagatcgactcggacaagatccgcgacgtcatcggcaagggcggcgcgaccatccgtggtatctgcgaagagaccaaggcctcgatcgacatcgaggacgatggcagcgtgaagatctacggcgaaaccaaggaagccgccgaggccgccaagctgcgcgtcctggcgatcaccgcggaagccgagatcggcaagatctacgtcggcaaggtggagcgcatcgtcgacttcggtgccttcgtcaacatcctgccgggcaaggacggcctggtgcacatctcgcagatcagcgacaagcgcatcgacaaggtcaccgacgtgctgcaggaaggccaggaagtgaaggtcctggtgctcgacgtggacaaccgtggccgcatcaagctgtcgatcaaggacgtggctgccgccgaagcttccggcgtgtaa

SEQ ID NO: 1656 - protein, 701 aa, Pseudomonas aeruginosa PAO1
MNPVTKQFQFGQSTVTLETGRIARQATGAVLVTMDDVSVLVTVVGAKSPAEGRDFFPLSVHYQEKTYAAGRIPGGFFKREGRPSEKETLTSRLIDRPIRPLFPEGFMNEVQVVCTVVSTNKKSDPDIAAMIGTSAALAISGIPFAGPIGAARVGFHPEIGYILNPTYEQLQSSSLDMVVAGTEDAVLMVESEADELTEDQMLGAVLFAHDEFQAVIRAVKELAAEAGKPAWDWKAPAENTVLVNAIKAELGEAISQAYTITIKQDRYNRLGELRDQAVALFAGEEEGKFPASEVKDVFGLLEYRTVRENIVNGKPRIDGRDTRTVRPLRIEVGVLGKTHGSALFTRGETQALVVATLGTARDAQLLDTLEGERKDAFMLHYNFPPFSVGECGRMGSPGRREIGHGRLARRGVAAMLPTQDEFPYTIRVVSEITESNGSSSMASVCGASLALMDAGVPVKAPVAGIAMGLVKEGEKFAVLTDILGDEDHLGDMDFKVAGTDKGVTALQMDIKINGITEEIMEIALGQALEARLNILGQMNQVIAKPRAELSENAPTMLQMKIDSDKIRDVIGKGGATIRGICEETKASIDIEDDGSVKIYGETKEAAEAAKLRVLAITAEAEIGKIYVGKVERIVDFGAFVNILPGKDGLVHISQISDKRIDKVTDVLQEGQEVKVLVLDVDNRGRIKLSIKDVAAAEASGV

SEQ ID NO: 1657 - DNA, 2322 bp, Lactococcus lactis subsp. lactis Il1403
  CDS (1)..(2322): transl_table=11
ttggcaaaagaaacattttcaatcgaatttgcaggtcggacattaactgttgaaacaggtcaagttgcaaaacaagcaaatggtgctgttgttgtacgttatggagatacaactgttttaacagccgctacaatgggtaaaatggctacgggtgatttcttcccacttcaagtgaactatgaagaaaaaatgtatgctgctggtaaattcccaggaggtttcaacaaacgtgaggcgcgtccgtcgactgatgcgacattgactgctcgtttaattgaccgcccaattcgtcctatgtttgctgaaggttttcgtaatgaagttcaagtcattaatactgttctttcttatgatgaaaatgcttctggtcgtgtggcagcaatgtttggctcttctttagcgcttgcaatttctgatattccatttgatagaccaattgcaggtgttgaagttgcctatattgatggagaatatatcatcaatccaactgttgcggaaaaagaggcatcaagtttggagctctctgttgcgggaaatatcaacgcaatcaatatggttgaatctggggccaaggaactttcagaagaagtgatgcttggtgcacttttggcaggacataatgctgttaaagaattaattgaatttcaaaatgaaattgttgcaaaagttggaaaagaaaaagctgaagttgaacttttgcatgttgatgaagatttaaaagccgaagtgattgcagcttacaattcagatttgcaaaaagcagttcaaattgaagaaaaattggcgcgtgaatctgcgacaaaagcagttaaagaggcgataatttctgtttacagtgcaaaatatgagaacgatgaaaatctatcaatcattttgcgtgatcttgctgaaattcttgaaggaatggaacatgcggaagttcgtcgcttgattactgaagataaaatccgtcctgatggacgtaagattgatgaaattcggccgcttgatgctgaaattgactttaccccacgtaatattacacatgggacaggtttatttactcgtggtcaaacccaagctttatcaacattgactttggcaccaatgaatgaagcacaaatcattgatggtttgaatgatgaatataaaaaacgttttatgcatcattataatttcccacagtattctgttggggaaacaggacgttacggggcacctggacgtcgtgaaattggtcacggagcgctcggtgaacgagctttagaacaagtattgccttctttagaggaattcccttatgccattcgtttggtcgctgaagttttagaatcaaatggttcgtcatcacaagcttcaatctgtgcaggaacacttgcactgatggccggtggtgtaccaatcaaagcaccagttgctgggattgcgatgggcttgatttctgacggaacaaattatactgttttgacagatattcaagggcttgaagaccattttggtgatatggacttcaaggttgcgggaactcgtgacgggattactgcactacaaatggatattaaaatttcaggaattacaccagaaattcttgccgaagctcttgcacaagcaaaaactgcacgtttccaaattcttgatgtaattgaagcaacaattgcacaacctcgtgaagagttagcaccttcagcacctaaaattgatacaattacaattcctgtcgataagattaaagttgtcatcggtaaaggcggcgagcaaatcgataaaattattgctgaaacgggcgtaaaaattgatattgatgacgaaggactttgttcaattttctcttctgaccaagcagcgattgatcgtgctaaagaaattattgctgaacttgttcgtgaagcaaaagttggtgaaatttacgatgcaaaagtggttcgtatcgaaagttttggtgcttttgtaaatctatttggtaagcaagatgcaatggtgcatatttctgaaatggcttgggctcggacagaaaatgttgaagatgttgtgaaattaggtgacactgtcaaagttaaaatcatgaaaattgatgacaagggtcgcgtagatgcatcaatgcgtgctttagttgagaaaccagaaggttatgttgaacctgagcgtaaaccaagagaacgccgtgaaaatggtgaccgtcgcaaaggtaacggaaatagtaaccgtggtaatggttttgaccgtcgtaataatgaccgtaataatcagggaaataaagttggaaaccacagttttgagctccgtgaacgtaaatcacatattgatgaagagtttccagaactctcaactaaaaaaccagaataa

SEQ ID NO: 1658 - protein, 773 aa, Lactococcus lactis subsp. lactis Il1403
MAKETFSIEFAGRTLTVETGQVAKQANGAVVVRYGDTTVLTAATMGKMATGDFFPLQVNYEEKMYAAGKFPGGFNKREARPSTDATLTARLIDRPIRPMFAEGFRNEVQVINTVLSYDENASGRVAAMFGSSLALAISDIPFDRPIAGVEVAYIDGEYIINPTVAEKEASSLELSVAGNINAINMVESGAKELSEEVMLGALLAGHNAVKELIEFQNEIVAKVGKEKAEVELLHVDEDLKAEVIAAYNSDLQKAVQIEEKLARESATKAVKEAIISVYSAKYENDENLSIILRDLAEILEGMEHAEVRRLITEDKIRPDGRKIDEIRPLDAEIDFTPRNITHGTGLFTRGQTQALSTLTLAPMNEAQIIDGLNDEYKKRFMHHYNFPQYSVGETGRYGAPGRREIGHGALGERALEQVLPSLEEFPYAIRLVAEVLESNGSSSQASICAGTLALMAGGVPIKAPVAGIAMGLISDGTNYTVLTDIQGLEDHFGDMDFKVAGTRDGITALQMDIKISGITPEILAEALAQAKTARFQILDVIEATIAQPREELAPSAPKIDTITIPVDKIKVVIGKGGEQIDKIIAETGVKIDIDDEGLCSIFSSDQAAIDRAKEIIAELVREAKVGEIYDAKVVRIESFGAFVNLFGKQDAMVHISEMAWARTENVEDVVKLGDTVKVKIMKIDDKGRVDASMRALVEKPEGYVEPERKPRERRENGDRRKGNGNSNRGNGFDRRNNDRNNQGNKVGNHSFELRERKSHIDEEFPELSTKKPE

SEQ ID NO: 1659 - DNA, 2124 bp, Neisseria meningitidis MC58
  CDS (1)..(2124): transl_table=11
atgatgttcgacaaacacgttaagaccttccaatacggtaatcagaccgttactttggaaaccggcgaaattgcccgccaagccgccgctgccgttaaagtctctatgggcgacaccgttgttttggttgccgttaccaccaacaaagaagtgaaagaaggtcaagacttcttccccctgaccgtcgattatttggaacgcacttacgccgcaggcaaaattcccggcggtttcttcaaacgcgaaggcaaacaaagcgaaaaagaaatcctgaccagccgtctgatcgaccgtccgattcgtccgctgttccctgaaggtttctaccacgacatccaaatcgtagcgatggtcgtgtccgtcgatcctgaaatcgattctgatattcctgcaatgttgggtgcatctgccgcgctggtgttgagcggcgtaccgtttgccggcccgatcggcgcggcacgcgtcggttatgtaaacggcgtgtacgttttgaatccgactaaagccgaattggcgaaatcgcaattggacttggtggtcgccggtacttcaaaagccgtgttgatggtggaatccgaagccaaaatcctgcccgaagacgtgatgctgggcgcggtggtttacggccacgatcaaatgcaggttgccatcaatgcaatcaatgaatttgccgacgaagtcaatccggaactttgggattggaaagcacctgaaaccaatgaggaactggttgccaaagtccgcgggattgccggcgaaaccattaaagaagcgttcaaaatccgtcaaaaacaagcgcgttctgccaaattggacgaagcttggagtgcggtaaaagaagccttgattaccgaagaaaccgacactttggcagccaacgaaatcaaaggcattttcaaacacttggaagccgatgtcgtccgcagccaaattttggatggccaaccgcgcatcgacggccgcgacacccgcaccgtccgtccgctgaacatccaaaccagcgtattgccgcgcacgcacggttctgcattgtttacccgtggcgaaacccaagctttggccgttgcaactttgggtacttcgcgcgacgagcaaatcatcgacgcgctgtccggcgaatacaccgaccgctttatgctgcactacaactttccgccgtactctaccggcgaagtgggccgcatgggcgcaccgaaacgccgtgaaatcggtcacggccgtttggctaaacgtgcattgttggccgtattgccgaaacctgaagatttcagctacaccatgcgcgtggtctccgaaattaccgaatccaacggctcttcctctatggcttccgtctgcggcggctgcctgagcctgctgtctgccggcgtgcctttgaaagcacacgttgccggtatcgcgatgggtctgattctggaaggcaacaaatttgccgtcctgaccgacattttgggcgacgaagaccacttgggcgatatggactttaaagtggccggtacgaccgaaggcgttaccgcgctgcaaatggacatcaaaatccaaggcattaccaaagaaattatgcaaatcgctttggcacaggccaaagaagcgcgtctgcacatcttggatcagatgaaagccgccgttgcgggcccgcaagagctgtccgcacacgcgccacgcttgttcacgatgaaaatcaaccaagacaaaatccgcgaagttatcggtaagggcggtgaaaccatccgttcgattaccgctgaaaccggtacggaaatcaatattgccgaagacggtacgattaccattgccgcaaccactcaagaagccggcgatgcggcgaaaaaacgcatcgagcagattactgccgaagtggaagtgggcaaagtgtacgaaggcactgtggtgaaaatcctcgataacaatgtcggcgcgattgtcagcgtgatgccgggcaaagacggtttggtacacatcagccaaatcgcccacgagcgcgtacgcaatgtcggcgactacctgcaagtcggtcaggtggtgaacgtgaaagcattggaagtggacgacagaggccgtgtccgtctgtccatcaaagccctgctggacgcgcctgcccgtgaggaaaatgccgccgagtaa

SEQ ID NO: 1660 - protein, 707 aa, Neisseria meningitidis MC58
MMFDKHVKTFQYGNQTVTLETGEIARQAAAAVKVSMGDTVVLVAVTTNKEVKEGQDFFPLTVDYLERTYAAGKIPGGFFKREGKQSEKEILTSRLIDRPIRPLFPEGFYHDIQIVAMVVSVDPEIDSDIPAMLGASAALVLSGVPFAGPIGAARVGYVNGVYVLNPTKAELAKSQLDLVVAGTSKAVLMVESEAKILPEDVMLGAVVYGHDQMQVAINAINEFADEVNPELWDWKAPETNEELVAKVRGIAGETIKEAFKIRQKQARSAKLDEAWSAVKEALITEETDTLAANEIKGIFKHLEADVVRSQILDGQPRIDGRDTRTVRPLNIQTSVLPRTHGSALFTRGETQALAVATLGTSRDEQIIDALSGEYTDRFMLHYNFPPYSTGEVGRMGAPKRREIGHGRLAKRALLAVLPKPEDFSYTMRVVSEITESNGSSSMASVCGGCLSLLSAGVPLKAHVAGIAMGLILEGNKFAVLTDILGDEDHLGDMDFKVAGTTEGVTALQMDIKIQGITKEIMQIALAQAKEARLHILDQMKAAVAGPQELSAHAPRLFTMKINQDKIREVIGKGGETIRSITAETGTEINIAEDGTITIAATTQEAGDAAKKRIEQITAEVEVGKVYEGTVVKILDNNVGAIVSVMPGKDGLVHISQIAHERVRNVGDYLQVGQVVNVKALEVDDRGRVRLSIKALLDAPAREENAAE

SEQ ID NO: 1661 - DNA, 2160 bp, Campylobacter jejuni subsp. jejuni NCTC 11168
  CDS (1)..(2160): transl_table=11
atgcaatacagcatagaaattaacaaaaatacagaaatatttgatatagacaaagtcgccaaacaagctgccggtgctgttttaatgagacaaggcaaaagcgttgttctagctacagttgcaagagaagaaaaacaagttgaagaagattttttacctctaaccgtccaatacatcgaaaaagcttatgccgcaggaaaaatccctggtggttatgtcaaaagagaaaccaagccaagcgatgcagaaaccttaacagcacgcattattgatagaagcttacgccctctttttccaaaaggctatgcttatccgactcaaatcgttgtgatggttctctcagctgatcctaaagtagatttacaagtaatgagcttaaatgccgcaagcgtggcactttatcttagtgatatacctatgaaagctccagtatgtggcgtgcgtataggaaagatagatggaaatttcatactcaatccaaacaatgaagagcttcaaaatagcaccctagatctctatgtagcaggtgtaaaagatgagcttttgatgatagaaatgagagccttacctgatcaaaaagaaaatgaaatctttatcgaagctccttatgccgatgttttaactcaaaccacttcacaaaatatgaatgaacttagcgaagatgaaattttagaagctctaaatttagctcaaaaagctatattaaatggttcaaatgcttatgaagaagcctttagcaaacacaaaaaaaattctcaaatcgaactaaaaaatgagattgaacatcctgaaattttagcttttatagaaaataatttccaaaaacaaatcaaagaagccatcaatcaaatggcaaaaagcgaaagagcaagcgaactaaataaaatcgctaaagaaattttaaatcttgaaatcactaaagactggagcgaagaaagtgtcttaaataccttagctaaagtcaaacgcaaacttattcgtgagcaaattttaaatgaaggcaaaagagctgatggtagaagtttaaacgaggttcgtcctattagtatagaaaccaacatcttaccaaacgctcatggttcttgtcttttcactcgtggacaaactcaagccctagtggttgcaaccttaggcggagaaaacgattctcaaatgatagacttgcttacagaaaaaaatcctataagcgaacgctttatggtaaattataattttccaggtttttcagtaggcgaagcaagtcctatcaaagctccaggaagaagagaactaggacatggaaatttagccaaaagagcactttatccaagtgtggatgaaaactatccttatgtaatccgcttagtcagtgaaattttagaaagcaatggctcaagttccatggcaacggtttgtggcggatctttagccttaaaagcagcaggagtgccaagcttaaaacttgttgcaggagtagccatggggcttatctttgaagataacaagtatgctgttttaacagatatcatgggacttgaagatcatgatggggatatggactttaaagtagcaggaagcaaagacggcgttactgctcttcaaatggatataaaactaggtggaatcgatcaagaaatactaaaacaagctttataccaagccaaagaaggaagaattcacattctaaatatcatggaagaagccgccaaagaaatcatagtcaatgaagaagttttacctaaacttgagctttttagcgttgatccttcaaaaatcgttgatatcataggacaagccggaaaaaccatcaaagaaatcgtagaaaaatttggcgtttctatagacttagatcgcgaaaaaggtgaagtaaaaatagcaggtagtcaaaacgagcaaatcaaagccgcaaaagactacatcataaacatcacaagctctcaaaaaggaactaaaaaaggccctaaagacaaagatatatcaggctttgaacttgggcaagaatttcaaggtattgttaaaaaaatcgctccttttggagcctttgtggaacttaaaaatggtgttgatggtttattgcatagttcaaaaatcaagcatcttaatttaagcgaaaaccaaagtttaaaggtgaaaatcagcgaaattaaaaacggaaaaatttctgtggatttgtgcgagtga

SEQ ID NO: 1662 - protein, 719 aa, Campylobacter jejuni subsp. jejuni NCTC 11168
MQYSIEINKNTEIFDIDKVAKQAAGAVLMRQGKSVVLATVAREEKQVEEDFLPLTVQYIEKAYAAGKIPGGYVKRETKPSDAETLTARIIDRSLRPLFPKGYAYPTQIVVMVLSADPKVDLQVMSLNAASVALYLSDIPMKAPVCGVRIGKIDGNFILNPNNEELQNSTLDLYVAGVKDELLMIEMRALPDQKENEIFIEAPYADVLTQTTSQNMNELSEDEILEALNLAQKAILNGSNAYEEAFSKHKKNSQIELKNEIEHPEILAFIENNFQKQIKEAINQMAKSERASELNKIAKEILNLEITKDWSEESVLNTLAKVKRKLIREQILNEGKRADGRSLNEVRPISIETNILPNAHGSCLFTRGQTQALVVATLGGENDSQMIDLLTEKNPISERFMVNYNFPGFSVGEASPIKAPGRRELGHGNLAKRALYPSVDENYPYVIRLVSEILESNGSSSMATVCGGSLALKAAGVPSLKLVAGVAMGLIFEDNKYAVLTDIMGLEDHDGDMDFKVAGSKDGVTALQMDIKLGGIDQEILKQALYQAKEGRIHILNIMEEAAKEIIVNEEVLPKLELFSVDPSKIVDIIGQAGKTIKEIVEKFGVSIDLDREKGEVKIAGSQNEQIKAAKDYIINITSSQKGTKKGPKDKDISGFELGQEFQGIVKKIAPFGAFVELKNGVDGLLHSSKIKHLNLSENQSLKVKISEIKNGKISVDLCE

SEQ ID NO: 1663 - DNA, 2121 bp, Neisseria meningitidis Z2491
  CDS (1)..(2121): transl_table=11
atgttcgacaaacacgttaagaccttccaatacggtaatcagaccgttactttggaaaccggcgaaattgcccgccaagccgccgctgccgttaaagtctctatgggcgacaccgtggttttggttgccgttaccaccaacaaagaagtgaaagaaggccaagacttcttccccctgaccgtcgattatttggaacgcacttacgccgcaggtaaaatccccggcggtttcttcaaacgcgaaggcaaacaaagcgaaaaagaaatcctgaccagccgtctgatcgaccgcccgattcgtccgctgttccccgaaggtttctaccacgacatccaaatcgtagcgatggtcgtgtccgtcgatcccgaaatcgattccgacattcctgcaatgttgggcgcgtctgccgcgctggtgttgagcggcgtaccgtttgccggtccgattggtgcggcacgcgtgggttatataaacggcgtgtacgttttgaacccgactaaagccgaattggcgaaatcgcaattggacttggtggtcgccggtacttcaaaagccgtgttgatggtggaatccgaagccaaaatcctgcccgaagacgtgatgctgggcgcggtggtttacggccacgatcaaatgcaggttgccatcaatgcaatcaatgaatttgccgacgaagtcaatccggaactttgggattggaaagcacctgaaaccaatgaggaactggttgccaaagtccgcgggattgccggcgaaaccattaaagaagcgttcaaaatccgtcaaaaacaagcgcgttctgccaaattggacgaagcttggagtgcggtaaaagaagccttgattaccgaagaaaccgacacgctggcagccaacgaaatcaaaggcattttcaaacacttggaagccgatgtcgtccgcagccaaattttggacggccaaccgcgcatcgacggccgcgacacccgcaccgtccgtccgctgaacatccaaaccggcgtattgccgcgcacgcacggttccgcattgtttacccgtggcgaaacccaagcccttgccgtagcgactttgggtacttcgcgcgacgagcaaatcatcgacgcgctgtccggcgaatacaccgaccgctttatgctgcactacaactttccgccgtactctaccggcgaagtgggccgcatgggcgcgccgaaacgccgtgaaatcggtcacggtcgtttggctaaacgtgcattgttggccgtattgccgaaacctgaagatttcagctacaccatgcgcgtggtctccgaaattaccgaatccaacggctcttcctctatggcttccgtctgcggcggctgcttgagcctgctgtccgccggcgtgcctttgaaagcacacgttgccggtatcgcgatgggtctgattctggaaggcaataagtttgccgtcctgaccgacattttgggcgacgaagaccacttgggcgatatggactttaaagtggctggtacgaccgaaggcgttaccgcgctgcaaatggacatcaaaatccaaggcattaccaaagagattatgcaaatcgctttggcgcaggccaaagaagcgcgtctgcacatcttggatcagatgaaagccgccgttgcgggcccgcaagagctgtccgcacacgcgccacgcttgttcacgatgaaaatcaaccaagacaaaatccgcgaagttatcggtaagggcggtgaaaccatccgtgcgattaccgctgaaaccggtacggaaatcaatattgccgaagacggtacgattaccattgccgcaaccactcaagaagccggcgatgcggcgaaaaaacgcatcgagcagattactgccgaagtggaagtgggcaaagtgtacgaaggcactgtggtgaaaatcctcgacaacaatgtcggcgcgattgtcagtgtgatgccgggcaaagacggtttggtacacatcagccaaatcgcccacgagcgcgtacgcaatgtcggcgactacctgcaagtcggtcaggtggtgaacgtgaaagcattggaagtggacgacagaggccgtgtccgtctgtccatcaaagccctgctggacgcgcctgcccgtgaggaaaatgccgccgagtaa

SEQ ID NO: 1664 - protein, 706 aa, Neisseria meningitidis Z2491
MFDKHVKTFQYGNQTVTLETGEIARQAAAAVKVSMGDTVVLVAVTTNKEVKEGQDFFPLTVDYLERTYAAGKIPGGFFKREGKQSEKEILTSRLIDRPIRPLFPEGFYHDIQIVAMVVSVDPEIDSDIPAMLGASAALVLSGVPFAGPIGAARVGYINGVYVLNPTKAELAKSQLDLVVAGTSKAVLMVESEAKILPEDVMLGAVVYGHDQMQVAINAINEFADEVNPELWDWKAPETNEELVAKVRGIAGETIKEAFKIRQKQARSAKLDEAWSAVKEALITEETDTLAANEIKGIFKHLEADVVRSQILDGQPRIDGRDTRTVRPLNIQTGVLPRTHGSALFTRGETQALAVATLGTSRDEQIIDALSGEYTDRFMLHYNFPPYSTGEVGRMGAPKRREIGHGRLAKRALLAVLPKPEDFSYTMRVVSEITESNGSSSMASVCGGCLSLLSAGVPLKAHVAGIAMGLILEGNKFAVLTDILGDEDHLGDMDFKVAGTTEGVTALQMDIKIQGITKEIMQIALAQAKEARLHILDQMKAAVAGPQELSAHAPRLFTMKINQDKIREVIGKGGETIRAITAETGTEINIAEDGTITIAATTQEAGDAAKKRIEQITAEVEVGKVYEGTVVKILDNNVGAIVSVMPGKDGLVHISQIAHERVRNVGDYLQVGQVVNVKALEVDDRGRVRLSIKALLDAPAREENAAE

SEQ ID NO: 1665 - DNA, 2433 bp, Deinococcus radiodurans R1
  CDS (1)..(2433): transl_table=11
atgccgcagcttaaaggccgggcgggggcgggcgcgtccgcctttcggtggatgttcctttccccggagcaacctcaggctagactgccccccatgattggaaagacctttaccacgatgctcggcggacgcgaactgagcatcgagacgggcaagctcgccaagctggtgagcggcagcgtgaccgtgcgctacggcgacaccctgctgctggtgaccgcccaggccagcgacacccagagcaagctcgactttttgccgctgacggtggaattcgaagagcgccactacgccgtgggcaagattcccggttcctttcagcgccgcgagggccgccccggcgaaaaggccattctctcggcgcgcatcaccgaccgccagattcgcccgctgtttcccaagggctaccgccacgaaacgcaggtcatcatcacggtgctttccgccgacggccagaacgcgcccgacgtgctggggccaattggcgctgccgccgcgctgagcatcagcgacattccctgggccggcccgaccgcctgcgtgcgcgtgggccagatcgacggccagtacgtggtcaaccccaccactgagcaactcactcgcagccgcatggacctggtggtggcgggcacccgcgaggccgtgatgatggtggagtgcggcgcccagacggtcagcgaggacgatctggtcggcgccatcgaattcgcgcacgccgagatgcagggcgtgattgccctgatcgagcagatgcgcgccgaagtcggccacgagaagttcaactttctggccgaggaaggccccgccaacgactacgtgcccgaactcaccgagaaggccaaagctgccggcctgcgcgacgcgctgctcacgcacggcaaaaaggaccgcagcgcgcggctcaaggcgctgcgcaacggcctgatcgagggctatgtgcccgaccccaccgccgaggggagtgccgaactgacccaggcgctcaaggacgctttcggtaaggttgagaagcgcgaactgcgccgcctgattctggaagaaaacctgcgcgccgatggtcgcgactccaagaccgtgcggcccatctggatcgaggcgcggcccctgcccaccgcccacggcagcgcggtgttcacgcgtggcgagacgcaggtgctgggcgtgaccaccctgggcaccgagcgcgacgagatcctgatcgacgacctgactgccgaaagcggcgacaagttcctgctgcactacaacttcccgccctactccaccggcgaggtcaagcgcatgggcgggcagtcgcgccgcgaaatcgggcacggcaacctcgccaagcgtgccatccgggcggtgctgccctctttcgaggagtttccctacgtgattcgcgtggtgggcgacgtgctggagtccaacggcagcagctcgatgggcactgtgtgcgcgggcaccctttcgctgatggacgcgggcgtgccgctcaaagccccggtcgcgggcgtggcgatgggcctggtgatggaaggtgacaactaccgcgtgctgaccgacatcctgggtctggaagacgcgctgggcgacatggacttcaaggtctgcggcaccgccgagggcgtcacggcgctgcaaatggacatcaaggtgggcggcatcaccccgcagatcatgcgtgaggcgctggcgcaggccaaggaaggccgcctgcacatcctgggtaagatggccgaggtactggccgccccgcgcgccgaactctcgcccaccgcgccgcacatcctgagtctgaaaatcaaccccgaactgatcggcaaagtcatcggccccggcggcaagcaggtgcgcgaactcgaggcgatgggcgcacaggtcaccatcgaggaagacggcaccgtccgcattttcagcgcctcgggcgaaagcgccgaagcggtgaaggcccgcatcgaggccgtaaccaaggaagccaaggtcggcgaggagttcgagggcaccgtggtcaagattgcgcccttcggcgccttcgtgaacctgttccccggccaggacggcatgctgcacatctcgcaactcagcgagcagcgcgtggagaatgtcgaggacgtgctgacggtgggcgacaagctcaaggtcaaaattgccaacatcgacgaccggggcaagatcgacctgatccgcccggaactcgaaggcaaagtgccgctgcgtgagccccgcgccccgcgtggtggcgaccgtggcccccgccgtgacagtgaccggggaggggaccggggaccgcgccgcgagttcagcgaccgtggcccacgtcctgaaggtgcccgctccgaacggcctgaaggccagcgtacggagcgtccggcaacggctcccgcgactcaggaaagcagtcagagcagtgacgcacccgctgcgccagtcttcccgagacgcgaggactga

SEQ ID NO: 1666 - protein, 810 aa, Deinococcus radiodurans R1
MPQLKGRAGAGASAFRWMFLSPEQPQARLPPMIGKTFTTMLGGRELSIETGKLAKLVSGSVTVRYGDTLLLVTAQASDTQSKLDFLPLTVEFEERHYAVGKIPGSFQRREGRPGEKAILSARITDRQIRPLFPKGYRHETQVIITVLSADGQNAPDVLGPIGAAAALSISDIPWAGPTACVRVGQIDGQYVVNPTTEQLTRSRMDLVVAGTREAVMMVECGAQTVSEDDLVGAIEFAHAEMQGVIALIEQMRAEVGHEKFNFLAEEGPANDYVPELTEKAKAAGLRDALLTHGKKDRSARLKALRNGLIEGYVPDPTAEGSAELTQALKDAFGKVEKRELRRLILEENLRADGRDSKTVRPIWIEARPLPTAHGSAVFTRGETQVLGVTTLGTERDEILIDDLTAESGDKFLLHYNFPPYSTGEVKRMGGQSRREIGHGNLAKRAIRAVLPSFEEFPYVIRVVGDVLESNGSSSMGTVCAGTLSLMDAGVPLKAPVAGVAMGLVMEGDNYRVLTDILGLEDALGDMDFKVCGTAEGVTALQMDIKVGGITPQIMREALAQAKEGRLHILGKMAEVLAAPRAELSPTAPHILSLKINPELIGKVIGPGGKQVRELEAMGAQVTIEEDGTVRIFSASGESAEAVKARIEAVTKEAKVGEEFEGTVVKIAPFGAFVNLFPGQDGMLHISQLSEQRVENVEDVLTVGDKLKVKIANIDDRGKIDLIRPELEGKVPLREPRAPRGGDRGPRRDSDRGGDRGPRREFSDRGPRPEGARSERPEGQRTERPATAPATQESSQSSDAPAAPVFPRRED

SEQ ID NO: 1667 - DNA, 2082 bp, Chlamydia muridarum Nigg
  CDS (1)..(2082): transl_table=11
atggcttttgagactttttctgttgcgttagacaaagataagacactgattttcgagacagggaaaatagctcgccaagccaatggagctgttcttgtcaaaatgaatgaaacttgggttttttcatcagcgtgcgcggcctctttatcagaggccgtagattttctgcctttcagagtagactatcaagaaaagttttcctccgcggggaaaacctctggaggatttctgaaacgcgaaggtcgtccctccgagaaagaaattcttatttctcgactgatagatcgctctttgcgtccatcattccctaatagacttatgcaagacattcaagtcttgtcctacgtttggtcttatgacgggaaaactttaccagaccccttagctatttgtggagcttctgcagctttagctatctcagaggtccctcagaattgtattgttgcaggtgtacgcgtcggtctcgtcgaaggaaaatgggtagttaacccaactaaagatgagttagacgcatccaagcttgatctcgttatggcaggaacagcttctgcggtattaatgatcgaaggtcattgcgactttttgactgaagagcaagttttagaagctattgcttttggacaaaaatacatagctaaaatatgtgacgctattgaagcttggcagaaagcgattggtaaggaaaaacagctctcggctgtccttgatctgccggaagatgtgcaaaatgttgtttcgaattttattagagaaaaattcgaaaaagcactgtcttttagagatagagacgctttagaacaagtctcaaaagagttagaagaatctgttgtcgccaacttagttcaagaagaaagtgatttttctttattgaacgtgaaagctgcatttaagaatgcaaaatccaatcaaatgcgagctttaattagagatctcggcattcgcgtagacggacgaagtacaacagaaattcgccctatttccatagaagtctctttccttccacgaacacatggaagctgcctatttacccgtggagaaacacaaagtgtagctgtatgcacacttgggggtgaaagtatggcacaacgatttgaagacctaaatggggatggagcagcgcgcttttatttgcagtattttttccctcctttctctgtaggagaagttggtagaatcggatctccagggagacgcgaaataggtcacggaaaattagctgaaaaagctttaagtcatgtccttcctgaagcatctcgattcccttacactgttcgagtggagtctaatattacagaatccaatgggtcttcttctatggcttctgtatgtgggggctgtctttctctgatggatgcaggagtgcctatcaaagctcctgtagccggcattgctatgggtctaatcctagatcaagataaggctattgtcctttctgatatttcagggatagaagatcatctcggcgatatggattttaaagtcgcgggaactgaagaaggaatcacagcattccaaatggacattaaagtagaaggaattacccatgagatcatggagcaggcgttggcccaagctaagcaaggtcgaagccatatcctaaatcttatgacacaggtaatgtcttctcctaatgattctgtttccagatatgctcctcgtattgaaactatgcaaatcaatacttcaaaaatcgcgacagtaataggtcctggagggaaacagatccgtcaaattattgagcgatcaggagctcaagttgacattaacgataacgggctcattaacatatcagctaacacccaagaatctatcgataaagctaaggagcttattgagggattaacgggagaagttgaggttggcaagatctataacggccgagtcacttccgttgtggcctttggagcatttgtagaagtccttcctggtaaagagggtctttgtcatatttcagaattgtctaaacaaaaagtagacaatgtagctgatttcgtaaaagaaggtgatcgcctagcggttaagttgctcagcatcaatgagaaggggcaactaaaacttagccataaagcaactttagaatag

SEQ ID NO: 1668 - protein, 693 aa, Chlamydia muridarum Nigg
MAFETFSVALDKDKTLIFETGKIARQANGAVLVKMNETWVFSSACAASLSEAVDFLPFRVDYQEKFSSAGKTSGGFLKREGRPSEKEILISRLIDRSLRPSFPNRLMQDIQVLSYVWSYDGKTLPDPLAICGASAALAISEVPQNCIVAGVRVGLVEGKWVVNPTKDELDASKLDLVMAGTASAVLMIEGHCDFLTEEQVLEAIAFGQKYIAKICDAIEAWQKAIGKEKQLSAVLDLPEDVQNVVSNFIREKFEKALSFRDRDALEQVSKELEESVVANLVQEESDFSLLNVKAAFKNAKSNQMRALIRDLGIRVDGRSTTEIRPISIEVSFLPRTHGSCLFTRGETQSVAVCTLGGESMAQRFEDLNGDGAARFYLQYFFPPFSVGEVGRIGSPGRREIGHGKLAEKALSHVLPEASRFPYTVRVESNITESNGSSSMASVCGGCLSLMDAGVPIKAPVAGIAMGLILDQDKAIVLSDISGIEDHLGDMDFKVAGTEEGITAFQMDIKVEGITHEIMEQALAQAKQGRSHILNLMTQVMSSPNDSVSRYAPRIETMQINTSKIATVIGPGGKQIRQIIERSGAQVDINDNGLINISANTQESIDKAKELIEGLTGEVEVGKIYNGRVTSVVAFGAFVEVLPGKEGLCHISELSKQKVDNVADFVKEGDRLAVKLLSINEKGQLKLSHKATLE

SEQ ID NO: 1669 - DNA, 2160 bp, Xylella fastidiosa 9a5c
  CDS (1)..(2160): transl_table=11
ttgcaaacactgagcatagttgatccgtttataaagcatcatcctaaggaaactctcgtggcaaaaatcaccaaaaccttccagtatggcaagcataccgtgactctggaaaccggcgaagtcgcccgtcaggcgaatggagctgttatcgtcaagatggatgacactgtgcttctggtcactgttgttgctgcaaaaactgcgcgagaggggcaggattttttcccattgacggttgattatcaggagaagttctatgccggtgggcggatcccgggtagcttctttaagcgtgaaggccgtgcgaccgaaaaagaaacgttgatttctcgattgattgaccgtccgatccgtccgttgtttcctgaagattacaagaacgaagttcagattatcgcgatggttatgtcactcgatccggaaatcgacggtgatattcccgcaatgattggtgcttcagctgcattatcactggctggtattccgtttaagggaccgattggtgctgctaagattggttacaatgatggtcaatatatcctcaatcccactgtcagtgaactgaaaaaatctcagttggagcttgttgtcgctggtactgccaatgccgtgctgatggttgagtctgaggctgcattgctttccgaagaagtgatgttaggggcggtcattttcggtcatcgcgaaatgcaaaaagtgattcaggtgattgattcactgaccgcagaagctggtacgcaaccgtctgattgggtgcccccggccaagaatgatgctttggtcattgcgttgaaggaagtaattggtggccgcttgtccgacgctttccatatcagagacaagttgcagcgtcgcgacgcgatcgctgctgttaaagatgatgtgattcagcagttggctggccgtcttgaagttgagggctggaacttggcggaattgttaaaggaattcggtgaactggaataccgtactatgcgtgatgcattgttggacactaaagtccgcattgatggacgctctctggaagctgtacgcccgatcaccgtaaaggttggggttctgccgcgtgttcatggttccgggttatttacacgtggagagactcaagcgattgtagtcactactttgggtacagcacgcgatggccaagtaattgatgcagtcactggtgaatataaggaaaattttttattccattacaacttcccgccatattcagtgggcgaatgtggccgttttggagtaccgaagcgccgtgagatcggtcacggccgtcttgctaggcgcggggtattggctgtgatgccgagtttggatgaattcccatacacgatccgtgttgtctcggagatcaccgaatcgaatggttcttcatctatggcttcggtgtgcggttcctcgctggcgctcatggatgctggtgtgccggtgaaagcaccagtggctggcattgcgatgggcttagtcaaggaaggggagcgctttgttgtgttgagcgacattctcggggacgaagatcaccttggcgatatggatttcaaggttgctggtacctccgaaggagtgtccgcattacagatggacattaagattgaaggcatcacagaagagattatgaggcaggctttacagcaggctaaggttggtcgtttacatatccttggcgagatggacaaggcactggctgcaccacgtgccgagttgtccgactacgctcctcgcctgctgacgattaagattcatcctgacaaaatccgtgatgtcattggtaaaggtggttcgaccatccaggcgatcactaaggatactggaacacagatcgatatccaggacgatggtacgatcatcatcgcttcagtcaacaatgctgcagcccgggaggctaagtgtcgtatcgagcaaattacctcggatgttgagccgggccgtatttatgagggcaaggttgctaagattatggactttggcgcttttgtgactattttgcctggcaaagatggtttagtgcacgtttcccagatatccagcgagcgtgtggagcgtgttggcgacaagctgaaggaaggcgatgtggttcgtgtgaaggtcttagaagttgataagcaaggtcggatccgtctttcgatcaaagccgtcgaggaagaggttgccagcatatga

SEQ ID NO: 1670 - protein, 719 aa, Xylella fastidiosa 9a5c
MQTLSIVDPFIKHHPKETLVAKITKTFQYGKHTVTLETGEVARQANGAVIVKMDDTVLLVTVVAAKTAREGQDFFPLTVDYQEKFYAGGRIPGSFFKREGRATEKETLISRLIDRPIRPLFPEDYKNEVQIIAMVMSLDPEIDGDIPAMIGASAALSLAGIPFKGPIGAAKIGYNDGQYILNPTVSELKKSQLELVVAGTANAVLMVESEAALLSEEVMLGAVIFGHREMQKVIQVIDSLTAEAGTQPSDWVPPAKNDALVIALKEVIGGRLSDAFHIRDKLQRRDAIAAVKDDVIQQLAGRLEVEGWNLAELLKEFGELEYRTMRDALLDTKVRIDGRSLEAVRPITVKVGVLPRVHGSGLFTRGETQAIVVTTLGTARDGQVIDAVTGEYKENFLFHYNFPPYSVGECGRFGVPKRREIGHGRLARRGVLAVMPSLDEFPYTIRVVSEITESNGSSSMASVCGSSLALMDAGVPVKAPVAGIAMGLVKEGERFVVLSDILGDEDHLGDMDFKVAGTSEGVSALQMDIKIEGITEEIMRQALQQAKVGRLHILGEMDKALAAPRAELSDYAPRLLTIKIHPDKIRDVIGKGGSTIQAITKDTGTQIDIQDDGTIIIASVNNAAAREAKCRIEQITSDVEPGRIYEGKVAKIMDFGAFVTILPGKDGLVHVSQISSERVERVGDKLKEGDVVRVKVLEVDKQGRIRLSIKAVEEEVASI

SEQ ID NO: 1671 - DNA, 2322 bp, Mycobacterium leprae TN
  CDS (1)..(2322): transl_table=11
atgtctgtagctgaaatcgaagagggcgtgttcgaggcaaccgttactatcgataacgggagtttcggcacccgcgccatccgttttgagaccgggcgcttagccttgcaagccgctggcgcagtggtggcctacctggacgccgacaatatgctcttgtcggcgaccaccgccagcaagaaccccaaggagcaattcgacttcttcccgcttacggtcgatgttgaggagcggatgtatgctgccggtaggatccctggttcgttcttccgccgtgagggtcggccgtccaccgacgcgatccttacctgccggctcatcgatcgccctttgcgcccgtcttttgtcgacggcctgcgcaacgagatccaggtcgtggtgacgattctgagcgtggatcccaacgatctctatgatgtgttggccatcaatgctgcctcggcctccactcagctgggcggtctaccgttctccgggcctatcggcggtgtgcgggtggcgctcatcgacggtacctgggttgctttccccactgtagagcagctcgagcgggccgtgttcgacatggtgattgccggccggattgttggcacggatgacgagggcaagcctgatgtcgctatcatgatggtcgaggctgaggctaccgaaaacgtcatcgagctggtcgagtgcggtgctcaggcgccgacggaaagcatcgtggcccaaggactcgaggtggccaagccgttcattgctgcgctgtgtaccgcgcagcaggaacttgctgacgttgtgtcttctcgccaagccaaaccgccagtcgagtacccgacgttccccgactacggcgacgacgtctactactcggtggcttcgatggctaccgatgagttggccgcggccttgaccatcggcgccaagcttgagcgcgatcaacgcaccaacgagatcaagacccaggttctcgagcggctcgccggcacctacgagggccgggaaaaggagttgggcgcagcattccgttcgttgaccaagaaactggtccgacagcggatcctcaccaaccatttccgtatcgacggccgcgggatcaccgacattcgcgcgttgtcggccgaagttgcggtggttccgcgggcgcacggtagcgcgctgttcgagcgcggcgaaacccagatccttggcgtgaccacgctcgacatggtcaagatggctcagcagatcgactcgctggggccagaaacatccaagcggtatatgcaccactacaacttcccgccgttctccactggtgagactggtcgagtcggctcgcccaagcggcgtgagatcgggcacggtgcgctggctgagcgggctctagtgccggtgctacccagcgtcgaggagttcccgtacgccatccgtcaggtgtccgaggcgctgggttctaacggctcgacctcgatggggtcggtttgcgcttccacgctggcgctgctcaacgccggcgtgccgctcaaggcgccggtggctggcattgctatggggctggtctccgacgatgttgagtttgacggagggactgagcgtcgttttgtcaccttgaccgacatcctgggcgccgaagacgccttcggcgacatggattttaaatgcgccggtaccaaggactttgtcaccgcgctgcagctcgataccaaacttgacggtattccctcccaggtgctcgcgggtgcgcttgcgcaggccaaagacgcccggctgaccatcctcgaggtcatggctgaggccattgacagacccgacgagatgagcccgtatgcgccgcgggtcatcactatcaaggttccagtggataagatcggtgaagtcatcggccccaagggcaaggtcatcaacgccattaccgaggagaccggtgcgcagatttctatcgaggatgacggtactgtgttcgtcggtgcgaccgatggcctgtcggcgcaggccgcgatcaataagattaatgccatcgcgaacccgcagctgccgacggtcggcgaacggttccttggaactgtcgtaaagataacggaattcggcgctttcgtgtcgctgctgcctgggcgtgacggtttggttcacatctccaagcttggcaagggtaagcgcatcgcaaaggtggaagacgtcgtgaacgtcggtgataagttgcgcgtcgagatcgcagatatcgaaaaacgcggcaagatctcattggtcttggtggctgacgacgattcggccaccgtccctgcagctccggccgatgctggggctgctcaggagttcggttcgggtactgcgccagccgatgctgcgacggccagtagctga

SEQ ID NO: 1672 - protein, 773 aa, Mycobacterium leprae TN
MSVAEIEEGVFEATVTIDNGSFGTRAIRFETGRLALQAAGAVVAYLDADNMLLSATTASKNPKEQFDFFPLTVDVEERMYAAGRIPGSFFRREGRPSTDAILTCRLIDRPLRPSFVDGLRNEIQVVVTILSVDPNDLYDVLAINAASASTQLGGLPFSGPIGGVRVALIDGTWVAFPTVEQLERAVFDMVIAGRIVGTDDEGKPDVAIMMVEAEATENVIELVECGAQAPTESIVAQGLEVAKPFIAALCTAQQELADVVSSRQAKPPVEYPTFPDYGDDVYYSVASMATDELAAALTIGAKLERDQRTNEIKTQVLERLAGTYEGREKELGAAFRSLTKKLVRQRILTNHFRIDGRGITDIRALSAEVAVVPRAHGSALFERGETQILGVTTLDMVKMAQQIDSLGPETSKRYMHHYNFPPFSTGETGRVGSPKRREIGHGALAERALVPVLPSVEEFPYAIRQVSEALGSNGSTSMGSVCASTLALLNAGVPLKAPVAGIAMGLVSDDVEFDGGTERRFVTLTDILGAEDAFGDMDFKCAGTKDFVTALQLDTKLDGIPSQVLAGALAQAKDARLTILEVMAEAIDRPDEMSPYAPRVITIKVPVDKIGEVIGPKGKVINAITEETGAQISIEDDGTVFVGATDGLSAQAAINKINAIANPQLPTVGERFLGTVVKITEFGAFVSLLPGRDGLVHISKLGKGKRIAKVEDVVNVGDKLRVEIADIEKRGKISLVLVADDDSATVPAAPADAGAAQEFGSGTAPADAATASS

SEQ ID NO: 1673 - DNA, 2259 bp, Mycobacterium tuberculosis CDC1551
  CDS (1)..(2259): transl_table=11
atgtctgccgctgaaattgacgaaggcgtgttcgagacgaccgccaccatcgacaacgggagctttggcacccggaccatccgcttcgagaccggccgattggccttgcaggccgccggcgcggtggtcgcctacctcgacgacgacaacatgctgctgtcggcgaccaccgccagcaagaaccccaaagaacacttcgacttcttccccctcacggtcgacgtcgaggagcgcatgtatgcggccggccgcatccccggttcgttcttccgtcgcgagggccgaccctccaccgacgcgatcctgacctgccggctcatcgaccgcccgctgcgcccgtcgtttgtcgacgggctgcgcaacgagatccaaatcgtggtgacgattctcagcctggatccgggcgatctctacgacgtattggcgatcaacgcggcgtcggcgtccacccagctgggcggtctgccgttctccgggcccatcggcggtgtgcgggtggcgctcatcgacggcacctgggtcggcttccccaccgtcgaccagatcgagcgcgccgtgttcgacatggtcgtggccggccggatcgtcgagggtgatgttgccatcatgatggtcgaagccgaggccaccgaaaacgtcgtcgagctcgtcgaaggtggtgcccaagcgccgacggaaagcgtggtggccgcgggcctggaggcggccaagccgtttatcgccgcgctgtgcaccgcgcagcaggagcttgccgatgccgctggaaagtcgggcaaaccgaccgtcgacttcccggtgttccctgactacggcgaagacgtgtactactcggtgtcctcggtggccaccgacgagttggccgccgcgttgaccatcggcggtaaagccgagcgcgaccagcgcatcgacgaaatcaagacccaggttgtgcagcggctcgccgacacctacgagggtcgcgaaaaggaggtcggcgccgcgttgcgtgccctgaccaaaaagctggttcggcagcgcatcctcaccgaccatttccgtatcgacggccgcggcatcaccgacattcgcgcattgtcggccgaggtggccgtggttccgcgcgcgcacggcagcgcgctgttcgaacgcggcgaaacccagatcctgggtgtgaccacactcgacatgatcaagatggcccagcagatcgactcgttggggccggagacatcgaagcggtacatgcaccactacaacttcccgccgttctccaccggcgagaccggtcgggtcggttcgcccaagcggcgtgagatcgggcacggcgcactggccgagcgggccctggtgccggtgttgccgagcgtcgaggaattcccgtatgccattcgccaggtgtcggaggctctgggctccaacgggtcgacctcgatggggtcggtgtgcgcgtcgacgctggcgctgctcaacgccggggtgccgctcaaggcgccggtggccggcatcgcgatgggcctggtctccgacgacattcaagtagaaggggcggtcgacggcgttgtggagcgtcgcttcgtcaccctcaccgacatcctcggcgccgaagacgcgttcggtgacatggacttcaaggtcgccgggaccaaggacttcgtcaccgcgctgcagctggacaccaagctcgacgggatcccttcgcaggtgcttgccggagcactcgagcaggccaaggacgcccgcctcacgatcttggaggtgatggctgaggccatcgatagacccgacgaaatgagtccctacgccccgcgggtgaccaccatcaaggttccggtggacaagatcggggaggtcatcggacccaagggcaaggtcatcaacgccatcaccgaggagaccggcgcgcagatctccatcgaagacgacggcaccgtgttcgtcggcgccaccgacgggccatcggcacaggccgcgatcgacaagatcaacgccatcgccaacccgcagctgccgacggtgggcgaacggttcctcggaaccgtggtcaagaccaccgatttcggtgcctttgtatcgttgctgcctggccgcgacggtctggtgcacatttccaaactcggcaagggcaagcgcatcgcgaaggtcgaggacgttgtcaatgtcggtgacaagctgcgggtggagatcgccgacatcgacaaacggggcaagatctccctgatcctggtcgccgacgaggacagcaccgccgccgctaccgatgccgcgacggtcaccagctga

SEQ ID NO: 1674 - protein, 752 aa, Mycobacterium tuberculosis CDC1551
MSAAEIDEGVFETTATIDNGSFGTRTIRFETGRLALQAAGAVVAYLDDDNMLLSATTASKNPKEHFDFFPLTVDVEERMYAAGRIPGSFFRREGRPSTDAILTCRLIDRPLRPSFVDGLRNEIQIVVTILSLDPGDLYDVLAINAASASTQLGGLPFSGPIGGVRVALIDGTWVGFPTVDQIERAVFDMVVAGRIVEGDVAIMMVEAEATENVVELVEGGAQAPTESVVAAGLEAAKPFIAALCTAQQELADAAGKSGKPTVDFPVFPDYGEDVYYSVSSVATDELAAALTIGGKAERDQRIDEIKTQVVQRLADTYEGREKEVGAALRALTKKLVRQRILTDHFRIDGRGITDIRALSAEVAVVPRAHGSALFERGETQILGVTTLDMIKMAQQIDSLGPETSKRYMHHYNFPPFSTGETGRVGSPKRREIGHGALAERALVPVLPSVEEFPYAIRQVSEALGSNGSTSMGSVCASTLALLNAGVPLKAPVAGIAMGLVSDDIQVEGAVDGVVERRFVTLTDILGAEDAFGDMDFKVAGTKDFVTALQLDTKLDGIPSQVLAGALEQAKDARLTILEVMAEAIDRPDEMSPYAPRVTTIKVPVDKIGEVIGPKGKVINAITEETGAQISIEDDGTVFVGATDGPSAQAAIDKINAIANPQLPTVGERFLGTVVKTTDFGAFVSLLPGRDGLVHISKLGKGKRIAKVEDVVNVGDKLRVEIADIDKRGKISLILVADEDSTAAATDAATVTS

SEQ ID NO: 1675 - DNA, 2214 bp, Streptococcus pneumoniae TIGR4
  CDS (1)..(2214): transl_table=11
atggcaaaacaagtgtttcaaacgacttttgcgggtcgtgagttaattgtagagactggtcaggttgctaagcaagcaaatggatctgttgtcgtacgttacggtgagtcaactgtcttgactgctgccgttatgtctaagaaaatggcaactggggatttcttcccactccaagtcaactacgaagaaaaaatgtatgcggctgggaagtttcctggtggctttatgaaacgtgaaggacgtccttcaacagatgcgaccttgacagcgcgtttgattgaccgtccgattcgtcctatgtttgcggaaggtttccgtaatgaagtccaagtcatcaatacagtgctttcttatgatgaaaatgcatctgcaccaatggctgctatgtttggttcatctttggcactgtctatttcagatattccatttgacggaccaattgctggggtacaagtgggatatgtagatggccaaatcatcatcaacccaagtcaagaacaagcagagcaatctcttcttgaattgacagtagctggaaccaagcacgctatcaacatggtagagtctggtgccaaagaattgtcagaagaaatcatgttggaagcgctccttaaagggcacgaagctgtcaaagaattgattgccttccaagaagaaatcgttgctgctgtcggtaaagaaaaagcagaagtggaattgcttcacgtggatgctgaattgcaagctgaaatcattgcagcctacaacagtgacctccaaaaggcagttcaagtagaagagaaattggcccgtgaagctgcgactcaagtagtgaaagaccaagtgactgccgtttacgaagaaaaatatgcggaccacgaagaatttgaccgtattatgcgtgatgtggctgaaatcttggaacaaatggaacacgcagaagtgcgacgtttaattacagaagacaaggtgcgtcctgatggtcgtaaggtcgatgaaatccgtcctttggatgcggttgttgacttccttcctcgtgtacatggttcaggtctctttactcgtgggcaaactcaagctctttcagtcttgaccttggctccgatgggagaaactcaaatcattgatggtttggatccagagtacaagaaacgctttatgcaccactataacttccctcaatattctgtaggggaaacaggtcgttacggtgcgccaggtcgtcgtgaaatcggtcacggtgcccttggtgagcgtgctcttgctcaagtcttgccaagcttggaagaattcccctacgctatccgtctagtagcagaagttttggaatcaaacggttcttcatctcaagcttctatctgtgcgggaactcttgcccttatggctggtggtgtgccaatcaaggcgccagtagctggtattgctatggggcttatctcagatggaaataactacacagtattgacagatatccaaggtttggaagatcactttggagatatggacttcaaggttgcaggtactcgtgatgggattacagcccttcaaatggatatcaagattcaagggattactgcagaaatcttgacggaggctcttgctcaagccaagaaagcgcgttttgaaatccttgatgtcattgaagcaaccattccagaagttcgtccagaattggctccaactgctccgaaaattgatacgatcaagattgatgtggacaagattaagattgtcatcggtaagggtggagaaaccatcgacaagattatcgctgaaacaggtgttaagattgatatagacgaagaaggaaatgtgtctatctactctagtgaccaagatgctattaaccgtgccaaagaaattattgctggtttggttcgtgaagccaaagtggatgaagtttaccgtgctaaagtcgttcgtatcgagaaatttggtgcctttgttaacctctttgataagacagatgcccttgttcatatctctgagatggcttggactcgtaccaatcgtgtagaggatttggtagaaatcggggatgaagttgatgttaaggttatcaaaattgatgaaaaaggccgtatcgatgcctctatgaaggctcttctacctcgtccgccaaaacctgagcatgatgaaaaaggtgaaaagtctgagcgccctcaccgcccacgtcatcaaaaggattacaaacctaagaaagaatttacagaaacatcaaaagattcagaataa

SEQ ID NO: 1676 - protein, 737 aa, Streptococcus pneumoniae TIGR4
MAKQVFQTTFAGRELIVETGQVAKQANGSVVVRYGESTVLTAAVMSKKMATGDFFPLQVNYEEKMYAAGKFPGGFMKREGRPSTDATLTARLIDRPIRPMFAEGFRNEVQVINTVLSYDENASAPMAAMFGSSLALSISDIPFDGPIAGVQVGYVDGQIIINPSQEQAEQSLLELTVAGTKHAINMVESGAKELSEEIMLEALLKGHEAVKELIAFQEEIVAAVGKEKAEVELLHVDAELQAEIIAAYNSDLQKAVQVEEKLAREAATQVVKDQVTAVYEEKYADHEEFDRIMRDVAEILEQMEHAEVRRLITEDKVRPDGRKVDEIRPLDAVVDFLPRVHGSGLFTRGQTQALSVLTLAPMGETQIIDGLDPEYKKRFMHHYNFPQYSVGETGRYGAPGRREIGHGALGERALAQVLPSLEEFPYAIRLVAEVLESNGSSSQASICAGTLALMAGGVPIKAPVAGIAMGLISDGNNYTVLTDIQGLEDHFGDMDFKVAGTRDGITALQMDIKIQGITAEILTEALAQAKKARFEILDVIEATIPEVRPELAPTAPKIDTIKIDVDKIKIVIGKGGETIDKIIAETGVKIDIDEEGNVSIYSSDQDAINRAKEIIAGLVREAKVDEVYRAKVVRIEKFGAFVNLFDKTDALVHISEMAWTRTNRVEDLVEIGDEVDVKVIKIDEKGRIDASMKALLPRPPKPEHDEKGEKSERPHRPRHQKDYKPKKEFTETSKDSE

SEQ ID NO: 1677 - DNA, 2112 bp, Clostridium acetobutylicum ATCC 824
  CDS (1)..(2112): transl_table=11
atgttacattttttagaaacagatattgccggaagaaaacttaaagttgaatgtggcaaaactggtatgctttcaaactgtgctatgttcataagttacggcgatactgttgtaatggttaatgtcaatgcctcagaaaagccaagagaaggtattgatttctttcctttgagtattgaatacgaagaaagacaatattcagtaggaaaaatacctgggggatttgtaaaaagagaaggtagaccttctgaaaaatctatcttacatgcaagagctatagatagacctttaagaccattgtttcctaaagggtacagaaatgatgttcaggtggtatgtactgtaatgtctgtagagcaggataacttaccagaaatacttgctatgaacggtgcatcaatggctctatgtttatctgatattccatttacaacacctgttgctacagtatctgttgggtgtattgatggtaaatttgttttaaatcctacattagaggaaagagaaaaaagttctcttgatttaactgtttgtgccacaaatgaaagagtaatgatgttagaggctggtgccgatgaaattcctgaggatttaatgattgctgcaatagattttggatttaatgcttgtcaagatatagtcgcttttcaagaaaaagcaatgaaagaattcggaaaagaaaaggttaccccagaattatatcatcctaaagaagaaattgaaaaagacgttactgaatttgcttttgaatctattaaggaaattatgtacataacggatagggatgaacgaaatttaagattaagagagataaaagaaaaaatatcaaatgagtttgcagaaaagtatcctgatgatggtgctgatatagatgaagttgtatatacacttcaaaagaaggtcgttagaaatatgttattaaaagaacatagaagacctgacggaagaagatttgatgaaataagacctataagttgtgatgtagatcttttgcctagaacccatggaagtggtttatttacaagaggtttaacacaggttatgacggttacaactttaggaccaattggcgatgctcaagttatagatggtttaggagtagaggaatctaaacgatatatgcatcattataacttcccaccatattctacaggagaagttaaaccattaagaggaccaaatagaagagagataggtcatggagctcttgctgagaaagccctagtgccattaataccatctgaagaagaatttccgtatacaataagacttgtgtcagaagttttaagttcaaatggttcaacatcccaagcaagtgtatgtggaagtactttagcactcatggatgcaggtgtaccaataaagagaccagcagccggaatagctatgggacttataacaagtgaagatctttcaaaagaagctgttattacagacatacaaggcttagaagacttttttggcgatatggattttaaagttgcaggtactgagaaaggtataacagcaattcaagttgatacaaaaatacatggtttatctaagtactgtataaaaactgcaataaatgatgctagaaaagctagattatttatactcgaaaaaatggttgcatgcataaatgaacctagaaaagaattatcaacatatgcaccaagagcgtatactataaatatagatacagataaaataagaactcttataggaactggcggaaaaacaatcaataaaataattgaggaaactggtgttaaaatagacattagagaagatggaactgtatttgttctatctagtgatgcagattcagctaacagggcgttaaagatgattgatgatcttacaaaagatgttaaagtaggagaagtttatttaggaaaagtaaccaagataactaacttcggagcttttgttgaagtgctcccaggtaaggaaggtcttgtccatatatcaaaacttgatataaataaagtaaataaagtagaagatgtagtttcagttggcgatgagatactagttaaagttactgatatagataatcaaggaagagtaaatttatcaagaaaagatgtattaaaacaacaagaatcaaataattctaaagaaaaataa

SEQ ID NO: 1678 - protein, 703 aa, Clostridium acetobutylicum ATCC 824
MLHFLETDIAGRKLKVECGKTGMLSNCAMFISYGDTVVMVNVNASEKPREGIDFFPLSIEYEERQYSVGKIPGGFVKREGRPSEKSILHARAIDRPLRPLFPKGYRNDVQVVCTVMSVEQDNLPEILAMNGASMALCLSDIPFTTPVATVSVGCIDGKFVLNPTLEEREKSSLDLTVCATNERVMMLEAGADEIPEDLMIAAIDFGFNACQDIVAFQEKAMKEFGKEKVTPELYHPKEEIEKDVTEFAFESIKEIMYITDRDERNLRLREIKEKISNEFAEKYPDDGADIDEVVYTLQKKVVRNMLLKEHRRPDGRRFDEIRPISCDVDLLPRTHGSGLFTRGLTQVMTVTTLGPIGDAQVIDGLGVEESKRYMHHYNFPPYSTGEVKPLRGPNRREIGHGALAEKALVPLIPSEEEFPYTIRLVSEVLSSNGSTSQASVCGSTLALMDAGVPIKRPAAGIAMGLITSEDLSKEAVITDIQGLEDFFGDMDFKVAGTEKGITAIQVDTKIHGLSKYCIKTAINDARKARLFILEKMVACINEPRKELSTYAPRAYTINIDTDKIRTLIGTGGKTINKIIEETGVKIDIREDGTVFVLSSDADSANRALKMIDDLTKDVKVGEVYLGKVTKITNFGAFVEVLPGKEGLVHISKLDINKVNKVEDVVSVGDEILVKVTDIDNQGRVNLSRKDVLKQQESNNSKEK

SEQ ID NO: 1679 - DNA, 2250 bp, Rickettsia conorii str. Malish 7
  CDS (1)..(2250): transl_table=11
atgtttaacgaaataactaagagtgttacatggaacggccaagttcttgagcttagtacaggtaaaatagcaaggcaagctgacggggcagttacagtaaaaatgggtaattccgttttattatgtacggcagtagtagctaacaaagcaaaagagggcataggttttcttcctttaacaattaattatagagaaatggcatatgctgccggtaagataccagggggattttttaaacatgagggaaaagcatcagatagagaagttttagtatctcgtttaatagatagaccgattagaccattatttcatccggcttttgtgaatgaaacgcatgtaacttgcagtgttctttcatatgatcctgaaactccggtagatatacttgcaattatcggtgcatcggctgcacttagcctatcccctgctccttatctagaaatagttgcggcaagtaaagtaggtttaatcaatggtgaatttgttttaaatccgacacttgcattattaaaaacaagtcagcttgatttagtagttgcaggaacatcagattcagtaatgatggttgaatcggaagctcatttactttctgaagaacaaatgttagaagccgtaaaatttggatttgaaagctttcagccggtaataaagataattaaagaactagcagaagaagctaaaaaaccaaaacttgaaatgcaagctttatatcctgcttcattaaagaaagaaattgagaagttatttgtaaaagaaattgaacaagcttttgcaattaaatctaaacaagaacgtagcactaatttagatttaatacctgaaaaagttcttacacattttgtaagcgacatagaaaataaaaaatatagtaattatcaaatcgaatcagctttaaaagctattgaatcagatatattacgtaacgagattttagaaaaaaatagacgtatcgatggaagaagtaccacggatataagacaaattgcttgtgaaataggtttactaccttccgcacatggttcagctttatttactagaggtgaaacgcaaagcttagttagtactacattcggtactagtttagatgagcagatagttgacagtttagagggtgagtataaagagcgttttatgctcaattatatctttccgccctactctgtaaatgaagcaatgccaatgaaagcacctagtcgtcgtgaagtcggacacggtaaactcgcatggcgtgctattaatccaatattacctaataaagtacaatttccttattctattagagtagttgccgaaactacggaatctaacggttcttcttcaatggcaactgtttgcggtagttctcttgctttaatgtatgctggcgtaccgataaaagcaccggttgcgggtattgctatgggacttgttaaggaaggtaaaaattttgccgtattatcggatattctcggcgatgaagattatttcggtgatatggactttaaggttgcaggaactagcgaagggattactgcattacaaatggatatcaaaatatccggagtagattttaaaataatgaaagtagctttagagcaagcacgactcggtcgtttgcatatactggagcaaatgaataaagttatcagtaaaccaaataacgaactaagtaaaaatgctccttctactactactataaaaatagataaggataaaattagagatattataggaccgggcggtaaaataataaaggaaatttgtgaaactagcggtgctaaaatagatataagcgatgacggtacggtgtctgtttatgcttcagatagagataagctaaaagttgccttagataaaattaaagctattgtcgttgaacctgaaatcggtgaaatatttaacggtacggtagtgaaagtcttagattccggtgcttttattaattatgtaggtaataaagacggctttgttcatattagtgaagtatcaggagaaagaatagaaacggttagcagtgttttaaaacaaggcgatatagtaaaagttaagctaataggctttgataataaaggcaaagcaaaattaactattaaaaatgccgataaagataaatcttcaaataatacaaagccaaaaactaatgttaataatactaataaggacaattcagaacctgagcagcgacgtgattctagtaaaaaacgagcttggaatgaagataataatgctgaaactgctgaagtaattacagaacgtaagtattttaattga

SEQ ID NO: 1680 - protein, 749 aa, Rickettsia conorii str. Malish 7
MFNEITKSVTWNGQVLELSTGKIARQADGAVTVKMGNSVLLCTAVVANKAKEGIGFLPLTINYREMAYAAGKIPGGFFKHEGKASDREVLVSRLIDRPIRPLFHPAFVNETHVTCSVLSYDPETPVDILAIIGASAALSLSPAPYLEIVAASKVGLINGEFVLNPTLALLKTSQLDLVVAGTSDSVMMVESEAHLLSEEQMLEAVKFGFESFQPVIKIIKELAEEAKKPKLEMQALYPASLKKEIEKLFVKEIEQAFAIKSKQERSTNLDLIPEKVLTHFVSDIENKKYSNYQIESALKAIESDILRNEILEKNRRIDGRSTTDIRQIACEIGLLPSAHGSALFTRGETQSLVSTTFGTSLDEQIVDSLEGEYKERFMLNYIFPPYSVNEAMPMKAPSRREVGHGKLAWRAINPILPNKVQFPYSIRVVAETTESNGSSSMATVCGSSLALMYAGVPIKAPVAGIAMGLVKEGKNFAVLSDILGDEDYFGDMDFKVAGTSEGITALQMDIKISGVDFKIMKVALEQARLGRLHILEQMNKVISKPNNELSKNAPSTTTIKIDKDKIRDIIGPGGKIIKEICETSGAKIDISDDGTVSVYASDRDKLKVALDKIKAIVVEPEIGEIFNGTVVKVLDSGAFINYVGNKDGFVHISEVSGERIETVSSVLKQGDIVKVKLIGFDNKGKAKLTIKNADKDKSSNNTKPKTNVNNTNKDNSEPEQRRDSSKKRAWNEDNNAETAEVITERKYFN

SEQ ID NO: 1681 - DNA, 2154 bp, Sinorhizobium meliloti 1021
  CDS (1)..(2154): transl_table=11
atgttcgagacacacaaggtagaaatcgaatgggctgggcgtccgctcaagctcgaaaccggaaaaatcgcgcgtcaggccgatggtgccgttctcgcgacctacggcgaaaccgtcgtgctcgccacggtggtttcggcgaaggcaccgaagccaggccaggatttcttcccgctcaccgtcaactatcaggaaaagacctacgctgcgggcaagatccccggcggctatttcaagcgtgagggccgccccagcgaaaacgagacgctggtgtcgcgtctgatcgaccggccgatccgtccgctcttcccggacggctacaagaacgacacccaggtcatcatcacggtcatgcagcatgacctcgagaacaacccggacgtcgtcgcgatggttgcggcatccgctgcattgacgctttccggcgttcccttcatgggtccggtcggcggtgcccgcgtcggctacatcaacggcgaatacgttctcaacccgcatctcgacgaaatggacgaatccacgctcgacctcgtcgtcgccggcacgcaggaagcggtgctgatggtggaatcggaagcgaaagagctgccggaagatgtcatgctcggcgccgtcgttttcggccagaagggcttccagccggtgatcgacgctgtcatcaggcttgcggaagttgccgccaaggagccgcgcgaattcaatccggaagatcactccgctctcgaaaatgcgatgctctcgatcgccgaagacgagctgcgcaacgcctataagatcaccgagaaggccgcgcgctatgccgccgtcgatgcggtaaaggcaaaggtcaaggagcatttcctgccggaaggcgtcgagaacccggcccataccgccgaagagattgccgctgtcttcaagcacctgcaggccaagatcgttcgctggaacatcctcgacacgaagagccgcatcgatggccgcgacctcgtcacggttcgcccgatcgtcgccgaagtcggcatcctgccgcgcacgcacggttcggcgctctttacccgcggtgaaacgcaggcgatcgtcgttgccacgctcggcaccggcgaagacgagcagtatgtcgattccttgactggcatgtacaaggaaaacttcatgctgcattacaacttcccgccctattcggtcggtgaaaccggccgcatgggttctccgggccgccgcgaaatcggccacggcaagctcgcctggcgcgccatccatccgatgctgccgaccgcggaacagttcccctacacgctgcgcgtcgtttccgagatcaccgagtccaacggttcgtcctccatggcaaccgtctgcggcacgtcgctcgcactgatggacgcgggcgttccgctcgccaagccggttgccggcattgccatgggcctcatcaaggaagacgaccgtttcgccgtcctctccgacattctcggcgatgaagaccacctcggcgatatggacttcaaggtcgcgggcacggatgccggcatcacctcgctgcagatggacatcaagatcgaaggcatcaccgaagaaatcatgggtgttgccctcaaccaggccaagggaggccgcctgcacattctcggcgaaatggccaaggccatctccgagagccgcggccagctcggcgagttcgcaccgcgcatcgaagtcatgaacattccggtcgacaagattcgtgaagtcatcggctcgggcggcaaggtcatccgcgaaatcgtcgaaaagaccggcgccaagatcaatatcgacgacgacggcaccgtcaagattgcgtcggcttccgccaaggagatcgaggccgcccgcaagtggatccactcgatcgtcgccgagccggaagtcggtcaggtctatgaaggcactgtcgtcaagacggccgatttcggcgccttcgtcaacttcttcggcgcccgcgacggcctcgtccacatctcgcagctcgcttccgagcgcgttgccaagaccaccgacgtcgtcaaggaaggcgataaggtctgggtcaagctgatgggcttcgacgagcgcggcaaggttcgtctctccatgaaggtcgtagaccaggcgaccggcaaggaagtcgttgccgagaagagcgaaaagaaggacggcggcgaagccgccgagtaa

SEQ ID NO: 1682 - protein, 717 aa, Sinorhizobium meliloti 1021
MFETHKVEIEWAGRPLKLETGKIARQADGAVLATYGETVVLATVVSAKAPKPGQDFFPLTVNYQEKTYAAGKIPGGYFKREGRPSENETLVSRLIDRPIRPLFPDGYKNDTQVIITVMQHDLENNPDVVAMVAASAALTLSGVPFMGPVGGARVGYINGEYVLNPHLDEMDESTLDLVVAGTQEAVLMVESEAKELPEDVMLGAVVFGQKGFQPVIDAVIRLAEVAAKEPREFNPEDHSALENAMLSIAEDELRNAYKITEKAARYAAVDAVKAKVKEHFLPEGVENPAHTAEEIAAVFKHLQAKIVRWNILDTKSRIDGRDLVTVRPIVAEVGILPRTHGSALFTRGETQAIVVATLGTGEDEQYVDSLTGMYKENFMLHYNFPPYSVGETGRMGSPGRREIGHGKLAWRAIHPMLPTAEQFPYTLRVVSEITESNGSSSMATVCGTSLALMDAGVPLAKPVAGIAMGLIKEDDRFAVLSDILGDEDHLGDMDFKVAGTDAGITSLQMDIKIEGITEEIMGVALNQAKGGRLHILGEMAKAISESRGQLGEFAPRIEVMNIPVDKIREVIGSGGKVIREIVEKTGAKINIDDDGTVKIASASAKEIEAARKWIHSIVAEPEVGQVYEGTVVKTADFGAFVNFFGARDGLVHISQLASERVAKTTDVVKEGDKVWVKLMGFDERGKVRLSMKVVDQATGKEVVAEKSEKKDGGEAAE

SEQ ID NO: 1683 - DNA, 2118 bp, Bacillus subtilis subsp. subtilis str. 168
  CDS (1)..(2118): transl_table=11
atgggacaagaaaaacatgtctttaccatagattgggccggaagaacgcttaccgttgaaaccggccagcttgccaaacaggcaaatggtgctgtgatgatccgctacggtgatacagcagtacttagtacagcaaccgcttcaaaagaacctaaaccgcttgatttcttccctcttactgtaaactatgaagaaagattatatgcggtagggaaaattccgggcggatttattaaaagagaaggacgtccaagtgaaaaagcggttcttgccagccgtttaattgaccgtccgatccgtcctttgtttgccgatggattccgtaatgaagttcaagtcatcagcattgtcatgagtgttgaccaaaactgctcttcagaaatggctgccatgttcggttcatctcttgcactttctgtatcggatattccgtttgaaggaccgattgcaggggttactgtcggacgcattgatgatcaatttatcattaacccgacagtcgatcagcttgaaaaaagcgatatcaatcttgtcgttgccggcacgaaagatgcgattaacatggtagaagcgggagcggacgaagttcctgaggaaatcatgcttgaggccattatgttcggccatgaagagattaaacgcctgattgcattccaagaagaaattgttgcagcagtcggcaaagagaaatctgaaattaagctctttgaaattgatgaagagcttaatgaaaaagtaaaagctttggcagaagaggatctgctgaaagccatccaagttcatgaaaagcatgcccgtgaagatgccattaacgaagtgaagaacgcagttgtggcaaaattcgaggatgaagaacatgatgaagacacaatcaagcaagtgaagcagattttatccaagcttgtgaaaaatgaagttcgccgcctgattactgaagagaaagtaagaccggacggccgcggtgtcgatcaaatccgtccgctctcttcagaggttggcctcttgccaagaacgcacggttcaggtctatttacaaggggacaaactcaggccctcagcgtatgtacgctaggtgctctgggagatgtgcaaatccttgacggcttaggtgtcgaagagtcgaaacggtttatgcatcattacaacttcccgcaattcagcgttggggaaacaggaccgatgcgcggaccgggacgtcgtgaaatcggacacggagcactgggtgagcgtgcgcttgagccagttattccgtctgaaaaagacttcccttatactgtccgtcttgtttcagaagtgcttgaatcaaacggttctacatctcaagcaagcatttgcgcaagcacacttgcaatgatggatgccggtgtaccgattaaagcgccagttgctggtattgcgatgggtcttgtcaaatcaggcgaacattacactgtcttgactgacatccaaggcatggaagacgcgctcggagatatggactttaaagtagcgggaactgaaaaaggcgtaacggccctgcaaatggacattaaaattgaaggcctttccagagagattcttgaagaagcgcttcagcaggcgaaaaagggcagaatggaaatcctcaacagcatgcttgcaacattaagcgaatcaagaaaagagctttctcgatatgcgcctaagatcttaacaatgaccattaatcctgataaaatccgcgatgtcatcggaccaagcgggaaacaaatcaataagatcatcgaagaaaccggtgttaaaattgatattgagcaggacggcacaatctttatttcctctacagatgaaagcggcaaccaaaaagcgaaaaaaatcatcgaagaccttgtgagagaggttgaagtcggccaactttacctaggtaaagtgaaacggattgaaaaattcggggctttcgttgaaattttcagcggaaaagacggtttggtgcacatttcagagcttgcgcttgaacgcgtagggaaagttgaagatgttgtgaaaatcggagacgagattcttgtcaaagtcactgaaattgataaacaaggacgagtgaatttatcccgcaaagcggtgctccgtgaagagaaagaaaaagaagaacaacaatcttaa

SEQ ID NO: 1684 - protein, 705 aa, Bacillus subtilis subsp. subtilis str. 168
MGQEKHVFTIDWAGRTLTVETGQLAKQANGAVMIRYGDTAVLSTATASKEPKPLDFFPLTVNYEERLYAVGKIPGGFIKREGRPSEKAVLASRLIDRPIRPLFADGFRNEVQVISIVMSVDQNCSSEMAAMFGSSLALSVSDIPFEGPIAGVTVGRIDDQFIINPTVDQLEKSDINLVVAGTKDAINMVEAGADEVPEEIMLEAIMFGHEEIKRLIAFQEEIVAAVGKEKSEIKLFEIDEELNEKVKALAEEDLLKAIQVHEKHAREDAINEVKNAVVAKFEDEEHDEDTIKQVKQILSKLVKNEVRRLITEEKVRPDGRGVDQIRPLSSEVGLLPRTHGSGLFTRGQTQALSVCTLGALGDVQILDGLGVEESKRFMHHYNFPQFSVGETGPMRGPGRREIGHGALGERALEPVIPSEKDFPYTVRLVSEVLESNGSTSQASICASTLAMMDAGVPIKAPVAGIAMGLVKSGEHYTVLTDIQGMEDALGDMDFKVAGTEKGVTALQMDIKIEGLSREILEEALQQAKKGRMEILNSMLATLSESRKELSRYAPKILTMTINPDKIRDVIGPSGKQINKIIEETGVKIDIEQDGTIFISSTDESGNQKAKKIIEDLVREVEVGQLYLGKVKRIEKFGAFVEIFSGKDGLVHISELALERVGKVEDVVKIGDEILVKVTEIDKQGRVNLSRKAVLREEKEKEEQQS

SEQ ID NO: 1685 - DNA, 2118 bp, Yersinia pestis CO92
  CDS (1)..(2118): transl_table=11
ttgctgactccgattattcgtaaattccagtatggtcaacataccgtaactatcgaaactggtatgatggctcgccaggccactgcagccgtaatggtaagcatggacgacactgcagtattcgtgactgttgttggtcaaaagaaagccaaaccaggccagagtttcttccctctgacggttaactatcaggagcgtacttacgctgctggccgtatcccaggtagcttcttccgtcgtgaaggccgcccaagtgaaggcgaaacactgacttcacgtctgatcgaccgcccaattcgcccactgttcccagacagcttcctgaacgaagttcaagtgattgcaaccgtcgtttcggttaacccacaaattaacccagacatcgtggcactgattggtgcatctgcggcactgagcttgtcaggcattccatttaacggcccaatcggtgctgctcgcgttggttttatcaacgaccagtatgtgctgaacccaaccactgacgagctgaaagagagccgtttggatctggttgttgccggtactgcgggtgcagtgctgatggttgaatcagaagccgatattctgtccgaagagcaaatgttgggcgcggtcgtcttcggccacgaacaacagcaagttgtgattgaaaatattaacgctttggttgctgaagctggcaaacctaagtgggattggcaggcagagcctgtcaacgaagcactgcatgcgcgtgttgctgaactggccgaagcgcgtctgggcgatgcataccgtatcactgaaaaacaagaacgttatacgcaagttgatgctatcaaagctgacgtgaccgaagcgctattagcgcaggacgacacattagatgccgctgaaattcaggatatcctggccagcgttgagaaaaatgttgtgcgtagccgtgtgctgcgtggtgagccacgtatcgatggtcgcgaaaaagacatgatccgtggtttggatgtacgtactggcatcttgccacgtactcatggttctgccttgttcacccgcggtgaaactcaggcgttggttaccgctacgctgggtacggcacgtgacgcacaaaacattgatgagttgatgggtgagcgcacagattcattcctgttacactataatttccctccgtattgtgtaggcgaaacagggatggttggctcacctaagcgtcgtgagattggccatggccgccttgcgaaacgtggtgttctggctgtgatgccaagtgcgagcgagttcccttacactattcgtgtggtttctgaaatcaccgagtctaatggttcttcctcaatggcttctgtttgtggtgcttctctggctctgatggatgcgggcgtgccaattaaagccgctgttgctggtattgcaatgggcctggtaaaagagggtgataactttgtcgttctgtctgacattctgggtgacgaagatcacttgggcgacatggactttaaagtagccggtagccgtgacggtgtgaccgcactgcaaatggacattaaaattgaaggtattacccgcgaaattatgcaggtagctctgaatcaggctaagggtgcacgtttgcacattctgggcgtgatggaacaggctatcagcacaccacgtggcgatatctctgagtttgctccacgtatctacaccatgaagatcaaccctgagaaaatcaaggatgtgatcggtaaaggtggttcggtgatccgtgcgctgactgatgaaactggcaccacgattgaaatcgaagatgatggtaccattaagattgcagcaactgatggcgataaagcaaaacacgctatccgtcgtatcgaagagattactgctgaaatcgaagtgggccgtatttacgcaggtaaagtcacccgtatcgttgatttcggtgcatttgttgctatcggtggcggtaaagaaggtctggtacatatttctcaaatcgctgataagcgtgtagagaaagtgacagactacctgcagatgggtcaagatgtgccagttaaagtaatggaagttgatcgtcagggccgtatccgcctgagcatcaaagaagccactactcctgacgcagaagcaccagaagcagcagcagagtaa

SEQ ID NO: 1686 - protein, 705 aa, Yersinia pestis CO92
MLTPIIRKFQYGQHTVTIETGMMARQATAAVMVSMDDTAVFVTVVGQKKAKPGQSFFPLTVNYQERTYAAGRIPGSFFRREGRPSEGETLTSRLIDRPIRPLFPDSFLNEVQVIATVVSVNPQINPDIVALIGASAALSLSGIPFNGPIGAARVGFINDQYVLNPTTDELKESRLDLVVAGTAGAVLMVESEADILSEEQMLGAVVFGHEQQQVVIENINALVAEAGKPKWDWQAEPVNEALHARVAELAEARLGDAYRITEKQERYTQVDAIKADVTEALLAQDDTLDAAEIQDILASVEKNVVRSRVLRGEPRIDGREKDMIRGLDVRTGILPRTHGSALFTRGETQALVTATLGTARDAQNIDELMGERTDSFLLHYNFPPYCVGETGMVGSPKRREIGHGRLAKRGVLAVMPSASEFPYTIRVVSEITESNGSSSMASVCGASLALMDAGVPIKAAVAGIAMGLVKEGDNFVVLSDILGDEDHLGDMDFKVAGSRDGVTALQMDIKIEGITREIMQVALNQAKGARLHILGVMEQAISTPRGDISEFAPRIYTMKINPEKIKDVIGKGGSVIRALTDETGTTIEIEDDGTIKIAATDGDKAKHAIRRIEEITAEIEVGRIYAGKVTRIVDFGAFVAIGGGKEGLVHISQIADKRVEKVTDYLQMGQDVPVKVMEVDRQGRIRLSIKEATTPDAEAPEAAAE

SEQ ID NO: 1687 - DNA, 2139 bp, Caulobacter crescentus CB15
  CDS (1)..(2139): transl_table=11
atgttcgatatcaaacgcaagacgatcgagtggggcggcaagacgctggtcctcgaaaccggtcgcatcgcccgtcaagccgacggcgccgtcctggccaccatgggcgaaaccgtcgtcctggccaccgccgtgttcgccaagagccagaagccgggccaagacttcttcccgctgacggtcaactatcaggaaaagaccttcgcggccggcaagatccccggcggcttcttcaagcgcgaaggccgtccgtcggaaaaggagaccctggtctctcgcctgatcgaccgtccgatccgcccgctgttcgtcaagggcttcaagaacgaagtccaggtcgtcgtcaccgtgctgcagcacgacctcgagaacgatccggatatcctgggcatggtcgccgcctcggccgccctgtgcctgtcgggcgccccgttcatgggccccatcggcgcggctcgcgtgggctgggtcgacggcgcctacgtgctgaacccgactctcgacgagatgaaggaaagcaagatggacctcgtcgtggccggcaccgccgacgccgtgatgatggttgaatcggaaatccaggagctctcggaagagatcgtgctgggcggcgtcaacttcgcccaccagcagatgcaggccgtgatcgacgcgatcatcgacctggccgagcacgccgccaaggagcccttcgcgttcgagccggaagacaccgacgcgatcaaggccaagatgaaggacctagtgggtgccgacatcgccgccgcctacaagatccagaagaagcaggaccgctatgaagcggtcggcgccgccaagaagaaggccatcgcggccctgggcctctcggacgaaaacccgaccggctacgacccgctgaagctgggcgcgatcttcaaggaactggaagccgacgtcgtgcgtcgcggcatcctggacaccggcctgcgcatcgacggccgtgacgtgaagaccgtccgtccgatcctgggcgaagtcggcatcctgccgcgcacccacggctcggccctgttcacccgcggcgagacccaggcgatcgtggtcgccaccctgggcaccggcgacgacgagcagttcatcgacgccctggaaggcacctacaaggaatccttcctgctgcactacaacttcccgccctactcggtcggtgagacgggccgcatgggctcgccgggccgtcgcgaaatcggccacggcaagctggcctggcgcgccctgcgcccgatgctgccgaccaaggaagacttcccctacacgatccgcctggtctcggagatcaccgagagcaacggttcgtcctcgatggccacggtctgcggttcgtcgctggccatgatggacgccggcgtgccgctggtccgtccggtctcgggcatcgccatgggcctgatcctggaacaggacggctttgcggttctgtcggacatcctgggtgacgaagatcacctcggcgacatggacttcaaggtcgccggcaccagcgagggcctgacttcgctgcagatggacatcaagatcgccggcatcacgcccgcgatcatggagcaggctctggcccaggccaaggaaggccgcgcgcacatcctgggcgaaatgaacaaggccatggacgcgccgcgcgccgacgtgggcgacttcgcgccgaagatcgagaccatcaacatcccgaccgacaagatccgtgaagtgatcggttcgggcggcaaggtgatccgcgagatcgtcgccaccaccggcgccaaggtcgacatcaacgacgacggcgtggtcaaggtctcggcctcggacggcgccaagatcaaggccgcgatcgactggatcaagtcgatcaccgacgaagccgaagtcggcaagatctatgacggcaaggtcgtgaaggtcgtcgatttcggcgccttcgtgaacttcttcggcgccaaggacggcctcgtccacgtcagccagatcagcaacgaacgcgtcgccaagccgtcggacgtgctgaaggaaggccagatggtcaaggtcaagctcctgggcttcgacgaccgcggcaagaccaagctgtcgatgaaggtcgtcgaccaggaaaccggcgaagacctgagcaagaaggaagcggcggccgaagaggcgtaa

SEQ ID NO: 1688 - protein, 712 aa, Caulobacter crescentus CB15
MFDIKRKTIEWGGKTLVLETGRIARQADGAVLATMGETVVLATAVFAKSQKPGQDFFPLTVNYQEKTFAAGKIPGGFFKREGRPSEKETLVSRLIDRPIRPLFVKGFKNEVQVVVTVLQHDLENDPDILGMVAASAALCLSGAPFMGPIGAARVGWVDGAYVLNPTLDEMKESKMDLVVAGTADAVMMVESEIQELSEEIVLGGVNFAHQQMQAVIDAIIDLAEHAAKEPFAFEPEDTDAIKAKMKDLVGADIAAAYKIQKKQDRYEAVGAAKKKAIAALGLSDENPTGYDPLKLGAIFKELEADVVRRGILDTGLRIDGRDVKTVRPILGEVGILPRTHGSALFTRGETQAIVVATLGTGDDEQFIDALEGTYKESFLLHYNFPPYSVGETGRMGSPGRREIGHGKLAWRALRPMLPTKEDFPYTIRLVSEITESNGSSSMATVCGSSLAMMDAGVPLVRPVSGIAMGLILEQDGFAVLSDILGDEDHLGDMDFKVAGTSEGLTSLQMDIKIAGITPAIMEQALAQAKEGRAHILGEMNKAMDAPRADVGDFAPKIETINIPTDKIREVIGSGGKVIREIVATTGAKVDINDDGVVKVSASDGAKIKAAIDWIKSITDEAEVGKIYDGKVVKVVDFGAFVNFFGAKDGLVHVSQISNERVAKPSDVLKEGQMVKVKLLGFDDRGKTKLSMKVVDQETGEDLSKKEAAAEEA

SEQ ID NO: 1689 - DNA, 2157 bp, Synechocystis sp. PCC 6803
  CDS (1)..(2157): transl_table=11
atgcaagagtttgacaagtccatatccttcgacggacgggatataagactcaaaatgggaaccctagccccccaagcaggaggttcagtcctcattcaatccggcgatacagcggtgttggtcacggcgaccagagctaaaggaagggatggcattgattttctacccttaacggtggactacgaaggacgactctatgccgcaggccgtattccgggcggttttttgcggcgggaaggccgacccccagaaaaggccacattaatcagccgcctcattgaccgtcctttgcgtcccctattcccccattggctgcgggatgaactgcaaatagtagccaccaccctctccatggatgaggaagtgccccccgatgtgttagcggtgaccggggcttccgtggcggtcatcctggcccaaattcctttcaaaggtcccatggccgctgtgcgggtaggtttagtaggggatgatttcattattaatcccacctatcgggaagtccataacggagatttggacctggtggtggccggtacccccgccggtattgtcatggtggaagctggggcgaaccagttgccggaacaggacatcatcgaagcaattgattttggctatgaagcagtgcaggatctgatcaacgcccagcgggaattgatgacagacctgggcattaccctggccacttccgagccgcccccggtcaataccgccgtggaagagttcattgcaaacagagcctctaaaaaaatcatcaccgtgctcggtcaatttgacctgggtaaagatggtcgggatgccgccctcgatgaaattaaagccaccgaagtggaaacggcgatcgccgaattaccagaaaccgatcccgttaaacaaagtgtagaagaagaccccaaactagtcggcaacctctacaaagcattgaccaaaaagttaatgcggaaacagattgttgatgatggagtacgggtagacggccgcaaactcgaacaggtacgccccattagctgcgaagtcggttttctaccccgccgggtccatggcagtggactgtttaaccgtggtttaacccaggtgctctccctggctacccttggttcccccggcgatgcccaagatttagcggatgacctccatcccgaggacgaaaaacgttatctgcatcactacaacttccccccctattccgtcggtgaggcccgccccatgcgctcccctggccgccgagaaattggccacggtgctcttgctgaacgggccatcataccagtgctccccccccaggaagactttccctatgtggtacgggttgtgtcggaagtgctgtcttccaacggttccacttccatgggatccgtttgtggctccacccttgctctcatggatgcgggggtaccgattaaaaaacccgttagtggcgccgccatgggtttaatcaaggaaggggatgaaattcgcattctcaccgacattcagggcattgaagatttccttggcgacatggatttcaaagtagctggtaccgattccggtattaccgccctgcaaatggatatgaaaattgatggtctgagcatggaagtggtgtccaaagccattatgcaagctctccccgcccgactccatatcctcgacaaaatgttggcgacgatccgggaaccccgtcctgagttgtctccctttgccccccggttgttaaccctgaaaattgagccggaacacatcggcatggttattgggcccggtggtaaaaccattaagggcatcaccgaacaaaccagttgtaagattgacattgccgacgacggtaccgtcaccattgcttccagtgaaggggaacgggcagaacgggcgcggcaaatgatttataacatgacccgcaaactcaacgaaggggaagtgtacctcggtcgggtaacccgcatcattcccattggtgcctttgtggaagtgctacctggaaaagaaggcatgatccacatttcccagctaacggaaggccgggttggcaaggtggaagatgaagtgggtgtgggcgatgaggtcattgtcaaagtacgggaaattgacagtaaaggccgcttgaacctcacccgcttgggcattcaccccgatgaagcagcggaagcccgtcgtaacgctagccggggttaa

SEQ ID NO: 1690 - protein, 718 aa, Synechocystis sp. PCC 6803
MQEFDKSISFDGRDIRLKMGTLAPQAGGSVLIQSGDTAVLVTATRAKGRDGIDFLPLTVDYEGRLYAAGRIPGGFLRREGRPPEKATLISRLIDRPLRPLFPHWLRDELQIVATTLSMDEEVPPDVLAVTGASVAVILAQIPFKGPMAAVRVGLVGDDFIINPTYREVHNGDLDLVVAGTPAGIVMVEAGANQLPEQDIIEAIDFGYEAVQDLINAQRELMTDLGITLATSEPPPVNTAVEEFIANRASKKIITVLGQFDLGKDGRDAALDEIKATEVETAIAELPETDPVKQSVEEDPKLVGNLYKALTKKLMRKQIVDDGVRVDGRKLEQVRPISCEVGFLPRRVHGSGLFNRGLTQVLSLATLGSPGDAQDLADDLHPEDEKRYLHHYNFPPYSVGEARPMRSPGRREIGHGALAERAIIPVLPPQEDFPYVVRVVSEVLSSNGSTSMGSVCGSTLALMDAGVPIKKPVSGAAMGLIKEGDEIRILTDIQGIEDFLGDMDFKVAGTDSGITALQMDMKIDGLSMEVVSKAIMQALPARLHILDKMLATIREPRPELSPFAPRLLTLKIEPEHIGMVIGPGGKTIKGITEQTSCKIDIADDGTVTIASSEGERAERARQMIYNMTRKLNEGEVYLGRVTRIIPIGAFVEVLPGKEGMIHISQLTEGRVGKVEDEVGVGDEVIVKVREIDSKGRLNLTRLGIHPDEAAEARRNASRG

SEQ ID NO: 1691 - DNA, 2085 bp, Chlamydophila pneumoniae AR39
  CDS (1)..(2085): transl_table=11
atgaattttcaaactatttctattaatctgaccgaaggtaaaatattggtgtttgaaacagggaaaattgctcgtcaagctaacggagctgttcttgtccgttcaggggaaacctgtgtttttgcaagtgcatgcgctgtagatcttgatgacaaagtagactttcttcctttacgagtggactaccaagaaaaattctcttccacagggaaaactcttggtggatttataaaaagagaaggacgcccctctgaaaaagaaattttagtttctcgattgattgatcggtctctacgtccttccttcccctaccgactcatgcaagatgtgcaagttttatcttatgtatggtcgtatgacggtcaagttttacctgatcctcttgctatctgcgcagcatctgctgctttagcaatttcagatattccacagagcaacattgttgctggagtacggattggatgtattgataaccaatgggtcatcaatcctacaaaaactgagttagcatcctctactttagatcttgtattagctggaacagaaaacgctattctaatgatagaaggtcattgcgatttctttaccgaagagcaagtacttgatgccatagaatttggtcacaagcatattgttaccatctgtaaaagattacagttgtggcaagaagaagttggaaaatctaaaaatctaagtgctgtatatcctcttcctgcagaagttttaacagctgtgaaagagtgtgcgcaagacaagtttactgaactctttaatattaaagataaaaaagtacatgcagctactgcgcatgagattgaagaaaatattttagaaaaattacagcgcgaagatgatgatcttttctcttcttttaacatcaaagcggcatgtaaaactttaaaatctgacacgatgcgtgctctcataagagatagagagatccgtgcagatggacgttctttaactacagtccgtcctattactattgaaacttcttaccttcctcgtactcacggaagctgcctcttcactcgtggagagactcagacacttgcggtatgtactttaggcagtgaggcaatggctcaacgctatgaggatttgaatggtgaaggactttcaaaattttacttacaatacttcttccctcccttctctgttggagaggtaggaagaatcggctctccaggaaggagagaaattggccatggcaaattggcagagaaggctttaagtcatgctcttcctgatagcgctacatttccctataccatccgtatagaatctaatattacagaatctaatggttcttcatccatggcttctgtatgtggcggttgcctcgctcttatggacgctggcgtccctatttcttctcctattgcaggaattgctatgggattgatccttgatgatcaaggagcgattatcctttctgatatttccggtcttgaagatcaccttggagacatggactttaaaatagcagggagtggtaaaggaattacagccttccaaatggatatcaaagttgaaggaatcactccagctatcatgaagaaagctctttcccaagcgaagcaagggtgtaatgatattttaaatattatgaacgaagccctttcagctcccaaagcagacctatctcaatacgcgcctcgtattgaaacaatgcaaattaaaccaacaaaaattgcttcagtaattgggccgggaggcaagcaaatccgtcagatcattgaagagactggcgtccaaattgatgttaacgacttaggagttgttagcatctctgcgtcctcagcatcagctatcaataaagctaaagaaatcattgaaggtttagttggagaagttgaagttggaaaaacctacagaggtcgcgtaacttccgtagttgcgtttggagcctttgttgaagttctccccggaaaagaaggactctgccacatctctgagtgttctagacagcgaatagaaaatataagtgatgttgttaaggaaggcgatatcattgatgtaaaactcttaagcatcaatgaaaaaggtcaacttaagttgagccataaagcaactctagaataa

SEQ ID NO: 1692 - protein, 694 aa, Chlamydophila pneumoniae AR39
MNFQTISINLTEGKILVFETGKIARQANGAVLVRSGETCVFASACAVDLDDKVDFLPLRVDYQEKFSSTGKTLGGFIKREGRPSEKEILVSRLIDRSLRPSFPYRLMQDVQVLSYVWSYDGQVLPDPLAICAASAALAISDIPQSNIVAGVRIGCIDNQWVINPTKTELASSTLDLVLAGTENAILMIEGHCDFFTEEQVLDAIEFGHKHIVTICKRLQLWQEEVGKSKNLSAVYPLPAEVLTAVKECAQDKFTELFNIKDKKVHAATAHEIEENILEKLQREDDDLFSSFNIKAACKTLKSDTMRALIRDREIRADGRSLTTVRPITIETSYLPRTHGSCLFTRGETQTLAVCTLGSEAMAQRYEDLNGEGLSKFYLQYFFPPFSVGEVGRIGSPGRREIGHGKLAEKALSHALPDSATFPYTIRIESNITESNGSSSMASVCGGCLALMDAGVPISSPIAGIAMGLILDDQGAIILSDISGLEDHLGDMDFKIAGSGKGITAFQMDIKVEGITPAIMKKALSQAKQGCNDILNIMNEALSAPKADLSQYAPRIETMQIKPTKIASVIGPGGKQIRQIIEETGVQIDVNDLGVVSISASSASAINKAKEIIEGLVGEVEVGKTYRGRVTSVVAFGAFVEVLPGKEGLCHISECSRQRIENISDVVKEGDIIDVKLLSINEKGQLKLSHKATLE

SEQ ID NO: 1693 - DNA, 2172 bp, Listeria monocytogenes EGD-e
  CDS (1)..(2172): transl_table=11
atgtctgaaaaacaagtattttcaacagagtgggcaggtaaaacattatctgttgaagtaggtcaattagcaaaacaagcaagtggggcagccttaattcgttacggcgatacggttgttttaacagccgcagtaggttctaaaaaaccacgtccaggcgactttttcccattaactgttaactatgaagaaaaaatgtattccgttggtaaagttcccggtggattcttaaaacgtgaaggacgtccaagcgaccgtgctacattaacagcgcgtcttattgaccgtccaatccgtccgctatttgcagaaggtttccgtaatgaagttcaaattacttctactgtattcagtgtggatcaagattgttcgccagaaatggcagcaatgcttggatcttctgttgcattagttatttccgatattccatttgaaggaccaatcgctggtgttgacgttggtcgtatcgatggaaaatacgttattaacccaacaatcgagcaagcagaaaaaagcgatattagcttaactgttgcaggaacttatgatgcaatcaacatggtagaggctggagcgaaagaagtttcagaagaagcaatgcttgaagcaattatgtttggtcatgaagaaattaaacgtctttgtgaattccaacaacaaattattgcggcagttggtaaagaaaaacgcgaaatcgaactttttgtaagcgatcctgaacttgaagcagaagtaaaagcagctagtgaaggtaaaatgaaaacagctatcaaaacagaagagaaaaaagcacgtgaagctgcaattgaagaagtaaaagaagaaattttagaaagctataaagcaaaagaattagaaaatgaatctgaaattcttagcgaagtagctcatattcttgaaatgattgaaaaagatgaaatgcgtcgtctaatttctcaagataaaatccgtccagatggtcgtaaagtaaacgaaattcgcccgctttcttctgaagttggcatgcttccacgtgtccatggttctggtttattcactcgtggccaaacacaagctctaagcgtgtgtacactggcaccgcttcgtgaacaccaaattattgatggtctaggaacagaagagtacaaacgctttatgcaccattataatttcccgcaatttagtgttggggaaactggccctcgtcgtgctccagggcgtcgtgaaatcggtcacggtgcattaggcgaacgtgcattacaatatgttattccttccgaagaggaattcccttacacaatccgtttagtatcagaagttcttgaatctaacggatctagctctcaagcaagtatttgtggttctacacttgcaatgcttgatgctggtgttccaattaaagcgccagttgcaggtatcgcgatgggccttgtaaaacttggagatgactacacaatcctttctgatatccaaggtatggaagatcactttggcgatatggactttaaagttgctggtacaaaagacggtattacagcacttcaaatggatatcaaaatcgatggcttgagccgtcaaattttggacgaagcattaacacaagcaaaagaaggacgcttacacattctagaacacttaactagcacaattagcgcacctcgtgaagaactttctgcttatgctccaaaaatcatcacactaaatatcaaaccagagaaaatcaaagatgtaatcggaccaggtggaaaacaaatcaatgcaattattgatgaaactggcgtgaaaattgatatcgaacaagatggtacagtgtacattgcttcccaagatcaagcaatgaaccgtaaagcaattgctatcatcgaagacatcgttcgtgaagtagaagtgggagaagtttatactggtaaagttcgtcgtatcgaaaaatttggcgcatttgttgaattattcaaaggtacagatggtttagttcatatttctgaattagcgcatgaacgcgttgggaaagtagaagatatcctaaaattaggtgatgaagttactgttaaagttatcgaagtagaccaacaaggccgcgttaacttatcacgtaaagctttgcttgagaaaaaagaacaaccagaaggcgataaaaaaccacaagcagagaaaaaattctatccaaaaacgaaaaaaccagaatctaaataa

SEQ ID NO: 1694 - protein, 723 aa, Listeria monocytogenes EGD-e
MSEKQVFSTEWAGKTLSVEVGQLAKQASGAALIRYGDTVVLTAAVGSKKPRPGDFFPLTVNYEEKMYSVGKVPGGFLKREGRPSDRATLTARLIDRPIRPLFAEGFRNEVQITSTVFSVDQDCSPEMAAMLGSSVALVISDIPFEGPIAGVDVGRIDGKYVINPTIEQAEKSDISLTVAGTYDAINMVEAGAKEVSEEAMLEAIMFGHEEIKRLCEFQQQIIAAVGKEKREIELFVSDPELEAEVKAASEGKMKTAIKTEEKKAREAAIEEVKEEILESYKAKELENESEILSEVAHILEMIEKDEMRRLISQDKIRPDGRKVNEIRPLSSEVGMLPRVHGSGLFTRGQTQALSVCTLAPLREHQIIDGLGTEEYKRFMHHYNFPQFSVGETGPRRAPGRREIGHGALGERALQYVIPSEEEFPYTIRLVSEVLESNGSSSQASICGSTLAMLDAGVPIKAPVAGIAMGLVKLGDDYTILSDIQGMEDHFGDMDFKVAGTKDGITALQMDIKIDGLSRQILDEALTQAKEGRLHILEHLTSTISAPREELSAYAPKIITLNIKPEKIKDVIGPGGKQINAIIDETGVKIDIEQDGTVYIASQDQAMNRKAIAIIEDIVREVEVGEVYTGKVRRIEKFGAFVELFKGTDGLVHISELAHERVGKVEDILKLGDEVTVKVIEVDQQGRVNLSRKALLEKKEQPEGDKKPQAEKKFYPKTKKPESK

SEQ ID NO: 1695 - DNA, 2172 bp, Listeria innocua Clip11262
  CDS (1)..(2172): transl_table=11
atgtctgaaaaacaagtattttcaacagaatgggcaggtaagacattatctgtcgaagtaggtcaattagcaaaacaagcaagtggagcagccttaattcgttacggcgatactgtcgttttaacagctgcagttggttcaaaaaaaccacgtcctggcgactttttcccattaacagttaactatgaagaaaaaatgtattccgtgggtaaagttcccggtggattcttaaaacgtgaaggacgtccaagtgaccgtgcaacattaacagcgcgcctaattgaccgtccaatccgtccattatttgcagaaggtttccgtaatgaagttcaaattacttctactgtattcagtgtggatcaagattgttctccagaaatggcagcaatgcttggatcttctgttgcattagttatttctgatattccatttgaaggcccaatcgctggtgttgatgttggccgtattgacggaaaatacgttattaacccaactattgaacaagcagaaaaaagtgatattagcttaactgttgcaggaacttatgatgcaatcaacatggtagaagctggagcaaaagaagtttcagaagaagcaatgcttgaagcaattatgtttggacatgaagaaattaaacgcctttgtgaattccaacaacaaatcatcgctgcagttggtaaagaaaaacgcgaaatcgaacttttcgtaagcgatcctgaacttgaagcagaagtaaaagcagcaagtgaaggtaaaatgaaagcagctatcaaaacagaagagaaaaaagctcgtgaagctgcaattgaagaagtaaaagaagaaattttagaaagctataaagcaaaagaattagaaaatgaagcagaaattcttggtgaagtagctcatattcttgaaatgattgaaaaagacgaaatgcgtcgtttaatttctcaagataaaatccgtccagatggtcgtaaagtaaacgaaattcgtccactttcttctgaagttggtatgcttccacgtgtccatggttcaggtttattcactcgtggtcaaacacaagctttaagcgtatgtacactagcgccgcttcgtgaacaccaaatcattgacggtttaggaacagaagaatataaacgattcatgcaccattataacttcccgcaatttagtgttggggaaactggtcctcgtcgtgcgccgggtcgtcgtgaaatcggtcatggtgcgttaggtgaacgtgcattacaatatgttattccttccgaagaggaattcccgtacactatccgtctagtatcagaagttcttgaatcaaatggttctagttctcaagcaagtatttgtggatctacacttgctatgcttgatgctggtgttccaattaaagcaccagttgctggtatcgcaatgggtcttgtaaaacttggtgatgactacacaatcctttctgatattcaaggtatggaagatcactttggcgatatggacttcaaagttgctggaacaaaagatggtattacagcacttcaaatggacatcaaaattgatggcttaagtcgtcaaattttagacgaagcattaacacaagcaaaagaaggtcgcttgcatattctagaacacttaacaagtacaattagcgaacctcgtgaagaactttctgcgtatgctccaaaaattattacgcttaatatcaaaccagaaaaaattaaagatgttattggacctggtggaaaacaaatcaatgcaatcattgaagaaacaggcgtaaaaattgatattgaacaagatggtacagtttacattgcttcacaagatcaagcaatgaaccgtaaagcaattgctatcatcgaagacatcgttcgtgaagtagaagttggagaagtttacactggtaaagttcgtcgtatcgaaaaattcggcgcgtttgttgaattattcaaaggtacagatggtttagttcatatttctgaattagcacatgaacgtgttggtaaagtggaagacatcttaaaacttggtgatgaagtaacggttaaagttattgaagtagaccaccaaggccgcgttaacttatcacgtaaagcattgctagagaaaaaagaacaaccagaaggcgacaaaaaacctcaagcagagaaaaaattctaccctaaaacaaaaaagcctgagtctaaataa

SEQ ID NO: 1696 - protein, 723 aa, Listeria innocua Clip11262
MSEKQVFSTEWAGKTLSVEVGQLAKQASGAALIRYGDTVVLTAAVGSKKPRPGDFFPLTVNYEEKMYSVGKVPGGFLKREGRPSDRATLTARLIDRPIRPLFAEGFRNEVQITSTVFSVDQDCSPEMAAMLGSSVALVISDIPFEGPIAGVDVGRIDGKYVINPTIEQAEKSDISLTVAGTYDAINMVEAGAKEVSEEAMLEAIMFGHEEIKRLCEFQQQIIAAVGKEKREIELFVSDPELEAEVKAASEGKMKAAIKTEEKKAREAAIEEVKEEILESYKAKELENEAEILGEVAHILEMIEKDEMRRLISQDKIRPDGRKVNEIRPLSSEVGMLPRVHGSGLFTRGQTQALSVCTLAPLREHQIIDGLGTEEYKRFMHHYNFPQFSVGETGPRRAPGRREIGHGALGERALQYVIPSEEEFPYTIRLVSEVLESNGSSSQASICGSTLAMLDAGVPIKAPVAGIAMGLVKLGDDYTILSDIQGMEDHFGDMDFKVAGTKDGITALQMDIKIDGLSRQILDEALTQAKEGRLHILEHLTSTISEPREELSAYAPKIITLNIKPEKIKDVIGPGGKQINAIIEETGVKIDIEQDGTVYIASQDQAMNRKAIAIIEDIVREVEVGEVYTGKVRRIEKFGAFVELFKGTDGLVHISELAHERVGKVEDILKLGDEVTVKVIEVDHQGRVNLSRKALLEKKEQPEGDKKPQAEKKFYPKTKKPESK

SEQ ID NO: 1697 - DNA, 2157 bp, Nostoc sp. PCC 7120
  CDS (1)..(2157): transl_table=11
atggcagaatttgagaagtcaatatccttcgatggaagggatattcgactgaaagtaggcctactagcaccccaagctggtgggtcggttttgatagaatcaggggatacagctgttttagtcacagctacgcgatcgccaggtagagaaggcattgatttccttcccctgacagtagactatgaagaaagactatatgcggctggtagaatccccggtgggattatgcgccgagaaggccgtcccccagaaaaaacaattctcaccagccgtctcatagatcgtcccctgcgtcctttgttcccttcatggttgcgggatgacttgcaagttgtcgccttaacaatgtcgatggacgagcaagtaccacccgacgtgctagcggtaacaggtgcttccattgctactctcattgccaaaatcccctttaacgggccaatggcagcagtgagggtagggttagtgggcgatgatttcattattaaccccacctatgcagaaatcgaagccggagacttggatctggtagtcgcaggttcacctcacggtgtgattatggtggaagcaggggctaatcaattaccagagcgagatattatcgaggcgattgattttggttatgaggctgtgcgcgacttaattaaagcgcagctagacctagtagccgaactcggtctagaaattgtccaagaagcaccgccagaggtagaccaaactctggaaaattatatccgtgatcgcgctagcgacgaaattaagaaaattctggctcaatttgaactaaccaaacccgaacgcgatgccgcgttggacgttgttaaagataatattgccacagcgatcgccgaactcccagaggaagacccaattcgtttagctgcaactgccaacagcaaagccctgggcaacacttttaaagacatcactaaatacttcatgcgccgtcaaatcgtcgaagataacgtgcgtgtggatggtcggaaacttgatcaagtgcgtccggtttcttcccaagttggtgtcttaccaaaacgtgtccacggtagcggtttatttaaccgagggctgactcaggtattatcagcttgtactttgggtactcctggtgatgcccaaaacctcaatgatgacctgcaaacagaccaatcgaaacgctacctccatcattacaacttcccgcctttctccgtcggggaaactaaacccttacgcgcccctggtagacgggaaattggtcacggtgcattagcagagagagccatcttacctgtgctgccaccaaaagagcaattcccttacgtgattcgcgtcgtctcggaagtgctttcctccaacggttccacctcaatgggttcagtttgtggttccaccttggcattaatggatgccggtgtacccattctcaaacccgtgagtggtgcagcaatgggtttgattaaagaaggtgatgaagtccgagtcctgacagatattcagggcatcgaagactttttaggtgatatggactttaaagtcgctggtaccgatgcagggattaccgccttgcaaatggacatgaaaatctctggtttgtctttggaggttattgcccaagccattcaccaagcaaaagatgctaggctgcatattttggacaaaatgctccaaactatcgaccaaccacgcactgaaacctcaccttatgccccacgcctgttgactatcaagattgatccagacatgatcggtctagtcattggccccggcggtaagacaattaagggcatcaccgaagaaactggtgcaaaaatcgacattgaagacgatggcacagtgacaatttctgcggttgatgaaaacaaggcgaaaagagcgcgtaatattgtccaaggcatgactcgcaaactcaacgaaggcgatgtctatgccggacgtgtgactcggattattcccattggtgcttttgtggaatttctccctggaaaagaagggatgattcacatttcccaattagctgattaccgtgtcggcaaagttgaagatgaagtagctgttggcgatgaagtaattgtcaaagtgcgcgaaattgacaataagggacggattaatctcacacgcttgggtatacacccagatcaagcagctgcggcgcgggaagctgcggcggtgaatcgttaa

SEQ ID NO: 1698 - protein, 718 aa, Nostoc sp. PCC 7120
MAEFEKSISFDGRDIRLKVGLLAPQAGGSVLIESGDTAVLVTATRSPGREGIDFLPLTVDYEERLYAAGRIPGGIMRREGRPPEKTILTSRLIDRPLRPLFPSWLRDDLQVVALTMSMDEQVPPDVLAVTGASIATLIAKIPFNGPMAAVRVGLVGDDFIINPTYAEIEAGDLDLVVAGSPHGVIMVEAGANQLPERDIIEAIDFGYEAVRDLIKAQLDLVAELGLEIVQEAPPEVDQTLENYIRDRASDEIKKILAQFELTKPERDAALDVVKDNIATAIAELPEEDPIRLAATANSKALGNTFKDITKYFMRRQIVEDNVRVDGRKLDQVRPVSSQVGVLPKRVHGSGLFNRGLTQVLSACTLGTPGDAQNLNDDLQTDQSKRYLHHYNFPPFSVGETKPLRAPGRREIGHGALAERAILPVLPPKEQFPYVIRVVSEVLSSNGSTSMGSVCGSTLALMDAGVPILKPVSGAAMGLIKEGDEVRVLTDIQGIEDFLGDMDFKVAGTDAGITALQMDMKISGLSLEVIAQAIHQAKDARLHILDKMLQTIDQPRTETSPYAPRLLTIKIDPDMIGLVIGPGGKTIKGITEETGAKIDIEDDGTVTISAVDENKAKRARNIVQGMTRKLNEGDVYAGRVTRIIPIGAFVEFLPGKEGMIHISQLADYRVGKVEDEVAVGDEVIVKVREIDNKGRINLTRLGIHPDQAAAAREAAAVNR

SEQ ID NO: 1699 - DNA, 2238 bp, Caenorhabditis elegans
  CDS (1)..(2238)
atgaaactttcccggttgccaatccacatttccaagagatttcacacgaaagaatatcgattagcgggtcgagaacaatcagtagcagtggattttgatggaaaaagtggaatcgagctgaaagctggccacctcgcccgttttgcgtcatccaccgtagttgcttcattcggagacaacgccgtgatggctacagtagtacaacggaaatccaagcaaggagatggtagtggagtaccgctacaagttgaatatcgaccgtcagcgtcagcaattggccgaattccaacaaatttcctgcgtcgtgagctcagtcaatctgacaatgaaatcctcatctccagagccattgacaggtcgattagaccacttttacccggaaattcctatgaaactcagataatctgcaaaccactggcgctcgatgagaacgccgaccaaatcatgctgggcatcaacgccgcctcaacggcccttcaaatctcgtcggcggcctacaacggcccgttggcggccctccgagtggcccgtacggcccgtggcgattttcacgtgaatccaacgcaggaagagctccgagaagcttctctaaacctaattgtagccatgcgaaaacacgaaaaaaccgtaatgatcgagcttgacggccgtgagagctctgcggagcacctggagcatgctcttgacgtggcattccgccacgtggcaaagcttcacgaggctatggagcaactgacggcggagcccaaagatgagcttgcttcggaggatttttctggtctcgaacggcttttggaggagaccgcccgtgaacggatctactatgtgatcaccgatgccggccatgacaaaatttccagggatatggaaattaaggcgatttttgaggagatttgtgcggaaaaagcttttcaaacctgcgaaaaagacgcaatctaccgtacctactcgactctcgtcaaaaaagtgctccgcgacaccacactccgtaccggaatccgatgcgacggccgccgccccgacgagttccgcccgatcacaattcacgtggatatgtacaagaagctgcacggatgttcgatcttccaacgtggacagacacaagtcatgtctacagtaacctttgactcgcccgccgccgcttttcaccccgactcggtggctcaactgctcggaagtcagcggaaaaagtcgtttatgctgcactacgagtttcccggatttgcgattaatgaatttgggacaacccgatccctcaatcgtcgtgaaatcggccacggagcccttgcggaaaaatcgctgaaaaacctcttccccgccgatttcccatacgccacacggctcgcatgccaggttttagagtcaaatggctcatcatcaatggcttcagtctgtggtggctcattggctcttttcgacgccggagttcccatgaaaaacgccgctgcgggggtggcaattggcctaatttcagatgaagccgagccggagacgaagtaccgggtgctgacggatattttgggtattgaggattacgctggtgatatggattttaaggttgccggcacccgagacggctttacagccgcccagcttgacgtcaaaaacggcggcctaacccgccgccagctcaccgagagcctccaggccgcccgagccggcatcgaccatgtgctccaaaaaatgagcgtgatgagggatcgtcctcgagagcagtttaagccgactgttccgatcattcaatcgatgaggatagaaccccataaacgggtcacattgttccggaataatgggtacaattgcaagttgatcgaggcggagactggtgttaagatctccgctgaagacgaagctcacatctcactgttggctcaggataaggaaaaactgcaaaaagcaatggatatgatgaatgatgtgctcgagagcaactccacattggatttcgcctttggctccatagttcaggctgaaatcgtggaggtagtcaatgtggtagcgagaaaaattttaaaaaaagagcgaaaaattcgaaatctacgtgccttttcaaaaaaactggaaaaccctacagtaacccggcctacagttccgagcattttgaaaattttgaattttgggtctcgccacgcggggtactgtagcaccggtttcagctgtgtcgaaactcaaaatcgtcggaacataggcatgatgggggtcattcgaaaggtctcgatgaggcgaagtaaatggtag

SEQ ID NO: 1700 - protein, 745 aa, Caenorhabditis elegans
MKLSRLPIHISKRFHTKEYRLAGREQSVAVDFDGKSGIELKAGHLARFASSTVVASFGDNAVMATVVQRKSKQGDGSGVPLQVEYRPSASAIGRIPTNFLRRELSQSDNEILISRAIDRSIRPLLPGNSYETQIICKPLALDENADQIMLGINAASTALQISSAAYNGPLAALRVARTARGDFHVNPTQEELREASLNLIVAMRKHEKTVMIELDGRESSAEHLEHALDVAFRHVAKLHEAMEQLTAEPKDELASEDFSGLERLLEETARERIYYVITDAGHDKISRDMEIKAIFEEICAEKAFQTCEKDAIYRTYSTLVKKVLRDTTLRTGIRCDGRRPDEFRPITIHVDMYKKLHGCSIFQRGQTQVMSTVTFDSPAAAFHPDSVAQLLGSQRKKSFMLHYEFPGFAINEFGTTRSLNRREIGHGALAEKSLKNLFPADFPYATRLACQVLESNGSSSMASVCGGSLALFDAGVPMKNAAAGVAIGLISDEAEPETKYRVLTDILGIEDYAGDMDFKVAGTRDGFTAAQLDVKNGGLTRRQLTESLQAARAGIDHVLQKMSVMRDRPREQFKPTVPIIQSMRIEPHKRVTLFRNNGYNCKLIEAETGVKISAEDEAHISLLAQDKEKLQKAMDMMNDVLESNSTLDFAFGSIVQAEIVEVVNVVARKILKKERKIRNLRAFSKKLENPTVTRPTVPSILKILNFGSRHAGYCSTGFSCVETQNRRNIGMMGVIRKVSMRRSKW

SEQ ID NO: 1701 - DNA, 2154 bp, Ralstonia solanacearum GMI1000
  CDS (1)..(2154): transl_table=11
atgttcaacaagatcgtcaaggaattccagtggggcaaccacaaggtgcgcatggagacgggcgagatcgctcgccaggccagcggcgccgtgctgctcgacatggacgacaccgtggtgctggccaccgtggtgggcgccaagaacgccaagccgggccaggatttcttcccgctgaccgtcgactacatcgagaagacctacgccgccggcaagatcccgggtggcttcttcaagcgtgaaggccgtccgtcggaaaacgagacgctgacctcgcgcctgatcgaccgtccgctgcgtccgctgttcccggaaggcttctacaacgaagtccaggtcgtcatccacgtgctgtcgatcaacccggaagtgccggccgacatcccggcgctggtggccgcttcggccgcgctggccgtgtcgggcctgccgttcaacggcccggtgggcgccgcccgcgtgggttacaaggacggccagtacctgctgaacccgaaccgcgcgcaactggcgcattcggacctggacctggtggttgccggcaccgagcgtgccgtgctgatggtcgaatccgaagccaaccagctgtcggaagaggtgatgctgggcgccgtggtgtacggccatgagcagatgcagatcgccatcaatgcgatccacgacctggtgcgcgacggcggcaagccggagtgggactggcaagcggcgccgaagaacgaagccctggtcgccaaggtgtccgagctgggcttggccgatctgcaagccgcttaccagctgcgccagaagtcggcccgcagccagaagctgaaggaagtctacgcatcggtcgcggccaagctggccgaagccggcgtggaagccgacggcgtggaagtcgacaacatcctgttcgagctcgaatcgaagatcgtgcgcggccagatcctgaacggcgagccgcgtatcgacggtcgcgacacccgcacggtgcgcccgatcgagatccgctcgtcggtgctgccgcgcgcgcacggctcggcgctgttcacgcgcggtgagacgcaagcgctggtggtggccaccctgggcaccaagagcgacgagcagatcatcgacgcgctgcagggcgagtaccgcgaccgcttcatgctccactacaacatgccgccgttcgccaccggcgaaaccggccgcgtgggcagcccgaagcgccgcgaaatcggccacggccgcctggccaagcgcgcgctgatcccggtgctgccgaaggaagacgaattcgcctacacgattcgtctggtgtcggagatcaccgagtcgaacggctcgtcgtcgatggcttcggtctgcggtggctgcctggcgctgatggatgccggcgtgccggtcaaggcgcacgtggccggcgtggccatgggcctgatcctggagggcaacaagttcgccgtgctgaccgacatcctgggcgacgaagatcacctgggtgacatggacttcaaggtggccggtaccgataacggcatcaccgcgctgcagatggacatcaaggtgcagggcatcaccaaggaaatcatgcaggtcgctctggcgcaggccaaggaaggccgtctgcatatcctgggcaagatgcaggccgcgatgggccatgcacgcaccgaactgtcggagcatgcgccgcgcatgatcaccgtcaagatcaatccggagaagatccgcgacgtgatcggcaagggcggctcgaccatccaggcgctgaccaaggaaaccggctgcacgatcgacatccaggaagacggcacgatcaccatcgcgtcgacctcgtccgagggcatggccgaagccaagcgccgcatcgaaggcatcacggccgaagccgaagtgggcaagatctacagcggcaccgtgctcaagctgctggacttcggtgcgatcgtcaacatcctgccgggcaaggacggcctgctgcacatctcggagatcgccaacgagcgcgtcaaccaggtgtcggactacgtcaaggaaggccagatggtgcgcgtgaagctgctgagcaccgacgaaaagggccgcatgcgcctgtcgatcaaggccgccaaggctgaggaaggcgatgtgccggccaccgcgccgcaggcgccgggcgccggcgacgcgacgtcgcagcagcagtaa

SEQ ID NO: 1702 - protein, 717 aa, Ralstonia solanacearum GMI1000
MFNKIVKEFQWGNHKVRMETGEIARQASGAVLLDMDDTVVLATVVGAKNAKPGQDFFPLTVDYIEKTYAAGKIPGGFFKREGRPSENETLTSRLIDRPLRPLFPEGFYNEVQVVIHVLSINPEVPADIPALVAASAALAVSGLPFNGPVGAARVGYKDGQYLLNPNRAQLAHSDLDLVVAGTERAVLMVESEANQLSEEVMLGAVVYGHEQMQIAINAIHDLVRDGGKPEWDWQAAPKNEALVAKVSELGLADLQAAYQLRQKSARSQKLKEVYASVAAKLAEAGVEADGVEVDNILFELESKIVRGQILNGEPRIDGRDTRTVRPIEIRSSVLPRAHGSALFTRGETQALVVATLGTKSDEQIIDALQGEYRDRFMLHYNMPPFATGETGRVGSPKRREIGHGRLAKRALIPVLPKEDEFAYTIRLVSEITESNGSSSMASVCGGCLALMDAGVPVKAHVAGVAMGLILEGNKFAVLTDILGDEDHLGDMDFKVAGTDNGITALQMDIKVQGITKEIMQVALAQAKEGRLHILGKMQAAMGHARTELSEHAPRMITVKINPEKIRDVIGKGGSTIQALTKETGCTIDIQEDGTITIASTSSEGMAEAKRRIEGITAEAEVGKIYSGTVLKLLDFGAIVNILPGKDGLLHISEIANERVNQVSDYVKEGQMVRVKLLSTDEKGRMRLSIKAAKAEEGDVPATAPQAPGAGDATSQQQ

SEQ ID NO: 1703 - DNA, 2142 bp, Agrobacterium tumefaciens str. C58
  CDS (1)..(2142): transl_table=11
atgttcaataaacactccgtggaaatcgaatgggcaggccgcccgttgaagctcgagaccggcaaggttgcccgtcaggctgacggcgccgtcatcgcaacctacggcgagacgatggttctcgcgaccgtggtttccgcaaagtctccgaagcccggccaggacttcttcccgctgaccgtcaactatcaggaaaagacctacgcagccggcaagatccccggtggctatttcaagcgcgaaggtcgtccgtcggaaaaggaaacactggtttcccgcctgatcgaccgtccgatccgcccgcttttccctgaaggttacaagaacgacacgcaggttgtcgtcacggtcattcagcacgatctggaaaatgatccggacgttctgtcgatggttgccgcatccgctgcgctcacactgtccggcattcctttcatgggtccggtcggcggcgcgcgtgttggctacatcaacggcgaatacgttctgaacccgcatctcgacgagatggatgaatcggttctggatctggttgttgccggcacgcaggacgccgtcctgatggtggaatcggaagccaaggaactcaacgaagagatcatgctcggcgccgtcatgttcggccacaagggcttccagccggttatcgacgcgatcatcaagctcgctgaagttgccgccaaggagccacgcgaattcgagccggaggatttctccgcactcgaaaacgaaatgctcggccttgccgaaaccgaactgcgcaccgcctacaagatcaccgaaaaggctgcccgttacgctgccgtcgacgccgtcaagacgaaggtcaaggcgcacttcctgccggaagaaggcgaagcgaagtacagcccggaagaaatcggcgctgtcttcaagcaccttcaggccaagatcgttcgctggaacgttctcgacaccaagagccgcatcgacggccgcgacctgtcgaccgttcgcccgatcgtttccgaagtcggcattctgccgcgcacccacggttcggcgctgttcactcgtggtgaaacgcaggcgatcgttgttgcgacgctcggcacaggcgaagacgaacagtatgtcgatagcctgaccggcatgtacaaggaacgtttcctgctgcattacaacttcccgccctactcggtcggcgaaacaggccgcatgggttccccgggccgtcgcgaaatcggtcacggcaagctcgcatggcgcgctatccgtccgatgctgccgactgcggaacagttcccctacacgctgcgcgtcgtttccgaaatcaccgagtccaacggctcctcgtcgatggcaacggtttgcggcacctcgcttgctctgatggacgccggcgtgccgcttgctaagccggttgccggtatcgccatgggcctgatccttgagggcgagcgctttgcggttctctccgacatcctgggtgacgaagatcacctcggcgacatggacttcaaggttgcgggtacggccgacggcatcacctcgctgcagatggacatcaagattgccggtatcaccgaagagatcatgaagatcgctctggagcaggcacagggtggccgcaagcacatcctcggcgaaatggccaacgccatcaccgagagccgtggccagctcggcgaattcgcaccgcgcatcgaagtcatgaacattccggtcgacaagattcgtgaagtcatcggttcgggcggcaaggtcattcgcgaaatcgtcgaaaagaccggcgccaagatcaacatcgaagacgacggcaccgtcaagatcgcttctgcttccggcaaggaaatcgaagcggcccgcaagtggatccactcgatcgttgcggaaccggaagtcggccagatctacgaaggcactgttgtcaagaccgctgacttcggcgctttcgtcaacttcttcggcgcccgtgacggcctcgtccacatctcgcagctcgcttccgagcgcgttgccaagacctccgacgtcgtcaaggaaggggacaaggtctgggtcaagctgatgggctttgatgagcgcggcaaggttcgcctgtccatgaaggttgtcgaccaggcaaccggcaaggaagtggctgccgacaagaaagacggcgaagccgctgccgaataa

SEQ ID NO: 1704 - protein, 713 aa, Agrobacterium tumefaciens str. C58
MFNKHSVEIEWAGRPLKLETGKVARQADGAVIATYGETMVLATVVSAKSPKPGQDFFPLTVNYQEKTYAAGKIPGGYFKREGRPSEKETLVSRLIDRPIRPLFPEGYKNDTQVVVTVIQHDLENDPDVLSMVAASAALTLSGIPFMGPVGGARVGYINGEYVLNPHLDEMDESVLDLVVAGTQDAVLMVESEAKELNEEIMLGAVMFGHKGFQPVIDAIIKLAEVAAKEPREFEPEDFSALENEMLGLAETELRTAYKITEKAARYAAVDAVKTKVKAHFLPEEGEAKYSPEEIGAVFKHLQAKIVRWNVLDTKSRIDGRDLSTVRPIVSEVGILPRTHGSALFTRGETQAIVVATLGTGEDEQYVDSLTGMYKERFLLHYNFPPYSVGETGRMGSPGRREIGHGKLAWRAIRPMLPTAEQFPYTLRVVSEITESNGSSSMATVCGTSLALMDAGVPLAKPVAGIAMGLILEGERFAVLSDILGDEDHLGDMDFKVAGTADGITSLQMDIKIAGITEEIMKIALEQAQGGRKHILGEMANAITESRGQLGEFAPRIEVMNIPVDKIREVIGSGGKVIREIVEKTGAKINIEDDGTVKIASASGKEIEAARKWIHSIVAEPEVGQIYEGTVVKTADFGAFVNFFGARDGLVHISQLASERVAKTSDVVKEGDKVWVKLMGFDERGKVRLSMKVVDQATGKEVAADKKDGEAAAE

SEQ ID NO: 1705 - DNA, 2145 bp, Brucella melitensis 16M
  CDS (1)..(2145): transl_table=11
atgttcaatacccataaagttgaaatcgaatggggcggacgtccgctcacactcgaaaccggcaagattgcccgtcaggctgacggcgctgttctcgccacctatggcgaaaccgccgttctcgcaactgtcgtttctgccaaggaaccgaagccgggccaggacttcttcccgctgaccgtcaattatcaggaaaagacctatgcagccggcaagattcccggcggctatttcaagcgtgaaggccgtccgagcgaaaacgaaaccctcgtttcgcgcctgatcgaccgtccgatccgcccgcttttcgttgacggctacaagaacgacacgcaggtcgtcattaccgttctccagcacgatctggaaaacaacccggacatcctgtcaatggttgcggcatctgccgccctcaccatttcgggcgtgcctttcatgggtccgatcagcggcgcgcgcgttggttatatcgatggcgaatatgtcctgaacccgaatatcgatgaaatgccggaatccaagctcgatctggtggttgccggtacgtcggaagcggttctgatggtcgaatcggaagcgcaggaactgcccgaagatgtcatgctcggcgccgtcatgtttggccacaagagcttccagccggtgatcgatgcgatcatcaagcttgccgaagttgccgccaaggaaccgcgtgacttccagccggaagacctgtcggaactggaagccaaggtgctggccgttgtggaaaacgacctgcgcgaagcttacaagatcactgaaaagcaggcgcgctacgcagccgttgatgccgccaaggccaaagccgaggaacatttcttccccgaaggcgtggaagaaaccgaaatgtcggcggaacagttcgcgaccattttcaagcatctgcaggccaagatcgttcgctggaacattctcgacacgggcaaccgtatcgatggccgtgacctttcgaccgttcgtccgatcgtttcggaagtcggcatcctgccgcgcacccacggttccgcgctcttcacccgcggtgaaacgcaggccatcgtcgttgccacgctcggcaccggcgaagacgaacagatgatcgatgcgctgacgggaacctacaaggaatccttcatgctgcattacaatttcccgccctattcggtcggtgaaacgggccgcatgggttctccgggccgccgcgaaatcggccatggcaagcttgcctggcgcgcaatccatccgatgctgcctgccgccgaacagttcccctatacgatccgcgctgtttccgaaatcacggaatcgaacggctcttcctcgatggcaaccgtttgcggcacctcgctggcgctgatggatgccggtgtgccgatcgtgcgccccgtcgccggtatcgccatgggtctcatcaaggaaggcgaacgtttcgccgttctttccgacattctcggcgatgaagatcacctcggcgacatggacttcaaggtggccggtaccgaattcggcatcacatcgctacagatggacatcaagatcgacggtatcaccgaagagatcatgaaggtcgctctggaacaggcaaagggtggccgcgttcacattctcggcgaaatggccaaggccatctcctcctcgcgcgctgaactgggcgagtttgccccgcgcatcgaagtgatgaacattccgaccgacaagatccgcgacgtgattggctccggcggcaaggttatccgcgagatcgtggaaaagaccggcgccaagatcaacatcgaggacgatggtacggtcaagatcgcgtcgtcgaacggcaaggaaatcgaagccgccaagaagtggattcactccattgtggctgaaccggaagtcggcgaaatctatgaaggcacggtcgtcaagaccgccgatttcggcgctttcgtgaacttcttcggcccgcgtgacggtctggttcatatctcgcagctcgctgccgaccgtgttgccaagaccaccgatgtggtcaaggaaggccagaaggtctgggtcaagctcatgggcttcgacgaacgcggcaaggttcgcctgtcgatgaaggtcgtcgatcaggaaaccggcaaggaaatcgttgctgaaaagaagaaggaagaagttgacgctgaataa

SEQ ID NO: 1706 - protein, 714 aa, Brucella melitensis 16M
MFNTHKVEIEWGGRPLTLETGKIARQADGAVLATYGETAVLATVVSAKEPKPGQDFFPLTVNYQEKTYAAGKIPGGYFKREGRPSENETLVSRLIDRPIRPLFVDGYKNDTQVVITVLQHDLENNPDILSMVAASAALTISGVPFMGPISGARVGYIDGEYVLNPNIDEMPESKLDLVVAGTSEAVLMVESEAQELPEDVMLGAVMFGHKSFQPVIDAIIKLAEVAAKEPRDFQPEDLSELEAKVLAVVENDLREAYKITEKQARYAAVDAAKAKAEEHFFPEGVEETEMSAEQFATIFKHLQAKIVRWNILDTGNRIDGRDLSTVRPIVSEVGILPRTHGSALFTRGETQAIVVATLGTGEDEQMIDALTGTYKESFMLHYNFPPYSVGETGRMGSPGRREIGHGKLAWRAIHPMLPAAEQFPYTIRAVSEITESNGSSSMATVCGTSLALMDAGVPIVRPVAGIAMGLIKEGERFAVLSDILGDEDHLGDMDFKVAGTEFGITSLQMDIKIDGITEEIMKVALEQAKGGRVHILGEMAKAISSSRAELGEFAPRIEVMNIPTDKIRDVIGSGGKVIREIVEKTGAKINIEDDGTVKIASSNGKEIEAAKKWIHSIVAEPEVGEIYEGTVVKTADFGAFVNFFGPRDGLVHISQLAADRVAKTTDVVKEGQKVWVKLMGFDERGKVRLSMKVVDQETGKEIVAEKKKEEVDAE

SEQ ID NO: 1707 - DNA, 2109 bp, Clostridium perfringens str. 13
  CDS (1)..(2109): transl_table=11
atgaatcatacccatgaaactatcatagcaggaagaccgatgaaagttgagttcgggaaattaggaatgctttcagatgctgctatattaatgagttatggtgatacagtaatattaacaaatgtaaatgcatcagaaaaaccaagagagggaatagactttttcccactaagtgttgaatacgaagagagattatattcagttggtaaaataccaggtggatttataaaaagagaaggaaaaccttcagagaaagctatactaaatggtagagctatagacagacctttaagacctttattcccaaaaggatatagaaatgatgttcaagtagtatgtacagttgtttcagtagaaaatgataaccttcctgaaatactagctataaatgctgcctcaatggcattatgtttatcaagcataccttttactactccagtggctgcagttcaagtaggattaataggagaagaattcatactaaaccctacttcaaaggaaagagaagaaagttcacttcaattaactgtttgcgcaactaaggaaagagttatgatgattgaagctggtggagatgaaatcccagaagatacaatgattaatgctatcaaatttggttttgataagtgtcaagatataataaaattccaagaagaagctgtaagtatgttcggtaaagagaaaaaagtgccagaactacataaagtaccagaagaaatagaagaagctgtaagagaatttgcttttgatatgattagtgagtcaatgcacattactgatagagatgaaagaaatgctgcaatggacgaagttaaagctaaaataaatgaagagttcgaagaaaaatatccagataacatgtctgatattggagaagcagtttatgatatgcaaaaagaagtcgtaagacatatgcttttaaaagaaggaaaaagacctgatggaagagcttttgaccaagtaagaaacattggttgtgaagttggattacttccaagaactcatggaacaggattatttacaagaggacttactcaagtaatgactgttgcaactttaggatcaataagtgaaattcaaatattagatggtattggtgaagaagaatctaagagatatatgcatcactataacttcccagcatacagtgtaggagaagttagaccattaagaggaccaggtagaagagaaattggtcatggagctttagctgaaagagctttagaaccacttataccttcagaagctgagttcccatacacaataagattagtatcagaagtattaagctcaaatggatctacttcacaggcttcagtttgtggtagtacattagcgcttttagatgctggggttccaataaagagaccagcagcaggtatagctatgggattaataacttcaaaagatttaactgaggaagaagttttaactgatatccaaggtttagaagatttctttggagatatggactttaaagtagctggaacagaagagggaataacttcaattcaagtagatactaaaataaaaggtctatcagaaaaagttatacacgatgctatatatggagcaagaaaagcaagattaatgatcttagataagattaaagaatgcataccagctccaagagaagaagtttcaaaatatgcacctaaaacatcaactctacaaatagatcctgagaaaatcagagatgtaattggggctggtggaaaagttataaacaagattatagctgatactggtgttaaaatagatataaaagaagatggattagtttatgtttcatcagctgaatcagaaggtgttaaagaagctgttaaaataatagaaggtttaactaaagaggttaaagctggagaaatttatttaggtaaagttacaaaaattgctcaatttggtgcctttgttgaggtattacctaataaagaaggattagttcatatttctaagttagataataagagagtagaaaaagttgaggatgtagtatctgttggagatgaaatcttagttaaggtaacagaaatagattctcaaggtagaataaatctttcaagaaaagatgcaataaaagaagctgaagaagaaaataaacagcaatag

SEQ ID NO: 1708 - protein, 702 aa, Clostridium perfringens str. 13
MNHTHETIIAGRPMKVEFGKLGMLSDAAILMSYGDTVILTNVNASEKPREGIDFFPLSVEYEERLYSVGKIPGGFIKREGKPSEKAILNGRAIDRPLRPLFPKGYRNDVQVVCTVVSVENDNLPEILAINAASMALCLSSIPFTTPVAAVQVGLIGEEFILNPTSKEREESSLQLTVCATKERVMMIEAGGDEIPEDTMINAIKFGFDKCQDIIKFQEEAVSMFGKEKKVPELHKVPEEIEEAVREFAFDMISESMHITDRDERNAAMDEVKAKINEEFEEKYPDNMSDIGEAVYDMQKEVVRHMLLKEGKRPDGRAFDQVRNIGCEVGLLPRTHGTGLFTRGLTQVMTVATLGSISEIQILDGIGEEESKRYMHHYNFPAYSVGEVRPLRGPGRREIGHGALAERALEPLIPSEAEFPYTIRLVSEVLSSNGSTSQASVCGSTLALLDAGVPIKRPAAGIAMGLITSKDLTEEEVLTDIQGLEDFFGDMDFKVAGTEEGITSIQVDTKIKGLSEKVIHDAIYGARKARLMILDKIKECIPAPREEVSKYAPKTSTLQIDPEKIRDVIGAGGKVINKIIADTGVKIDIKEDGLVYVSSAESEGVKEAVKIIEGLTKEVKAGEIYLGKVTKIAQFGAFVEVLPNKEGLVHISKLDNKRVEKVEDVVSVGDEILVKVTEIDSQGRINLSRKDAIKEAEEENKQQ

SEQ ID NO: 1709 - DNA, 2262 bp, Corynebacterium glutamicum ATCC 13032
  CDS (1)..(2262): transl_table=11
atgagcgatgtaaagtacttcgaagacaccgaatttggcctgatcgaggccgtcgcaaccatcgacaacggtgacttcggaacccgcaccatccgttttgaaaccggccaacttgcccgccaggcagatggtgcagtgaccacctacctcgacgatgacacgatgctgctggcaaccaccaccgcatccaaccagccacgcgagggctttgacttcttcccactgaccgtggacgttgaagagcgtatgtacgcagctggtcgcatccctggctctttcttccgtcgggagggtcgcccatccaccgaagctatcctggcttgccgtctcatcgaccgcccactgcgcccaacctttgttaagggcctgcgcaatgaggttcagatcgttgtcaccgtcatgtccatgaaccctgaggattactacgatgtcgtagcaatcaacggagcttccgcagcaacccgcatctccggacttcctgtctccggcgctgtcggtggcgttcgcatggcactggttgttgatgaaaagcacccagaaggccaatgggttgcattcccaacccacgctcaacatgagcagtccgtatttgaaatcgttgtggctggtcgcctcgtcgagcgcaagcgcggcaacaagaccttctccgacgtcgcagtgatgatggtggaagctggcgcttccgaaaacgttgtcaaccgcgtcaaggacggtgcaccagcaccaaccgaaaagatcgtctccgacggccttgaagcagctaagccattcatcgacatcctgtgccgcgcacaggaaggtctggcacagcgcgttggaaacgcagccaaggaattcccactgttccctccatacaccgacgaggtgtactccgcagtggagcgcaaggtatccaagaagctagcttctttgctgaccctgaaggcaaagcaagagcgcgacgacgctaccaacgcctacatggaagaaatcgaagccgaactgcttccaaagttcgaggcttcctacagctcagcagctgaagcgtccaaggaaatccgtgcaggatacaacgctgtcatgaaggccatcgtgcgccgcatgatcctcaccgatcacttccgcatcgacggccgcggagtcaccgacatccgtgacctggcagtagaagttgagctcatcccacgtgcgcacggttcctccctcttcgagcgtggcgagacccagatccttggtgtcaccaccctggacatgctcaagatggaacagcaaatcgactccctggcaccaggcgatgcgaagcgctacatgcaccactacaacttccctccatactccaccggtgaaaccggacgtgtgggctcaccaaagcgccgcgaaatcggccacggtgcacttgcagaacgcgcagttttgccagtaatcccatcccgtgaggaattcccatacgcaatccgtcaggtctctgaagctctgggctccaacggctccacctccatgggctctgtctgtgcatccactctgtccctgtacaacgctggtgttccactgaaggcacctgttgcaggtatcgccatgggacttgtttccggtgaaatcgacggcaagaccgagtacgttgcactgaccgacatcctcggcgcagaagacgcattcggcgacatggacttcaaggttgccggcaccgcagacttcatcaccgcacttcagctggacaccaagctggacggcattccttccaaggtgctctccgatgcgcttgagcaggcacgcgatgcccgactgaccatcctgaacaccatggctgatgtcatcaacggacctgatgagatgagcaagttcgctcctcgcatcaccaccgtgaagatcccagtggcaaagatcggtgagctgatcggaccaaagggtaagaacatcaacgctcttaccgaagagaccggcgcaaacatctccatcgaagatgacggcaccgtgttcatctctgcagctgacggcgcatctgctgaagcggcgatcgaaaagatcaacgctctggcgaacccacagctgccaaaggttggcgagcgcttcctcggaaccgtcgtcaagaccaccgcattcggagcattcgtttccttgctcccaggccgcgacggccttgttcacatctccaagctgggtaacggcaagcgagtagaaaaggtcgacgatgtggtgaaggttggcgagaagattcaggtcgaaatcgctgacatcgacaaccgcggcaagatctccttggtcccagttgttgaagaggactaa

SEQ ID NO: 1710 - protein, 753 aa, Corynebacterium glutamicum ATCC 13032
MSDVKYFEDTEFGLIEAVATIDNGDFGTRTIRFETGQLARQADGAVTTYLDDDTMLLATTTASNQPREGFDFFPLTVDVEERMYAAGRIPGSFFRREGRPSTEAILACRLIDRPLRPTFVKGLRNEVQIVVTVMSMNPEDYYDVVAINGASAATRISGLPVSGAVGGVRMALVVDEKHPEGQWVAFPTHAQHEQSVFEIVVAGRLVERKRGNKTFSDVAVMMVEAGASENVVNRVKDGAPAPTEKIVSDGLEAAKPFIDILCRAQEGLAQRVGNAAKEFPLFPPYTDEVYSAVERKVSKKLASLLTLKAKQERDDATNAYMEEIEAELLPKFEASYSSAAEASKEIRAGYNAVMKAIVRRMILTDHFRIDGRGVTDIRDLAVEVELIPRAHGSSLFERGETQILGVTTLDMLKMEQQIDSLAPGDAKRYMHHYNFPPYSTGETGRVGSPKRREIGHGALAERAVLPVIPSREEFPYAIRQVSEALGSNGSTSMGSVCASTLSLYNAGVPLKAPVAGIAMGLVSGEIDGKTEYVALTDILGAEDAFGDMDFKVAGTADFITALQLDTKLDGIPSKVLSDALEQARDARLTILNTMADVINGPDEMSKFAPRITTVKIPVAKIGELIGPKGKNINALTEETGANISIEDDGTVFISAADGASAEAAIEKINALANPQLPKVGERFLGTVVKTTAFGAFVSLLPGRDGLVHISKLGNGKRVEKVDDVVKVGEKIQVEIADIDNRGKISLVPVVEED

SEQ ID NO: 1711 - DNA, 2112 bp, Fusobacterium nucleatum subsp. nucleatum ATCC 25586
  CDS (1)..(2112): transl_table=11
gtgaaagaattaatgtttgatgaaaaaattatggagctagaactcgctggaagaactttaaaagtttcaactggtaaaatttctagacaatctagtggagctattgtaattcaatatggagatacagttcttctatctactgctaaccgtagtaaagaagcaagaaaaggtgcagactttttcccattaactgttgactatatagaaaaattttattcaagtggtaaatttccaggaggatttaacaaaagagaaggaagaccttcaacaaatgccacattggtagcaagacttattgatagaccaataagaccgatgtttccagatggatttaactatgatgtacatatagttaatactgttttatcttatgacgaaataaatatacctgactatttaggtgtaattggttcatctcttgcacttatgatttctgatattccattcttaggacctgttgcaagtgtaatagttggatataagaatggtgaatttattttaaatccttctccaaaagaattggaagaaagtgaacttgatttaatcgttgctggaacaaaagaagctgtaaatatggttgaagcaggggcaaaagaattagatgaagaaactatgttaaaagcaattatgtttgcacatgaaaatattaaaaagatttgtgaattccaagaagaattctctaaattatatggaaaagaaaatatagagtttgaaaaaccagaagtattaactcttgttaaagatttcattgacactaatggatatgaaagattacaacaagctgttttaactactggtaaaaagaatagagaagacgctgttgactcattagaagaagaattgatggaaaaatttatacaagaaaattatcctgatgttccagaagaagaattaccagaagatataatattagaatttaaaacttactatcatgatttaatgaaaaaattagttagagaagctattctttatcataaacatagagttgatggaagaacaaccactgaaataagaccattagatgctcaaataaatgtattacctattcctcatggttcagcattatttacaagaggagaaactcaatctcttgcaattacaacattaggaactaaagaagatgagcaattaatagatgatttagaaaaagaatattataaaaaattctatttacactataacttccctccatattcagttggagaagttggaagaatggggtctcctggaagaagagaattaggacatggttcacttgccgaaagagctttaagctatgttattcctactgaagaagaattcccttacactataagagttgtatctgaaataactgaatctaacggttcatcatcacaagcttctatctgtggtggttcattatcacttatgtcagctggtgtccctataaaagaacatgttgctggtatagcaatggggcttattaaagaaggagaagaatttacagttctaacagatataatgggactagaagaccacttaggagatatggacttcaaagttgctggtacaaaatctggaattacagctttacaaatggatattaaaattacaggtataacagaagaaattatgagaattgctttaaatcaagctcatcaagctagaattcaaatattagagcttatgaataatacaatttctaaacctgctgaattaaaatctaatgtacctagaatacaacaaattactattccaaaagataagattgcagctcttattggaccaggtggaaaaaatattaaaggtatcatagaacaaacaggagctactgttgatataactgatgatggacttgtatctgtctttgcaaaagatgctgatacattagaaaaaactttaaaactggtagattcttttgtaagagaagttgagtacaatgaagtttatgaagggcgtgtagtttctattatgaaatttggtgcatttatggaaattctacctggaaaagaaggtttacttcatatttctgaaatttcaccagaaagagttgaaaaagttgaagatgtactttcagttggagatgtatttaaggtaagagttatttctatggaaggtggaaaaatctctttaagtaaaaaaaaggtttaa

SEQ ID NO: 1712 - protein, 703 aa, Fusobacterium nucleatum subsp. nucleatum ATCC 25586
MKELMFDEKIMELELAGRTLKVSTGKISRQSSGAIVIQYGDTVLLSTANRSKEARKGADFFPLTVDYIEKFYSSGKFPGGFNKREGRPSTNATLVARLIDRPIRPMFPDGFNYDVHIVNTVLSYDEINIPDYLGVIGSSLALMISDIPFLGPVASVIVGYKNGEFILNPSPKELEESELDLIVAGTKEAVNMVEAGAKELDEETMLKAIMFAHENIKKICEFQEEFSKLYGKENIEFEKPEVLTLVKDFIDTNGYERLQQAVLTTGKKNREDAVDSLEEELMEKFIQENYPDVPEEELPEDIILEFKTYYHDLMKKLVREAILYHKHRVDGRTTTEIRPLDAQINVLPIPHGSALFTRGETQSLAITTLGTKEDEQLIDDLEKEYYKKFYLHYNFPPYSVGEVGRMGSPGRRELGHGSLAERALSYVIPTEEEFPYTIRVVSEITESNGSSSQASICGGSLSLMSAGVPIKEHVAGIAMGLIKEGEEFTVLTDIMGLEDHLGDMDFKVAGTKSGITALQMDIKITGITEEIMRIALNQAHQARIQILELMNNTISKPAELKSNVPRIQQITIPKDKIAALIGPGGKNIKGIIEQTGATVDITDDGLVSVFAKDADTLEKTLKLVDSFVREVEYNEVYEGRVVSIMKFGAFMEILPGKEGLLHISEISPERVEKVEDVLSVGDVFKVRVISMEGGKISLSKKKV

SEQ ID NO: 1713 - DNA, 2133 bp, Streptococcus pyogenes MGAS8232
  CDS (1)..(2133): transl_table=11
atgtcaaaacaaacctttacaacaacatttgcagggaaaccccttgttgttgaagttggtcaagtcgctaagcaagccaatggggcaaccgttgttcgttacggagaatcaactgtcctgaccgcagctgtcatgtctaagaaaatggcaacgggtgatttcttccctcttcaagttaattacgaagaaaaaatgtatgccgctggtaaattcccaggaggtttcatgaagcgtgagggacgcccttcaacagatgcgaccttgacagctcgcttgattgaccgtccgattcgtcccatgtttgccgaaggtttccgtaacgaagtacaagtgattaacactgttctttcttatgatgaaaatgctagcgctccaatggcagcgatgtttggctcatctctggccttgtccatctcagatattccatttaatggaccgattgcaggtgttcaagttggctatattgatggcgagttcatcatcaacccagataaagaacaaatggaagcgtcactcttagaattaaccgttgctggtagcaaagaagccatcaatatggttgagtctggtgccaaagaattatcagaagacatcatgcttgaggctcttttaaaaggtcaccaagccattcaagaattgattgccttccaagaacaaatcgtagccgttgttggtaaagaaaaagctgaggttgaactgttacaggttgatgcagacttacaagctgatattgtggctaagtacaatgctcaactgcaaaaagctgttcaagttgaagagaaaaaagcgcgtgaagcagccacagaagctgttaaagaaatggttaaggctgaatatgaagagcgttacgcagaagacgaaaacctagcaaccattatgcgtgacgtggcagaaatccttgaacaaatggagcatgctgaagtacgtcgcctcattacagaagacaagattcgtcctgacggtcgtaagattgacgaaattcgtccgcttgatgctgtggttgacttcttgccaaaggtccatggatcaggtctttttacgcgcggtcaaacgcaggccttgtcagttttgactttggcgccaatgggagaaactcaaatcattgatggtctggctccagagtacaaaaaaagctttttacaccactacaatttcccacaatattcagttggtgaaactggtcgttacggagctgctggtcgtcgtgaaattggacacggtgccttaggtgaacgcgctcttgaacaagtcttgccaagcttagaagaatttccttatgctattcgtttagttgccgaagttctagaatctaacggttcgtcttctcaggcttctatctgtgctggtacccttgctctgatggctggtggtgtaccaatcaaggctcctgtggcagggattgccatgggtctcatttcagacgggacgaattatactgtcttgactgacattcagggtcttgaagaccactttggagatatggactttaaagtggcaggaactcgtgaagggattacagcccttcaaatggatattaagattgcagggattacgcctcaaatcctagaagaagctcttgcacaagctaaaaaagctcgctttgaaatccttgatgtgattgaagcaactatcgctgaaccacgtcctgagttagccccaactgcaccgaaaattgacaccatcaagattgacgtagacaaaatcaaagtggttatcggtaaaggtggcgaaactattgacaagattattgccgaaacgggcgtcaaaattgatattgacgacgaaggaaatgtctctatctactcaagtgaccaagctgccattgaccgcactaaagaaattattgcaggtcttgttcgtgaagccaaggtaggcgaagtttaccatgccaaggttatccgtatcgagaaatttggtgcctttgtcaacctctttgacaagacagatgcacttgttcacatttctgaaattgcttggactagaacgaccaacgtgtcagatgtccttgaagtgggtgaagacgttgatgttaaggtcattaagattgatgagaaaggtcgtgtggatgcctcaatgaaagctttgattccacgcccaccaaaaccagagaaaaaagaagaaaaacatgactaa

SEQ ID NO: 1714 - protein, 710 aa, Streptococcus pyogenes MGAS8232
MSKQTFTTTFAGKPLVVEVGQVAKQANGATVVRYGESTVLTAAVMSKKMATGDFFPLQVNYEEKMYAAGKFPGGFMKREGRPSTDATLTARLIDRPIRPMFAEGFRNEVQVINTVLSYDENASAPMAAMFGSSLALSISDIPFNGPIAGVQVGYIDGEFIINPDKEQMEASLLELTVAGSKEAINMVESGAKELSEDIMLEALLKGHQAIQELIAFQEQIVAVVGKEKAEVELLQVDADLQADIVAKYNAQLQKAVQVEEKKAREAATEAVKEMVKAEYEERYAEDENLATIMRDVAEILEQMEHAEVRRLITEDKIRPDGRKIDEIRPLDAVVDFLPKVHGSGLFTRGQTQALSVLTLAPMGETQIIDGLAPEYKKSFLHHYNFPQYSVGETGRYGAAGRREIGHGALGERALEQVLPSLEEFPYAIRLVAEVLESNGSSSQASICAGTLALMAGGVPIKAPVAGIAMGLISDGTNYTVLTDIQGLEDHFGDMDFKVAGTREGITALQMDIKIAGITPQILEEALAQAKKARFEILDVIEATIAEPRPELAPTAPKIDTIKIDVDKIKVVIGKGGETIDKIIAETGVKIDIDDEGNVSIYSSDQAAIDRTKEIIAGLVREAKVGEVYHAKVIRIEKFGAFVNLFDKTDALVHISEIAWTRTTNVSDVLEVGEDVDVKVIKIDEKGRVDASMKALIPRPPKPEKKEEKHD

SEQ ID NO: 1715 - DNA, 2124 bp, Thermoanaerobacter tengcongensis MB4
  CDS (1)..(2124): transl_table=11
atggaagaacgaacttttgaaatggaactagcaggcaggaagcttgtagtccagaccgggaaagtggcacagcaggccaatggagcagcatgggtgaaatacggcgatacagttgtgctggttactgcctgtgcttcaaaagagccgagagaaggaattgactttttccccttgacggttgaatacgaagagagattgtattccattgggaaaattcccggcggttttatcaaaagagaggggaagcccagcgaaaaagctattttatcagctcggttaatagatagacctataaggcctctattcccagaaggatacagaaatgacgtgcaggtcatagctactgtgttatcagtggaccctgatgcgcagccagaaattgtagctatgataggttcttctgttgcgctctctatatccgacataccctttaacggccccacaggttctgtggcagtaggcctggtggacggaaagtttgtcataaatcccacctatgagcagagagaaaagagcttaatgcacttagtagtttctggaacaaaagatgcaattgtaatggtggaagctggagcgaaagaagtgcctgaggagacaatacttgatgcgatagtgtatgctcatcaatatataaaacagattgtagaatttatagaagggattgtaaaagaagtaggagttcctaaggcagaagtcgtactgcacgaaattgacaaggagctggaggaaaaagtaagagcatatgctacagagaaaatatataacgctttaagaactcctgaaaagaaagagagaaatgacaacttagacaaggtagaacaggaagtacttgagcactttaaagatgagtaccccgataatctagcagatattgacgaagtcctctacaaaataatgaaagaacagatgagaaagatgataaaggaagaaaagataagggtagatggaagagggcttgacgatataaggccgatatggtgcgaagtaggagtactgccaagaactcacggttctgctatttttacaagaggacaaactcaagtgctcacagtagctactcttggagcaataggtgatatacagattttagaaggaattggagatgaagaattcaagcgttacatgcaccattacaacttcccaccctatagtgtaggagaagtaaggccactgagaggccctggaagaagggaaattggacacggagccttggcagaaagggcactagaaccagtaattccttctgaagaagaattcccatacacaatacgcttagtgtctgaagtattgagctctaacggttctacatcacaggcgagtgtgtgcggaagcactttggctttgatggacgcgggagtgccaatcaaagcaccggttgctggaattgcaatgggactcataaaagaagaagatgaagtactaattctgactgatatacagggaattgaggacttcctcggagacatggactttaaagtagctggaacagaaaaaggcgtaactgctattcagatggatatcaaaatacctggcattgatagagatatcctgcaaatggctttggaaaaggcaaggaaggcgagactatacgtgctccaaaagatgctggaagtcataaaagaaccgaggaaagaactctccaagtatgctcctagagtagtgagaatggtagtcaaccctgaaaagataagagatatcataggccctgcaggaaagactatcacaaagatcatatctgagacaggtgtcaaaatcgacatagaagaagacggtcgactgtatataacagctcctaaccttgaggccggcgaaagagctaaacagatgattgaagctataacaaaggacatagaagttgggggaatctatttaggaaaagtgttgagaatcgcgccttttggagcttttgtagagatcgccccaggtaaagaaggattagttcacatttctaacttgtccaaaaagagagtccgccgggtagaagacgtagtaaaagtgggagacaatatattggttaaggtaacagaaattgacaaactcggaagaattgtattgtctcgcaaagacgctatgcctgatgaagaagaaagtgataacaggaaaagtgataatagaaaaaagtaa

SEQ ID NO: 1716 - protein, 707 aa, Thermoanaerobacter tengcongensis MB4
MEERTFEMELAGRKLVVQTGKVAQQANGAAWVKYGDTVVLVTACASKEPREGIDFFPLTVEYEERLYSIGKIPGGFIKREGKPSEKAILSARLIDRPIRPLFPEGYRNDVQVIATVLSVDPDAQPEIVAMIGSSVALSISDIPFNGPTGSVAVGLVDGKFVINPTYEQREKSLMHLVVSGTKDAIVMVEAGAKEVPEETILDAIVYAHQYIKQIVEFIEGIVKEVGVPKAEVVLHEIDKELEEKVRAYATEKIYNALRTPEKKERNDNLDKVEQEVLEHFKDEYPDNLADIDEVLYKIMKEQMRKMIKEEKIRVDGRGLDDIRPIWCEVGVLPRTHGSAIFTRGQTQVLTVATLGAIGDIQILEGIGDEEFKRYMHHYNFPPYSVGEVRPLRGPGRREIGHGALAERALEPVIPSEEEFPYTIRLVSEVLSSNGSTSQASVCGSTLALMDAGVPIKAPVAGIAMGLIKEEDEVLILTDIQGIEDFLGDMDFKVAGTEKGVTAIQMDIKIPGIDRDILQMALEKARKARLYVLQKMLEVIKEPRKELSKYAPRVVRMVVNPEKIRDIIGPAGKTITKIISETGVKIDIEEDGRLYITAPNLEAGERAKQMIEAITKDIEVGGIYLGKVLRIAPFGAFVEIAPGKEGLVHISNLSKKRVRRVEDVVKVGDNILVKVTEIDKLGRIVLSRKDAMPDEEESDNRKSDNRKK

SEQ ID NO: 1717 - DNA, 2115 bp, Xanthomonas axonopodis pv. citri str. 306
  CDS (1)..(2115): transl_table=11
gtggcaaaaatcaccaaaaccttccagtacggcaagcacaccgtcactcttgagacgggcgaaatcgctcgccaggcaggcggcgccgtgatcgtcaaggtcgacgacaccgtactgctggtcaccgccgtcgccgccaagagcgcgcgcgaagggcaggacttctttcctctgacggtcgattatcaggagaagttctacgctggcggccgcatcccgggcggcttcttcaagcgcgaaggacgcgcgaccgagaaggaaacgttgatctcgcgcctgatcgatcgtccgatccgtccgctgttcccggaggactacaagaacgaagtgcagatcatcgccaccgtgatgtcgatgaacccggacatcgacggcgatatcgccgcgctgatcggcgcctcggctgcactgtcgctggcaggcactcccttcaagggcccgatcggcgccgccaaggtcggctacaagaacggcgaatacatcctcaacccgaccgtgaccgagctgaaggattcgcagctggagttggtcgtggccggtaccgccaacgcggtgctgatggtcgagtccgaagccgagttgctgtccgaagaagtcatgctgggcgcagtgacgttcggccatcgcgagatgcagaaggtcatcaacgtcatcaacgagctgaccgtcgaggccggcaccaagccgtccgactgggtggccccggcgaagaacgacggcatgatcgctgccctgaaggaagcggtgggcgaccagctggcgtcggcgttccaggtgcgcgacaagctgcagcgccgcgatgcgatttccgcgatcaagaaggacgtgctgggcgcactggcgccgcgcgccaccatcgaaggctgggctgccggtgatctggccaaggaattcggcgagctggaataccagaccatgcgtggttcggtgttgagcaccaaggtgcgtatcgacggtcgtgcactggataccgtgcgtccgatcagcgccacggccggtgtgttgccgcgtacccatggctcggcgctgtttacccgcggcgagacgcaggcgatcgtgatcaccacgctgggcaccgcgcgcgacggtcaggtcatcgacgcggtgtcgggcgagtacaaggaaaatttcctgttccattacaacttccctccgtactcggtgggcgagtgcggtcgtttcggtgcgccgaagcgtcgcgaaatcggccacggccgcctggccaagcgcggcgtgctggcagtgatgccgaccctggaagaattcccgtacaccatccgcgtggtctcggaaatcaccgaatccaacggttcgtcctcgatggcatcggtctgcggcagctcgctggcgctgatggatgctggcgtgccgatcaaggcgccggtcgcgggtatcgcaatgggcctggtcaaggaaggcaacgacttcgtcgtgctctccgacatcctgggtgacgaagatcacctcggcgacatggacttcaaggtggccggtactgccgaaggcgtgtccgccctgcagatggacatcaagatcgaaggcatcaccgaagagatcatgaagcaggcattgcagcaggccaaggctggccgtctgcacatcctgggcgagatggcgcatgcgctgaccaccccgcgtcaggagctgagcgactacgcgccgcgcctgctcaccatcaagatccacccggacaagatccgcgaagtgatcggcaagggtggctcgaccatccaggccatcaccaaggaaaccggcacgcagatcgacatccaggacgatggcacgatcatcatcgcctcggtcaatgccatcgctgcgcaggctgcgaagtcgcgcatcgaacagatcacctcggacgtggagccgggccgcatctacgaaggcaaggtcgccaagatcatggacttcggtgcgttcgtcaccatcctgccgggcaaggacggcctggtgcacgtctcgcagatttccagcgagcgcgtggagaaggtcggcgacaagttgaaggaaggcgatctggtccgcgtcaaggtgctggaagtggacaagcagggccgcatccgcctgtcgatcaaggcagtggaagaaggcgaaggcgtgcaggcgtcggccgagtaa

SEQ ID NO: 1718 - protein, 704 aa, Xanthomonas axonopodis pv. citri str. 306
MAKITKTFQYGKHTVTLETGEIARQAGGAVIVKVDDTVLLVTAVAAKSAREGQDFFPLTVDYQEKFYAGGRIPGGFFKREGRATEKETLISRLIDRPIRPLFPEDYKNEVQIIATVMSMNPDIDGDIAALIGASAALSLAGTPFKGPIGAAKVGYKNGEYILNPTVTELKDSQLELVVAGTANAVLMVESEAELLSEEVMLGAVTFGHREMQKVINVINELTVEAGTKPSDWVAPAKNDGMIAALKEAVGDQLASAFQVRDKLQRRDAISAIKKDVLGALAPRATIEGWAAGDLAKEFGELEYQTMRGSVLSTKVRIDGRALDTVRPISATAGVLPRTHGSALFTRGETQAIVITTLGTARDGQVIDAVSGEYKENFLFHYNFPPYSVGECGRFGAPKRREIGHGRLAKRGVLAVMPTLEEFPYTIRVVSEITESNGSSSMASVCGSSLALMDAGVPIKAPVAGIAMGLVKEGNDFVVLSDILGDEDHLGDMDFKVAGTAEGVSALQMDIKIEGITEEIMKQALQQAKAGRLHILGEMAHALTTPRQELSDYAPRLLTIKIHPDKIREVIGKGGSTIQAITKETGTQIDIQDDGTIIIASVNAIAAQAAKSRIEQITSDVEPGRIYEGKVAKIMDFGAFVTILPGKDGLVHVSQISSERVEKVGDKLKEGDLVRVKVLEVDKQGRIRLSIKAVEEGEGVQASAE

SEQ ID NO: 1719 - DNA, 2316 bp, Drosophila melanogaster
  CDS (1)..(2316)
atggccatgattttcacacggaaatcgctgaagctgctcaactatcgcctcaaatgcctaagtttgtcctgcccaggaggaaggagaggaatccaaagcagttccaacggagaagcgccctccgtggaagtcaacttcagcaatggacgtaacatgaccttcagttccggccgcctggcgagatttgcgaatggaacagctgtgtgccaaatgggcgataccgccgtcatggtcaccgcggtggccaaggcgaagccaaatcccggccagggattcatgcctctggtggttgactaccgactgaaaaacgccgcctctggcagaatacccatgaactttatgcgccgcgaactgggcccctcggaaaaagagatcctgtccgcccgccttatcgaccgttcgctacgcccgctcttccacaaagattatcgcacggagacacagctggtgtgcaacatgttggctatggacgcggtgcacagtccggatgtgcttgcaatcaatgccgcttccatggcgctatctctaagtgacattccctggaatggacccattggagctgtgcgcgttggcctctgcgacggcgaggtgctgatcaaccccacgcgccgggagctgcagacttcgcaactggatttggtagtctccgccaccaaacaaaacctcgtcgttatgttggagggcaaggggaatgtggttcttcagcaggaccttctaaaggctatcaaacaagggactcgtgaggcccaattcattatccacgagatcgagcgactgcagaaggcctatggtcgacagaagcgcgaagtggaagtggctgccgaagtagatcccgaactggggaaagccgttcgtagcatgtgcgaaatgcggctgagagagatcttccaggattcgacgcacgacaagatgtctcgtgacaatgcggttaacgaggtgcgctccaacgttattgacaaggtgtggagttcgtttccggataccgaaccgtcgcttattaccgagcagttcaaccagaccagtagaaccatttttcgcgaactgatctttgagcggggtctgcgttgcgatggacgagattacgaccagctgaggaacatctcctgccaggtggacatgtacaagcctctccacggatccgccctattccagcgcggtcagacgcaggtcttctgcacggttagcttggactcgcaggaaagcgcaatgaaacttgactcgttggctgctttagatagcggtggcctgaaggccaagaactttatgctgcactatgagttcccgccctatgccacgggtgaagtgggtcggattggtccagtgggtcgccgggaaatgggccacggagccttggcggagagatcgttgcttcccaccctgccgaatgattatccctttaccgtaagactcacctctgaagtcctggaatccaatgggagcagtagcatggccagcgtttgcggtggctccttggcccttatggacgccggcgttccagtgagcgcacctgcggcaggtgtggccattggcctggtcacaaagttcgagaacgacgacactaagcacctgcaggactaccgcattctcaccgacatcctgggcatcgaagattacatgggcgacatggacatgaaggtggctggcacgagaaaaggcttcaccgccatccaggcggacctcaagatcccgggaattcctcttaaggttgtgatggaatcgctacaaaaggccaccgatgccaaatctaatattctggacatcatgagtgaggctattagggaacctcgaaaataccccaaggagagctggccagtgagtgaaaccctaactgtagagccgcaacagagggcgcagttaattggtcccagcggccttcacatgaagcggatttacttggaaacgggcacctccctaacagcagtcgatgagacccatttcaatgtttttgctccttcgcaagcagccatggatgaggccaaggagctgatcgagggctacatggtgaaggaacgagtgccggacctggagttcggcggaatctacactgccaaaatcaccgaattgcgagacaccggagtaatggtcatcctctatcccagtatgccacccgctttgctgcacaactcgcagctggatcagcgcaagatagcccatccctctgccctaaacctggaagtgggtcaggagatccaggtcaagtactttggccgcgatcccgtctccggctttatgcgtctttcgcgaaaggttctccaagggcccgccctgggaatcccccgttcgctcaacaaatctgccggagagagcggaacgtga

SEQ ID NO: 1720 - protein, 771 aa, Drosophila melanogaster
MAMIFTRKSLKLLNYRLKCLSLSCPGGRRGIQSSSNGEAPSVEVNFSNGRNMTFSSGRLARFANGTAVCQMGDTAVMVTAVAKAKPNPGQGFMPLVVDYRLKNAASGRIPMNFMRRELGPSEKEILSARLIDRSLRPLFHKDYRTETQLVCNMLAMDAVHSPDVLAINAASMALSLSDIPWNGPIGAVRVGLCDGEVLINPTRRELQTSQLDLVVSATKQNLVVMLEGKGNVVLQQDLLKAIKQGTREAQFIIHEIERLQKAYGRQKREVEVAAEVDPELGKAVRSMCEMRLREIFQDSTHDKMSRDNAVNEVRSNVIDKVWSSFPDTEPSLITEQFNQTSRTIFRELIFERGLRCDGRDYDQLRNISCQVDMYKPLHGSALFQRGQTQVFCTVSLDSQESAMKLDSLAALDSGGLKAKNFMLHYEFPPYATGEVGRIGPVGRREMGHGALAERSLLPTLPNDYPFTVRLTSEVLESNGSSSMASVCGGSLALMDAGVPVSAPAAGVAIGLVTKFENDDTKHLQDYRILTDILGIEDYMGDMDMKVAGTRKGFTAIQADLKIPGIPLKVVMESLQKATDAKSNILDIMSEAIREPRKYPKESWPVSETLTVEPQQRAQLIGPSGLHMKRIYLETGTSLTAVDETHFNVFAPSQAAMDEAKELIEGYMVKERVPDLEFGGIYTAKITELRDTGVMVILYPSMPPALLHNSQLDQRKIAHPSALNLEVGQEIQVKYFGRDPVSGFMRLSRKVLQGPALGIPRSLNKSAGESGT

SEQ ID NO: 1721 - DNA, 2202 bp, Chlorobium tepidum TLS
  CDS (1)..(2202): transl_table=11
atgtttatcaaaaaaaagatcgatcttggacacggtaaggtaatcacgatcgaaaccggaaaaatggccaaacaggccgacggctcggcggtcgtcacaatgaacgacaccatggtgctcgccacggtggtttcaagcaaaacacctccgtcgccgaatcaggacttcttcccgctccaggtcgaataccgcgaaaaatattccgcagccggcaagttccccggaggcttcttcaagcgcgaaggccgcccctccgaaaaggagattctctccgcccgcctgatcgaccgcgccctgcgcccgctcttccctgacggttactatcaggagacccagatcatcatctcggtcatctcctccgacacgatcaatgacgccgacgtgcttggcggcatcgccgcttcagccgccatcatggtctccgacattccgttcgccaacccgatgtccgaggttcgcgtcgggcgcatcaacggactcttcatcgtcaaccccgacatcaacgagctggcgcaaagcgacatggacatctgcatcggcggcaccgaggacaccatctgtatgctcgagggcgagatgaaggagatctccgaagccgagatgctcgacgccatcaaattcggccacgacgccatcaagaaaatttgcgccctccagcgcgaactcgccgcagaggtagccaagcccaaacggccattctctccgaccgtcgcgccggacgagctggtcaatttcgttgaagagcactgctcagccgagctgaaagctttggcctacaccccgctcgccaaggaggagcgcgccgaaaagaccaaagccatctacacgcaaaccatcaggaaaaccctcacgcacttcaccgaccgcgtcggccccgatcagatcgaagccgatcccaccagcgcgttctgcctgaacgaacacatgatcgaagagtgcatccatgccgtcgaaaagaaggtgatgcgccacatgattctcgatgacggcaagcgcctcgacggccgtacactcgaacaggttcgcccgatcagcatcgagctgggcctcattccgagggctcacggttcagcgctcttcactcgcggcgaaacgcaggcactcgtcacgctgacgctgggcaccaagaaggacgcccagtcggtcgatacgctgactgacgacaaggacaagcggttcatgctgcactacaacttcccacccttctcagtcggcgaaatcggcagggtcggcggtgccggacggcgtgaaatcggccacggcaacctcgccgagcgcgccatcaaaatggtgatgccatccgagcaggagttcccctacaccgtgcgcctcgtctcggacatcctcgaatcgaacggttcgtcctcgatggcctcggtctgcggcggcacgctggccgcgatggacggtggcattccgctcaagaaaccggtctccggcatcgcaatgggcctcatcaaggagggcgaccgctacgccgtgctctccgacattctcggcaacgaggatcatctcggcgacatggacttcaaggtggcaggcacccgtgacggcattaccgcctgccagatggacatcaagatcgacggcctcgactaccacatcctcgaaaccgcgctcgagcaggctcgcaaaggtcgcttgcacatcctcgacgtcatggccgaggcgattcccgagtcgcgtgcagacatcggtaaatacgcaccgcgcctcaccaccatccagattccggtggacgccatcggcatggtgatcggcaagggcggcgaaaccatccgcagcatcaccgaggagaccggcgcagagatcaacatcgacgacgacggcacggtcaccatcgcctgctccagccccgaagccaccaaagcggcggtcgaaaccatcaagaccctcgtctccaagccggaggtcggcacaatctacatgggcaaggttcgcgacatccgcgacgagctcggcgccttcgtcgagttcctgccaaaaaccgacggtctggtgcacatctcggagattgcccgcgaacgtatcgccaaggtgagcgacgtgctcaaggtgggtgaccggatcaaggtgaagctgatcgacgtgcgcaaggatccccgcaccggcaagaccaagttcgccctctcgatcaaggcgctactcgacaccgaccagcaagccgaaacgaacggcgaagcaaagccggcaagagactga

SEQ ID NO: 1722 - protein, 733 aa, Chlorobium tepidum TLS
MFIKKKIDLGHGKVITIETGKMAKQADGSAVVTMNDTMVLATVVSSKTPPSPNQDFFPLQVEYREKYSAAGKFPGGFFKREGRPSEKEILSARLIDRALRPLFPDGYYQETQIIISVISSDTINDADVLGGIAASAAIMVSDIPFANPMSEVRVGRINGLFIVNPDINELAQSDMDICIGGTEDTICMLEGEMKEISEAEMLDAIKFGHDAIKKICALQRELAAEVAKPKRPFSPTVAPDELVNFVEEHCSAELKALAYTPLAKEERAEKTKAIYTQTIRKTLTHFTDRVGPDQIEADPTSAFCLNEHMIEECIHAVEKKVMRHMILDDGKRLDGRTLEQVRPISIELGLIPRAHGSALFTRGETQALVTLTLGTKKDAQSVDTLTDDKDKRFMLHYNFPPFSVGEIGRVGGAGRREIGHGNLAERAIKMVMPSEQEFPYTVRLVSDILESNGSSSMASVCGGTLAAMDGGIPLKKPVSGIAMGLIKEGDRYAVLSDILGNEDHLGDMDFKVAGTRDGITACQMDIKIDGLDYHILETALEQARKGRLHILDVMAEAIPESRADIGKYAPRLTTIQIPVDAIGMVIGKGGETIRSITEETGAEINIDDDGTVTIACSSPEATKAAVETIKTLVSKPEVGTIYMGKVRDIRDELGAFVEFLPKTDGLVHISEIARERIAKVSDVLKVGDRIKVKLIDVRKDPRTGKTKFALSIKALLDTDQQAETNGEAKPARD

SEQ ID NO: 1723 - DNA, 2214 bp, Yersinia pestis KIM
  CDS (1)..(2214): transl_table=11
ttgtcattagtcgcgaggatgcagtgtgaaggtatcagtaacaggtggattagatcgtcaatacgatcaggcaccgcaaagcataagggtacaattttgctgactccgattattcgtaaattccagtatggtcaacataccgtaactatcgaaactggtatgatggctcgccaggccactgcagccgtaatggtaagcatggacgacactgcagtattcgtgactgttgttggtcaaaagaaagccaaaccaggccagagtttcttccctctgacggttaactatcaggagcgtacttacgctgctggccgtatcccaggtagcttcttccgtcgtgaaggccgcccaagtgaaggcgaaacactgacttcacgtctgatcgaccgcccaattcgcccactgttcccagacagcttcctgaacgaagttcaagtgattgcaaccgtcgtttcggttaacccacaaattaacccagacatcgtggcactgattggtgcatctgcggcactgagcttgtcaggcattccatttaacggcccaatcggtgctgctcgcgttggttttatcaacgaccagtatgtgctgaacccaaccactgacgagctgaaagagagccgtttggatctggttgttgccggtactgcgggtgcagtgctgatggttgaatcagaagccgatattctgtccgaagagcaaatgttgggcgcggtcgtcttcggccacgaacaacagcaagttgtgattgaaaatattaacgctttggttgctgaagctggcaaacctaagtgggattggcaggcagagcctgtcaacgaagcactgcatgcgcgtgttgctgaactggccgaagcgcgtctgggcgatgcataccgtatcactgaaaaacaagaacgttatacgcaagttgatgctatcaaagctgacgtgaccgaagcgctattagcgcaggacgacacattagatgccgctgaaattcaggatatcctggccagcgttgagaaaaatgttgtgcgtagccgtgtgctgcgtggtgagccacgtatcgatggtcgcgaaaaagacatgatccgtggtttggatgtacgtactggcatcttgccacgtactcatggttctgccttgttcacccgcggtgaaactcaggcgttggttaccgctacgctgggtacggcacgtgacgcacaaaacattgatgagttgatgggtgagcgcacagattcattcctgttacactataatttccctccgtattgtgtaggcgaaacagggatggttggctcacctaagcgtcgtgagattggccatggccgccttgcgaaacgtggtgttctggctgtgatgccaagtgcgagcgagttcccttacactattcgtgtggtttctgaaatcaccgagtctaatggttcttcctcaatggcttctgtttgtggtgcttctctggctctgatggatgcgggcgtgccaattaaagccgctgttgctggtattgcaatgggcctggtaaaagagggtgataactttgtcgttctgtctgacattctgggtgacgaagatcacttgggcgacatggactttaaagtagccggtagccgtgacggtgtgaccgcactgcaaatggacattaaaattgaaggtattacccgcgaaattatgcaggtagctctgaatcaggctaagggtgcacgtttgcacattctgggcgtgatggaacaggctatcagcacaccacgtggcgatatctctgagtttgctccacgtatctacaccatgaagatcaaccctgagaaaatcaaggatgtgatcggtaaaggtggttcggtgatccgtgcgctgactgatgaaactggcaccacgattgaaatcgaagatgatggtaccattaagattgcagcaactgatggcgataaagcaaaacacgctatccgtcgtatcgaagagattactgctgaaatcgaagtgggccgtatttacgcaggtaaagtcacccgtatcgttgatttcggtgcatttgttgctatcggtggcggtaaagaaggtctggtacatatttctcaaatcgctgataagcgtgtagagaaagtgacagactacctgcagatgggtcaagatgtgccagttaaagtaatggaagttgatcgtcagggccgtatccgcctgagcatcaaagaagccactactcctgacgcagaagcaccagaagcagcagcagagtaa

SEQ ID NO: 1724 - protein, 737 aa, Yersinia pestis KIM
MSLVARMQCEGISNRWIRSSIRSGTAKHKGTILLTPIIRKFQYGQHTVTIETGMMARQATAAVMVSMDDTAVFVTVVGQKKAKPGQSFFPLTVNYQERTYAAGRIPGSFFRREGRPSEGETLTSRLIDRPIRPLFPDSFLNEVQVIATVVSVNPQINPDIVALIGASAALSLSGIPFNGPIGAARVGFINDQYVLNPTTDELKESRLDLVVAGTAGAVLMVESEADILSEEQMLGAVVFGHEQQQVVIENINALVAEAGKPKWDWQAEPVNEALHARVAELAEARLGDAYRITEKQERYTQVDAIKADVTEALLAQDDTLDAAEIQDILASVEKNVVRSRVLRGEPRIDGREKDMIRGLDVRTGILPRTHGSALFTRGETQALVTATLGTARDAQNIDELMGERTDSFLLHYNFPPYCVGETGMVGSPKRREIGHGRLAKRGVLAVMPSASEFPYTIRVVSEITESNGSSSMASVCGASLALMDAGVPIKAAVAGIAMGLVKEGDNFVVLSDILGDEDHLGDMDFKVAGSRDGVTALQMDIKIEGITREIMQVALNQAKGARLHILGVMEQAISTPRGDISEFAPRIYTMKINPEKIKDVIGKGGSVIRALTDETGTTIEIEDDGTIKIAATDGDKAKHAIRRIEEITAEIEVGRIYAGKVTRIVDFGAFVAIGGGKEGLVHISQIADKRVEKVTDYLQMGQDVPVKVMEVDRQGRIRLSIKEATTPDAEAPEAAAE

SEQ ID NO: 1725 - DNA, 2148 bp, Thermosynechococcus elongatus BP-1
  CDS (1)..(2148): transl_table=11
atgaagggtctagaaaagattatccccctagatggacgggatattaaggtagtattgcaaaaatttgccccccaagctgccggttccattctcattagttcgggagaaacggctgtactggtaacagccaatcgtgctgctgcgcgcgaaggcattgattttttgccccttgttgttgattacgaagagcgcctctatgcggctggccggattcccggcggttttttacggcgtgagggtcgcccccccgaaaaagccattctcattggtcgtctgattgaccggccgctgcgccctctctttccccaatggttgcgcgatgatctccaagtggtggcaacgacggtttcgctggatgaaaatgctccccccgatgtgttggcggtaacgggagcctcgatcgctgttctgttggcacaaattccctttaatggcccgatggccgcggtgcgggtgggccttgtgggggatgagtttgttatcaaccccacctacaaagaaattgagcgcggtggcttggatctggtcgtcgccggctctcccgatggggtggtgatggtggaggctggtgccaatgaactgccagaagccgacatgattgaggccattgactttgcctatgaggtgatccgagacctgattcaagcgcagcgggatctcctcaaggaattgggcattgacattgtccgcgctgagccaccggcgatcgaccccaccttagaaaactttatctacgatcgcgccgctgaaccggtcaaagccattctcaaacgctttgaaaaggacaaaaatgtccgcgatgcagccctcgatgaggtgcaaggggcgatcgcccaagaaattgctgccttgcccgaggatgacccagtggctgtggcggcggcggaaaaccccaaagccctacccaccctctttaaggccgtcacgaaaaaactcatgcggcagcaaattattgaagaaggggtgcgagtggatggccgccgtctcgatgaagtgcgtcccatttggtgtgaggtgggggttctcccagagcgggttcatggcagtgccctctttaatcgtggcttgacgcaggtgatgtccgtgaccaccctcggttctcctgccgatgcccaagccctggatgatttgcatcccgaggacagcaaacgttatctgcaccactacaactttcccccctactccgtcggtgaagtcaaacccctgcgatcgccggggcggcgagaaattggccatggtgcccttgctgagcgtgcccttgaacccgtccttccccccaaggaggagtttccctacgtgatccgagtggtgtcggaggtgctctcttccgatggctcgacctccatgggatccgtttgtgggtccaccctctcgctgatggatgccggggtacccatccgcaagcctgtcagtggtgcagctatgggattgatcaaggagggcaacgaggtgcgcatcctcaccgacattcagggaattgaagacttccttggtgacatggacttcaaagttgccggcaccgatagcggcatcactgccctgcaaatggatatgaaaattaccggcttgcccgttgccgtgattcagcaggcgattgaacaggcgcggccggcgcggctgcatatccttgagaaaatgctggcagtgctcgataaaccccgtccccaactgccccccagtgcgccacggctgctgacgttgcagattcctccggatatgattgggctggttattggtccagggggcaaaacggtgcgcggtatctctgagcaatacaacgtcaaggtggacatcagcgaagaagggctcgtcaccattactgcccccaatgaaaccaatgcgaagcaagcacgggctgccattgagggtctaacgcgaaagctcaatgccggtgatgtctatctgggcagggtgacacggattattcccatcggtgcttttgttgagcttctcccgggcaaagaggggatgatccacatttcccagttggcggagtatcgcgttggtaaggtcgaggacgaagtgaaaattggcgatgaaattgtcgtcaaaatccgtgaggtggacagcaaaggccgcattaacctcacccgccttggcattcatcccgacgaggccgaagccgcccgcagtaactccgttgtctag

SEQ ID NO: 1726 - protein, 715 aa, Thermosynechococcus elongatus BP-1
MKGLEKIIPLDGRDIKVVLQKFAPQAAGSILISSGETAVLVTANRAAAREGIDFLPLVVDYEERLYAAGRIPGGFLRREGRPPEKAILIGRLIDRPLRPLFPQWLRDDLQVVATTVSLDENAPPDVLAVTGASIAVLLAQIPFNGPMAAVRVGLVGDEFVINPTYKEIERGGLDLVVAGSPDGVVMVEAGANELPEADMIEAIDFAYEVIRDLIQAQRDLLKELGIDIVRAEPPAIDPTLENFIYDRAAEPVKAILKRFEKDKNVRDAALDEVQGAIAQEIAALPEDDPVAVAAAENPKALPTLFKAVTKKLMRQQIIEEGVRVDGRRLDEVRPIWCEVGVLPERVHGSALFNRGLTQVMSVTTLGSPADAQALDDLHPEDSKRYLHHYNFPPYSVGEVKPLRSPGRREIGHGALAERALEPVLPPKEEFPYVIRVVSEVLSSDGSTSMGSVCGSTLSLMDAGVPIRKPVSGAAMGLIKEGNEVRILTDIQGIEDFLGDMDFKVAGTDSGITALQMDMKITGLPVAVIQQAIEQARPARLHILEKMLAVLDKPRPQLPPSAPRLLTLQIPPDMIGLVIGPGGKTVRGISEQYNVKVDISEEGLVTITAPNETNAKQARAAIEGLTRKLNAGDVYLGRVTRIIPIGAFVELLPGKEGMIHISQLAEYRVGKVEDEVKIGDEIVVKIREVDSKGRINLTRLGIHPDEAEAARSNSVV

SEQ ID NO: 1727 - DNA, 2130 bp, Streptococcus agalactiae 2603V/R
  CDS (1)..(2130): transl_table=11
atgtcaaaacaagtctttgaaatgatttttgctggaaaaaaattagttgttgaaactggccaagtggctaaacaagcaaatggatcagttgtcgttcgttatggagattctactgtactcacagcagcagttatgtctaagaaaatgtcaacaggtgattttttcccacttcaagtcaattacgaagaaaaaatgtatgctgctgggaaatttccgggtggctttaacaaacgtgaagggcgtccaagtacggatgctaccttaacagcacgtcttattgatagaccaatccgtccgatgtttgctgagggatttcgtaacgaagtacaggtcatcaatactgttctttcatttgatgaaaatgctagcgcaccaatggctgctatgtttggttcatcattagcattatcgatttccgatattcctttcaatgggccaattgctggagttcaagttgcttatgttgatggtaattttattattaatccgacagcacaagaacaagaggcttctgcgttagaattaacggttgcaggtactaaagaagcgattaacatggttgaatctggagcgaaagaactttcagaagaaatcatgctagaggctcttcttaaaggacatgaggctgtctgtgaattaatcgcctttcaagaagagattgttactgctattggtaaagaaaaagccgaggtagaacttcttcaagttgatccagaacttcaagcagaaattattgctactcataacatagctttacaggctgcagtacaagttgaagagaaaaaggctagagaagcagctacagaagcagttaaagaagtagttataggtgaatatgaggcacgttacgctgaacatgaagaatatgatcgcattatgcgtgatgttgctgaaattttagaacaaatggaacatgcagaagttcgtcgcctcattacagaagataagattcgtcctgatggacgtcgtgtggatgagattcgtccattagacgcagagattgattttttaccacaagttcatggatcaggtctctttacacgaggacaaacccaagcattatcagtattaacgttagcacctatgggtgaagcacaaatcattgatgggctaacaccagagtataagaaacgctttatgcaccactataacttcccacaatattcagttggtgagacgggacgttatggagctgcagggcgtcgtgaaattggtcacggtgctttaggagagcgtgcattagaacaagtccttccaagattggaggagtttccgtatgctatccgactagttgcagaagttttagaatcaaacggttcatcatctcaggcttctatatgtgctggaacgcttgctcttatggcaggtggtgtgcctataaaagctccagttgctggtattgccatggggctcatatcagatggaacaaactatacagtcctcactgatattcaaggattagaagaccattttggcgatatggactttaaagttgcgggtacacgtgaagggattacagcacttcaaatggatattaaaattgaaggtattacccctcaaattttggaagaagctcttgcgcaagctaaaaaagcacgctttgaaattcttgatgtccttcatggagctatcgcagagccacgtccacaattagcaccaacggcacctaagattgatatgataaaaatcgatgttgataagattaaagttgtcatcggtaaaggtggcgaaactatcgataaaatcatcgctgaaacaggtgttaagattgatattgatgaagaaggaaatgtatctatcttctctagtgatcaggctgctattgatcgtacgaaagacattattgcaagtttagtacgtgaagcaaaagtgggagaagtttaccatgctaaagtagttcgtatcgagaaattcggtgcctttgtcaacctctttgataaaacagatgcattggtacatatttcagaaattgcatggacacgtacagcaaatgtagctgatgttcttgaaattggtgaagaagttgatgtgaaagtcatcaaaattgatgataaagggcgagttgatgcttctatgaaagcattgttaccacgtcctccaaaagctgacaatcctaaaaaggaatcttaa

SEQ ID NO: 1728 - protein, 709 aa, Streptococcus agalactiae 2603V/R
MSKQVFEMIFAGKKLVVETGQVAKQANGSVVVRYGDSTVLTAAVMSKKMSTGDFFPLQVNYEEKMYAAGKFPGGFNKREGRPSTDATLTARLIDRPIRPMFAEGFRNEVQVINTVLSFDENASAPMAAMFGSSLALSISDIPFNGPIAGVQVAYVDGNFIINPTAQEQEASALELTVAGTKEAINMVESGAKELSEEIMLEALLKGHEAVCELIAFQEEIVTAIGKEKAEVELLQVDPELQAEIIATHNIALQAAVQVEEKKAREAATEAVKEVVIGEYEARYAEHEEYDRIMRDVAEILEQMEHAEVRRLITEDKIRPDGRRVDEIRPLDAEIDFLPQVHGSGLFTRGQTQALSVLTLAPMGEAQIIDGLTPEYKKRFMHHYNFPQYSVGETGRYGAAGRREIGHGALGERALEQVLPRLEEFPYAIRLVAEVLESNGSSSQASICAGTLALMAGGVPIKAPVAGIAMGLISDGTNYTVLTDIQGLEDHFGDMDFKVAGTREGITALQMDIKIEGITPQILEEALAQAKKARFEILDVLHGAIAEPRPQLAPTAPKIDMIKIDVDKIKVVIGKGGETIDKIIAETGVKIDIDEEGNVSIFSSDQAAIDRTKDIIASLVREAKVGEVYHAKVVRIEKFGAFVNLFDKTDALVHISEIAWTRTANVADVLEIGEEVDVKVIKIDDKGRVDASMKALLPRPPKADNPKKES

SEQ ID NO: 1729 - DNA, 2118 bp, Oceanobacillus iheyensis HTE831
  CDS (1)..(2118): transl_table=11
atggcagaagaaaaacaactattctccacagaaatttctggtaagaaatttactgtagaagttggagaattagcaaaacaagcaaatggtgcttgtatgattcattatggcgatacatctgtcctatccgtagcaactgcttccagtgaaccaaaggaccttcctttctttccactaacagtaaactacgaagaacgactatatgcagtcggtaagataccaggaggatttataaagcgagaagggcgtccgagtgaaaaagcgatcctttcatctcgtctaatagaccgacctatccgtccattgttcccggatggttttcgaaatgaagtgcaagtaattagtacggtaatgagcgtagatcaagactgcccttcagagattgccgctatgattggctcttcaattgcacttagtgtgtctgatattccatttgagcaaccaatcgctggtgtgaatgttggaagagtagacggggaatttattataaatccaacaattgaacaagaagcaaaaagtgacattgaattaacagtcgctggtacaaaagatgcgattaacatggtagaagcaggagcaaatgaagttccagaagatattatgttagaagcaattatgtttggccatgaagaaattaagcgcttagtagcttttcaagaagaacttgtgaaggcatgtggacaagataaatttgatgttgtattagctgaatctgaagaagagctagttgaaaatgttcattcagaagcgaaagacaagattgtaaatgcaatacaggtacaggaaaagcatgcacgtgatgaagcgataaaacaagcgaaaaatgaaattgttgctcattatgaagaacaagaagtcgaagaagatgtaatcaaacaagtaaaatcaattttagatagcatggtgaaggaagaagttcgtcgactaatcacgaaagaaaaaattagacctgatggacgaaaagtggatgaaattcgaccactgtcttctagaatacatgtattgccacgtacgcatggctctggattatttacacgtggacaaacacaggcacttagtgtgtgtactcttggtgcacttggggatgtacaaatcttagacggtttagacttagaagaatcaaaaagatttatgcatcattataacttccctcagtatagtgtcggggaaacaggtccaattcgtggaccaggtcgtcgtgagataggccacggggcattaggtgaacgtgctttagaaaaagtaattccggatgacaaagaatttccgtatacgattcgacttgtatcagaagttttagaatcaaatggttctacatcacaggcaagtatttgtgctagtacattagcaatgatggatgccggtgtaccaattaaagcaccagttgcaggtattgcaatggggcttgttaaatcaggtgatgattatacgattctgacggatattcaaggtatggaagatgcgttaggagatatggactttaaagttgctggaaccgctaatggggttactgcattgcaaatggatattaagattgatggattatctcgtgatatcttagaagaagcactttctcaagcgaagaaaggtcgcatgcagattctagattctatgttagcaacaattaaagaaccgaaagaagaactatctgagtttgcaccaaaaatcctaacaatggcaatagaaccagataagatccgtgatgttattggaccaagcggaaaacaaatcaatcaaattattgatgaaactggtgtgaaaattgatattgaacaagatggaagtatctttatttcctcaacagacaatgaaatgaacaaaaaagcaaaacaaatcattgaagatcttgtccgtgaagtagaagtaggacagatttatcttggtaaagtaaaacgtatcgagaaatttggagctttcgttgaattgtttaaaggaaaagatggtctcgttcacatttcagagcttgcagaagaacgcacgaataaagtggaagacgttgtttctatagacgatcagattatggttaaagtaaaagaaattgatcgtcaaggacgtgtgaatttatctagaaaagccgttattcaagacgagaagaaagcaaaagaacaagcaaaataa

SEQ ID NO: 1730 - protein, 705 aa, Oceanobacillus iheyensis HTE831
MAEEKQLFSTEISGKKFTVEVGELAKQANGACMIHYGDTSVLSVATASSEPKDLPFFPLTVNYEERLYAVGKIPGGFIKREGRPSEKAILSSRLIDRPIRPLFPDGFRNEVQVISTVMSVDQDCPSEIAAMIGSSIALSVSDIPFEQPIAGVNVGRVDGEFIINPTIEQEAKSDIELTVAGTKDAINMVEAGANEVPEDIMLEAIMFGHEEIKRLVAFQEELVKACGQDKFDVVLAESEEELVENVHSEAKDKIVNAIQVQEKHARDEAIKQAKNEIVAHYEEQEVEEDVIKQVKSILDSMVKEEVRRLITKEKIRPDGRKVDEIRPLSSRIHVLPRTHGSGLFTRGQTQALSVCTLGALGDVQILDGLDLEESKRFMHHYNFPQYSVGETGPIRGPGRREIGHGALGERALEKVIPDDKEFPYTIRLVSEVLESNGSTSQASICASTLAMMDAGVPIKAPVAGIAMGLVKSGDDYTILTDIQGMEDALGDMDFKVAGTANGVTALQMDIKIDGLSRDILEEALSQAKKGRMQILDSMLATIKEPKEELSEFAPKILTMAIEPDKIRDVIGPSGKQINQIIDETGVKIDIEQDGSIFISSTDNEMNKKAKQIIEDLVREVEVGQIYLGKVKRIEKFGAFVELFKGKDGLVHISELAEERTNKVEDVVSIDDQIMVKVKEIDRQGRVNLSRKAVIQDEKKAKEQAK

SEQ ID NO: 1731 - DNA, 2742 bp, Bifidobacterium longum NCC2705
  CDS (1)..(2742): transl_table=11
atggagggtcccgaaatcaaggccgttgaggccgtaatcgacaatggatcgtttggtaagcgcacgctgcgcttcgagaccggccgcctcgcccagcaggccgatggcgctgtggccgcctacctcgacgacgattccatgattctgtccaccaccaccgccggttccagcccgaaggagaactacgacttcttcccgctgaccgttgatgttgaagagaagatgtacgctgccggcaagattccgggctcgttcttccgccgtgaaggccgcccgagctccgaggccatcctcgcctgccgcatcatcgaccgcccgctgcgcccgctgttcccgcacaccctgcgcaacgaagtgcaggtcgtcgagaccgtgctcgccgtgaaccctgatgacgcttacgatgtcatcgccctgaacgccgcttccgcctccactatgatctccggcctgccgttcgaaggcccggtctccggtgtgcgtctggcgctgatcgacggccagtgggtcgccttcccgcgttggagtgagcgtgagcgcgccgtgttcgagattgtggtcgctggccgcgtgatcgagaacggtgatgttgccatcgccatgatcgaggcgggtgccggcaagaacgcctggcacctcatctatgacgagggtcagaccaagcccgatgaggaggtcgtggccggtggtcttgaagccgccaagccgttcatcaaggtgatctgcgaggctcaggatgagctcaagaagatcgccgccaaggagaccaaggaattccagctcttcccggagtacaccgacgagctgtatgcccgtatcgacgagatcgctcacaaggatctggacgaggcgctctccatcgccgagaagctgccgcgtcaggatcgcatccacgagatcaaggagcacgtgcgcgaggtgctcgcggacgagttcaccgatatggacgatgccgagaaggacaaggaactcggtaacgccttcaaggaactgcagcgccagattgtgcgtcgccgcatcctgaccgaggactaccgcatcgacggccgtggcctgcgcgacatccgcaccctgtccgccgaggtggacattgtgcctcgcgtgcacggttccgccctgttccagcgtggcgagacccagattctgggcgtcaccacgctgaacatgctcaagatggagcagcagatcgacgcgctgtccggtccgcagtccaagcgttacatgcacaactacgagatgccgccgtactccactggtgagaccggccgcgtcggttccccgaagcgccgcgaaatcggccacggcgccctcgccgagaaggctctcgtgccggtgctgccgagccgcgaagagttcccctacgccatccgacaggtctccgaggccatcggttccaacggttccacttcgatgggttccgtgtgcgcctccacgctgagccttttggctgccggcgtgccgctgaaggctccggttgccggcatcgccatgggcctcgtgtccggcgacgttgatggcaagcacatcttcaagaccctcaccgatattctgggtgccgaggatgccttcggcgacatggacttcaaggtggccggtacttccgagttcatcaccgccctgcagctcgacaccaagctcgacggcatccccgccgacatcctggccgccgctctgcagcaggccaaggaagcccgcgccacgattctcgaggtcatcaacgagtgcatcgacggcccggccgagatgagcgagttcgctccgcgcatcatcaccacctccgtcccggttgagaagatcggcgaagtcatcggcccgaagggcaagatgatcaaccagattcaggaagacaccggcgctgaaattgccatcgaggatgacggtaccgtcttcatctcctccgagggtggcgaggctgctgagaaggccaaggccatcatcgaccagattgccaacccgcacgtgcccgaggccggcgaaacctacaacggcaaggtcgtcaagaccacgtcgttcggcgctttcgtgaacctcacccccggcaccgacggcctgctgcacatctcccagatccgcaacctggccaacggcgagcgtattgacgctgtcgaagacgtgctcaaggaaggcgacaccgttgaggtgatcgttcagggtgtcgatgatcgcggcaagatctccctggccattcctggtttcgaggatcaggagaacaacgcccgcccgagccgtggcgatcgcgatgaccgccgtggcggccgtggccgtggtgaccgtgacgatcgccgtggcggccgtggccgtcgctccgagcgcgatgaccgtgacttcgacgatcgtgacgaccgtccgcgtcgccgtcgctccgatgacttcgaggatgattacgacgaccgtccgcgtcgccgtcgctccgatgaccgtgacttcgatcgcgatgatcgcgatgatgatcgtccgcgtcgccgtcgttctgccgaccgtgacttcgacgatcgcgatgaccgtgatgctcgcgactcccgtgacgatgatcgtccgcgtcgccgtcgctcttccgatcgcgatgaccgtggcgatcgtgatgaccgccgtggcggttcccgtggccgtggccgtggctcggaccgtaacccgcgctacgccaccgacgacaactacgacgactaccgcgccgaccgcgaagagcgtactgagcgcccgcgtcgccgcgtccgtcgcgactttgatccgttcgaggactaa

SEQ ID NO: 1732 - protein, 913 aa, Bifidobacterium longum NCC2705
MEGPEIKAVEAVIDNGSFGKRTLRFETGRLAQQADGAVAAYLDDDSMILSTTTAGSSPKENYDFFPLTVDVEEKMYAAGKIPGSFFRREGRPSSEAILACRIIDRPLRPLFPHTLRNEVQVVETVLAVNPDDAYDVIALNAASASTMISGLPFEGPVSGVRLALIDGQWVAFPRWSERERAVFEIVVAGRVIENGDVAIAMIEAGAGKNAWHLIYDEGQTKPDEEVVAGGLEAAKPFIKVICEAQDELKKIAAKETKEFQLFPEYTDELYARIDEIAHKDLDEALSIAEKLPRQDRIHEIKEHVREVLADEFTDMDDAEKDKELGNAFKELQRQIVRRRILTEDYRIDGRGLRDIRTLSAEVDIVPRVHGSALFQRGETQILGVTTLNMLKMEQQIDALSGPQSKRYMHNYEMPPYSTGETGRVGSPKRREIGHGALAEKALVPVLPSREEFPYAIRQVSEAIGSNGSTSMGSVCASTLSLLAAGVPLKAPVAGIAMGLVSGDVDGKHIFKTLTDILGAEDAFGDMDFKVAGTSEFITALQLDTKLDGIPADILAAALQQAKEARATILEVINECIDGPAEMSEFAPRIITTSVPVEKIGEVIGPKGKMINQIQEDTGAEIAIEDDGTVFISSEGGEAAEKAKAIIDQIANPHVPEAGETYNGKVVKTTSFGAFVNLTPGTDGLLHISQIRNLANGERIDAVEDVLKEGDTVEVIVQGVDDRGKISLAIPGFEDQENNARPSRGDRDDRRGGRGRGDRDDRRGGRGRRSERDDRDFDDRDDRPRRRRSDDFEDDYDDRPRRRRSDDRDFDRDDRDDDRPRRRRSADRDFDDRDDRDARDSRDDDRPRRRRSSDRDDRGDRDDRRGGSRGRGRGSDRNPRYATDDNYDDYRADREERTERPRRRVRRDFDPFED

SEQ ID NO: 1733 - DNA, 2145 bp, Brucella suis 1330
  CDS (1)..(2145): transl_table=11
atgttcaatacccataaagttgaaatcgaatggggcggacgtccgcttacactcgaaaccggcaagattgcccgtcaggctgacggcgctgttctcgccacctatggcgaaaccgccgttctcgcaactgtcgtttctgccaaggaaccgaagccgggccaggacttcttcccgctgaccgtcaattatcaggaaaagacctatgcagccggcaagattcccggcggctatttcaagcgtgaaggccgtccgagcgaaaacgaaaccctcgtttcgcgcctgatcgaccgtccgatccgcccgcttttcgttgacggctacaagaacgacacgcaggtcgtcattaccgttctccagcacgatctggaaaacaacccggacatcctgtcaatggttgcggcatctgccgccctcaccatttcgggcgtgcctttcatgggtccgatcagcggcgcgcgcgttggttatatcgatggcgaatatgtcctgaacccgaatatcgatgaaatgccggaatccaagctcgatctggtggttgccggtacgtcggaagcggttctgatggtcgaatcggaagcgcaggaactgcccgaagatgtcatgctcggcgccgtcatgtttggccacaagagcttccagccggtgatcgatgcgatcatcaagcttgccgaagttgccgccaaggaaccgcgtgacttccagccggaagacctgtcggaactggaagccaaggtgctggccgttgtggaaaacgacctgcgcgaagcttacaagatcactgaaaagcaggcgcgctacgcagccgttgatgccgccaaggccaaagccaaggaacatttcttccccgaaggcgtggaagaaaccgaaatgtcggcggaacagttcgcgaccattttcaagcatctgcaggccaagatcgttcgctggaacattctcgacacgggcaaccgtatcgatggccgtgacctttcgaccgttcgtccgatcgtttcggaagtcggcatcctgccgcgcacccacggttccgcgctcttcacccgcggtgaaacgcaggccatcgtcgttgccacgctcggcaccggcgaagacgaacagatgatcgatgcgctgacgggaacctacaaggaatccttcatgctgcattacaatttcccgccctattcggtcggtgaaacgggccgcatgggttctccgggccgccgcgaaatcggccatggcaagcttgcctggcgcgcaatccatccgatgctgcctgccgccgaacagttcccctatacgatccgcgctgtttccgaaatcacggaatcgaacggttcttcctcgatggcaaccgtttgcggcacctcgctggcgctgatggatgccggtgtgccgatcgtgcgccccgtcgccggtatcgccatgggtctcatcaaggaaggcgaacgtttcgccgttctttccgacattctcggcgatgaagattacctcggcgacatggacttcaaggtggccggtaccgaattcggcatcacatcgctacagatggacatcaagatcgacggtatcaccgaagagatcatgaaggtcgctctggaacaggcaaagggtggccgcgttcacattctcggcgaaatggccaaggccatctcctcctcgcgcgctgaactgggcgagtttgccccgcgcatcgaagtgatgaacattccgaccgacaagatccgcgacgtgattggctccggcggcaaggttatccgcgagatcgtggaaaagaccggcgccaagatcaacatcgaggacgatggtacggtcaagatcgcgtcgtcgaacggcaaggaaatcgaagccgccaagaagtggattcactccattgtggctgaaccggaagtcggcgaaatctatgaaggcacggtcgtcaagaccgccgatttcggcgctttcgtgaacttcttcggcccgcgtgacggtctggttcatatctcgcagctcgctgccgaccgtgttgccaagaccaccgatgtggtcaaggaaggccagaaggtctgggtcaagctcatgggcttcgacgaacgcggcaaggttcgcctgtcgatgaaggtcgtcgatcaggaaaccggcaaggaaatcgttgctgaaaagaagaaggaagaagttgacgctgaataa

SEQ ID NO: 1734 - protein, 714 aa, Brucella suis 1330
MFNTHKVEIEWGGRPLTLETGKIARQADGAVLATYGETAVLATVVSAKEPKPGQDFFPLTVNYQEKTYAAGKIPGGYFKREGRPSENETLVSRLIDRPIRPLFVDGYKNDTQVVITVLQHDLENNPDILSMVAASAALTISGVPFMGPISGARVGYIDGEYVLNPNIDEMPESKLDLVVAGTSEAVLMVESEAQELPEDVMLGAVMFGHKSFQPVIDAIIKLAEVAAKEPRDFQPEDLSELEAKVLAVVENDLREAYKITEKQARYAAVDAAKAKAKEHFFPEGVEETEMSAEQFATIFKHLQAKIVRWNILDTGNRIDGRDLSTVRPIVSEVGILPRTHGSALFTRGETQAIVVATLGTGEDEQMIDALTGTYKESFMLHYNFPPYSVGETGRMGSPGRREIGHGKLAWRAIHPMLPAAEQFPYTIRAVSEITESNGSSSMATVCGTSLALMDAGVPIVRPVAGIAMGLIKEGERFAVLSDILGDEDYLGDMDFKVAGTEFGITSLQMDIKIDGITEEIMKVALEQAKGGRVHILGEMAKAISSSRAELGEFAPRIEVMNIPTDKIRDVIGSGGKVIREIVEKTGAKINIEDDGTVKIASSNGKEIEAAKKWIHSIVAEPEVGEIYEGTVVKTADFGAFVNFFGPRDGLVHISQLAADRVAKTTDVVKEGQKVWVKLMGFDERGKVRLSMKVVDQETGKEIVAEKKKEEVDAE

SEQ ID NO: 1735 - DNA, 2109 bp, Shewanella oneidensis MR-1
  CDS (1)..(2109): transl_table=11
atgggtcacgtgaatccaatagtaaagagttttgagtatggtcaacatacagtcaccctggaaacaggtgtcattgcacgtcaagcagatgcagccgttttagccagcatgggtgacacgacagtgttagtcactgttgtaggtaaaaaagaagccgaagctggccgtgacttctttcctctgactgttaattatcaagaaaagacttacgcagcaggtaagatccctggcggtttctttaagcgtgaaggccgtccttctgaagaggaaacgttaatcgctcgtttgattgaccgtccaattcgccctcttttccctaatggtttcaaaaacgaagttcaagttatcatcactgtagtatctgtcgatccagaaatcgagccggatatcatctctatgatcggtacttctgctgcattagcgatttcaggtattccattcaacggcccattaggcgctgctcgtgtgggctacattaatggcgaatatgtattaaacccaactgtgaaacaaatcggagctagccaacttaacttagtggtagcgggtactgaaagcgcagtattaatggttgaatctgaagcacaagccttgccagaagaagtgatgttaggctctgtggtttatggtcatgaccaacaacaagtggttatcaaagcgattgctgaattcaaagctgaagccggtaaacctacttgggattggaccgcgcctgttgaagatgaggcgttagtcgctcaaattaaagagctggctgaagcaggctttattgaagcataccaaattcaagtgaaacaagagcgttacgctcaagtggctgtggtaaaagctgctgctaaagaagcattactggccgctaatcctgatgttgatctacgtgaagtagacaacttattaggtagcttagagaagaaagttgtgcgtggacgcatcctacgtggtatgccacgtatcgatggtcgtgaacctgatatggttcgtgcattaagcgtgttagcgggcgtattgccacgtacccatggtagtgcattgttcacgcgcggcgaaacacaagcgttagtgacttgtactttaggtactgaacgtgatgctcagaagattgatagcattatgggcgagcgcacaaaccgctttatgctgcactacaacttccctccttactctgttggtgaaacggggatggtcggttcacctaagcgccgtgaaatcggccatggaaagctcgcatggcgtggtatcaatgctgttatgccatctgcagaagagttcccatacagtgttcgtgtggtttctgagattactgaatcaaacggttcaagctctatggcgtcagtatgtggtacttcgttagcgctgatggatgcgggtgtacctatcaagacttctgtagcgggtatcgctatgggtctagtgaaggaaggcgatgacttcgttgttctttctgacatcttaggtgatgaagatcacttaggtgatatggactttaaagtggcgggtacccgtgatggtgtaactgcactgcaaatggatatcaaaatcgaaggtatcaccaaagaaatcatggaaattgcactgcaacaagcctatggcgcacgtgtgcatatcctgaacgtgatggaccaagccattggttcacaccgtgctgatatctctgatcatgctccacgtattaccaccatcaagattaacccagagaaaatccgtgatgttatcggtaaaggcggcgcagtgatccgtgctctgaccgaagaaaccggcactacgattgaactggaagatgacggtactgtgaagattgcttcttcaaatggtgaagcaaccaaagaagcgattcgtcgtattgaagaaatcacttcagaagttgaagtaggtcgcatctacaatggtaaagtgattcgtatcgttgatttcggtgcttttgttaacattctgccaggtaaagatggtttggtgcacatttcgcaaatcagcgatgagcgtgtggctaacgtatctgaccaccttgaactaaaccaagaagtcaccgttaaagtaatggaagtggatcgtcaaggtcgtgtaagactgtcaattaaagaagcacagacgaaagaacctgctgctgaataa

SEQ ID NO: 1736 - protein, 702 aa, Shewanella oneidensis MR-1
MGHVNPIVKSFEYGQHTVTLETGVIARQADAAVLASMGDTTVLVTVVGKKEAEAGRDFFPLTVNYQEKTYAAGKIPGGFFKREGRPSEEETLIARLIDRPIRPLFPNGFKNEVQVIITVVSVDPEIEPDIISMIGTSAALAISGIPFNGPLGAARVGYINGEYVLNPTVKQIGASQLNLVVAGTESAVLMVESEAQALPEEVMLGSVVYGHDQQQVVIKAIAEFKAEAGKPTWDWTAPVEDEALVAQIKELAEAGFIEAYQIQVKQERYAQVAVVKAAAKEALLAANPDVDLREVDNLLGSLEKKVVRGRILRGMPRIDGREPDMVRALSVLAGVLPRTHGSALFTRGETQALVTCTLGTERDAQKIDSIMGERTNRFMLHYNFPPYSVGETGMVGSPKRREIGHGKLAWRGINAVMPSAEEFPYSVRVVSEITESNGSSSMASVCGTSLALMDAGVPIKTSVAGIAMGLVKEGDDFVVLSDILGDEDHLGDMDFKVAGTRDGVTALQMDIKIEGITKEIMEIALQQAYGARVHILNVMDQAIGSHRADISDHAPRITTIKINPEKIRDVIGKGGAVIRALTEETGTTIELEDDGTVKIASSNGEATKEAIRRIEEITSEVEVGRIYNGKVIRIVDFGAFVNILPGKDGLVHISQISDERVANVSDHLELNQEVTVKVMEVDRQGRVRLSIKEAQTKEPAAE

SEQ ID NO: 1737 - DNA, 2193 bp, Streptococcus mutans UA159
  CDS (1)..(2193): transl_table=11
atgtcaaaacaagtgtttgaaacaatttttgctggcaaaaagctggctgtagaaatcggtcaggttgccaaacaagccaatggtgctgctttggttcgttatggtgattcaacggtcttgagtgctgcagttatgtctaaaaaaatgtccacaggcgatttcttcccacttcagattaattatgaagaaaaaagatacgcagctgggaaattccccggtggctttaacaagcgtgaaggccggccatcaaccgatgctactttaacggctcgcttaattgatcgtccgattcgtcccatgtttgcggaaggttttcgcaatgaagtccaagtcattaatacagttctgtcttatgatgctgatgcgagtgctcctatggcggctatgtttggcagttcactagcactttcgatttcagatattccttttaatggcccgattgctggggtacaagttgcttaccttgatggtcaatatgttattaatcctacggctgaagaaaagaaagcttcacttttagaattgactgtcgccggaaccaaggaagccatcaatatggttgagtctggtgctaaggaattgtcagaagatatcatgcttgaagcccttctcaaaggacatgaagcggtacgtgaactaattgctttccaagaggaaattatagcagctgttggtaaagaaaaagctgaagttgaattgttacaggtggatgctgatttgcaggctgaaattgttggaaaatacaatgcagaccttcaaaaggctgtccaaattgaggaaaagaaagcccgcgaaattgcgacagaagctgtcaaagagcacgtgactgctgaatatgaagaacgctatgctgaacacgaggaacatgaccgtatcatgcgcgacgtagctgaaatccttgaacagatggaacacgcagaggttcgccgtcttatcacagaagacaaggttcgtcctgacggtcgtcgtgttgatgaaatccgtccgcttgatgcagagattgatttcttgccaaaagtacatggttcaggtctctttactcgtggacaaacccaagccttgtcagtgttaacattggctccaatgggagatacccaaattgtggacgggcttgacgaagaatataaaaaacgcttcatgcatcattataatttcccgcaatattcggttggggaaacgggacggtatggagcgccaggacgccgagaaatcggtcatggagctcttggtgaacgtgctttggctcaagttctgccaagtttggaagcatttccttatgccattcgtttggtagctgaagtgttagaatcaaacggttcctcatcacaggcttcaatttgtgcgggaacgctcgctcttatggctgggggtgtacctatcaaagcaccagttgcaggtattgctatgggacttatctcagacggcactaactataccgttttgaccgatatccaaggactagaagatcacttcggcgatatggactttaaagttgcaggtacccgtgaaggtatcacagctttgcaaatggatattaagattgagggtattacaccgcagattttagaagaagctcttgcccaagctaaaaaagcacgttttgaaattcttgatgtgatcgaaaaagtcattcctgcaccacgtctagaattagcaccgacagcacctaaaattgacacaattaaagttgatgttgataaaatcaagattgtcattggcaagggcggtgaaaccattgataagattattgaagaaactggcgttaagattgatattgatgaagacggtaatattgctatctactctagcgatcaagaggctatcaatcggactaaggaaattattgcaagtttggtacgtgaagctaaggttggtgagatctatgaagctgaagttgtccgtattgagaaatttggtgcttttgtgcatctttttgataagacagatgcactcgttcacatctctgaaatagcttggacccgcacgaataaagtagaagatgtcttggctgttggagataaggttacggtcaaagttgttaaggtagatgacaaaggccgtattgatgcttccatgaaagctttattaccacgtccgccaagatctgaaaagtcaaataaggaggaccatcaatctgtcagacatcacggttctcctaaagacgataaaggtaaagaaaaatatgataaataa

SEQ ID NO: 1738 - protein, 730 aa, Streptococcus mutans UA159
MSKQVFETIFAGKKLAVEIGQVAKQANGAALVRYGDSTVLSAAVMSKKMSTGDFFPLQINYEEKRYAAGKFPGGFNKREGRPSTDATLTARLIDRPIRPMFAEGFRNEVQVINTVLSYDADASAPMAAMFGSSLALSISDIPFNGPIAGVQVAYLDGQYVINPTAEEKKASLLELTVAGTKEAINMVESGAKELSEDIMLEALLKGHEAVRELIAFQEEIIAAVGKEKAEVELLQVDADLQAEIVGKYNADLQKAVQIEEKKAREIATEAVKEHVTAEYEERYAEHEEHDRIMRDVAEILEQMEHAEVRRLITEDKVRPDGRRVDEIRPLDAEIDFLPKVHGSGLFTRGQTQALSVLTLAPMGDTQIVDGLDEEYKKRFMHHYNFPQYSVGETGRYGAPGRREIGHGALGERALAQVLPSLEAFPYAIRLVAEVLESNGSSSQASICAGTLALMAGGVPIKAPVAGIAMGLISDGTNYTVLTDIQGLEDHFGDMDFKVAGTREGITALQMDIKIEGITPQILEEALAQAKKARFEILDVIEKVIPAPRLELAPTAPKIDTIKVDVDKIKIVIGKGGETIDKIIEETGVKIDIDEDGNIAIYSSDQEAINRTKEIIASLVREAKVGEIYEAEVVRIEKFGAFVHLFDKTDALVHISEIAWTRTNKVEDVLAVGDKVTVKVVKVDDKGRIDASMKALLPRPPRSEKSNKEDHQSVRHHGSPKDDKGKEKYDK

SEQ ID NO: 1739 - DNA, 2220 bp, Streptomyces coelicolor A3(2)
  CDS (1)..(2220): transl_table=11
gtggagaacgagacccactacgccgaagccgtgatcgacaacggcgcgttcggcacccgcaccatccgcttcgagacgggccgcctggcccgtcaggccgccggttccgccgtggcgtacctggacgacgacaccatggtgctgtcggccaccagcgcctccaagaacccgaaggaccagctcgacttcttccccctgacggtggacgtcgaggagcggatgtacgccgccggcaagatccccggcagcttcttccgccgtgagggccggccctccgaggacgcgatcctcacctgccgcctgatcgaccgcccgctgcgcccgtccttcaagaagggcctgcgcaacgagatccaggtcgtcgcgacgatcatggcgctcaaccccgaccacctgtacgacgtcgtggcgatcaacgccgcctccgcgtccacgcagctggccggtctgcccttctccggcccgatcggcggcgtccgcgtcgcgctgatccgcggccagtgggtggccttcccgacgcacaccgagctcgaggacgccgtcttcgacatggtcgtcgcgggccgcgtcctggaggacggcgacgtcgcgatcatgatggtcgaggccgaggccaccgacaagaccatcaagctggtcgagggcggcgccgaggcgcccaccgaggaggtcgtcgccgccggtctggacgccgcgaagcccttcatcaaggtgctgtgccgcgcccaggccgacctcgccgccaaggccgccaagccgaccggcgagttcccgatcttcctggacttccaggacgacgtcctcgaggcgctgaccggcgccgtcaagcccgagctgacgcaggcgctcaccatcgccggcaagcaggagcgcgaggccgagttggaccgcgtcaaggggctcgccgccgagaagctcctcccggagttcgagggccgcgagaaggagatctccgccgcgtaccgcgcgctgaccaagtccctggtccgcgagcgcgtcatcaaggagaagaagcgcatcgacggccgcggtgtcaccgacatccgcaccctggccgccgaggtcgaggccatcccgcgcgtgcacggctccgccctgttcgagcgtggcgagacccagatcctgggcgtcaccaccctgaacatgctccgcatggagcagcagctggacaccctctccccggtgacccgcaagcgctacatgcacaactacaacttcccgccgtactccgtcggcgagaccggccgcgtgggctccccgaagcgccgcgagatcggccacggcgctctcgccgagcgcgccatcgtgccggtgctgccgacgcgcgaggagttcccctacgcgatccgccaggtgtccgaggccctcggctccaacggctcgacgtccatgggctcggtctgcgcctccaccatgtcgctgctgaacgccggtgtgccgctgaaggcccccgtcgccggtatcgccatgggcctgatctcccaggagatcaacggcgagacgcactacgtcgccctcaccgacatcctcggtgcggaggacgccttcggcgacatggacttcaaggtcgccggcaccaaggagttcgtgaccgccctccagctcgacaccaagctggacggcatccccgcctccgtcctggccgccgccctcaagcaggcccgtgacgcccgcctccacatcctcgacgtgatgatggaagcgatcgacacgccggacgagatgtccccgaacgcgccgcggatcatcaccgtgaagatccccgtcgacaagatcggtgaggtcatcggccccaagggcaagatgatcaaccagatccaggaggacacgggcgccgacatcacgatcgaggacgacggcacgatctacatcggtgccgcccagggctcgcaggccgaggccgcccgcgccacgatcaacggcatcgccaacccgaccatgcccgaggtcggcgagcgctacctgggtacggtcgtcaagacgaccaccttcggcgcgttcgtctccctgctgcccggcaaggacggtctgctgcacatctcgcagatccgcaagctcgccggcggcaagcgcgtggagaacgtcgaggacgtcctcggcgtgggcgcgaaggtccaggtcgagatcgccgagatcgactcccgcggcaagctctccctgatccccgtgatcgagggcgaagcgggcgacgacgacaagaaggacgacgccgacaagtga

SEQ ID NO: 1740 - protein, 739 aa, Streptomyces coelicolor A3(2)
MENETHYAEAVIDNGAFGTRTIRFETGRLARQAAGSAVAYLDDDTMVLSATSASKNPKDQLDFFPLTVDVEERMYAAGKIPGSFFRREGRPSEDAILTCRLIDRPLRPSFKKGLRNEIQVVATIMALNPDHLYDVVAINAASASTQLAGLPFSGPIGGVRVALIRGQWVAFPTHTELEDAVFDMVVAGRVLEDGDVAIMMVEAEATDKTIKLVEGGAEAPTEEVVAAGLDAAKPFIKVLCRAQADLAAKAAKPTGEFPIFLDFQDDVLEALTGAVKPELTQALTIAGKQEREAELDRVKGLAAEKLLPEFEGREKEISAAYRALTKSLVRERVIKEKKRIDGRGVTDIRTLAAEVEAIPRVHGSALFERGETQILGVTTLNMLRMEQQLDTLSPVTRKRYMHNYNFPPYSVGETGRVGSPKRREIGHGALAERAIVPVLPTREEFPYAIRQVSEALGSNGSTSMGSVCASTMSLLNAGVPLKAPVAGIAMGLISQEINGETHYVALTDILGAEDAFGDMDFKVAGTKEFVTALQLDTKLDGIPASVLAAALKQARDARLHILDVMMEAIDTPDEMSPNAPRIITVKIPVDKIGEVIGPKGKMINQIQEDTGADITIEDDGTIYIGAAQGSQAEAARATINGIANPTMPEVGERYLGTVVKTTTFGAFVSLLPGKDGLLHISQIRKLAGGKRVENVEDVLGVGAKVQVEIAEIDSRGKLSLIPVIEGEAGDDDKKDDADK

SEQ ID NO: 1741 - DNA, 2130 bp, Streptococcus agalactiae NEM316
  CDS (1)..(2130): transl_table=11
atgtcaaaacaagtctttgaaatgatttttgctggtaaaaaattagttgttgaaactggccaagtggctaaacaagcaaatggatcagttgtcgttcgttatggagattctactgtacttacagcagcagttatgtctaagaaaatgtcaacaggtgattttttcccacttcaagtcaattacgaagaaaaaatgtatgctgctgggaaatttccgggtggttttaacaaacgtgaagggcgtccaagtacggatgctaccttaacagcacgtcttattgatagaccaatccgtccgatgtttgctgagggatttcgtaacgaagtccaggtcatcaatactgttctttcatttgatgaaaatgctagcgcaccaatggctgctatgtttggttcatcattagcattatcgatttccgatattcctttcaatgggccaattgctggagttcaagttgcttatgttgatggcaattttattattaatccgacagcacaagaacaagaggcttctgcgttagaattaacggttgcaggtactaaagaagcgattaacatggttgaatctggagcgaaagaactttcagaagaaatcatgctagaggctcttcttaaaggacatgaggctgtctgtgaattaatcgcctttcaagaagagattgtaactgctattggtaaagaaaaagccgaagtagaacttcttcaagttgatccagaacttcaagcagaaattattgctactcataacatagctttacaggctgcagtacaagttgaagagaaaaaggctagagaagcagctacagaagcagttaaagaagtagttataggtgaatatgaggcgcgttacgctgaacatgaagaatatgatcgcattatgcgtgatgttgctgaaattttagaacaaatggaacatgcagaagttcgtcgcctcattacagaagataaggttcgtcctgatggacgtcgtgtggatgagattcgtccattagatgcagtgattgattttttaccacaagttcatggatcaggtctctttacacgaggacaaacccaagcattatcagtattaacgttagcacctatgggtgaagcacaaatcattgatgggctaacaccagagtataagaaacgctttatgcaccactataacttcccacaatattcagttggtgagacgggacgttatggagctgcagggcgtcgtgaaattggtcacggtgctttaggagagcgtgcattagaacaagtccttccaagcttggaggagtttccgtatgctatccgactagttgcagaagttttagaatcaaacggttcatcatctcaggcttctatatgtgctggaacgcttgctcttatggcaggtggtgtgcctataaaagctccggttgctggtattgccatgggactcatatcagatggaacaaactacacagtccttactgatattcaaggattagaagaccattttggcgatatggactttaaggttgcgggtacacgtgaagggattacagcacttcaaatggatattaaaattgaaggtattacccctcaaattttggaagaagctcttgcgcaagctaaaaaagcacgctttgaaattcttgatgtccttcatggagctatcgcagagccacgtccacaattagcaccaacggcacctaagattgatatgataaaaatcgatgttgataagattaaagttgtcatcggtaaaggcggcgaaactatcgataaaatcatcgctgaaacaggtgttaagattgatattgatgaagaaggaaatgtatctatcttctctagtgatcaggctgctattgatcgtacgaaagacattattgcaagtttagtacgtgaagcaaaagtgggagaagtttaccatgctaaagtagttcgtatcgagaaattcggtgcctttgtcaacctctttgataaaacagatgcattggtacatatttcagaaattgcatggacacgtacagcaaatgtagctgatgttcttgaaattggtgaagaagttgatgtgaaagtcatcaaaattgatgataaagggcgagttgatgcctctatgaaagcattattaccacgtcctccaaaagctgacaatcctaaaaaggaatcttaa

SEQ ID NO: 1742 - protein, 709 aa, Streptococcus agalactiae NEM316
MSKQVFEMIFAGKKLVVETGQVAKQANGSVVVRYGDSTVLTAAVMSKKMSTGDFFPLQVNYEEKMYAAGKFPGGFNKREGRPSTDATLTARLIDRPIRPMFAEGFRNEVQVINTVLSFDENASAPMAAMFGSSLALSISDIPFNGPIAGVQVAYVDGNFIINPTAQEQEASALELTVAGTKEAINMVESGAKELSEEIMLEALLKGHEAVCELIAFQEEIVTAIGKEKAEVELLQVDPELQAEIIATHNIALQAAVQVEEKKAREAATEAVKEVVIGEYEARYAEHEEYDRIMRDVAEILEQMEHAEVRRLITEDKVRPDGRRVDEIRPLDAVIDFLPQVHGSGLFTRGQTQALSVLTLAPMGEAQIIDGLTPEYKKRFMHHYNFPQYSVGETGRYGAAGRREIGHGALGERALEQVLPSLEEFPYAIRLVAEVLESNGSSSQASICAGTLALMAGGVPIKAPVAGIAMGLISDGTNYTVLTDIQGLEDHFGDMDFKVAGTREGITALQMDIKIEGITPQILEEALAQAKKARFEILDVLHGAIAEPRPQLAPTAPKIDMIKIDVDKIKVVIGKGGETIDKIIAETGVKIDIDEEGNVSIFSSDQAAIDRTKDIIASLVREAKVGEVYHAKVVRIEKFGAFVNLFDKTDALVHISEIAWTRTANVADVLEIGEEVDVKVIKIDDKGRVDASMKALLPRPPKADNPKKES

SEQ ID NO: 1743 - DNA, 2310 bp, Corynebacterium efficiens YS-314
  CDS (1)..(2310): transl_table=11
gtggcaccgatgatcaccgaaagaactaaacatgaggagaacaactcgcatatgagcgaagttaagtatttcgaagacaccgactatggcgttattgaagccatcgccaccattgacaacggtgacttcggaacccgcaccatccgtttcgagaccggccagctggcccgccaggcagatggtgctgtgaccacttacctcgacgatgagacgatgctgctggccaccaccaccgcatccaaccagccccgcgaaggcctcgatttcttcccgctgaccgtggacgtggaagaacgtatgtacgccgccggccgtatccccggttccttcttccgccgtgagggccgcccctccacggaggccatcctggcctgtcgtctgatcgaccgtccgctgcgccccaccttcgtcaaggggctgcgcaacgaggtccaggtgatcatcaccgtcatgtccgtcagccccgaggacagctacgatgtcgtggccatcaacggtgcctccgccgccacccgcatctccggtctgccggtctccggtgccgtcggcggtgtccgcatggcactgatcgccgatgagaaccaccccgaggggcagtgggtggcattccccaccgctgagcagcagaaggcctccgtcttcgagctcgttgtcgccggccgtctcgttgagcgcaagcgtggaaacaagaccttctccgatgtcgccgtgatgatggtggaggccggtgcctccgagaacgtcgtcgagcgcatcaaggagggagcacccgccccgacagagaagaccgtcgccgagggcctggaggccgcgaagccgttcattgatctgctgtgccgtgctcaggagggtctggcccagcgcgtggccaaggagacccgtgagttcccgctgttccccgcctactccgatgaggtgtacgcagcggtggagaagcaggcctccaagaagctgacccagctgatgaccatcaagggcaagaacgagcgcgagaacgccaccaatgacttcatggttgaggtcgaggagaagctgatcggccgtttcgaggatgacctcggtgccgctgttgcctccaaggagatccgtgcagcctacaactcgctcatgaagaagatcgtgcgcggcaagatcctctccgaggggttccgcatcgacggtcgcggagtctccgatatccgtgatctcggcgtggaggtcgaactgatcccacgtgcacacggttcctccctcttcgagcgcggcgagacccagatcctcggtgtcaccaccctggacatgctcaagatggagcagcatatcgattccctggcgccggtggacaccaagcgttacatgcaccactataacttcccgccgtactccaccggtgagacgggtcgtgtgggttcccccaagcgtcgtgagatcggccatggtgcgctcgccgagcgtgccgtgctgccggtgatcccgtcccgcgaggatttcccgtacgccatccgtcaggtctccgaggcgctggggtccaacggttccacctccatgggttccgtctgtgcttccacgctgtcgctgtacaacgccggtgtgcccctgaaggcaccggtggccggtatcgccatgggcctggtctccgatgaggtcgacggcaagaccgaatacgtcgccctcaccgatatcctcggtgccgaggatgccttcggtgatatggacttcaaggtcgcaggcaccgccgagttcatcaccgcactgcagctggacaccaagctcgacggcatcccctccaaggttcttgccgatgccctggagcaggcacgcgatgcccgtctcgccatcctcgagaccatggccgaggtcatcgacggacccgatgagatgagccagttcgccccgcgcatcaccaccatccagatcccggtttccaagatcggtgagctgatcggaccgaagggcaagaacatcaacgccctgaccgaggagaccggtgcgaacatctccattgaggatgacggcaccgtgttcatctccgccgccagcggtgaggctgccgaggccgcgatcgagaagatcaacgccctggccaacccacagctgccgaaggtcggcgagcgtttcctgggcactgtggtcaaggccaccgccttcggcgcgttcgtgtccctgctgccgggccgtgacggcctggtccacatctccaagctgggcaacggcaagcgtgtagagaaggtcgaggacgtggtcaccgtcggtgagaagctccaggtggagatcgccgacatcgacaaccgcggcaagatctcgctcgttccggtggtcgaggaggattaa

SEQ ID NO: 1744 - protein, 769 aa, Corynebacterium efficiens YS-314
MAPMITERTKHEENNSHMSEVKYFEDTDYGVIEAIATIDNGDFGTRTIRFETGQLARQADGAVTTYLDDETMLLATTTASNQPREGLDFFPLTVDVEERMYAAGRIPGSFFRREGRPSTEAILACRLIDRPLRPTFVKGLRNEVQVIITVMSVSPEDSYDVVAINGASAATRISGLPVSGAVGGVRMALIADENHPEGQWVAFPTAEQQKASVFELVVAGRLVERKRGNKTFSDVAVMMVEAGASENVVERIKEGAPAPTEKTVAEGLEAAKPFIDLLCRAQEGLAQRVAKETREFPLFPAYSDEVYAAVEKQASKKLTQLMTIKGKNERENATNDFMVEVEEKLIGRFEDDLGAAVASKEIRAAYNSLMKKIVRGKILSEGFRIDGRGVSDIRDLGVEVELIPRAHGSSLFERGETQILGVTTLDMLKMEQHIDSLAPVDTKRYMHHYNFPPYSTGETGRVGSPKRREIGHGALAERAVLPVIPSREDFPYAIRQVSEALGSNGSTSMGSVCASTLSLYNAGVPLKAPVAGIAMGLVSDEVDGKTEYVALTDILGAEDAFGDMDFKVAGTAEFITALQLDTKLDGIPSKVLADALEQARDARLAILETMAEVIDGPDEMSQFAPRITTIQIPVSKIGELIGPKGKNINALTEETGANISIEDDGTVFISAASGEAAEAAIEKINALANPQLPKVGERFLGTVVKATAFGAFVSLLPGRDGLVHISKLGNGKRVEKVEDVVTVGEKLQVEIADIDNRGKISLVPVVEED

SEQ ID NO: 1745 - DNA, 2106 bp, Pseudomonas putida KT2440
  CDS (1)..(2106): transl_table=11
gtgaacccggtaatcaagactttccagttcggtcaatcgaccgtcactctcgaaacgggccgtattgcccgtcaggcaaccggcgccgtgctggttaccgtcgacaacgacgtcaccgtgctggtgactgtggtaggcgccaaacaggctgatccaggcaagggtttcttcccgctgtcggttcactaccaggaaaagacctacgccgctggcaagatcccaggtggcttcttcaagcgtgaaggccgtccttccgagaaagagacgctgacctcgcgcctgatcgaccgtccgatccgtccgctgttcccggaaggcttcatgaacgaagtgcaggtcgtctgcaccgtggtttccaccagcaagaagaccgacccggacatcgctgcgatgatcggtacctcggctgccctggccatttccggcattccgttcgaaggcccgatcggcgctgcccgcgttgccttccacgaaagcactggctacctgctgaacccgacctatgagcaactggctgcctcgagcctggacatggtcgttgccggtacctccgacgctgtactgatggttgaatcggaagctcaagagctgaccgaagaccagatgctgggtgccgtactgttcgcccacgacgaattccaggctgttatccaggctgtcaaagagctggctgccgaagctggcaagccgacttgggactggaaacctgccgttgccaacaccgagctgttcaatgctatccgcgccgagttcggcgaagcggtttcgcagggttacaccatcaccgtcaaagccgaccgctacgcgcgtctgggtgagctgcgtgaccaggcggttgccaagttctccggtgaagaaggccagccttcggcttccgaagtaaaagagatcttcggcgaaatcgaataccgcaccgttcgcgaaaacatcgtcaacggcaagccacgtatcgacggccgcgacaacaagaccgtacgcccgctgaacatcgaagtgggtgtgctgccaaaaactcacggttcggcactgttcacccgtggcgaaacccaggccctggtcgttgcgaccctgggtactgcccgtgatgcccagctgctggacaccctcgaaggcgagaagaaagaccccttcatgctgcactacaacttcccaccgttctcggtaggtgagtgtggccgcatgggcggtgctggccgtcgcgaaatcggccacggccgtctggcccgccgttcggttcaggccatgctgcctgctgctgacgtgttcccgtacaccatccgcgtggtttcggaaatcaccgaatccaacggttccagctccatggcttcggtctgcggtgcttccctggccctgatggacgccggtgtgccgatgaaggcgccggttgccggtatcgccatgggcctggtcaaggaaggcgacaagttcgcagtcctgactgacatcctgggtgacgaagaccacctgggcgacatggacttcaaggtagccggtaccgccaaaggcgtcaccgcgctgcagatggacatcaagatcaacggcatcaccgaagagatcatggaaatcgccctgggccaagccctggaagcgcgcctgaacatcctcggccagatgaaccaggttattggccagtcgcgtaccgaactgtcggccaacgccccgaccatgatcgcgatgaagatcgacaccgacaagatccgtgacgtcatcggtaaaggcggcgccaccattcgcgccatctgcgaagagaccaaggcttcgatcgacatcgaagacgacggctcgatcaagatcttcggcgaaaccaaggaagcggcagatgctgccaagcagcgcatcctgggcatcaccgctgaggccgagatcggcaagatctacgtcggcaaggttgagcgcattgtcgacttcggcgccttcgtcaacatcctgcctggcaaggacggtttggtgcacatctccatgctgagcgatgctcgcgtcgagaaagtcaccgacatcctcaaggaaggccaggaagttgaagtgcttgtactggacgtggacaaccgcggccgtatcaagctgtcgatcaaagacgtccctgcggccaaggcctcgggcgtctaa

SEQ ID NO: 1746 - protein, 701 aa, Pseudomonas putida KT2440
MNPVIKTFQFGQSTVTLETGRIARQATGAVLVTVDNDVTVLVTVVGAKQADPGKGFFPLSVHYQEKTYAAGKIPGGFFKREGRPSEKETLTSRLIDRPIRPLFPEGFMNEVQVVCTVVSTSKKTDPDIAAMIGTSAALAISGIPFEGPIGAARVAFHESTGYLLNPTYEQLAASSLDMVVAGTSDAVLMVESEAQELTEDQMLGAVLFAHDEFQAVIQAVKELAAEAGKPTWDWKPAVANTELFNAIRAEFGEAVSQGYTITVKADRYARLGELRDQAVAKFSGEEGQPSASEVKEIFGEIEYRTVRENIVNGKPRIDGRDNKTVRPLNIEVGVLPKTHGSALFTRGETQALVVATLGTARDAQLLDTLEGEKKDPFMLHYNFPPFSVGECGRMGGAGRREIGHGRLARRSVQAMLPAADVFPYTIRVVSEITESNGSSSMASVCGASLALMDAGVPMKAPVAGIAMGLVKEGDKFAVLTDILGDEDHLGDMDFKVAGTAKGVTALQMDIKINGITEEIMEIALGQALEARLNILGQMNQVIGQSRTELSANAPTMIAMKIDTDKIRDVIGKGGATIRAICEETKASIDIEDDGSIKIFGETKEAADAAKQRILGITAEAEIGKIYVGKVERIVDFGAFVNILPGKDGLVHISMLSDARVEKVTDILKEGQEVEVLVLDVDNRGRIKLSIKDVPAAKASGV

SEQ ID NO: 1747 - DNA, 2127 bp, Vibrio vulnificus CMCP6
  CDS (1)..(2127): transl_table=11
atgttcgaaaaaccagttgttaaaacgttccagtacggtaaccacacggttactctagaaactggcgttatcgcacgtcaagcaaccgctgctgttatggttactatggacgacactgcagtatttgtttctgttgtcggtaagaaagaagcagttccaggtcaggacttcttccctctaaccgtaaactaccaagagcgtacttacgctgcaggtaaaatcccaggtggtttcttcaagcgtgaaggccgtccttctgaaggtgaaacgctgactgctcgtctaatcgaccgcccaattcgtcctctattccctgagggttttaataacgaagtacaagttatcgcaacggtagtgtctgttaacccagacgtacagccagatatcccaacaatgattggtacctctgcagcgcttgctatttctggtatcccattcaacggtcctatcggcgcggcacgtgttggtcacattgacggtcaacttgtactaaacccaagcaacactgaactaaacgcatctcgtctagatcttgttgttgcgggtactgaatctgcagtgctaatggttgagtcagaagctgacaaccttactgaagaagaaatgctatctgcagtggtatttggtcacgaccaacaacaagcagtgatcaaagcaatcaacgaattcgcagcagaagttgcgacgccatcttggaactgggttgctcctgaagcgaacacagctcttaacgagaaagtggcggatctagcagaagcgaaacttgttgaagcttacaaaattactgaaaagatggctcgttacgaccgtatccatgagattgcggcagaggttaatgcagttatccttgctgaagatccagaagcagatgcaaaagaaattcacactatcttccacgatcttgagaagacggttgtgcgtcgtagcatcattgctggcaacccacgtatcgatggccgtgaaaaagacatggttcgtgcactagatgtacgtactggcgttcttccacgtactcacggttcttcactattcactcgtggtgagactcaggcgctagtaacggcgacgctaggtactcaacgtgatgcgcaaatcatcgacgagctaacgggtgagaagaaagattacttcctactgcactacaacttccctccatactgtgtaggcgaaacgggttttgtcggttctccgaagcgtcgtgaaatcggtcacggtaaacttgcgaagcgtggtattgctgcagtaatgccatcaattgatgagttcccatacacagtacgtgttgtttcggaaatcacagaatctaacggttcatcttcaatggcttctgtatgtggtacttctctagcgcttatggacgctggtgtgccaatcaaggcttctgttgctggtatcgcaatgggtctggttaaagaaggcgacgattttgttgttctttcagatatccttggtgacgaagaccacctaggcgacatggactttaaagttgcgggtacttctactggtatcactgcacttcaaatggacatcaagatcgaaggtattacgaaagagatcatgcaaattgcgcttaaccaagctcaaggcgcgcgtaagcacatcctatctgtgatggatcaagctatctctggtgctcgtgacgatatctctgagttcgctcctcgcatccacacgatgaagatcagcgcagacaagatcaaagacgttatcggtaaaggtggcgcagtgatccgtgctctaactgaagagacaggcacaaccatcgaaatcgaagatgacggtactatcaagattgcagcaacagaaggtgcggcagcgaaagaagcgatccgtcgtattcaagagatcaccgctgaagttgaagtgggcgtaatctacacaggtaaagtagctcgcctagctgattttggtgcgttcgtaacgattcttccaggtaaagatggtcttgttcacatttctcaaatcgctgacaagcgtgtagagaaagtgtctgactacctaactgaaggtcaagaagttcaagttaaagtacttgaaatcgaccgccaaggccgcgttcgtctaagcatgaaagaagcggtagaaaagccagttgaagcagaagcgccagcggcagaagaagagtaa

SEQ ID NO: 1748 - protein, 708 aa, Vibrio vulnificus CMCP6
MFEKPVVKTFQYGNHTVTLETGVIARQATAAVMVTMDDTAVFVSVVGKKEAVPGQDFFPLTVNYQERTYAAGKIPGGFFKREGRPSEGETLTARLIDRPIRPLFPEGFNNEVQVIATVVSVNPDVQPDIPTMIGTSAALAISGIPFNGPIGAARVGHIDGQLVLNPSNTELNASRLDLVVAGTESAVLMVESEADNLTEEEMLSAVVFGHDQQQAVIKAINEFAAEVATPSWNWVAPEANTALNEKVADLAEAKLVEAYKITEKMARYDRIHEIAAEVNAVILAEDPEADAKEIHTIFHDLEKTVVRRSIIAGNPRIDGREKDMVRALDVRTGVLPRTHGSSLFTRGETQALVTATLGTQRDAQIIDELTGEKKDYFLLHYNFPPYCVGETGFVGSPKRREIGHGKLAKRGIAAVMPSIDEFPYTVRVVSEITESNGSSSMASVCGTSLALMDAGVPIKASVAGIAMGLVKEGDDFVVLSDILGDEDHLGDMDFKVAGTSTGITALQMDIKIEGITKEIMQIALNQAQGARKHILSVMDQAISGARDDISEFAPRIHTMKISADKIKDVIGKGGAVIRALTEETGTTIEIEDDGTIKIAATEGAAAKEAIRRIQEITAEVEVGVIYTGKVARLADFGAFVTILPGKDGLVHISQIADKRVEKVSDYLTEGQEVQVKVLEIDRQGRVRLSMKEAVEKPVEAEAPAAEEE

SEQ ID NO: 1749 - DNA, 2163 bp, Bradyrhizobium japonicum USDA 110
  CDS (1)..(2163): transl_table=11
atgttcaataagcattcagtcgagatcgactggggcggacgccctctcaagctcgaaaccggcaagatcgcccgccaggccgacggcgccgtcgtcgccacctatggcgagaccgtggtgctcgccaccgtcgtcgcggcgaaggcgccgcgcgaaggcgtcgacttcctgccgctgaccgtcgactaccaggagaagacctacgccgccggccgcattcccggcggctatttcaagcgtgagggccgtccgaccgagaaggagacgctggtctcccgcctgatcgaccgcccgatccgtccgctgttcgtcgacggttggcgcaacgagacccaggtgatcgccaccgtgctgtcgcacgacatggagaacgatcccgatatcgtcgcgctggtggcctcgtcggctgcgctgaccctgtcgggcgctcccttcaagggtccgatcggcgccgcgcgcgtcggcttcgtcaatgacgaatacgtgctcaacccgacgctcgacgagatggtcgacacccagctcgacctcgtcgtcgccggcacggccgacgccgtgctgatggtggaatcggaagccaaggaactgaacgaagacatcatgctcggcgcggtgatgttcggtcaccgccacttccagccggtgatcaacgcgatcatcgagctcgccgagaaggccgccaaggagccgcgcgaagtcaccgtcatcgacaatgccgcgctcgagaaggaaatgctcggcctcgtcgagcaggaactgcgcgccgcctacgccattccggtcaagcaggatcgctacgccgcggtcggcaaggtcaaggaaaaggtgatcgcccattatttccccgaagggcaggaaccgaaatacgacaagctgcgcatcgccggcgtgttcaaggagctcgaggccaagatcgttcgctggaacatcctcgacaccggcaagcgcatcgacggccgcgactccaagaccgtgcgcaacatcatcgccgaagtcggcgtgctgccgcgcgcccacggctcggcgctgttcacccgcggcgagacccaggcgatggtcgtgaccacgctcggcaccggcgaggacgagcagtacatcgacgcgctgtcgggaacgtacaaagagacgttcctgctgcactacaacttccctccctattcggtcggtgagaccggccgcctcggcggcaccaagcgccgcgagatcggccatggcaagctcgcctggcgcgcgatccacccggtgctgccgccgcatcacgagtttccgtacacgatccgcgtggtctccgagatcaccgaatccaacggctcctcgtcgatggcttcggtctgcggcgcctcgctcgcgctgatggacgccggcgtgccgctgaagcggccgaccgcgggcatcgcaatgggcctgatcctcgaagacaagcgctttgcggttctctccgacatcctcggtgacgaggatcatctcggcgacatggacttcaaggtcgccggcacggaatcgggcatcacctcgctccagatggacatcaagatcgagggcatcaccgaggagatcatgaaggtcgctctcggccaggccaaggatgggcgtatccacatcctcggcgagatggccaaggcgctgaccaacgcccgcgccgagctcggcgaatacgcgccgcgcatcgagaccttcaagatcccgaccgacaagatccgcgaagtgatcggcaccggcggcaaggtgatccgcgagatcgtcgagaagaccggcgccaaggtcaacatcgaggacgacggcaccgtgaaggtcgcctccagcgacggcgaggcgatgaaggccgcgatcaagtggatcaagtcgatcgcgtccgagcccgaagtcggccagatctatgacggcaccgtcgtcaaggtgatggagttcggcgccttcgtgaacttcttcggctccaaggacggtctcgttcacatcagccagctcgcttcggcgcgcgtgcagaagacctccgacgtcgtcaaggaaggcgacaaggtcaaggtcaagctgctcggcttcgacgaccgcggcaagacccgcctgtcgatgaaggtggtcgaccagaccaccggcgaggacctcgaggccaaggacaaggtcgccgagggcgagaaggccccgcgcgaagcggccggcgagtaa

SEQ ID NO: 1750 - protein, 720 aa, Bradyrhizobium japonicum USDA 110
MFNKHSVEIDWGGRPLKLETGKIARQADGAVVATYGETVVLATVVAAKAPREGVDFLPLTVDYQEKTYAAGRIPGGYFKREGRPTEKETLVSRLIDRPIRPLFVDGWRNETQVIATVLSHDMENDPDIVALVASSAALTLSGAPFKGPIGAARVGFVNDEYVLNPTLDEMVDTQLDLVVAGTADAVLMVESEAKELNEDIMLGAVMFGHRHFQPVINAIIELAEKAAKEPREVTVIDNAALEKEMLGLVEQELRAAYAIPVKQDRYAAVGKVKEKVIAHYFPEGQEPKYDKLRIAGVFKELEAKIVRWNILDTGKRIDGRDSKTVRNIIAEVGVLPRAHGSALFTRGETQAMVVTTLGTGEDEQYIDALSGTYKETFLLHYNFPPYSVGETGRLGGTKRREIGHGKLAWRAIHPVLPPHHEFPYTIRVVSEITESNGSSSMASVCGASLALMDAGVPLKRPTAGIAMGLILEDKRFAVLSDILGDEDHLGDMDFKVAGTESGITSLQMDIKIEGITEEIMKVALGQAKDGRIHILGEMAKALTNARAELGEYAPRIETFKIPTDKIREVIGTGGKVIREIVEKTGAKVNIEDDGTVKVASSDGEAMKAAIKWIKSIASEPEVGQIYDGTVVKVMEFGAFVNFFGSKDGLVHISQLASARVQKTSDVVKEGDKVKVKLLGFDDRGKTRLSMKVVDQTTGEDLEAKDKVAEGEKAPREAAGE

SEQ ID NO: 1751 - DNA, 2160 bp, Xylella fastidiosa Temecula1
  CDS (1)..(2160): transl_table=11
ttgcaaacactcagcatagttgatccgtttataaagcatcatcctaaggaaactctcgtggcaaaaatcaccaaaaccttccagtatggcaagcataccgtgaccctggaaaccggcgaagtcgcccgtcaggcgagtggagctgttatcgtcaagatggatgacactgtgcttctggtcactgttgttgctgcaaaaactgcgcgagaggggcaggattttttcccattgacggttgattatcaggagaagttctatgccggtgggcggatcccgggtagcttctttaagcgtgaaggccgtgccaccgaaaaagaaacgttgatttctcgattgattgaccgtccgatccgtccgttgtttcctgaagattacaagaacgaagttcagattatcgctatggttatgtcactcgatccggaaatcgacggtgatattcccgcaatgattggtgcttcagctgcattatcactggctggtattccgtttaagggaccgattggtgctgctaaggttggttacaatgatggtcaatatatcctcaatcccactgtcagtgaactgaaaaaatctcagttggagcttgttgtcgctggtactgccaatgccgtgctgatggttgagtctgaggctgcattgctttccgaagaagtaatgttaggggcggttattttcggtcatcgcgaaatgcaaaaagtgattcaggtgattgattcactgaccgcagaagcttgtacgcagccgtctgattgggtgcccccggccaagaatgatgctttggtcattgcgttgaagaaagtaattggtggtcgcttgtccgacgctttccatatcagagacaagttgcagcgtcgcgacgcgatcgctgctgttaaagatgatgtgattcagcagttggctggccgtcttgaagttgagggctggaacttggcggaattgttaaaggaattcggtgaactggaataccgtactatgcgtgatgcactgttggacactaaagtccgcattgatggacgctctctggaagctgtacgcccgatcaccgtaaaggttggggttctgccgcgtgttcatggttccgggttatttacacgtggagagactcaagcgattgtagtcactactttgggtacagcgcgcgatggccaagtaattgatgcagtcactggtgaatataaggaaaattttttattccattacaacttcccgccatattcagtgggcgaatgtggccgttttggagtaccgaagcgccgtgagatcggtcacggccgtcttgctaggcgcggggtgttggctgtgatgccgagtttggatgaattcccatacacgatccgtgttgtctctgagatcaccgaatcgaacggttcctcatctatggcttcggtgtgcggttcctcgctggcgctcatggatgctggtgtgccggtgaaagcaccagtggctggcattgcgatgggcttagtcaaggaaggggagcgctttgttgtgttgagcgacattctcggtgacgaagatcaccttggcgatatggatttcaaggttgctggtacctccgaaggagtgtccgcgttacagatggacattaagatcgaaggcataacagaagagattatgaggcaggctctacagcaggctaaagttggacgtctgcatatccttggcgagatggacaaggcactggctgcaccgcgtgccgagttgtccgactacgctcctcgcctgctgacgattaagattcatcctgacaaaatccgcgatgtcattggtaaaggtggttcgaccatccaggcgatcactaaggagactggaacacagatcgatattcaggacgatggtacgatcgttatcgcttcagtcaacaatgctgcagcccgggaggctaagcgtcgtattgagcaaattacctcggatgttgagccgggtcggatttatgagggcaaggttgctaagattatggattttggcgcttttgtgactattttgcctggaaaagatggtttagtgcacgtttcccagatatccagcgagcgtgtggagcgtgttggcgacaagctgaaggaaggcgatgtggttcgtgtgaaggtcttagaagttgataagcaaggtcgaatccgtctttcgatcaaagcagtggaggaagaggttgccagcatatga

SEQ ID NO: 1752 - protein, 719 aa, Xylella fastidiosa Temecula1
MQTLSIVDPFIKHHPKETLVAKITKTFQYGKHTVTLETGEVARQASGAVIVKMDDTVLLVTVVAAKTAREGQDFFPLTVDYQEKFYAGGRIPGSFFKREGRATEKETLISRLIDRPIRPLFPEDYKNEVQIIAMVMSLDPEIDGDIPAMIGASAALSLAGIPFKGPIGAAKVGYNDGQYILNPTVSELKKSQLELVVAGTANAVLMVESEAALLSEEVMLGAVIFGHREMQKVIQVIDSLTAEACTQPSDWVPPAKNDALVIALKKVIGGRLSDAFHIRDKLQRRDAIAAVKDDVIQQLAGRLEVEGWNLAELLKEFGELEYRTMRDALLDTKVRIDGRSLEAVRPITVKVGVLPRVHGSGLFTRGETQAIVVTTLGTARDGQVIDAVTGEYKENFLFHYNFPPYSVGECGRFGVPKRREIGHGRLARRGVLAVMPSLDEFPYTIRVVSEITESNGSSSMASVCGSSLALMDAGVPVKAPVAGIAMGLVKEGERFVVLSDILGDEDHLGDMDFKVAGTSEGVSALQMDIKIEGITEEIMRQALQQAKVGRLHILGEMDKALAAPRAELSDYAPRLLTIKIHPDKIRDVIGKGGSTIQAITKETGTQIDIQDDGTIVIASVNNAAAREAKRRIEQITSDVEPGRIYEGKVAKIMDFGAFVTILPGKDGLVHVSQISSERVERVGDKLKEGDVVRVKVLEVDKQGRIRLSIKAVEEEVASI

SEQ ID NO: 1753 - DNA, 2118 bp, Clostridium tetani E88
  CDS (1)..(2118): transl_table=11
atgagtcacgtacttgaaactgatatagcaggaagaacccttaaagtagaatatggaaaagtaggaatgctttccaattgtgctatattagtaagctatggagatacagtggtacttataaatgcaaatgcgtctaaagaaccaagagatggaatagatttctttccattaagtgtagaatatgaggagagactttattctgttggaaaaatacctggaggatttataaaaagagagggaagacctacagagaatgctatattacatgctagagctatagatagacccctaagacctctatttccaaaaggatatagaaatgatgttcaaatagtatgcactgtcctatctgtagaatctgataatcaaccagatatattagctatgaatggagcatctttagctctatgtctatctagcataccttttacgactccagtagctaatgtttccgtagggctaattaatggagactttatattaaatccaactcaaagtcaaagagaagaaagtatcttaaatttaactgtttcagctacaaaggaaagagttatgatgattgaagctggtgctgaagaagtagatgaagatactatgtataatgcaataagatttggtttcgaacaatgtcaaaaaatagtggaattccaagaagaggcaatgagaagatttgggaaagaaaaagtagaaccagttttatacttagtggataaagatatagaaaaagaagtaagagaattcgcatttcctatggttaaagaagctatgtacatttcagataaagaccttagaaatgaaaaaatagatgaagtaaaagaaaaagtgaaagaggagtttgaagaaaagtatccagagaatgattcagatatttcagaagctttatataaaatgcaaaaagaagtagtaagaaatatgatacttagagaaaaaagacgtccagatgaaagggcttttgacgaaataagaaaaataagctgtgaagtaggattacttccaagaactcatggtacaggactatttacaagaggattaactcaagtaatgacagctgctaccattggacctttagcagatgtacaaattctcgatagtatagaagatgaagaatttaaaagatatatgcatcactataactttccttcttacagtgtaggggaaactagacctttaagaggaccaggtagaagagaaataggtcatggagctttagcagaaaaagcattagaaccattaataccatctgaagaagatttcccatatactataagacttgtatccgaagttttaagttcaaatggatctacatcacaggcaagtgtttgtgggagtacactagcattattagatgcaggtgtacctataaaaagaccagcagcaggaatagctatggggcttgttactaatgatgatttaacagaagaaaaaattttaactgatatacaaggcatagaagacttttttggagatatggactttaaagttgcgggtacagaaaaaggaataaccgctctacaagtagatacaaagataagtggattatcagacaactgtataaaagaaaccttaataaaagcaaaagatgctagaatgtatatattaggtaaaattaaagagtgtataccagagcacagagcagaactttcaccttatgcaccaagagtctatactatgactatagcaccagaaaaaataagagatgtaataggtgctggtggtaaaacaataaataaaataataggtgaaacaggagttcaaatagacataaaagaagatggaaaaatatatgttatgtcttctgatagtgtaggagctaatagagctttaaagatgataaatgatttaactaaagatgtggaagcaggagaaatttatttaggtaaagttactagaacaactaattttggggcttttgttgaaatacttccaggaaaagaaggattagtacacatttcaaaattagattttacaagagtaaataaggttgaagatgtggtttcagttggagatgaaatattagtaaaagtaacagatatagatgatcaaggaagaataaatctttcaagaagagatgcaataaagaaagaagaagacgaaaaaactaaagaaaataatcattaa

SEQ ID NO: 1754 - protein, 705 aa, Clostridium tetani E88
MSHVLETDIAGRTLKVEYGKVGMLSNCAILVSYGDTVVLINANASKEPRDGIDFFPLSVEYEERLYSVGKIPGGFIKREGRPTENAILHARAIDRPLRPLFPKGYRNDVQIVCTVLSVESDNQPDILAMNGASLALCLSSIPFTTPVANVSVGLINGDFILNPTQSQREESILNLTVSATKERVMMIEAGAEEVDEDTMYNAIRFGFEQCQKIVEFQEEAMRRFGKEKVEPVLYLVDKDIEKEVREFAFPMVKEAMYISDKDLRNEKIDEVKEKVKEEFEEKYPENDSDISEALYKMQKEVVRNMILREKRRPDERAFDEIRKISCEVGLLPRTHGTGLFTRGLTQVMTAATIGPLADVQILDSIEDEEFKRYMHHYNFPSYSVGETRPLRGPGRREIGHGALAEKALEPLIPSEEDFPYTIRLVSEVLSSNGSTSQASVCGSTLALLDAGVPIKRPAAGIAMGLVTNDDLTEEKILTDIQGIEDFFGDMDFKVAGTEKGITALQVDTKISGLSDNCIKETLIKAKDARMYILGKIKECIPEHRAELSPYAPRVYTMTIAPEKIRDVIGAGGKTINKIIGETGVQIDIKEDGKIYVMSSDSVGANRALKMINDLTKDVEAGEIYLGKVTRTTNFGAFVEILPGKEGLVHISKLDFTRVNKVEDVVSVGDEILVKVTDIDDQGRINLSRRDAIKKEEDEKTKENNH

SEQ ID NO: 1755 - DNA, 2217 bp, Tropheryma whipplei str. Twist
  CDS (1)..(2217): transl_table=11
ttggatgacgtgcagttttctgagggagtgatagataacggacggtttggcactcgcacgattaggttcgagactggccgtctcgcgaggcaggctcagggctccgtcgttgcttatctggatggcgagacgatgcttttgtcttctaccagcgtcggcaagcagccgaaggaagattgtgattttttcccgctcacggttgatgtcgaggagcgttcctatgctgcaggaaaaataccgggttcatactttcgtcgtgagggaaggccctccacagaggctattcttgcatgcaggctgattgacaggcccctgcggcccagttttaatgccgggctgcggaatgaggttcaggtaatagttactgttcttagcattgctccaggcgaattctatgaagctttggcaataaatgcggcgagtgcatcaacccttgtatctggcctgcctttctctggcccaattggcggtgtgcgtctcgctcttatagatggtcagtgggttgcctttccgagatatgaagacctgtccggggccgtgtttgacctaactgttgcaggacgggtgtttgtcaatgagtctggcaaggaagatattgcaatcatgatggttgaggcagaggccacagaatctgcctgggatcttattcattctcatggcgctaaaaagcccaatgaggaggttattgaggaaggaatcgagtcagcaaaggtctttatacgtaccctgtgtgacatacagcgtgatttggcaagcaagttgtcattgagccatacggagccggatttgtatccggattattccgatagtgtacattcctttgtggagggtctggttaaatctgacctcgagaaagtctatcggggcaatcatgattcgggatacgctccgaatgctttatctgcgtccgatgagataaagcaaaaagcgtatgatgcttttcatgacgcagtgctctcgggtcgattcgatcaagatagcctttctcagtttccgcatgcgtacaaggcggtcctaaaagatgttgttagaacttgcgttcttgagggttttgcccgaatggatggtcgtgggctttccgatatacgccccttggatgcggaggtccaagttgtccctcgcgttcatggatcggctgtatttcagaggggcgagacacaggtcttgggcgttacaacccttaatatgctcaaaatggagcagcagatagattctttggcgccgattgtatcaaagcggtatattcatcactacaatttccccccgtattcaacgggcgaagtcggtcgtgttggtagtccgaagcgcagggagataggtcacggcttccttgccgagcgcgcacttgttccggttctgccgagccgcgaagattttccgtatgcaatccgacaggtttcagaggcattgggctccaacggctccacatccatgggttctgtttgtgcctcgacattatcgcttctgaatgccggtgttccacttcgggcgccagttgctggaatagctatgggtcttatcagcggtcgtgttgatggcgaaatgcgatatgttacgctaacggatatttccggctcggaagatgctttgggggatatggattttaaagttgctgggacatctgattttataactgcgcttcagcttgatacgaagctcgatgggattccagcacatgttttgagtgaggctctggcacatgcccggtctgcgcgtttggcaattctagatgttttaactcgcgtaatagattctcccgatcagatgtcggaatatgccccccgtgttgtaagagtaaagattcctgttcaaaagattggcgagctgattggtccaaagggtaaggtgataaattccattcaggatgagacaggtgcggaaatttctatcgaggatgatggaacggtgtatataggatcatctcaggccgattcttcagagaaagccgtcgcaatggtgaattccattgtaaacccagtagagccttgcgttggtagccagtttctcgggactgttgtaaaaaatatgcccttcggttcttttataagtcttgttcctggtaaggatggcttgcttcatatatctgagatacgtaagatggtagacgggagacatcttgaaagtgtcgatgaggtcctgagcgttggtcagaaggtgcttgttgaggtatcaaagatcgacgataggggtaaattgtgccttgtcgctgtcaagtag

SEQ ID NO: 1756 - protein, 738 aa, Tropheryma whipplei str. Twist
MDDVQFSEGVIDNGRFGTRTIRFETGRLARQAQGSVVAYLDGETMLLSSTSVGKQPKEDCDFFPLTVDVEERSYAAGKIPGSYFRREGRPSTEAILACRLIDRPLRPSFNAGLRNEVQVIVTVLSIAPGEFYEALAINAASASTLVSGLPFSGPIGGVRLALIDGQWVAFPRYEDLSGAVFDLTVAGRVFVNESGKEDIAIMMVEAEATESAWDLIHSHGAKKPNEEVIEEGIESAKVFIRTLCDIQRDLASKLSLSHTEPDLYPDYSDSVHSFVEGLVKSDLEKVYRGNHDSGYAPNALSASDEIKQKAYDAFHDAVLSGRFDQDSLSQFPHAYKAVLKDVVRTCVLEGFARMDGRGLSDIRPLDAEVQVVPRVHGSAVFQRGETQVLGVTTLNMLKMEQQIDSLAPIVSKRYIHHYNFPPYSTGEVGRVGSPKRREIGHGFLAERALVPVLPSREDFPYAIRQVSEALGSNGSTSMGSVCASTLSLLNAGVPLRAPVAGIAMGLISGRVDGEMRYVTLTDISGSEDALGDMDFKVAGTSDFITALQLDTKLDGIPAHVLSEALAHARSARLAILDVLTRVIDSPDQMSEYAPRVVRVKIPVQKIGELIGPKGKVINSIQDETGAEISIEDDGTVYIGSSQADSSEKAVAMVNSIVNPVEPCVGSQFLGTVVKNMPFGSFISLVPGKDGLLHISEIRKMVDGRHLESVDEVLSVGQKVLVEVSKIDDRGKLCLVAVK

SEQ ID NO: 1757 - DNA, 2208 bp, Tropheryma whipplei TW08/27
  CDS (1)..(2208): transl_table=11
gtgcagttttctgagggagtgatagataacggacggtttggcactcgcacgattaggttcgagactggccgtctcgcgaggcaggctcagggctccgtcgttgcttatctggatggcgagacgatgcttttgtcttctaccagcgtcggcaagcagccgaaggaagattgtgattttttcccgctcacggttgatgtcgaggagcgttcctatgctgcaggaaaaataccgggttcatactttcgtcgtgagggaaggccctccacagaggctattcttgcatgcaggctgattgacaggcccctgcggcccagttttaatgccgggctgcggaatgaggttcaggtaatagttactgttcttagcattgctccaggcgaattctatgaagctttggcaataaatgcggcgagtgcatcaacccttgtatctggcctgcctttctctggcccaattggcggtgtgcgtctcgctcttatagatggtcagtgggttgcctttccgagatatgaagacctgtccggggccgtgtttgacctaactgttgcaggacgggtgtttgtcaatgagtctggcaaggaagatattgcaatcatgatggttgaggcagaggccacagaacctgcctgggatcttattcattctcatggcgctaaaaagcccaatgaggaggttattgaggaaggaatcgagtcagcaaaggtctttatacgtaccctgtgtgacatacagcgtgatttggcaagcaagttgtcattgagccatacggagccggatttgtatccggattattccgatagtgtacattcctttgtggagggtctggttaaatctgacctcgagaaagtctatcggggcaatcatgattcgggatacgctccgaatgctttatctgcgtccgatgagataaagcaaaaagcgtatgatgcttttcatgacgcagtgctctcgggtcgattcgatcaagatagcctttctcagtttccgcatgcgtacaaggcggtcctaaaagatgttgttagaacttgcgttcttgagggttttgcccgaatggatggtcgtgggctttccgatatacgccccttggatgcggaggtccaagttgtccctcgcgttcatggatcggctgtatttcagaggggcgagacacaggtcttgggcgttacaacccttaatatgctcaaaatggagcagcagatagattctttggcgccgattgtatcaaagcggtatattcatcactacaatttccccccgtattcaacgggcgaagtcggtcgtgttggtagtccgaagcgcagggagataggtcacggcttccttgccgagcgcgcacttgttccggttctgccgagccgcgaagattttccgtatgcaatccgacaggtttcagaggcattgggctccaacggctccacatccatgggttctgtttgtgcctcgacattatcgcttctgaatgccggtgttccacttcgggcgccagttgctggaatagctatgggtcttatcagcggtcgtgttgatggcgaaatgcgatacgttacgctaacggatatttccggctcggaagatgctttgggggatatggattttaaagttgctgggacatctgattttataactgcgcttcagcttgatacgaagctcgatgggattccagcacatgttttgagtgaggctctggcacatgcccggtctgcgcgtttggcaattctagatgttttaactcgcgtaatagattctcccgatcagatgtcggaatatgccccccgtgttgtaagagtaaagattcctgttcaaaagattggcgagctgattggtccaaagggtaaggtgataaattccattcaggatgagacaggtgcggaaatttctatcgaggatgatggaacggtgtatataggatcatctcaggccgattcttcagagaaagccgtcgcaatggtgaattccattgtaaacccagtagagccttgcgttggtagccagtttctcgggactgttgtaaaaaatatgcccttcggttcttttataagtcttgttcctggtaaggatggcttgcttcatatatctgagatacgtaagatggtagacgggagacatcttgaaagtgtcgatgaggtcctgagcgttggtcagaaggtgcttgttgaggtatcaaagatcgacgataggggtaaattgtgccttgtcgctgtcaagtag

SEQ ID NO: 1758 - protein, 735 aa, Tropheryma whipplei TW08/27
MQFSEGVIDNGRFGTRTIRFETGRLARQAQGSVVAYLDGETMLLSSTSVGKQPKEDCDFFPLTVDVEERSYAAGKIPGSYFRREGRPSTEAILACRLIDRPLRPSFNAGLRNEVQVIVTVLSIAPGEFYEALAINAASASTLVSGLPFSGPIGGVRLALIDGQWVAFPRYEDLSGAVFDLTVAGRVFVNESGKEDIAIMMVEAEATEPAWDLIHSHGAKKPNEEVIEEGIESAKVFIRTLCDIQRDLASKLSLSHTEPDLYPDYSDSVHSFVEGLVKSDLEKVYRGNHDSGYAPNALSASDEIKQKAYDAFHDAVLSGRFDQDSLSQFPHAYKAVLKDVVRTCVLEGFARMDGRGLSDIRPLDAEVQVVPRVHGSAVFQRGETQVLGVTTLNMLKMEQQIDSLAPIVSKRYIHHYNFPPYSTGEVGRVGSPKRREIGHGFLAERALVPVLPSREDFPYAIRQVSEALGSNGSTSMGSVCASTLSLLNAGVPLRAPVAGIAMGLISGRVDGEMRYVTLTDISGSEDALGDMDFKVAGTSDFITALQLDTKLDGIPAHVLSEALAHARSARLAILDVLTRVIDSPDQMSEYAPRVVRVKIPVQKIGELIGPKGKVINSIQDETGAEISIEDDGTVYIGSSQADSSEKAVAMVNSIVNPVEPCVGSQFLGTVVKNMPFGSFISLVPGKDGLLHISEIRKMVDGRHLESVDEVLSVGQKVLVEVSKIDDRGKLCLVAVK

SEQ ID NO: 1759 - DNA, 2106 bp, Pseudomonas syringae pv. tomato str. DC3000
  CDS (1)..(2106): transl_table=11
gtgaacccggtaatcaaaaagtttcagttcggtcaatcgaccgtaaccctcgagacaggccgtatcgcccgtcaagcctctggcgcagtattggtcaccgttgacgacgacgtcagcgtacttgtgactgtggtcggcgccaaacaggctgacgctggcaaaggcttcttccctctgtccgtgcactatcaggaaaaaacctacgctgccggcaagattcctggtggtttcttcaagcgtgaaggccgtccttccgagaaagaaaccctgacctcgcgcctgatcgaccgtccgatccgtccgctgtttccagaaggcttcatgaacgaagtgcaggttgtctgcacagtcgtttccaccagcaagaagatcgatccggacatcgctgcgatgatcggtacttcggctgctctggccatctccggtatcccgtttgacggtccggttggcgctgcgcgcgttgctttccacgaaagcaccggctacctgctgaacccgacttacgagcaactgcaggcttcgagcctggacatggtcgtagctggtacttccgaagccgttctgatggttgagtctgaagccaaagagctgaccgaagaccagatgctgggcgctgtgctgtttgcccacgacgagttccaggtggtcatcaacgccatcaaggaactggctgccgaagccgccaagcctacctgggactggcagccaaagcctgaagcgactgcactgctgggcgctatccgtgccgagttcggcgacgcgatctcccaggcgtacaccatcaccgtcaaagccgaccgctatgcgcgtctgggcgagctgaaagaccaggtcgttgccaagctggctgtcgaagaaggcagcccgtctgccggcgaagtcaaagcggctttcggtgaaatcgaataccgcaccgttcgcgaaaacatcgtcaacggcaagccgcgtatcgatggccgtgacactcgcactgtccgcccgctgaacatcgaagtcggcgttctgccaaagactcacggttcggcactgttcacccgtggcgaaactcaggcgctggttgttgccaccctgggtactgcacgcgacgcacagctgctcgacacccttgaaggcgagaaaaaagacccgttcatgctgcactacaacttccctccgttctcggtgggcgagtgtggtcgtatgggcggcgcaggtcgtcgcgagatcggtcacggccgtctggcacgccgcagcgtacaggctatgctgccgggcgctgatgtgttcccctacaccatccgtgttgtgtcggaaatcaccgagtccaacggttccagctccatggcttcggtctgcggcgcttctctggcactgatggacgctggtgttccgatgaaggcaccggttgccggtatcgccatgggtctggtcaaggaaggcgagaagttcgccattctgaccgacatcctgggtgacgaagatcacctgggcgacatggacttcaaagtagccggtacctccaaaggtgttaccgcgctgcagatggacatcaagatcaaaggcatcaccgaagaaatcatggagatcgctctgggccaagccctggaagctcgcctgaacatcctcggtcagatgaaccagatcatcggtcagtcgcgtaacgaattgtcggccaacgctccgaccatgatcgcgatgaagatcgataccgacaagatccgtgacgtgatcggcaagggtggcgcgaccatccgtgcaatctgcgaagagaccaaggcttcgatcgacatcgaagatgacggctcgatcaagatcttcggcgagtccaaggaagcggctgaagcagcacgtcagcgcgttctgggtatcaccgcagaagcagagatcggcaagatctacctgggcaaggttgagcgcatcgtcgatttcggcgcattcgtgaacatcctgcctggcaaggatggcctggtacacatctccatgttgagcgacgctcgcgtagagaaagtgaccgacatcctgaaagaaggtgaagaggtcgaagtactggtattggacgtggacaaccgcggtcgtatcaagctgtcgatcaaagacgtcgccgcagcgaaagcgtcgggcgtctga

SEQ ID NO: 1760 - protein, 701 aa, Pseudomonas syringae pv. tomato str. DC3000
MNPVIKKFQFGQSTVTLETGRIARQASGAVLVTVDDDVSVLVTVVGAKQADAGKGFFPLSVHYQEKTYAAGKIPGGFFKREGRPSEKETLTSRLIDRPIRPLFPEGFMNEVQVVCTVVSTSKKIDPDIAAMIGTSAALAISGIPFDGPVGAARVAFHESTGYLLNPTYEQLQASSLDMVVAGTSEAVLMVESEAKELTEDQMLGAVLFAHDEFQVVINAIKELAAEAAKPTWDWQPKPEATALLGAIRAEFGDAISQAYTITVKADRYARLGELKDQVVAKLAVEEGSPSAGEVKAAFGEIEYRTVRENIVNGKPRIDGRDTRTVRPLNIEVGVLPKTHGSALFTRGETQALVVATLGTARDAQLLDTLEGEKKDPFMLHYNFPPFSVGECGRMGGAGRREIGHGRLARRSVQAMLPGADVFPYTIRVVSEITESNGSSSMASVCGASLALMDAGVPMKAPVAGIAMGLVKEGEKFAILTDILGDEDHLGDMDFKVAGTSKGVTALQMDIKIKGITEEIMEIALGQALEARLNILGQMNQIIGQSRNELSANAPTMIAMKIDTDKIRDVIGKGGATIRAICEETKASIDIEDDGSIKIFGESKEAAEAARQRVLGITAEAEIGKIYLGKVERIVDFGAFVNILPGKDGLVHISMLSDARVEKVTDILKEGEEVEVLVLDVDNRGRIKLSIKDVAAAKASGV

SEQ ID NO: 1761 - DNA, 2136 bp, Vibrio parahaemolyticus RIMD 2210633
  CDS (1)..(2136): transl_table=11
atgttcgaaaaaccagttgttaaaacgttccagtacggtaaccacacggttactctagaaactggcgttatcgcacgtcaagctacagcagcagttatggttacaatggacgatacagcagtattcgtttcagttgttggtaaaaaagaagcagtagcgggtcaagatttcttcccactaactgtaaactaccaagagcgtacttacgctgcaggtaaaatcccaggtggcttcttcaaacgtgaaggtcgtccatctgaaggcgaaacgctaacagctcgtctaatcgaccgtccaatccgtccactattcccggacgcgttcaaaaatgaagtgcaagttattgcaacggttgtatctgtaaacccagacgttcaaccagatatcccaacaatgattggtacatctgcggctcttgctatctctggtattccattcaatggtcctatcggtgcagcacgtgttggtcacatcgatggtcagctagttcttaaccctagccaaactgagctaaacgcatcgcgtctagatctagtggttgcaggtacagagtctgcggtactaatggttgagtcagaagctgacaacctaactgaagaagaaatgctagcagcagttgtgttcggtcacgatcaacaacaagttgtaatcaatgctatcaacgagttcaaagccgaagttgctactccagcttgggattgggttgctccagaagaaaatacagcacttaagactaagattgctgaacttgctgaagctaagcttgttgaggcttaccaaatcactgagaaaatggctcgttacgaccgcatccatgagattgcagcagaagtaaacgaagcactgcttgctcaagatcctgaagcggatactaaagaaatccacacaatcttccacgatctagagaagactgttgtgcgtcgtagcatcatcgcgggtaaccctcgtatcgatggtcgtgagaaagacatggttcgtgcgctagacgtacgcactggtgttcttccacgtacacacggctctgcactgttcactcgtggtgaaactcaggccctagttactgcgactctaggtactcaacgtgatgcacaaatcatcgatgagctaactggtgagcgtaaagatcacttcctactacactacaacttccctccatactgtgtgggtgagactggtttcgtaggttctcctaagcgtcgtgaaatcggccacggtaaactggctaagcgtggtattgcagctgtaatgccatctgttgacgagttcccatacacagttcgcgttgtatcagaaatcacggaatctaacggttcatcttcaatggcttctgtatgtggtacatctctagcacttatggatgctggtgtgccaatcaaagcatctgttgcgggtatcgcgatgggtcttgtgaaagaaggcgatgactttgttgttctttctgacatccttggcgacgaagaccacctaggtgacatggactttaaagtagcaggtactagcactggtgttactgcacttcaaatggacatcaagatcgaaggtatcactaaagagatcatgcaaattgcgcttaaccaagcacaaggcgcacgtaagcacatcctatctgtaatggatgaagcgcttgctggtgctcgtgacgatatctctgagttcgctccacgtatccacacaatgaagatcagcgcagagaagatcaaagacgttatcggtaaaggtggtgcagttatccgtgctctaactgaagagactggtacaactattgaaatcgaagacgacggtacaatcaagattgcagcaactgaaggtgcagcagcgaaagaagctatccgccgtatcgaagagatcactgctgaagttgaagtaggccgtatctacactggtaaagtggctcgtctagctgactttggtgcgtttgtaacggttctaccaggtaaagatggtctagtacacatttctcaaatcgctgaaaaacgcgttgagaaagtgtctgactacctaactgaaggtcaagaagttcaagttaaagttcttgaaatcgaccgtcaaggccgtgtacgtctaagcatgaaagaagcggtagagaagcctgctgaagaagcagcggcagaagcaccagcagcgaaagaagagtaa

SEQ ID NO: 1762 - protein, 711 aa, Vibrio parahaemolyticus RIMD 2210633
MFEKPVVKTFQYGNHTVTLETGVIARQATAAVMVTMDDTAVFVSVVGKKEAVAGQDFFPLTVNYQERTYAAGKIPGGFFKREGRPSEGETLTARLIDRPIRPLFPDAFKNEVQVIATVVSVNPDVQPDIPTMIGTSAALAISGIPFNGPIGAARVGHIDGQLVLNPSQTELNASRLDLVVAGTESAVLMVESEADNLTEEEMLAAVVFGHDQQQVVINAINEFKAEVATPAWDWVAPEENTALKTKIAELAEAKLVEAYQITEKMARYDRIHEIAAEVNEALLAQDPEADTKEIHTIFHDLEKTVVRRSIIAGNPRIDGREKDMVRALDVRTGVLPRTHGSALFTRGETQALVTATLGTQRDAQIIDELTGERKDHFLLHYNFPPYCVGETGFVGSPKRREIGHGKLAKRGIAAVMPSVDEFPYTVRVVSEITESNGSSSMASVCGTSLALMDAGVPIKASVAGIAMGLVKEGDDFVVLSDILGDEDHLGDMDFKVAGTSTGVTALQMDIKIEGITKEIMQIALNQAQGARKHILSVMDEALAGARDDISEFAPRIHTMKISAEKIKDVIGKGGAVIRALTEETGTTIEIEDDGTIKIAATEGAAAKEAIRRIEEITAEVEVGRIYTGKVARLADFGAFVTVLPGKDGLVHISQIAEKRVEKVSDYLTEGQEVQVKVLEIDRQGRVRLSMKEAVEKPAEEAAAEAPAAKEE

SEQ ID NO: 1763 - DNA, 2133 bp, Streptococcus pyogenes SSI-1
  CDS (1)..(2133): transl_table=11
atgtcaaaacaaacctttacaacaacatttgcagggaaaccccttgttgttgaagttggtcaagtcgctaagcaagccaatggggcaaccgttgttcgttatggcgactcaactgtcctgaccgcaactgtcatgtctaagaaaatggcaacgggtgatttcttccctcttcaagttaattacgaagaaaaaatgtatgccgctggtaaattcccaggaggtttcatgaaacgtgagggacgcccttcaacagatgcgaccttgacagctcgcttgattgaccgcccgattcgtcccatgtttgccgaaggtttccgtaacgaagtacaagtgattaacactgtcctttcttatgatgaaaatgctagcgctccaatggcagcgatgtttggctcatctctggccttgtccatctcagatattccatttaatggaccgattgcaggtgttcaagttggctatattgatggcgagttcatcatcaatccagataaagaacaaatggaagcgtcgctcttagaattaaccgttgctggtagcaaagaagccatcaacatggttgaatctggtgccaaagaattatcagaagacatcatgcttgaggctcttttaaaaggtcaccaagccattcaagaattaattgccttccaagaacaaatcgtagcagttgttggtaaagagaaagctgaggttgaactgttacaggttgatgcagacttacaagctgatattgtggctaagtacaatgctcaactgcaaaaagctgttcaagttgaagagaaaaaagcgcgtgaagcagccacagaagccgttaaagaaatggttaaggctgagtacgaagagcgttacgcagaagacgaaaacctagcaaccattatgcgtgacgtggcagaaatccttgaacaaatggagcatgctgaagtgcgccgcctcattacagaggacaagattcgtcctgacggtcgtaagattgacgaaattcgtccgcttgatgctgtggttgacttcttgccaaaagtccatggatcaggtctctttacacgtggtcaaactcaggcgctatcagttttgactttggcaccaatgggagaaactcaaatcattgatggtctggctccagagtacaaaaaacgctttttacaccactacaatttcccgcaatattcagttggtgaaacgggtcgttacggagctgctggtcgtcgtgaaattggacacggtgccttaggtgaacgcgctcttgaacaagtcttgccaagcttagaagagtttccttatgccattcgtttagttgccgaagttctagaatctaacggttcgtcttctcaggcttctatctgtgctggtacccttgctctgatggctggtggtgtaccaatcaaggctcctgtggcagggattgccatgggtctcatttcagacgggacgaattatacagtcttgaccgatatccaaggtcttgaagaccactttggagatatggactttaaagtggcaggaactcgtgaagggattacagcccttcaaatggatattaagattgcaggaattacccctcaaatcctagaagaagctcttgcacaagctaaaaaagctcgctttgaaattcttgatgtgattgaagcaactatcgctgaaccacgtcctgagttagccccaactgcaccgaaaattgacaccatcaagattgacgtagacaaaatcaaagtggttatcggtaaaggtggcgaaaccattgataagattattgccgaaacgggtgtcaaaattgatattgatgacgaaggaaatgtctctatctactcaagtgaccaagctgccattgaccgcactaaagaaattattgcaggtcttgttcgtgaagccaaggtaggcgaagtttaccatgccaaggttatccgtatcgagaaatttggtgcctttgtcaacctctttgacaaaacagatgcacttgttcacatttctgaaattgcttggactagaacagctaacgtgtcagatgtccttgaagtgggtgaagacgttgatgttaaggtcattaagattgatgagaagggtcgtgtggatgcctcaatgaaagctttgattccacgcccaccaaaacaagagaaaaaagaagaaaaacatgactaa

SEQ ID NO: 1764 - protein, 710 aa, Streptococcus pyogenes SSI-1
MSKQTFTTTFAGKPLVVEVGQVAKQANGATVVRYGDSTVLTATVMSKKMATGDFFPLQVNYEEKMYAAGKFPGGFMKREGRPSTDATLTARLIDRPIRPMFAEGFRNEVQVINTVLSYDENASAPMAAMFGSSLALSISDIPFNGPIAGVQVGYIDGEFIINPDKEQMEASLLELTVAGSKEAINMVESGAKELSEDIMLEALLKGHQAIQELIAFQEQIVAVVGKEKAEVELLQVDADLQADIVAKYNAQLQKAVQVEEKKAREAATEAVKEMVKAEYEERYAEDENLATIMRDVAEILEQMEHAEVRRLITEDKIRPDGRKIDEIRPLDAVVDFLPKVHGSGLFTRGQTQALSVLTLAPMGETQIIDGLAPEYKKRFLHHYNFPQYSVGETGRYGAAGRREIGHGALGERALEQVLPSLEEFPYAIRLVAEVLESNGSSSQASICAGTLALMAGGVPIKAPVAGIAMGLISDGTNYTVLTDIQGLEDHFGDMDFKVAGTREGITALQMDIKIAGITPQILEEALAQAKKARFEILDVIEATIAEPRPELAPTAPKIDTIKIDVDKIKVVIGKGGETIDKIIAETGVKIDIDDEGNVSIYSSDQAAIDRTKEIIAGLVREAKVGEVYHAKVIRIEKFGAFVNLFDKTDALVHISEIAWTRTANVSDVLEVGEDVDVKVIKIDEKGRVDASMKALIPRPPKQEKKEEKHD

SEQ ID NO: 1765 - DNA, 2136 bp, Salmonella enterica subsp. enterica serovar Typhi Ty2
  CDS (1)..(2136): transl_table=11
ttgcttaatccgatcgttcgtgaattccagtacggccagcataccgttacgctggaaactggcatgatggcgcgtcaggccactgccgctgttatggtaagcatggatgacaccgccgtattcgttaccgttgtcggccagaaaaaagccaagccaggccaggacttcttcccactgaccgttaactatcaggagcgtacctacgctgctggtcgtatcccgggcagcttcttccgtcgtgaaggccgtccaagcgaaggcgaaaccctgatcgcgcgtctgattgaccgcccggttcgtccgctgttcccggaaggtttcgttaacgaagtgcaggttattgcgaccgtcgtttccgttaacccgcaggttaacccggatatcgtggcgatgatcggcgcatccgctgcgctgtcgctgtccggcattccgttcaacggcccaatcggcgcggcgcgcgtaggttacatcaatgaccagtacgtactgaacccgacccaggacgagctgaaagaaagcaagctggacctggtggttgccggtaccgaagcggctgtgctgatggtggaatccgaagctgaactgctgagcgaagacactatgctgggcgcggtggtattcggtcacgagcagcagcaggttgttatccaggcgatcaacgatctggtgaaagaagccggtaaaccgcgttgggactggcagccggaagccgtcaacgacgcgttgaacgcgcgtgttgctgcgctggctgaatctcgtctgagcgacgcgtaccgcatcaccgataaacaagagcgctatgctcaggttgacgtaatcaaatccgaaaccatcgagcagcttattgcagaagatgaaactctggatgctaacgagctgggtgaaatcctgcacgccatcgagaaaaacgtggtacgtagccgcgtactggcaggcgagccgcgtattgatggccgtgaaaaagacatgatccgtggtctggacgtgcgcactggcgtactgccgcgaactcacggttccgctctgtttacccgtggtgaaacgcaggcgctggttaccgcgactctgggtactgcccgtgacgcgcaggtgcttgatgaactgatgggcgagcgcactgacagcttcctgttccactacaacttccctccgtactccgtaggcgaaaccggcatggtcggttctccgaagcgtcgtgaaattggtcacggtcgtctggcgaagcgcggcgtgctggcagtgatgccggacatggataaattcccgtacaccgttcgcgtggtgtctgaaatcaccgaatccaacggttcttcttctatggcttccgtgtgcggcgcttctctggcgctgatggacgctggcgtgccaattaaagccgccgtagcaggtatcgctatgggtctggtgaaagaaggcgacaactacgttgtactgtctgacattctgggcgacgaagatcacctgggcgatatggacttcaaagtggcgggttcccgcgacggtatctctgcgctgcagatggatatcaaaattgaaggtatcaccaaagagatcatgcaggttgcgttgaaccaggctaaaggtgcgcgtctgcacatcctgggcgtgatggaacaggcgatcaacgcgccgcgcggcgatatctctgaatttgcgccgcgtatccataccatcaagatcagcacggacaagatcaaagacgtgatcggtaaaggcggttctgtgatccgcgcgctgactgaagagaccggcaccaccatcgaaattgaagatgacggtactgtgaagatcgcggcgaccgacggtgaaaaagcgaaatacgctatccgtcgtatcgaagagatcaccgcagagatcgaagtcggccgtatctacaatagtaaagtgacccgtatcgttgactttggcgcgtttgttgccatcggcggcggtaaagaaggtctggttcacatctctcaaatcgcggataagcgtgtagagaaagtgaccgattatctgcagatgggtcaggaagtcccggttaaggttctggaagttgaccgccagggccgtgtacgtctgagcattaaagaagcaaccgagcagtctcaacctgcggctgcgccggaagctccggcgagcgaacaggccgagtaa

SEQ ID NO: 1766 - protein, 711 aa, Salmonella enterica subsp. enterica serovar Typhi Ty2
MLNPIVREFQYGQHTVTLETGMMARQATAAVMVSMDDTAVFVTVVGQKKAKPGQDFFPLTVNYQERTYAAGRIPGSFFRREGRPSEGETLIARLIDRPVRPLFPEGFVNEVQVIATVVSVNPQVNPDIVAMIGASAALSLSGIPFNGPIGAARVGYINDQYVLNPTQDELKESKLDLVVAGTEAAVLMVESEAELLSEDTMLGAVVFGHEQQQVVIQAINDLVKEAGKPRWDWQPEAVNDALNARVAALAESRLSDAYRITDKQERYAQVDVIKSETIEQLIAEDETLDANELGEILHAIEKNVVRSRVLAGEPRIDGREKDMIRGLDVRTGVLPRTHGSALFTRGETQALVTATLGTARDAQVLDELMGERTDSFLFHYNFPPYSVGETGMVGSPKRREIGHGRLAKRGVLAVMPDMDKFPYTVRVVSEITESNGSSSMASVCGASLALMDAGVPIKAAVAGIAMGLVKEGDNYVVLSDILGDEDHLGDMDFKVAGSRDGISALQMDIKIEGITKEIMQVALNQAKGARLHILGVMEQAINAPRGDISEFAPRIHTIKISTDKIKDVIGKGGSVIRALTEETGTTIEIEDDGTVKIAATDGEKAKYAIRRIEEITAEIEVGRIYNSKVTRIVDFGAFVAIGGGKEGLVHISQIADKRVEKVTDYLQMGQEVPVKVLEVDRQGRVRLSIKEATEQSQPAAAPEAPASEQAE

SEQ ID NO: 1767 - DNA, 2127 bp, Bacteroides thetaiotaomicron VPI-5482
  CDS (1)..(2127): transl_table=11
atgattaacccaattgttaagacgatcgagttacctgatggaagaaccatcacactcgagacgggaaagttggcaaaacaggcagacggttctgtaatgctacgcatgggaaacaccatgttattagctactgtttgtgccgctaaagatgcagttcccggaacagatttcatgcctttgcaggtagagtataaagaaaaatttgcggcattcggccgttttcctggtggcttcaccaagagagaaggtagagcttccgattatgagattttgacttgtcgtctcgttgaccgcgctctccgcccactattccctgataattatcacgcagaagtatatgtaaatatcatccttttctctgctgacggtgtagatatgccggatgcactggccggattggcagcttctgcagcactcgctgtttcagatattcctttcaacggaccgatctcggaagtacgtgtagcacgtatcgacggtcagtttgtaatcaatcctacttttgaccaactggaaaaagctgatatggacctgatggttgccgctacttatgataacatcatgatggtagaaggcgaaatgcacgaagtatctgaagctgaactgctggaagcaatgaaggtagctcacgaagctatcaaagtgcattgcaaggctcagatggagctgactgaagaagtaggcaagacagtgaaacgtgaatataaccatgaagtaaacgatgaagaattgcgtaaggcagttcgtgaggcttgttatgacaaggcttatgcagtagctgcttccggaaataacaacaagcacgaacgtttcgatgcttttgatgctatccgcgaagagttcaaggctcagttctctgaagaagaacttgaagaaaaagctccgctgatcgaccgttactatcatgatgtagaaaaagaagcgatgcgtcgttcaattcttgacgaaggcaagcgcctggatggtcgtaagactactgaaatccgcccgatctggtgtgaggttggtcctctgcccggtcctcacggatctgctattttcactcgtggtgaaactcagtctctgacttctgtcactttgggtacgaagctcgacgaaaagattatcgacaatgtattggaacacggaaaagaacgtttcctgctgcactataacttccctcctttctctacaggcgaagcaaaagctcaacgtggtgtaggccgtcgtgaaatcggtcacggtcacttggcttggcgtgccttgaaaggacagattcctgctgactatccatacgtagtacgtgttgtttcggaaatcctcgaatctaacggttcttcttctatggctaccgtatgtgctggaacattggcattgatggatgccggtgtgaagatcaagaagccggtatcgggtattgctatgggactgatcaagaatccgggcgaagaaaaatatgctgtattgtctgacatcctcggtgacgaagaccacctcggagatatggacttcaaggtaaccggaacaagagacggtatcactgctactcagatggatatcaaggtagacggtctgtcttacgaaattctggaacgtgctttgaaccaggctaaagaaggacgtatgcacatcctcgacaagatcaccgagacaatcgctgaaccgcgtgctgacctgaaagaccatgctcctcgcattgaaacaatgactattcctaaagaatttatcggagctgtaatcggccctggtggaaaaatcattcaaggtatgcaggaagagaccggtgctgttatcactatcgaagaaacagacggtatgggacgcatcgaagtttccggaaccaacaagaaatgtattgatgatgcaatgcgcatgatcaaagcaatcgttgctgttcctgaagtaggcgaagtatataaaggtaaagttcgctctatcatgccttacggtgcattcattgaattcctgccgggtaaagacggtttgctgcacatttccgagatcgactggaaacgtctggaaacagtggaagaagccggaatcaaggaaggtgatgagatcgaagtgaaactgatcgacatcgatccgaagacaggaaaattcaaactttcaagaaaagtattgatgccaagaccggaaaagaagtaa

SEQ ID NO: 1768 - protein, 708 aa, Bacteroides thetaiotaomicron VPI-5482
MINPIVKTIELPDGRTITLETGKLAKQADGSVMLRMGNTMLLATVCAAKDAVPGTDFMPLQVEYKEKFAAFGRFPGGFTKREGRASDYEILTCRLVDRALRPLFPDNYHAEVYVNIILFSADGVDMPDALAGLAASAALAVSDIPFNGPISEVRVARIDGQFVINPTFDQLEKADMDLMVAATYDNIMMVEGEMHEVSEAELLEAMKVAHEAIKVHCKAQMELTEEVGKTVKREYNHEVNDEELRKAVREACYDKAYAVAASGNNNKHERFDAFDAIREEFKAQFSEEELEEKAPLIDRYYHDVEKEAMRRSILDEGKRLDGRKTTEIRPIWCEVGPLPGPHGSAIFTRGETQSLTSVTLGTKLDEKIIDNVLEHGKERFLLHYNFPPFSTGEAKAQRGVGRREIGHGHLAWRALKGQIPADYPYVVRVVSEILESNGSSSMATVCAGTLALMDAGVKIKKPVSGIAMGLIKNPGEEKYAVLSDILGDEDHLGDMDFKVTGTRDGITATQMDIKVDGLSYEILERALNQAKEGRMHILDKITETIAEPRADLKDHAPRIETMTIPKEFIGAVIGPGGKIIQGMQEETGAVITIEETDGMGRIEVSGTNKKCIDDAMRMIKAIVAVPEVGEVYKGKVRSIMPYGAFIEFLPGKDGLLHISEIDWKRLETVEEAGIKEGDEIEVKLIDIDPKTGKFKLSRKVLMPRPEKK

SEQ ID NO: 1769 - DNA, 2115 bp, Enterococcus faecalis V583
  CDS (1)..(2115): transl_table=11
atgacagaaaaacaagtctttaaaacaacttggggcggccgcccactagaagtagaaatcggccaattagccaaacaagccaatggagctgtcttagtacgttacggcgatacggtcgttttaagtgctgctgttgcctctaaagaagcaaaagatgtagactttttcccattaactgtaaactatgaagaaaaaatgtatgcggtaggaaaaattcctggcggcttcattaaacgtgaaggtcgtccaagtgaacgtgcgacattaaccgctcgtttaatcgaccgtcctattcgtccaatgttctcagaaggcttccgtaacgaagtccaaatcacgaacatcgttatgagtgtggagcaagactgtacaccagaaatggctgcaatgtttgggtcttccttagcgttagcaatttcagatattccgtttgatggaccaattgctggtgttgacgttggtcgtattaatggcgaatatgttttaaatccaacggtagaacaagcggaacaaacagatattgaattaactgttgctggaacaaaagaagccatcaatatggttgaaagtggtgccaaagaagtatcagaagaagatatgttaggtgccttacttttcggttttgatgccattaaagaactagtggcgttccaagaagaaatcgttgccgctgtaggtaaaccaaagatggacgtggacttattacaagtggacgctgatcttaaaaaagaaatttttgatgcgtactacaatacaatgaaaacagccgtaatgacggaagaaaaattagcacgtgaagttgaaattgacaaagtaaaagatacagtcaaagaagtttacgctgaaaaattttcggaacacgaagaagaagcacaattactaaaagaagtgaaacaaattgcggaagatcttgaaaaagatgtcgtacgtgagttaatcacgatcgataagattcgcccggatggccgtaaattagacgaaattcgtcatttatcatcagaagtaagtattttaccacgtgtgcatggttctggcttatttactcggggtcaaacacaagctttatccgtttgtacattagcgcctttaggggaacatcaaattatcgatgggttgggtgtccaagatagcaaacgtttcatccatcattataacttcccgcaattctctgttggttcaacaggacgcgcgggctcaccaggtcgtcgtgaaatcggtcacggtgcgttaggtgaacgtgccttagcacaaattattccatcagaagaagacttcccttacacaatccgcttagtagcagaagtgttagaatcaaatggttcttcttcacaagcaagtatttgcgcgggaacattagcattaatggatgcgggtgtgccaattaaagcgccagttgcaggtattgcaatgggtcttgttagtgatggcgaaaactatacaatcttaacagatattcaaggtttagaagaccaccttggcgatatggactttaaagtagcaggaacgaaagacggaatcactgctttacaaatggacatcaaaatccaaggaattacagaacaaattttaacggaagcattagaccaagcgaagaaagcacggatggaaattctagaagaattaacaacaacgattgctgctcctcgtgaagaattaagtcaatatgcaccgaaaattgaaatgattcaaattaaaccagcgaaaattaaagatgtcattggtaaaggtggcgaaacaatcaacagcattattgatgaaaccggcgttaagattgatatcgatcaagacggtaacgtaagtattgcttcatcagatgctgaaatgattaaaaaagccatcaagattattgaagaattaaccaaagaagttgaagtcggtcaagtttacttagcaaaagttgtccgcattgaaaaatttggtgcgtttgttaacctaattaaaggcaaagatggcttgatccatatttctcaattagcaaacgaacgtgtgaacaacgttgaagatgtcgtgaaattaggcgacgaagtccttgtcaaagtaactgaaattgacaaacaaggccgtgtcaacgtgtcaagaaaagcgttattaaacgaagaaaacaaagaaaaataa

SEQ ID NO: 1770 - protein, 704 aa, Enterococcus faecalis V583
MTEKQVFKTTWGGRPLEVEIGQLAKQANGAVLVRYGDTVVLSAAVASKEAKDVDFFPLTVNYEEKMYAVGKIPGGFIKREGRPSERATLTARLIDRPIRPMFSEGFRNEVQITNIVMSVEQDCTPEMAAMFGSSLALAISDIPFDGPIAGVDVGRINGEYVLNPTVEQAEQTDIELTVAGTKEAINMVESGAKEVSEEDMLGALLFGFDAIKELVAFQEEIVAAVGKPKMDVDLLQVDADLKKEIFDAYYNTMKTAVMTEEKLAREVEIDKVKDTVKEVYAEKFSEHEEEAQLLKEVKQIAEDLEKDVVRELITIDKIRPDGRKLDEIRHLSSEVSILPRVHGSGLFTRGQTQALSVCTLAPLGEHQIIDGLGVQDSKRFIHHYNFPQFSVGSTGRAGSPGRREIGHGALGERALAQIIPSEEDFPYTIRLVAEVLESNGSSSQASICAGTLALMDAGVPIKAPVAGIAMGLVSDGENYTILTDIQGLEDHLGDMDFKVAGTKDGITALQMDIKIQGITEQILTEALDQAKKARMEILEELTTTIAAPREELSQYAPKIEMIQIKPAKIKDVIGKGGETINSIIDETGVKIDIDQDGNVSIASSDAEMIKKAIKIIEELTKEVEVGQVYLAKVVRIEKFGAFVNLIKGKDGLIHISQLANERVNNVEDVVKLGDEVLVKVTEIDKQGRVNVSRKALLNEENKEK

SEQ ID NO: 1771 - DNA, 2091 bp, Coxiella burnetii RSA 493
  CDS (1)..(2091): transl_table=11
atgaataaaattagaaagactttccaatatggcaaacatgaagttacatttgaaacaggagaaatggcccgccaagccacgggtgctgttgttgtccgaatgggtgacacagttttattagtatcggttgttgcaaaaaaagaagcggaagagggacgagatttttttcctcttactgtcaattaccaagaaaaaacctatgcggccggcaaaattccgggaggttattttaaacgcgaagggagacccaccgaaaaagagactttaacttcccgtctgattgatcgacccttgcgcccgctttttcctaaaggattcaccaacgaagtccaggttattgcgaccgtactttcggtggattctaaagtccccaccgatattcctgctattttaggcgcttctgccgcgatcggtttgtcaggcatccctttcaacgggtctttgggggccgcacgggtcggctatcgcggcggggaatatcttttaaacccgtctttagacgaacttaaagattcggcgcttgacctcgtggtagcggggactcgagacgctgttttaatggttgaatctgaagcacaagaattgccagagtcagtgatgctgggagcggtgttacatgggcatcaagcgatgcaggttgccattcaggcgatagctgaatttattcaagaggcgggaggtgcgaaatgggagtgggaacctccaacggtaaatacagctttagaaaaatgggtggtagaaaaatcagaagctccccttaaaaaggcctaccaaatccaagaaaaaacggcgcgtcaagcccaaattcaggctattcgcgatcaattgctcgccgatcgagctgccgagcgtgaaggagaggaaaacgccgttaatgaacatgagctggcagtgattttccatgaattggaacgtcgaattgtccgtgagcagatcctaaccgggcagccgcgtattgacgggcgtgataccaaaacggtgcgtcctatcaccgttaaagtgggggtgctgccccgctcgcacggatctgctttattcacgcgtggcgaaactcaagctttagtagtaacgactttaggcactgagcgcgatgcgcaatctatcgatgatctggatggcgaccgacaagaagaatttattttccattacaatttcccgccgttttgtgtcggcgaggttggctttatgagtggacctaagcgccgtgaaatcggtcacggccgattagccaagcgggcagtggtccctgttgttcctacgcttgataaatttccttacgtaattcgagttgtctcggaaattttggagtcgaatggttcgagttcgatggcaagcgtctgtggaagtagtttggcactcatggacgcgggcgtgccgacgaaagctccggtggcgggcattgccatgggattaattaaagaaaacgataaatatgccgttttatctgacattttaggggacgaagatcacttaggagatatggactttaaagtggcgggaacatcaaacggtgtaacggctttacaaatggatatcaaaatagaagggattaccaaagaaattatggaacaagcgctggaccaagccaaagaggggcgtctacatattctgagcattatgaacaaagtgttggataaaccgcgctcccaagtttcagatctagcaccgcagtatgtcacgatgaaaattaatcctgaaaaaattcgtgacgtgataggtaaaggcggggttgtcattcgagaaattactgaggcgaccaattgcgctattgatatctcagatgatgggacgatcaaaattgccgctcatactaccgaagaaggcgaggccgcaaagcgacggatcgaagagttaacggctgaggttgagttaggtaaagtttacgaaggcacggtcgttaaaattacggatttcggcgcttttgtacaaattctgccaaatactcaaggtttagtgcatatttcacaaattgcccaagaacgcgtggaaaacgtcagggactacttagaagaaggacaagtgattcgagttaaagtcattgaaattgaccgacaaggccgcgttcgcttgagcatgaaacaaatcgattaa

SEQ ID NO: 1772 - protein, 696 aa, Coxiella burnetii RSA 493
MNKIRKTFQYGKHEVTFETGEMARQATGAVVVRMGDTVLLVSVVAKKEAEEGRDFFPLTVNYQEKTYAAGKIPGGYFKREGRPTEKETLTSRLIDRPLRPLFPKGFTNEVQVIATVLSVDSKVPTDIPAILGASAAIGLSGIPFNGSLGAARVGYRGGEYLLNPSLDELKDSALDLVVAGTRDAVLMVESEAQELPESVMLGAVLHGHQAMQVAIQAIAEFIQEAGGAKWEWEPPTVNTALEKWVVEKSEAPLKKAYQIQEKTARQAQIQAIRDQLLADRAAEREGEENAVNEHELAVIFHELERRIVREQILTGQPRIDGRDTKTVRPITVKVGVLPRSHGSALFTRGETQALVVTTLGTERDAQSIDDLDGDRQEEFIFHYNFPPFCVGEVGFMSGPKRREIGHGRLAKRAVVPVVPTLDKFPYVIRVVSEILESNGSSSMASVCGSSLALMDAGVPTKAPVAGIAMGLIKENDKYAVLSDILGDEDHLGDMDFKVAGTSNGVTALQMDIKIEGITKEIMEQALDQAKEGRLHILSIMNKVLDKPRSQVSDLAPQYVTMKINPEKIRDVIGKGGVVIREITEATNCAIDISDDGTIKIAAHTTEEGEAAKRRIEELTAEVELGKVYEGTVVKITDFGAFVQILPNTQGLVHISQIAQERVENVRDYLEEGQVIRVKVIEIDRQGRVRLSMKQID

SEQ ID NO: 1773 - DNA, 2217 bp, Streptomyces avermitilis MA-4680
  CDS (1)..(2217): transl_table=11
gtggagaacgagacccactacgccgaggccgtcattgacaacggttccttcggcacccgcaccatccgcttcgagacgggccgcctggccaagcaggccgccggctccgccgtcgcgtacctggacgacgacaccatggtgctgtcggccaccaccgcctccaagaagcccaaggaaaatctcgacttcttccccctcacggtggacgtcgaggagcggatgtacgccgccggcaagatccccggcagcttcttccgccgcgagggccgtccctccgaggacgcgatcctcacctgtcgcctgatcgaccgcccgctgcgcccgtccttcaagaagggcctgcgcaacgagatccaggtcgtcgcgacgatcatggcgctcaaccccgaccacctgtacgacgtcgtcgcgatcaacgccgcgtccgcgtccacgcagctggccggcctgcccttctccggcccgatcggcggcgtccgcgtcgcgctgatcaacggccagtgggtcgcgttcccgacgcacaccgagctcgaggacgccgtcttcgacatggtcgtcgcgggccgcgccctggaggacggcgacgtcgcgatcatgatggtcgaggccgaggccaccgagaagaccatccagttggtcgcgggcggcgccgaggcgccgaccgaggaggtcgtcgccgccggtctggacgccgcgaagcccttcatcaaggtgctctgcaaggctcaggccgacctcgccgcgaaggccgccaagccgaccggcgagttcccggtcttcctcgactaccaggacgacgtcctggaggccctgaccgccgcggtcaagagcgagctctcccaggcgctcaccatcgccggaaagcaggaccgcgaggccgagctggaccgcgtcaaggagatcgccgccgagaagctgctcccgcagttcgagggtcgcgagaaggagatctccgccgcgtaccgctcgctgaccaagtccctggtgcgcgagcgcgtcatcaaggacaaggtccgcatcgacggccgaggcgtcacggacatccgtacgctcgccgccgaggtcgaggccatcccgcgtgtgcacggctcggcgctgttcgagcgtggtgagacccagatcctgggcgtcaccaccctgaacatgctccgtatggagcagcagctggacaccctctccccggtgacccgcaagcgctacatgcacaactacaacttcccgccgtactccgtcggcgagaccggccgcgtcggctccccgaagcgccgcgagatcggccacggcgcgctcgccgagcgcgcgatcgtgccggtcctgccgacgcgcgaggagttcccgtacgcgatccgtcaggtgtccgaggccctcggctccaacggatcgacgtccatgggctcggtctgcgcctccaccatgtcgctgctgaacgccggtgtgccgctgaaggcccccgtcgccggtatcgccatgggcctgatctcccaggagatcaacggcgagacgcactacgtcgccctcaccgacatcctcggtgcggaggacgccttcggcgacatggacttcaaggtcgccggcaccaaggagttcgtgaccgccctccagctcgacaccaagctggacggcatcccggcctccgtcctggccgcggccctcaagcaggcccgcgacgcccgcctccacatcctcgacgtgatgatggaagcgatcgacacgccggacgagatgtccccgaacgccccgcggatcatcaccgtcaagatccccgtggacaagatcggtgaggtcatcggccccaagggcaagatgatcaaccagatccaggaggacaccggcgccgagatcacgatcgaggacgacggcaccatctacatcggtgcccaggtcggctcgcaggccgaggccgcccgcgccacgatcaacggcatcgccaacccgaccatgccggaggtcggcgagcgctacctgggcacggtcgtcaagacgaccaccttcggtgcgttcgtgtcgctgctcccgggcaaggacggtctgctgcacatctcgcagatccgcaagctcgccggcggcaagcgcgtggagaacgtcgaggacgtgctcggtgtgggcgccaaggtccaggtcgagatcgccgagatcgactcccgcggcaagctctccctcatccccgtggtcgagggcgaaggcgacgacgagaagaaggacgacaccgacaagtga

SEQ ID NO: 1774 - protein, 738 aa, Streptomyces avermitilis MA-4680
MENETHYAEAVIDNGSFGTRTIRFETGRLAKQAAGSAVAYLDDDTMVLSATTASKKPKENLDFFPLTVDVEERMYAAGKIPGSFFRREGRPSEDAILTCRLIDRPLRPSFKKGLRNEIQVVATIMALNPDHLYDVVAINAASASTQLAGLPFSGPIGGVRVALINGQWVAFPTHTELEDAVFDMVVAGRALEDGDVAIMMVEAEATEKTIQLVAGGAEAPTEEVVAAGLDAAKPFIKVLCKAQADLAAKAAKPTGEFPVFLDYQDDVLEALTAAVKSELSQALTIAGKQDREAELDRVKEIAAEKLLPQFEGREKEISAAYRSLTKSLVRERVIKDKVRIDGRGVTDIRTLAAEVEAIPRVHGSALFERGETQILGVTTLNMLRMEQQLDTLSPVTRKRYMHNYNFPPYSVGETGRVGSPKRREIGHGALAERAIVPVLPTREEFPYAIRQVSEALGSNGSTSMGSVCASTMSLLNAGVPLKAPVAGIAMGLISQEINGETHYVALTDILGAEDAFGDMDFKVAGTKEFVTALQLDTKLDGIPASVLAAALKQARDARLHILDVMMEAIDTPDEMSPNAPRIITVKIPVDKIGEVIGPKGKMINQIQEDTGAEITIEDDGTIYIGAQVGSQAEAARATINGIANPTMPEVGERYLGTVVKTTTFGAFVSLLPGKDGLLHISQIRKLAGGKRVENVEDVLGVGAKVQVEIAEIDSRGKLSLIPVVEGEGDDEKKDDTDK

SEQ ID NO: 1775 - DNA, 2085 bp, Chlamydophila caviae GPIC
  CDS (1)..(2085): transl_table=11
atgacatttgaaactattttcgttaccctcgaagaaggcaaaacattagtatttgaaacggggaaaattgctcgccaagctaacggagctgttcttgctcgcatgcaagaaacttgggtcttttcatctgtttgtgcggccaatctcgaagaacctgtagactttctccctttaagagtcgattatcaagaaaagttttcctctataggaaaaactttaggcgggttcattaaaagagaaggtcgcccaactgaaagagaaattttaacttctcgtttgatagatcgttctatgcgtccttctttaccgaaccggttaatgcaggatgttcaagtcttatcttatgtatggtcttatgatggggtgactctccccgatcctatagctatttgtggtgtttctgcagcactagcaatttctgacattcctcaaattagtgttgtagctggtgttcgtgttggctttgtcaacaatagttgggtagttaacccaacaaaagccgaaatggatgtttctagaatggagctcgttttagcaggaaccgaaaatgctattctaatgatagagggtcattgcgacttcttaacggaagagcaggttatcgaggctattgaatttggtcataaacacatagcaaccatttgtagagcaatcaaagacttgcagcaaaaggtaggcaagaaaaagaattccgatgctattgttccccttcctgaagaagttcaatcttctgtaaatacgtttgttgaaggcaaatttgctgatcttttaaaaattaaagagaaaaaagcttttgaggctgcttcgaagcaattagaaaaagaaattgtagagaagttcctagaagaaaatgagatcttcacagcattgaatattaagacagctttcaaacaagctaagtcggattatatgcgtgctttgatacgcgaacaaagtgttcgttctgatggacgggcaataacaacaatccgtcctatttctattgacacatctttcttaccaagaacccacggaagttgtttattcactcgtggagaaacacaaactgtggccgtttgtactttaggtagcgaggctatggcgcagcgttacgaagacttgaacggtgaagggttggctaaattttatttacaatacttcttccctcctttctctgttggcgaagtaggaagaataggttctccaggaagaagagaaattggtcatggtaagcttgctgagaaagctttaagccacactcttcctgatcctgcaaagtttccttatactatccgtatagaatccaacattactgaatctaatggttcttcatccatggcttctgtttgcggaggttgtttagctttaatggatgctggggtccctattaaaactcctatagcaggtattgctatggggttaatcttagataatgatcacgtcactattctttcagatatttctggattagaagattatttaggagatatggactttaaggttgctgggaataccgaagggatcacagcattccaaatggatatcaaggtagagggcatcacccctacaattatgcaagcagccctagctcaagctaaagctggccgtcaacatatcctggatattatgaaagaggctcttgcagctccaaaaacagacttatcacaatatgctcctcgtattgaaacgatgcagattaagccaaataaaattgctactgttattggacctggaggaaaacagattcgtcaaattattgaagaagctggagtgcaaattgatattaatgactcaggtcttgtcagcatttcagcatcttctccacaagcgatagaaaaagctaagtctatgattgaaggtttagttggagaagttgaagttggtaaaatctacgaaggtcgagtgacatctattgttcctttcggggctttcgttgaaattcttcctggtaaggaaggtctttgccacatttctgaattctctaaacaacgtatagaaaacgttggtgatttcgttaagcaaggagacatcctggctgttaaattgctaagcattaatgaaaaaggccaatataaactcagccataaagctactctcagcgagtag

SEQ ID NO: 1776 - protein, 694 aa, Chlamydophila caviae GPIC
MTFETIFVTLEEGKTLVFETGKIARQANGAVLARMQETWVFSSVCAANLEEPVDFLPLRVDYQEKFSSIGKTLGGFIKREGRPTEREILTSRLIDRSMRPSLPNRLMQDVQVLSYVWSYDGVTLPDPIAICGVSAALAISDIPQISVVAGVRVGFVNNSWVVNPTKAEMDVSRMELVLAGTENAILMIEGHCDFLTEEQVIEAIEFGHKHIATICRAIKDLQQKVGKKKNSDAIVPLPEEVQSSVNTFVEGKFADLLKIKEKKAFEAASKQLEKEIVEKFLEENEIFTALNIKTAFKQAKSDYMRALIREQSVRSDGRAITTIRPISIDTSFLPRTHGSCLFTRGETQTVAVCTLGSEAMAQRYEDLNGEGLAKFYLQYFFPPFSVGEVGRIGSPGRREIGHGKLAEKALSHTLPDPAKFPYTIRIESNITESNGSSSMASVCGGCLALMDAGVPIKTPIAGIAMGLILDNDHVTILSDISGLEDYLGDMDFKVAGNTEGITAFQMDIKVEGITPTIMQAALAQAKAGRQHILDIMKEALAAPKTDLSQYAPRIETMQIKPNKIATVIGPGGKQIRQIIEEAGVQIDINDSGLVSISASSPQAIEKAKSMIEGLVGEVEVGKIYEGRVTSIVPFGAFVEILPGKEGLCHISEFSKQRIENVGDFVKQGDILAVKLLSINEKGQYKLSHKATLSE

SEQ ID NO: 1777 - DNA, 2139 bp, Bacillus cereus ATCC 14579
  CDS (1)..(2139): transl_table=11
atgagtcaagaaaagcaagtcttctcgatagatttagctggtcgccagctaacagttgaaactggtcagcttgcaaaacaagcgaacggagcagtattagtaagatatggcgatacagcggttctatctacagcaactgcatcaaaagaagcaaaaaatgtagatttcttcccacttacagtaaactatgaagagcgtttatatgcagtcggaaaaattcctggcggctttattaagcgtgaaggtcgtccaagtgaaaaagcaattttggcaagtcgtttaatcgaccgtccaattcgtccgctattcgcagatggcttccgtaacgaagtacaagttgtcagcattgtaatgagtgttgatcaagattgttcttctgaaatggcagctatgcttggttcttcattagcgttatcgatttcagatattccatttgaaggtccaatcgctggtgcgacagttggccgtattaatggcgaattcgttattaacccaacagtagaacagcaagaacaaagtgatattcacttagttgtagctggtacgaaagatgcgattaacatggttgaagcaggagcagatcaagtacctgaagaaacaatgttagaagcaattatgtttggtcatgacgaaattaaacgtctaattgcattccaagaagagattgtacaagctgtaggtaaagagaaatcagaagtgaaactttatgaagttgacgctgatcttaaccaagctgtacgtgaaatggctgaagaagatatgcattcagcaattcaagtacatgagaaacatgcacgtgaagatgcaattaacgaagtgaaaaagcgtgttattgagcattacgaagcgcaggaagctgacgctgatacattaggacaagtaaatgagattttatataaaattgtaaaagaagaagtacgtcgtcttattacagttgaaaaaatccgtccagatggccgtaaaggtgacgaaatccgtccattagcatcagaggttggtattttatctcgtacacacggttctggtttgttcactcgtggacaaacacaagcattaagtatttgtacattaggtgcattaggcgatgtgcaaattttagatggtcttggtgtagaagaatcaaaacgctttatgcaccattacaatttcccatcatttagtgttggtgaaacaagaccaatgcgtggaccaggtcgtcgtgaaatcggtcacggtgcaataggagaacgcgcacttgagcctgtaattccatctgaaaaagatttcccatacacagtacgtcttgtatctgaagttttagaatcaaatggttctacttcacaagcaagtatttgtggtagtactttagcaatgatggatgctggtgttccacttaaagctccagttgcaggtattgcaatgggtctagttaaaactggtgagcattacacaattttatctgatattcaaggtatggaagatcatttaggtgatatggactttaaagtagcaggtacagcacaaggtgtaactgcactacaaatggacattaaaatcgatggtctatctcgtgaaattttagaagaggcattacaacaagcgaaagttggtcgtgtgcacattctaaatcatatgttatctgttattccagagccacgcactgaattatcagcgtacgctccaaagattattacaatgacaattaatccagataaaatccgtgacgttatcggaccgagcggtaaacaaatcaataaaattattgaagaaactggcgttaaaattgacatcgagcaagatggcacagtattcatttcttcaataaaccaagaaatgaacgacaaagctaagaaaattatcgaagatatcgttcgcgaagtacaagtaggtgaaatctacgaagcaaaagtgaaacgtgttgagaaattcggtgctttcgttgaattattcagcggtaaagatggattagttcatatttctgaacttgcacttgagcgtgtaggtaaagtagaagacgttgtaaaaatcggtgatgtaattacagttaaagttatcgagattgacaagcaaggtcgcgtaaatctatctagaaaagtattgctaaaagaagagcaagaaaaagaagctgttaaagaagaaaacaaacaagagcagcaataa

SEQ ID NO: 1778 - protein, 712 aa, Bacillus cereus ATCC 14579
MSQEKQVFSIDLAGRQLTVETGQLAKQANGAVLVRYGDTAVLSTATASKEAKNVDFFPLTVNYEERLYAVGKIPGGFIKREGRPSEKAILASRLIDRPIRPLFADGFRNEVQVVSIVMSVDQDCSSEMAAMLGSSLALSISDIPFEGPIAGATVGRINGEFVINPTVEQQEQSDIHLVVAGTKDAINMVEAGADQVPEETMLEAIMFGHDEIKRLIAFQEEIVQAVGKEKSEVKLYEVDADLNQAVREMAEEDMHSAIQVHEKHAREDAINEVKKRVIEHYEAQEADADTLGQVNEILYKIVKEEVRRLITVEKIRPDGRKGDEIRPLASEVGILSRTHGSGLFTRGQTQALSICTLGALGDVQILDGLGVEESKRFMHHYNFPSFSVGETRPMRGPGRREIGHGAIGERALEPVIPSEKDFPYTVRLVSEVLESNGSTSQASICGSTLAMMDAGVPLKAPVAGIAMGLVKTGEHYTILSDIQGMEDHLGDMDFKVAGTAQGVTALQMDIKIDGLSREILEEALQQAKVGRVHILNHMLSVIPEPRTELSAYAPKIITMTINPDKIRDVIGPSGKQINKIIEETGVKIDIEQDGTVFISSINQEMNDKAKKIIEDIVREVQVGEIYEAKVKRVEKFGAFVELFSGKDGLVHISELALERVGKVEDVVKIGDVITVKVIEIDKQGRVNLSRKVLLKEEQEKEAVKEENKQEQQ

SEQ ID NO: 1779 - DNA, 2127 bp, Nitrosomonas europaea ATCC 19718
  CDS (1)..(2127): transl_table=11
ttgaagccaataaaaaaaagtataacctacggacgccatacactcaccattgaaaccggagaaattgccaaacaggcacatggtgcagtcattgtttccatggatgatacggttgtactggtgactgcagtaggcgataaaaaaaccaaacccggacaggatttcttcccgctcaccgtagattaccaggagaagttttattctgccggccgtattccaggaagttttttcaaacgtgaaggccgcccttccgaaaaggaaacactgacctcccggctgatcgatcgaccgatacgcccgcttttccccgatggcttttataacgaagtacaagtcgttgccatggtgctgtcatccgatactgaaatcgatgctgacattcctgcaatgatcggtacctcagcagcgctgatactctcgggtatccctttcgatggtccggtcggtgcagcgcgggtgggttatatcaataatgaatatattctcaatccgaccactacccagctcaaggaatctcaactcaatcttgtggtagccggcacgcagaaagcggtgctgatggttgaatcggaagccgatgagctttctgaagatgtcatgctcggtgctgtgacatacgggcatgatcagatgcagcaagtgatcgacatgatcaatgaactggctgatgaagcaggtgtaactgcctgggattggcagccggcagaacaggatttatcactggtcgaaaaagttacccaactggctgaagctgatctgcgcaatgcattccggctgaaacaaaaatcagccagagtcgaagcaatcaatgagatctggcagcgtgtattcaccgagttgaaagtgggtacagaggaaggccccagtgaacaggcagtcagagaaattggttttgcgcttgaagccagaatagtacgtaacagtattcttgatggggaatcccggatcgatggtcgtggcacccgcaccgttcggccaatcactattcgccatggtgtattgccgcgcactcacggttctgcgctgttcacacggggagaaacacaagcacttgcaatcaccacgctgggaacagcacgcgatgaacaaaaaatagacgcactccagggagattattccgaacgtttcatgcttcactacaacatgcctcctttcgccacgggcgaaaccggaagggtaggaacccccaaacggcgtgaaatcggtcatggacggctggccaagcgtgctctgctggcagtgataccaccagtggaagaattcggttattcgatgcgcgtggtctcggaagtgactgaatcaaacggctccagctcgatggcatctgtctgtggtggatgtctttcactcatggatgcaggtgttccactgaaagcacatgtagccggcatcgccatgggattgatcaaggaaggcaaccggtttgccgtgctgaccgacattctcggcgacgaagatcacctgggtgatatggatttcaaggtggcgggtaccgaacacggcatcactgccctgcaaatggatataaaaattcaggggatcacgaaggaaatcatgcaggttgctctgctccaggcaaaggaagggcgtctgcatattctggaaatcatgaaacaatctcttccaattgcaagagaaagtatctcggtccatgctccgcgcatcatcaaattcaagatcaacccggaaaagatccgtgatgtcatcggtaaaggcggtgcagtgattcgtgcgctaaccgaagaaaccggaacgaccatcgatatttccgatgatggttccgtgacgattgcctgtgtcagcagtgaaggtggagaacaagcgagaaaacgtatcgaagatatcactgcagatgtcgaagtcggaaggatttacgaaggaactgttctcaaattgcttgattttggcgccattgtcagcgttcttccggggaaagatggattgctccatatttcccagattgccaatgaacgggtcgaaaatgttgctgaccatctcaaagaaggacagaccgttcgtgtcaaagtactggaagcagatgaaaaaggccggctgcgactcagtatgaaagcagccagtatcagcacagaaataactgcagacaatccggacaacactgaaaaataa

SEQ ID NO: 1780 - protein, 708 aa, Nitrosomonas europaea ATCC 19718
MKPIKKSITYGRHTLTIETGEIAKQAHGAVIVSMDDTVVLVTAVGDKKTKPGQDFFPLTVDYQEKFYSAGRIPGSFFKREGRPSEKETLTSRLIDRPIRPLFPDGFYNEVQVVAMVLSSDTEIDADIPAMIGTSAALILSGIPFDGPVGAARVGYINNEYILNPTTTQLKESQLNLVVAGTQKAVLMVESEADELSEDVMLGAVTYGHDQMQQVIDMINELADEAGVTAWDWQPAEQDLSLVEKVTQLAEADLRNAFRLKQKSARVEAINEIWQRVFTELKVGTEEGPSEQAVREIGFALEARIVRNSILDGESRIDGRGTRTVRPITIRHGVLPRTHGSALFTRGETQALAITTLGTARDEQKIDALQGDYSERFMLHYNMPPFATGETGRVGTPKRREIGHGRLAKRALLAVIPPVEEFGYSMRVVSEVTESNGSSSMASVCGGCLSLMDAGVPLKAHVAGIAMGLIKEGNRFAVLTDILGDEDHLGDMDFKVAGTEHGITALQMDIKIQGITKEIMQVALLQAKEGRLHILEIMKQSLPIARESISVHAPRIIKFKINPEKIRDVIGKGGAVIRALTEETGTTIDISDDGSVTIACVSSEGGEQARKRIEDITADVEVGRIYEGTVLKLLDFGAIVSVLPGKDGLLHISQIANERVENVADHLKEGQTVRVKVLEADEKGRLRLSMKAASISTEITADNPDNTEK

SEQ ID NO: 1781 - DNA, 2130 bp, Helicobacter hepaticus ATCC 51449
  CDS (1)..(2130): transl_table=11
atgcaacacattaaacttgaatttgagaatctaagtgagcaatatagctttaattatgttgcacaagctgcaaatgggggtatactttatcaaaatggagggagtgtgcttttagcaagtgtttgcacgcaggagaatgaaaagtatgatgatgagtttttgcctttgagcgtgcagtatattgaaaaaacttatgcaaacaataaatttccatctggcttcataaaacgtgaaggtaaaccaagcgagtttgagattctcacttcaaggcttattgaccgcactttgcgcccactttttcctaaaggttatacttacataacttctattgttgttatggttttaagttatgatggaaaaagtgatttacaacttaatgcccttaatgctgctgcgtgcgcactttatgtatcagatttgccattggaaagtttgcaagataaggcagtatctggtgtccgtattgggcgtaaagatgggcattttattattaatcctacaatggagcaacttagtgaaagcgaacttaatttatttgtttcggggcgagacgatgaacttcttatgattgaaatgaaaagtataagaactgcgcaaggtgcaaatgaactaagtgaagaaaacttccttgaagcccttgaatgtgctaaaaattatattaaaaatgctacacaaacctatcatcagcaatttgctccctataagaagtctccttttgcttttgaatcagcgaatgatgagcttgatgagcagttattaaatataattcaaacacattatcatacgcccattacagaggctattaaacatatggcaaaatctgaacgacacactcagcttaaggcattgataaagcaagttgttcgtgaatgcgagattgaagatgaaaaaaaggtgcaagaacatattatggcgtataagagaaaacttgtgcgtgagatgattttacaatctcatattcgtgccgatggtcgtgggcttaaagatgtgcgccctataagtattcaaacaaatattttgccttttgcgcacggaagtgtgctttttacgcgaggacaaactcaagcacttgtgagcgctacgattggtggagataatgacgcacaaaattatgaaatgcttggcagtaaaaacgcacttaaaaagcgatttttgtttcattataatttcccaagctttagtgtaggtgaggcgagtatgataggttctgtaggtcgtagagagctaggacacggcaatttggctaaacgtgctttacattcaagtgtgcaagagcaggataaaacaattcgccttgtttcagagattttagaatctaatggttcaagttcaatggcaagtgtgtgtggtggttctttggcactatgtgcttgtggcataaaagtagaatctcttattgcaggtgtggcaatggggcttgttacacaagatgagcagtgtgcgattttgacagatattagcgggttagaagaccacgatggtgatatggattttaaggtagctggaggatataaagggattagcgcaatgcaaatggatattaaacttggtgggattacacaagagattctttgccaagcactctttcaggcaaaagaggcaagagagcagattttagcaattatggaagaagctcgcgcaaagattgtattaaatgatgtgatattaccaaagagtgagagttttatgattcctccacataagattgttgaggttattggtgctggtgggagggtaataaaagatattattgagcgatttgaagtaagtattgatttagcgcgtgaaagcggtatggtcagtgtgagtgcgagtaatgtagaaaatctgcaaaaggcaaagacttttattttacagcttgtatctagtgcggggacaaaaaaagaatatgaaaaagtagattgggaaagttatgcagtaggggagcgatttgtagggaaaattaagaaaattgttgattttggtatctttgttgagttaccacgtggaggcgatggacttattcatattagtaaaatcacaaaagataaaactcaacaattaagcgagatttttcacaatgtaagtgagctagaatgcgagattttatcacaaaataagaacaaagtagaactagggcttgttgaataa

SEQ ID NO: 1782 - protein, 709 aa, Helicobacter hepaticus ATCC 51449
MQHIKLEFENLSEQYSFNYVAQAANGGILYQNGGSVLLASVCTQENEKYDDEFLPLSVQYIEKTYANNKFPSGFIKREGKPSEFEILTSRLIDRTLRPLFPKGYTYITSIVVMVLSYDGKSDLQLNALNAAACALYVSDLPLESLQDKAVSGVRIGRKDGHFIINPTMEQLSESELNLFVSGRDDELLMIEMKSIRTAQGANELSEENFLEALECAKNYIKNATQTYHQQFAPYKKSPFAFESANDELDEQLLNIIQTHYHTPITEAIKHMAKSERHTQLKALIKQVVRECEIEDEKKVQEHIMAYKRKLVREMILQSHIRADGRGLKDVRPISIQTNILPFAHGSVLFTRGQTQALVSATIGGDNDAQNYEMLGSKNALKKRFLFHYNFPSFSVGEASMIGSVGRRELGHGNLAKRALHSSVQEQDKTIRLVSEILESNGSSSMASVCGGSLALCACGIKVESLIAGVAMGLVTQDEQCAILTDISGLEDHDGDMDFKVAGGYKGISAMQMDIKLGGITQEILCQALFQAKEAREQILAIMEEARAKIVLNDVILPKSESFMIPPHKIVEVIGAGGRVIKDIIERFEVSIDLARESGMVSVSASNVENLQKAKTFILQLVSSAGTKKEYEKVDWESYAVGERFVGKIKKIVDFGIFVELPRGGDGLIHISKITKDKTQQLSEIFHNVSELECEILSQNKNKVELGLVE

SEQ ID NO: 1783 - DNA, 2457 bp, Rhodopirellula baltica SH 1
  CDS (1)..(2457): transl_table=11
ttgtcacgaatcgggaatgtcgcttggcgattttcgcgattcttcacgttgttgcgtggcgacccagttcgccgctctttcccatcagccgttgtggctgacaaggccttgttggccagggatgaaaatcgggccggcttcggaaaagccgttcaaattgttgtttgttgtgtagatgcaggaaaagaggttgttgtgagtgttcaaaaagttcgcgtggagcgaaaaattggtgattcggtgctgtcgtttgagacaggacacatcgctaaacaagcagccggcagcgtgctggttcaatacggcgaaaccgttgtgctggtcgcggccgcatcgggtacgccacgtccgggaatcgatttcttccccttgatgtgtgattatcgcgagcgattggctgcagctggtaaattccctggtggcttcctaaaacgcgaaggtcgtcccagcacaaaagaaatcctcagctcgcgtttgatggatcgcccgatccgaccgctttggccagccggttacaaagatgaagttcaagtccaagcttgcgtgatcgccagcgacttgcaaaacgacggcgacgtattggcaatgatcggtggcgctaccgcgttgcacatcagcccactgccattcaaaggccctctgggtagcgttcgagtcggtaaggttgacggcaaattggttgccttcccaaccgccgatcaactcgaacaaagcgagttggacatgatcgtcagcggcagccgtgacatggttgccatgatcgaaggctttgccaatgaaatgcccgaagacgagatgatggaagcgattggcttcgcccatgacgccatccgcgaagtcatcgacctgcaagaagagttctataaaaaggtcaacccagagaagactccttaccagtcacctgaagacgacgggttgcttcagcgtttgaccgacgcctactacagcgacttcaaaaccgctcaacaaacttcgggtaagcaagctcgtgcggaagccgtccgtgccgttcgcgatcgtgcgatggccgacgtcattcctgatcccaacgctgctgacgccgtttgcgtcaaccgcttcaaatcagtctggcacgacctggaagaaaaggtcgttcgcgacctgatcctcgccggcacccgccccgatggccgcgaccacaactcgcttcgcgccattcactgcgaaaccgacttgttgccacgcgttcacggttcggctttgttccaacgtggcgaaacccaagctctcatcacgatcgcattgggaaccagccgcgacgaacaacgcgtcgatggcctgcaggacgagtacagcaagaagtttatgctggactacaacttcccttcgtactcggttggcgaatgccgtccgattcgtggacctggacgtcgtgaaatcggacacggttgcttagccgagcgtagcgtcgctcccgtgcttccttccgccgacgacttcccctacacaattcgcgtgatcagcgacatcaccgaatcgaacggtagctcctccatggcttccgtttgtggtgctaccctcggcctgatggcttcgggtgttccaatcagcaacccagtcgctggtatctcggtcggcctcgtccaagacggtcctgacaactggtgcttgatcactgacatcctcggaaccgaagaccacttcggcgacatggacttcaagatcgctggtactcaaaacggtatcaccggtatccagttggacctcaaagtcaccggtgtcactaacgacatcatccgcgccacgctgaaacaatcgcgtgaagctcggatcgagatcctgaagaagatgctgacgacgatcccacgtcctcgtcgcgaaatctcgccgaccgctcctcgtctgcttcgcacgaaaatctcgcccgacaagatcggtgccttgatcggtcctggcggaaagaacatccgtggaattcaagaaacgaccggtgcggtcatcgaagtcgatgatgaaggcaccgtcttggttgccagcagcaacaaagagtcggctcaagaagccatgcgtcaggtcgaggcttgcacggcaaccgttcagattggcaagatctacgacggcaccgtcagcagcatcaaagagtttggtgccttcgttgaaatccttcccggtcgcgatggactggttcacatcagcgagatgagtggcggatacatcagcagcctggaccaagtgatcgccgttggcgacgccatgaaggtcttggtcatcgatgttgacgaacacgatcgcgtgaagctcagccgtcgcaaagctctcgaagagctcggcgaagaagatcctttggccgttgaaggcgaaggtggcggcgacagcgaaggcggtggcgacggtgaagatcgcccacgtcgtcgacgcggcggcagcggcggtggtggaggcggaggtcgcggacgcggcccacgtcgaagcggtggcggacgcgatcgcgactga

SEQ ID NO: 1784 - protein, 818 aa, Rhodopirellula baltica SH 1
MSRIGNVAWRFSRFFTLLRGDPVRRSFPSAVVADKALLARDENRAGFGKAVQIVVCCVDAGKEVVVSVQKVRVERKIGDSVLSFETGHIAKQAAGSVLVQYGETVVLVAAASGTPRPGIDFFPLMCDYRERLAAAGKFPGGFLKREGRPSTKEILSSRLMDRPIRPLWPAGYKDEVQVQACVIASDLQNDGDVLAMIGGATALHISPLPFKGPLGSVRVGKVDGKLVAFPTADQLEQSELDMIVSGSRDMVAMIEGFANEMPEDEMMEAIGFAHDAIREVIDLQEEFYKKVNPEKTPYQSPEDDGLLQRLTDAYYSDFKTAQQTSGKQARAEAVRAVRDRAMADVIPDPNAADAVCVNRFKSVWHDLEEKVVRDLILAGTRPDGRDHNSLRAIHCETDLLPRVHGSALFQRGETQALITIALGTSRDEQRVDGLQDEYSKKFMLDYNFPSYSVGECRPIRGPGRREIGHGCLAERSVAPVLPSADDFPYTIRVISDITESNGSSSMASVCGATLGLMASGVPISNPVAGISVGLVQDGPDNWCLITDILGTEDHFGDMDFKIAGTQNGITGIQLDLKVTGVTNDIIRATLKQSREARIEILKKMLTTIPRPRREISPTAPRLLRTKISPDKIGALIGPGGKNIRGIQETTGAVIEVDDEGTVLVASSNKESAQEAMRQVEACTATVQIGKIYDGTVSSIKEFGAFVEILPGRDGLVHISEMSGGYISSLDQVIAVGDAMKVLVIDVDEHDRVKLSRRKALEELGEEDPLAVEGEGGGDSEGGGDGEDRPRRRRGGSGGGGGGGRGRGPRRSGGGRDRD

SEQ ID NO: 1785 - DNA, 2118 bp, Wigglesworthia glossinidia endosymbiont of Glossina brevipalpis
  CDS (1)..(2118): transl_table=11
ttgttaaaagctactattcaaaagtttcaatatggaaaaaatattgttactattgaaaccggaatgattgctcgtcaagcaacatctgcagtaatggttagaatggacgatacttcagtttttgttactgtagtagctgataagaaagaaaaattaggacaaaaattttttcccctcacagtgaattatcaagaaaggacatattcaataggaagatttcctggaggattttttagaagagagggcaggccaaatgaaaatgaagtattagtttctagattaatagatcgttctgttagaccgttgtttccaaaaaatttttttaatgatattcaaattatagcaacagtaatgtctgttaatccacaagttaatccggacatagtatctataataggagcttctgctgctttgagtttatctggattaccttttaaatgtccaataggatcatctagaataggttatatagataacaaatatattttaaacccaactacatcagaattaattgatagtaaattggacatgatagtatctggctcttctaatgcagtattaatggttgaatcatcttcaaatattctacaagaaaaaaatattttagaagcaattttatttggtaatgaacaaaataaaatagtaattgaaaatattgataaattaaaaaagaaatttaaaaaagaaaatttagaatatgatttgaaatcattaaataacaatgatattcaatttgtaatagaagatttattttttgatagaataaaagattcttacaaaataccagaaaagaaaaaaagattagaaaaaattgaaaatattaaaaatgatattttaaataattttataaataataataatacaaatgaagaagaaatattatatattatacaaaatatagaacgaaaaattgtaagaaatagaataatatcaggaaaaccaagaattgatggacgtacagaagatatggtacgtaatttagatatccatcttggcattcttccaagaactcatggttcatcgttatttactagaggagaaacacaagctcttgtaacaactactttaggaacagaaagagacgcacaaaacatagatgatcttgtaggagataagatagatagatttttatttcattataatttccccccttattgtgtaggtgaggtaggaattataagttctccaaaaagaagagaaataggacatggaaaattagcaaaaagaggaatgttggctgttatgccagacatagataaatttccatatactattagaatagtttcagagattacagaatctaatggatcttcttccatggcatctgtgtgcggagcttctttatctcttatggatgcaggcgttcctatttcttcatctgttgcaggaatagcaatgggtttgattaaagaaaaagataaatttgttgttttaactgatatattaggagatgaagattatttgggagatatggattttaaggtaatgggaacaagagaaggagttactgctttacaaatggatataaaaatagaaggaattacatcagaaatattacaagtatcattagataaagcaaaaaatgcaagaatcaatatattgaatgaaatggacaaagtaataaaaaaaccaaaaaacgaaatttcaatatttgcgccaagaatatataaaattaaaatcaatccagaaaaaataaaagatgttattggaaaaggtggttccgtaataagaatgttaactgaaaaaacaaaatcttctatagagatagaagatgatggaacagtaaaagtaatttctactgatataaaaaatgcgcaatgtgcattaaaaaaaataaaagatataactcatgaaataaaaattaataaaatttatgttgccaaaatcactcgtatttctgaatttggaatatttgcatgtttaataaacaataaagaaggattaatacatgtatccaaaattccttataaaaaatttagcgatataaataacaattttaaaattggtcaaataatttccgtaaaagttatagaaattgatagatatggaagaataagactaagttttacaggaacagataaaaacaaaaataaaaaattttttaataaaaataattaa

SEQ ID NO: 1786 - protein, 705 aa, Wigglesworthia glossinidia endosymbiont of Glossina brevipalpis
MLKATIQKFQYGKNIVTIETGMIARQATSAVMVRMDDTSVFVTVVADKKEKLGQKFFPLTVNYQERTYSIGRFPGGFFRREGRPNENEVLVSRLIDRSVRPLFPKNFFNDIQIIATVMSVNPQVNPDIVSIIGASAALSLSGLPFKCPIGSSRIGYIDNKYILNPTTSELIDSKLDMIVSGSSNAVLMVESSSNILQEKNILEAILFGNEQNKIVIENIDKLKKKFKKENLEYDLKSLNNNDIQFVIEDLFFDRIKDSYKIPEKKKRLEKIENIKNDILNNFINNNNTNEEEILYIIQNIERKIVRNRIISGKPRIDGRTEDMVRNLDIHLGILPRTHGSSLFTRGETQALVTTTLGTERDAQNIDDLVGDKIDRFLFHYNFPPYCVGEVGIISSPKRREIGHGKLAKRGMLAVMPDIDKFPYTIRIVSEITESNGSSSMASVCGASLSLMDAGVPISSSVAGIAMGLIKEKDKFVVLTDILGDEDYLGDMDFKVMGTREGVTALQMDIKIEGITSEILQVSLDKAKNARINILNEMDKVIKKPKNEISIFAPRIYKIKINPEKIKDVIGKGGSVIRMLTEKTKSSIEIEDDGTVKVISTDIKNAQCALKKIKDITHEIKINKIYVAKITRISEFGIFACLINNKEGLIHVSKIPYKKFSDINNNFKIGQIISVKVIEIDRYGRIRLSFTGTDKNKNKKFFNKNN

SEQ ID NO: 1787 - DNA, 2139 bp, Haemophilus ducreyi 35000HP
  CDS (1)..(2139): transl_table=11
atgacacccattgttaaacaatttaaatacggccaacataccgtaactctagaaacaggcgctatcgcgcgtcaagccactgctgcggttatggcaagtatggacgatacgacagtctttgtaagtgtggtagcgaaaaaagaagtaaaagaaggtcaagacttcttcccattaacagtaaactatcaagaacgtacttatgcagctggccgtattcccggtggttttttcaaacgtgaaggacgcccgtccgaaaatgaaacgttaattgcacggctaatcgaccgcccaattcgtccgcttttcccagaaggcttctttaatgaaattcaaattgttgctactgttgtttctgttaatccacaaattagcccggatttagtcgcaatgatcggcgcttctgcagcattatcactgtctggtgtaccatttaatggcccaattggtgcagcacgtgtcggctttattaatgatcaatttgtccttaatccaacgattactgagcaaaaacaaagccgtttagatttagtggttgcaggtacagataaagcggtcttaatggtcgaatctgaagcagatatcctttcagaagaacaaatgttagcggcggtggtatttggtcatcagcaacaacaaatagtgattgaaaatatcaaagaatttgtaaaagaagcgggaaaaccacgttgggattggcaaccagcagaagcaaatactgcattaattaatcaagtaaaagcattggcagaaacgcgtattggtgatgcctaccgcattacagaaaaacaagcacgttatgagcaaattgatgcgattaaagctgacgttatcgcacaattaaccgctcaagatgaaacaattagcgaaggtgctattattgatattatcaccgcattagaaagttcggtcgtgcgtgggcgtatcttagcgggtgagcctcgtattgatggtcgtacagtggacacggttcgtgcattaaatatttgcaccggcgtattacctcgcacccatggttcggcaattttcacgcgtggtgaaactcaggcattagcagtcgctactttagggactgagcgtgatgcacaaattattgatgaattaactggcgaaaaatccgaccgcttcttattccattataatttccctccatattctgtcggagagacaggtatgatcggctcaccaaaacgtcgcgaaattggtcacggtcgtttagcaaaacgtggggtattagccgttatgccaagcgcagaagaatttccttatgtcgtacgtgttgtatcagaaattactgaatcaaatggttcttcctcaatggcttccgtatgtggtgcgtctttagcgttaatggatgcaggtgtgccaattaaagctactgtagcgggtattgctatgggattagttaaagaagacgaaaaatttgttgtgctttctgatattttgggcgatgaagatcacttaggcgatatggactttaaagtagccggtacgcgcaaaggtataactgcactacaaatggatatcaaaattgaaggcattacgccagagattatgcatattgcattaaaccaagctaaaggtgcacgtatgcatattctgaacgtaatggaacaagcactccctgctccgcgtgcggatctttctgattttgcacctcgtattcacactatgaagattgatcctaaaaaaatcaaagatgtgattggtaaaggcggtgccgttattcgttctttaactgaagaaaccggtacatccatcgatattgatgatgacggtacagtaaaaattgcagcaacagataataatgcggctaaaatggttatgtctcgtattgaagagatcgtagctgaagtagaagtgaatgcaatttataccggtaaagtttcccgtgttgtcgattttggcgcattcgtgacgattttaggtggcaaagaaggtttagtgcatatttcacaaattacagatgctcgtgttgaacgcgtttctgattacctatcggtcggtcaagaagttaatgtaaaagtagtcgaaattgaccgccaaaaccgtatccgcctaacgatgaaagatctggataataacctttcgacaaacgttactccggaagctgtcgttcaagaagaatctactgagaactaa

SEQ ID NO: 1788 - protein, 712 aa, Haemophilus ducreyi 35000HP
MTPIVKQFKYGQHTVTLETGAIARQATAAVMASMDDTTVFVSVVAKKEVKEGQDFFPLTVNYQERTYAAGRIPGGFFKREGRPSENETLIARLIDRPIRPLFPEGFFNEIQIVATVVSVNPQISPDLVAMIGASAALSLSGVPFNGPIGAARVGFINDQFVLNPTITEQKQSRLDLVVAGTDKAVLMVESEADILSEEQMLAAVVFGHQQQQIVIENIKEFVKEAGKPRWDWQPAEANTALINQVKALAETRIGDAYRITEKQARYEQIDAIKADVIAQLTAQDETISEGAIIDIITALESSVVRGRILAGEPRIDGRTVDTVRALNICTGVLPRTHGSAIFTRGETQALAVATLGTERDAQIIDELTGEKSDRFLFHYNFPPYSVGETGMIGSPKRREIGHGRLAKRGVLAVMPSAEEFPYVVRVVSEITESNGSSSMASVCGASLALMDAGVPIKATVAGIAMGLVKEDEKFVVLSDILGDEDHLGDMDFKVAGTRKGITALQMDIKIEGITPEIMHIALNQAKGARMHILNVMEQALPAPRADLSDFAPRIHTMKIDPKKIKDVIGKGGAVIRSLTEETGTSIDIDDDGTVKIAATDNNAAKMVMSRIEEIVAEVEVNAIYTGKVSRVVDFGAFVTILGGKEGLVHISQITDARVERVSDYLSVGQEVNVKVVEIDRQNRIRLTMKDLDNNLSTNVTPEAVVQEESTEN

SEQ ID NO: 1789 - DNA, 2169 bp, Prochlorococcus marinus subsp. marinus str. CCMP1375
  CDS (1)..(2169): transl_table=11
gtgcaaggtcagacaacgtcggtctctttcgatggtcgagaaatacggctcacaacagggagatatgcaccacaggctggtggttcagtattgattgaatgtggtgacacagcagtcttagtaacagcaacccaagggcaagggagagaaggagctgatttccttcctcttagttgcgactacgaagagaggctttatgcggctggtcgaattcctggaagtttcatgaggcgagaaggaagacctcctgaaagagcaactttaatctcaagattgatagatcgtcctctcagacctctttttcccaattggatgagagatgatatccaagttgttgctacttgtctttcactagatgaaagagtgcctgccgatattttagctgtaacaggctcatcaatggcaacactccttgctggaattccattttatggacctatggccgctgttagagttggtttattaggggatgactttgtcttaaatccaagcttcagagaaatcgagcgaggagacttagatttagtagttgctggaactcctgatggagttgtaatggttgaagcaggatctaatcaactaactgaacaagatgtaattgaggcaattgactttggctatgaagcagttaatgaattgattaaagctcaggaatctattctgaaagactcaggtctaactcaaatcaaacctgaaaagccagacttggatgaaacagtaccttcctatttagaaaaaaactgtacaaaaccaattagtgcattattaaaagaattcgatctttccaaagaagacagagatttaaagcttgatgaaatcaaaactaattgtgcagaaaaaattgattctcttaaagatgacaatgcagtcaagaaatcaataacaactaatacaaaactattaggaataagcttcaaagctcttactaaaaaactaatgagagagcaaattatcaaagatggaaaaagagtagatggaagagcacttgatgaagtaagagagatatccgccgaagctggtattcttccaaaacgtgttcatggatctggtctgtttcaaagagggttaacccaggtactttccacagcaacactaggaacacctagtgatgctcaagaaatggatgatctaaacccaagtcccgataaaacatatatacatcactataatttccctccttactcagtaggcgaaacaagacctatgcgtaccccaggacgccgcgaagttggtcatggcgctttagcggaacgagcaattatcccagttttgcctcctaaagagtccttcccttatgtcttacgagtagtaagtgaggttttaagctcaaatggctctacctcaatgggatctgtttgtggtagcacaattgcactccttgatgcaggagtcccacttaaagcacctgtaagcggagctgctatgggccttattaaggaaggagaagaagtaagaatactcactgacattcaaggaattgaagactttttgggagatatggatttcaaagtcgcaggtacagaaaaaggtattactgctcttcaaatggatatgaaaatgacaggcctacctataaaaataattggagaagcaataaatcaagcgaagcctgcaagaactcatattctagaaaaaatggttcaagctattgacaaaccaagagagactctttctcctcatgcaccacggcttctaagcttcagaatagaccctgaacttattggaacagttattggacctggtggaagaactatcaaaggtataactgaaagaacaaatacaaaaatagatatagaagatggcggaattgtaaccattgcatcacatgatggagttgcagcagaagaagctcagaagataattgaaggtctaaccaggaaagttcatgagggagaagtatttacaggctcaattacaaggattatccctattggtgcatttgttgaaatccttccaggcaaagaaggaatgatacatatttctcaattatcagaagccagagtagagaaagttgaagatgttgtcaaagtaggtgatgaagtaactgtaagggttagagaaatagataatcgaggcagaatcaatctaactctaaggggtattccacaaaatggagacatgcaatattatccacagccaacccccactccagtagcacctttgatgtaa

SEQ ID NO: 1790 - protein, 722 aa, Prochlorococcus marinus subsp. marinus str. CCMP1375
MQGQTTSVSFDGREIRLTTGRYAPQAGGSVLIECGDTAVLVTATQGQGREGADFLPLSCDYEERLYAAGRIPGSFMRREGRPPERATLISRLIDRPLRPLFPNWMRDDIQVVATCLSLDERVPADILAVTGSSMATLLAGIPFYGPMAAVRVGLLGDDFVLNPSFREIERGDLDLVVAGTPDGVVMVEAGSNQLTEQDVIEAIDFGYEAVNELIKAQESILKDSGLTQIKPEKPDLDETVPSYLEKNCTKPISALLKEFDLSKEDRDLKLDEIKTNCAEKIDSLKDDNAVKKSITTNTKLLGISFKALTKKLMREQIIKDGKRVDGRALDEVREISAEAGILPKRVHGSGLFQRGLTQVLSTATLGTPSDAQEMDDLNPSPDKTYIHHYNFPPYSVGETRPMRTPGRREVGHGALAERAIIPVLPPKESFPYVLRVVSEVLSSNGSTSMGSVCGSTIALLDAGVPLKAPVSGAAMGLIKEGEEVRILTDIQGIEDFLGDMDFKVAGTEKGITALQMDMKMTGLPIKIIGEAINQAKPARTHILEKMVQAIDKPRETLSPHAPRLLSFRIDPELIGTVIGPGGRTIKGITERTNTKIDIEDGGIVTIASHDGVAAEEAQKIIEGLTRKVHEGEVFTGSITRIIPIGAFVEILPGKEGMIHISQLSEARVEKVEDVVKVGDEVTVRVREIDNRGRINLTLRGIPQNGDMQYYPQPTPTPVAPLM

SEQ ID NO: 1791 - DNA, 2085 bp, Chlamydophila pneumoniae TW-183
  CDS (1)..(2085): transl_table=11
atgaattttcaaactatttctattaatctgaccgaaggtaaaatattggtgtttgaaacagggaaaattgctcgtcaagctaacggagctgttcttgtccgttcaggggaaacctgtgtttttgcaagtgcatgcgctgtagatcttgatgacaaagtagactttcttcctttacgagtggactaccaagaaaaattctcttccacagggaaaactcttggtggatttataaaaagagaaggacgcccctctgaaaaagaaattttagtttctcgattgattgatcggtctctacgtccttccttcccctaccgactcatgcaagatgtgcaagttttatcttatgtatggtcgtatgacggtcaagttttacctgatcctcttgctatctgcgcagcatctgctgctttagcaatttcagatattccacagagcaacattgttgctggagtacggattggatgtattgataaccaatgggtcatcaatcctacaaaaactgagttagcatcctctactttagatcttgtattagctggaacagaaaacgctattctaatgatagaaggtcattgcgatttctttaccgaagagcaagtacttgatgccatagaatttggtcacaagcatattgttaccatctgtaaaagattacagttgtggcaagaagaaattggaaaatctaaaaatctaagtgctgtatatcctcttcctgcagaagttttaacagctgtgaaagagtgtgcgcaagacaagtttactgaactctttaatattaaagataaaaaagtacatgcagctactgcgcatgagattgaagaaaatattttagaaaaattacagcgcgaagatgatgatcttttctcttcttttaacatcaaagcggcatgtaaaactttaaaatctgacacgatgcgtgctctcataagagatagagagatccgtgcagatggacgttctttaactacagtccgtcctattactattgaaacttcttaccttcctcgtactcacggaagctgcctcttcactcgtggagagactcagacacttgcggtatgtactttaggcagtgaggcaatggctcaacgctatgaggatttgaatggtgaaggactttcaaaattttacttacaatacttcttccctcccttctctgttggagaggtaggaagaatcggctctccaggaaggagagaaattggccatggcaaattggcagagaaggctttaagtcatgctcttcctgatagcgctacatttccctataccatccgtatagaatctaatattacagaatctaatggttcttcatccatggcttctgtatgtggcggttgcctcgctcttatggacgctggcgtccctatttcttctcctattgcaggaattgctatgggattgatccttgatgatcaaggagcgattatcctttctgatatttccggtcttgaagatcaccttggagacatggactttaaaatagcagggagtggtaaaggaattacagccttccaaatggatatcaaagttgaaggaatcactccagctatcatgaagaaagctctttcccaagcgaagcaagggtgtaatgatattttaaatattatgaacgaagccctttcagctcccaaagcagacctatctcaatacgcgcctcgtattgaaacaatgcaaattaaaccaacaaaaattgcttcagtaattgggccgggaggcaagcaaatccgtcagatcattgaagagactggcgtccaaattgatgttaacgacttaggagttgttagcatctctgcgtcctcagcatcagctatcaataaagctaaagaaatcattgaaggtttagttggagaagttgaagttggaaaaacctacagaggtcgcgtaacttccgtagttgcgtttggagcctttgttgaagttctccccggaaaagaaggactctgccacatctctgagtgttctagacagcgaatagaaaatataagtgatgttgttaaggaaggcgatatcattgatgtaaaactcttaagcatcaatgaaaaaggtcaacttaagttgagccataaagcaactctagaataa

SEQ ID NO: 1792 - protein, 694 aa, Chlamydophila pneumoniae TW-183
MNFQTISINLTEGKILVFETGKIARQANGAVLVRSGETCVFASACAVDLDDKVDFLPLRVDYQEKFSSTGKTLGGFIKREGRPSEKEILVSRLIDRSLRPSFPYRLMQDVQVLSYVWSYDGQVLPDPLAICAASAALAISDIPQSNIVAGVRIGCIDNQWVINPTKTELASSTLDLVLAGTENAILMIEGHCDFFTEEQVLDAIEFGHKHIVTICKRLQLWQEEIGKSKNLSAVYPLPAEVLTAVKECAQDKFTELFNIKDKKVHAATAHEIEENILEKLQREDDDLFSSFNIKAACKTLKSDTMRALIRDREIRADGRSLTTVRPITIETSYLPRTHGSCLFTRGETQTLAVCTLGSEAMAQRYEDLNGEGLSKFYLQYFFPPFSVGEVGRIGSPGRREIGHGKLAEKALSHALPDSATFPYTIRIESNITESNGSSSMASVCGGCLALMDAGVPISSPIAGIAMGLILDDQGAIILSDISGLEDHLGDMDFKIAGSGKGITAFQMDIKVEGITPAIMKKALSQAKQGCNDILNIMNEALSAPKADLSQYAPRIETMQIKPTKIASVIGPGGKQIRQIIEETGVQIDVNDLGVVSISASSASAINKAKEIIEGLVGEVEVGKTYRGRVTSVVAFGAFVEVLPGKEGLCHISECSRQRIENISDVVKEGDIIDVKLLSINEKGQLKLSHKATLE

SEQ ID NO: 1793 - DNA, 2094 bp, Candidatus Blochmannia floridanus
  CDS (1)..(2094): transl_table=11
ttgttaaattcgattgttcataaatttcagtatggtcaacataccgtggttttaaatactggcgctattgctcgtcaagctaatgctgcagttatggttagcataggtgatactacagttttagttactgtggtaagttctaatcaagaaaaaatagatcaaggtttctttccattagttgtacattatcaagaacgtacttatgctgctggaaaatttcctggaggtttctttagaagagagggtcgtcctagtgaaagtgaaattttgacttctcgtttaattgatcgtccaatacgtccgttatttcctaaggggtttttaaatgatattcagattattgctaccgtggtatcagtaaatcctcagatacatccagatattgttgctatgataggggtttctgcagctttaagtttatctgatattcctttctttgggcctattggagctgcaagagtgggatatattaaggatcagtacatattgaatccgaccactattgaattatctaatagtaaattagatttagttgttgctggaactgattccaatattttaatggtagagtcagcggcttgtgtgttaagcgaacaagaaatgttaaatgctattgttttcggtcatgaacaacaacaaacggttattcaaaatattaatcaattagtaaaaaaagccggtaaagtgaaatatgactggaaactaaaagatatggatatattattaagtgaatatttatctaatttatatagatctcgagtgaatgtttcgtgtcttgtcggagtaaataaaaaggatcggcaggaacaattaaataatattaaacacgatattattgatattactctaagagagtataatgagaatattgatgtcaatgaagtgatgtcttttttgaataatttagaaataaaattattacgtagtagtattttaagagataatgtccgttttgatgggcgttcgccagatatgattagagagatagatattagtgctggaatacttcctagaactcatggttcagcattatttacgagaggagatactcaagctttagttactgctactcttggaactgagagggatgcacaaaatttagatgaacttacaggagatagggttgataggtttttattacattataattttcctccgtattgtacaggagagattggtatagtgggagctccaagacgacgggagattggtcatggtagattagcaaagcgtggtatgttggcggttatgcctaattctaatgaatttccttatacagtacgtgtggtgtcagaagttactgaatcgaatggttcttcttctatggcttctatttgtggggcatcgttggctttgatggatgctggtgttccaattaaggaatctgtagcaggagtggctatgggattaattaaagaaaatagtaattttattatattgtctgatattattagcgatgaagatcatattggagatatggattttaaagtttctggtactagaacgggtattactgcattgcaaatggatattaaaattaagggaattacttatgatattattgaagtttcttttaaaaaggcaaggtgtgctctattacgaatattagatattatggatcaagttattaagattccgcgtaaagatatttctgaatttgctcctagaatatatagtataaaaattaatccagataaaattaaagacgtgataggtaagggaggttcagtaattagagcattaacggagaaaacaagcactattattgatattgaagatgatggtgtaataaaagtaatatctttgaatgctgaaaaagcaaaacaggctgttgaccgaattcaagagattactgctaatattgcaataggttcaatttatactggaagggtcactcatattgtggattttggggcttttgttactttatttgcaggaaaagaaggtttagtgcatatttctcaaattacagagaaaagagtgaatagagtttctgattacctaaaattaggacaagaggtattggtaaaagttttagaaattgatcgtcaaggaagaatgcgtttaagtatgagaggaataaatcatatataa

SEQ ID NO: 1794 - protein, 697 aa, Candidatus Blochmannia floridanus
MLNSIVHKFQYGQHTVVLNTGAIARQANAAVMVSIGDTTVLVTVVSSNQEKIDQGFFPLVVHYQERTYAAGKFPGGFFRREGRPSESEILTSRLIDRPIRPLFPKGFLNDIQIIATVVSVNPQIHPDIVAMIGVSAALSLSDIPFFGPIGAARVGYIKDQYILNPTTIELSNSKLDLVVAGTDSNILMVESAACVLSEQEMLNAIVFGHEQQQTVIQNINQLVKKAGKVKYDWKLKDMDILLSEYLSNLYRSRVNVSCLVGVNKKDRQEQLNNIKHDIIDITLREYNENIDVNEVMSFLNNLEIKLLRSSILRDNVRFDGRSPDMIREIDISAGILPRTHGSALFTRGDTQALVTATLGTERDAQNLDELTGDRVDRFLLHYNFPPYCTGEIGIVGAPRRREIGHGRLAKRGMLAVMPNSNEFPYTVRVVSEVTESNGSSSMASICGASLALMDAGVPIKESVAGVAMGLIKENSNFIILSDIISDEDHIGDMDFKVSGTRTGITALQMDIKIKGITYDIIEVSFKKARCALLRILDIMDQVIKIPRKDISEFAPRIYSIKINPDKIKDVIGKGGSVIRALTEKTSTIIDIEDDGVIKVISLNAEKAKQAVDRIQEITANIAIGSIYTGRVTHIVDFGAFVTLFAGKEGLVHISQITEKRVNRVSDYLKLGQEVLVKVLEIDRQGRMRLSMRGINHI

SEQ ID NO: 1795 - DNA, 2160 bp, Bordetella parapertussis 12822
  CDS (1)..(2160): transl_table=11
atgttcaataaagtgaccaagaccttccagtacggccagcattcggtcgtgttggaaaccggcgagatggctcgccaggcgtccggcgcggtgctggtgtccgtggaggacaccgtcgtgctggcaacggtcgtggcggccaagaaagccaaggccggccaggacttttttccgctgaccgtcgactacatcgagaagacctacgccgccggccgcatcccgggcggtttcttcaagcgcgaaggcaagccctccgaaaaggaaacgctgacctcgcgcctgatcgaccgtccgctgcgtccgctgttcccggaaggcttctataacgacgtgcaagtggtcatccacacgctgtcggtcaatccggacatcgatcccgacattcccgccatgatcggcgcctcggccgcgctggccatctcgggcatcccgttcaacggccccatcggcgccgcccgcgtcggctatgtcgacggccagtacgtgctcaaccccaccgcgacgcaactgaagtcgtccaagatggacctggtggtggccggcaccgagaacgccgtgctgatggtcgaatccgaggcgaagcagctgtccgaggaaatcatgctgggcggcgtggtgttcggccacgagcagatgcaggccgccatcaacgccatccatgacctggtgcgcgatgccggcaagcccgactgggactggcaacccgcccccaagaacgaagcgctgatcgccgccgtgagcgccgccgcccaggaagggctgaacgccgcctaccagatccgcgaaaagcaggcccgcaccaccaagctgcgcgaagtctacgccgccgtgcaggccgccatggccgaacaggccgcgcaggctggccagcccgcgcccgacagcgtcggcgtggacaacatcctgttcgacctggaagcgcgcatcgtgcgcagccagatcctcaacggcgagccgcgcatcgacggccgcgacactcgcaccgtgcgtccgatcagcatccgcctgggcgtgctgccgcgcgcgcacggcagcgcgctgttcacccgcggcgaaacgcaggcgctggtggtggccacgctgggcaccaagcaggatgagcagatcatcgacgccctgatgggcgagtaccgcgaccgcttcatgctgcactacaacatgccgccgttcgccaccggcgaaaccggccgcatcggcgtgcccaagcgccgcgaaatcggccacggccgcctggccaagcgcgcgctgctgccgctgctgccggccccggaagacttccagtacaccatccgcctggtgtccgagatcaccgaatccaacggctcctcgtcgatggcctcggtgtgcggcggttcgctggccatgatggacgccggcgtgcccaccaacgatcacgtggccggcgtggccatgggcctgatcctggacagcggcaagttcgccgtgctgaccgacatcctgggcgacgaagaccacctgggcgacatggacttcaaggtggcgggtaccgaaaccggtatcacggcgctgcagatggacatcaagatccagggcatcaccaaggaaatcatgcaggtcgcgctggcccaggcccgcgaaggccgcctgcacatcctcggcaagatgcgcgacgcgctggaaggctcgcgtaccgagctgtcggcgttcgcgccgcgcatgctgaccatcaagatcaaccccgagaagatccgcgacgtgatcggcaagggcggcgccaccatccgtgcgctgaccgaggaaaccggcacgcagatcgatatctcggacgacggcaccatcgtgatcgccagcgtggacgagacccaggccaaggaagcccagcgccgcatcgtcgaactgaccgccgacgtcgaagtgggccagatctacgacggctcggtgctgcgcctgctggatttcggcgccatcgtgcaagtgctgccgggccgcgacggcctgctgcacatctccgagatcgccaactaccgcatcgccaacattaacgatgtgctgaaggttggccagccggtccgcgtcaaggtcatcgaggccgacgacaagggccgcctgcgcctgtcgatcaaggcgatcggcggcatcgagcagcagcagtccggtacggccgagccggccgcccagtcggagccgcaagccgaataa

SEQ ID NO: 1796 - protein, 719 aa, Bordetella parapertussis 12822
MFNKVTKTFQYGQHSVVLETGEMARQASGAVLVSVEDTVVLATVVAAKKAKAGQDFFPLTVDYIEKTYAAGRIPGGFFKREGKPSEKETLTSRLIDRPLRPLFPEGFYNDVQVVIHTLSVNPDIDPDIPAMIGASAALAISGIPFNGPIGAARVGYVDGQYVLNPTATQLKSSKMDLVVAGTENAVLMVESEAKQLSEEIMLGGVVFGHEQMQAAINAIHDLVRDAGKPDWDWQPAPKNEALIAAVSAAAQEGLNAAYQIREKQARTTKLREVYAAVQAAMAEQAAQAGQPAPDSVGVDNILFDLEARIVRSQILNGEPRIDGRDTRTVRPISIRLGVLPRAHGSALFTRGETQALVVATLGTKQDEQIIDALMGEYRDRFMLHYNMPPFATGETGRIGVPKRREIGHGRLAKRALLPLLPAPEDFQYTIRLVSEITESNGSSSMASVCGGSLAMMDAGVPTNDHVAGVAMGLILDSGKFAVLTDILGDEDHLGDMDFKVAGTETGITALQMDIKIQGITKEIMQVALAQAREGRLHILGKMRDALEGSRTELSAFAPRMLTIKINPEKIRDVIGKGGATIRALTEETGTQIDISDDGTIVIASVDETQAKEAQRRIVELTADVEVGQIYDGSVLRLLDFGAIVQVLPGRDGLLHISEIANYRIANINDVLKVGQPVRVKVIEADDKGRLRLSIKAIGGIEQQQSGTAEPAAQSEPQAE

SEQ ID NO: 1797 - DNA, 2160 bp, Bordetella bronchiseptica RB50
  CDS (1)..(2160): transl_table=11
atgttcaataaagtgaccaagaccttccagtacggccagcattcggtcgtgttggaaaccggcgagatggctcgccaggcgtccggcgcggtgctggtgtccgtggaggacaccgtcgtgctggcaacggtcgtggcggccaagaaagccaaggccggccaggacttttttccgctgaccgtcgactacatcgagaagacctacgccgccggccgcatcccgggcggtttcttcaagcgcgaaggcaagccctccgaaaaggaaacgctgacctcgcgcctgatcgaccgtccgctgcgtccgctgttcccggaaggcttctataacgacgtgcaagtggtcatccacacgctgtcggtcaatccggacatcgatcccgacattcccgccatgatcggcgcctcggccgcgctggccatctcgggcatcccgttcaacggccccatcggcgccgcccgcgtcggctatgtcgacggccagtacgtgctcaaccccaccgcgacgcaactgaagtcgtccaagatggacctggtggtggccggcaccgagaacgccgtgctgatggtcgaatccgaggcgaagcagctgtccgaggaaatcatgctgggcggcgtggtgttcggccacgagcagatgcagaccgccatcaacgccatccatgacctggtgcgcgatgccggcaagcccgactgggactggcaacccgcccccaagaacgaagcgctgatcgccgccgtgagcgccgccgcccaggaagggctgaacgccgcctaccagatccgcgaaaagcaggcccgcaccaccaagctgcgcgaagtctacgccgccgtgcaggccgccatggccgaacaggccgcgcaggctggccagcccgcgcccgacagcgtcggcgtggacaacatcctgttcgacctggaagcgcgcatcgtgcgcagccagatcctcaacggcgagccgcgcatcgacggccgcgacacccgcaccgtgcgtccgatcagcatccgcctgggcgtgctgccgcgcgcgcacggcagcgcgctgttcacccgcggcgaaacgcaggcgctggtggtggccacgctgggcaccaagcaggatgagcagatcatcgacgccctgatgggcgagtaccgcgaccgcttcatgctgcactacaacatgccgccgttcgccaccggcgaaaccggccgcatcggcgtgcccaagcgccgcgaaatcggccacggccgcctggccaagcgcgcgctgctgccgctgctgccggccccggaagacttccagtacaccatccgcctggtgtccgagatcaccgaatccaacggctcctcgtcgatggcctcggtgtgcggcggttcgctggccatgatggacgccggcgtgcccaccaacgatcacgtggccggcgtggccatgggcctgatcctggacagcggcaagttcgccgtgctgaccgacatcctgggcgacgaagaccacctgggcgacatggacttcaaggtggcgggtaccgaaaccggtatcacggcgctgcagatggacatcaagatccagggcatcaccaaggaaatcatgcaggtcgcgctggcccaggcccgcgaaggccgcctgcacatcctcggcaagatgcgcgacgcgctggaaggctcgcgtaccgagctgtcggcgttcgcgccgcgcatgctgaccatcaagatcaaccccgagaagatccgcgacgtgatcggcaagggcggcgccaccatccgtgcgctgaccgaggaaaccggcacgcagatcgatatctcggacgacggcaccatcgtgatcgccagcgtggacgagacccaggccaaggaagcccagcgccgcatcgtcgaactgaccgccgacgtcgaagtgggccagatctacgacggctcggtgctgcgcctgctggatttcggcgccatcgtgcaagtgctgccgggccgcgacggcctgctgcacatctccgagatcgccaactaccgcatcgccaacatcaacgatgtgctgaaggttggccagccggtccgcgtcaaggtcatcgaggccgacgacaagggccgcctgcgcctgtcgatcaaggcgatcggcggcatcgagcagcagcagtccggtacggccgagccggccgcccagtcggagccgcaagccgaataa

SEQ ID NO: 1798 - protein, 719 aa, Bordetella bronchiseptica RB50
MFNKVTKTFQYGQHSVVLETGEMARQASGAVLVSVEDTVVLATVVAAKKAKAGQDFFPLTVDYIEKTYAAGRIPGGFFKREGKPSEKETLTSRLIDRPLRPLFPEGFYNDVQVVIHTLSVNPDIDPDIPAMIGASAALAISGIPFNGPIGAARVGYVDGQYVLNPTATQLKSSKMDLVVAGTENAVLMVESEAKQLSEEIMLGGVVFGHEQMQTAINAIHDLVRDAGKPDWDWQPAPKNEALIAAVSAAAQEGLNAAYQIREKQARTTKLREVYAAVQAAMAEQAAQAGQPAPDSVGVDNILFDLEARIVRSQILNGEPRIDGRDTRTVRPISIRLGVLPRAHGSALFTRGETQALVVATLGTKQDEQIIDALMGEYRDRFMLHYNMPPFATGETGRIGVPKRREIGHGRLAKRALLPLLPAPEDFQYTIRLVSEITESNGSSSMASVCGGSLAMMDAGVPTNDHVAGVAMGLILDSGKFAVLTDILGDEDHLGDMDFKVAGTETGITALQMDIKIQGITKEIMQVALAQAREGRLHILGKMRDALEGSRTELSAFAPRMLTIKINPEKIRDVIGKGGATIRALTEETGTQIDISDDGTIVIASVDETQAKEAQRRIVELTADVEVGQIYDGSVLRLLDFGAIVQVLPGRDGLLHISEIANYRIANINDVLKVGQPVRVKVIEADDKGRLRLSIKAIGGIEQQQSGTAEPAAQSEPQAE

SEQ ID NO: 1799 - DNA, 2166 bp, Prochlorococcus marinus subsp. pastoris str. CCMP1986
  CDS (1)..(2166): transl_table=11
gtggaaggaaaaaatacgtcgatcacgtttgacggacgagagatacgactaactacaggactatatgctcctcaagctggtggagctgtaatgattgaatgtggagacacatctttattagtcacagcaacaaaaacaacgaaaaagcaagctgcagactttctccctctaatatgtgattatgaggaaaagttgtatgctgccggaagaattccaggcgggttcatgagaagagagggcagacctcctgaaagagcaacattaatagcaaggttaatagatagaccaatgaggcctcttttcccatcttggatgagagatgagatacaaatagttgcttcttgcctttcccttgatgaaagggtacctgcagatgttctaggcgtaacaggagcctcaattgcaaccttgttagcagaaataccattctacggaccaatggctgctgtaagagtagggctaataggagatgactttattttaaatccaagctacagagaaatagaaaaaggtgatttagatattgttgtggcaggatctccagagggaattgtgatgattgaggcaggtgccaatcaactttcggaacaagatactattgaggccatagatttcggttatgaggctgtaagcgaactaattaaagctcaagaaaatcttcttaaagacttaggaataaaacaggttaagcctttagaaccagaagaagataaagcattagcaacatatttagagaaaaactgtactaagccaattgatctaatcttaaagaaatttgatcaatctaaagaagagagagatcttgaattagataaaatagaacttgaagtgcaaacaaaaattgattcacttaaagatgataatcaattaaaagttcttacttcagagaatgaaaaactaatacattctgacttcaaaaagttaaccaaaaaattaatgaggtcacaaataattaatgaaggaaaaagagttgatggaagagatcttgacgaagttagaaaaatatcagcatctgctggaatacttccgaaaagagttcacgggtctgcattatttcaaagaggtttaacacaagtattatctactacaacacttggaactcctagtgatgctcaagagatggatgatctaaacccaagtactgagaaaacttatttgcatcattataatttccctccttactcagttggagagactagaccaatgagaactcctgggagaagagagataggtcatggtgcactagcagaaagagcaataactcccgtattaccaggtaaagagacttttccatatgtcttaagagtagtcagtgaagtactgagctccaatggatccacctctatgggatcagtatgtggaagtacactttcattacttgacgctggagttcccctcaaggctccagtaagtggtactgcaatgggtttaattaaagagggtaaagaggtcagaatccttacagatattcagggaattgaggattttcttggagatatggacttcaaagtggctggcactgagaaaggtatcactgctctacaaatggatatgaaaattacgggcttacccgtttctgtaatttctgatgcaatcaaaaaagcccgaccagcaagattacatattcttgaaaaaatgcaagaggccattgataaacctcaagaatcattgtcaccacatgctccaaggcttttaagttttaggattgatccagaacttataggtactgttatcggtccgggagggagaactattaaaggaattactgaaagaactaatacaaaaatagatattgaagacggaggaatcgtaactattgcttctcatgacggcgctgcagctgaagaagctcaaaagataatagagggtttaactcgaaaagtacacgaaggagagatctttccaggtgttgttacaaggatcattccaataggtgcttttgttgaaatccttccagggaaagaagggatggtgcatatttctcaattatctgaagcaagagttgagagagttgaagatgtggttagacagggagatgaggtgacagttagagttcgtgaaattgatagcagaggaaggattaatctcacattaagaggtgtagctcagaacggagggatgtcatatccagaacctactcctacacctgttgctcctcttaattaa

SEQ ID NO: 1800 - protein, 721 aa, Prochlorococcus marinus subsp. pastoris str. CCMP1986
MEGKNTSITFDGREIRLTTGLYAPQAGGAVMIECGDTSLLVTATKTTKKQAADFLPLICDYEEKLYAAGRIPGGFMRREGRPPERATLIARLIDRPMRPLFPSWMRDEIQIVASCLSLDERVPADVLGVTGASIATLLAEIPFYGPMAAVRVGLIGDDFILNPSYREIEKGDLDIVVAGSPEGIVMIEAGANQLSEQDTIEAIDFGYEAVSELIKAQENLLKDLGIKQVKPLEPEEDKALATYLEKNCTKPIDLILKKFDQSKEERDLELDKIELEVQTKIDSLKDDNQLKVLTSENEKLIHSDFKKLTKKLMRSQIINEGKRVDGRDLDEVRKISASAGILPKRVHGSALFQRGLTQVLSTTTLGTPSDAQEMDDLNPSTEKTYLHHYNFPPYSVGETRPMRTPGRREIGHGALAERAITPVLPGKETFPYVLRVVSEVLSSNGSTSMGSVCGSTLSLLDAGVPLKAPVSGTAMGLIKEGKEVRILTDIQGIEDFLGDMDFKVAGTEKGITALQMDMKITGLPVSVISDAIKKARPARLHILEKMQEAIDKPQESLSPHAPRLLSFRIDPELIGTVIGPGGRTIKGITERTNTKIDIEDGGIVTIASHDGAAAEEAQKIIEGLTRKVHEGEIFPGVVTRIIPIGAFVEILPGKEGMVHISQLSEARVERVEDVVRQGDEVTVRVREIDSRGRINLTLRGVAQNGGMSYPEPTPTPVAPLN

SEQ ID NO: 1801 - DNA, 2172 bp, Prochlorococcus marinus str. MIT 9313
  CDS (1)..(2172): transl_table=11
gtgcaaggtcagacacagtcgatctcctttgatggtcgggagattcggctgaccacagggcgatatgccccccaggccggtggttccgtgatgatggaatgcggcgacaccgccgtcctggtaaccgccaccagatcaacaggccgcgaaggcatcgattttcttcccctgatttgcgactacgaggagcggctctatgcagctggccgcattcctggcagtttcatgcgacgtgaaggacgcccgccagaaagagccacactgatcgctcgtctaatcgaccgccccatgaggcccttattccctagctggatgagggacgaccttcagatcgtggcaacatgcctctctctcgatgaacgggttccagcagatgtgcttgccgttacgggagcttccatggccaccttgctagcaagcatccccttccaggggccaatggctgcagtaagggtagggcttctcggtgacgatttcgttctgaatcccagctatcgagaaatcgaacgtggcgatctcgatctcgtggtagctggtactccagatggggttgtcatggttgaagccggtgcaaaccagctgccacaaggggatgtcatcgaagccatcgactttggctatgaagccgtatgcgaattaatcaaggcacagcaaaccatcctcaaggatgcagggattaagcaggtacagcccgaaccccccactcaagaccaagacaccaagctgtcgacttatctagaaaaaaattgcagcaagagcatcggggaagtgcttaagcaatttgaacagaccaaagctgaacgcgatagcaagttggatgccatcaaagcgaaaactgctgaagccattgacagcctcaaagaagacgatgccgttcgcaagtcagtgaatgccaacagcaaagtcttgagcaacaacttcaaggcgctcaccaaaaaattgatgcgtgagcagatcatcaaacaaggcaaacgagtcgatggtcgcaagctcgatgaggtgcgcccgatcagttccgccgcaggcgtgctgccaaaacgcgtgcacggatccggactcttccaacgcggactaacccaggtgctgtccaccgccaccctaggcacacccagcgatgcccaggagatggatgacctcaaccctggacctgagaagacctatctacaccactacaacttcccgccctattccgttggcgagacacgtccaatgcgatcgcccgggcgccgtgaggtaggccatggttccctcgctgaacgcgccatcattccagtactgcctcccaaggacagcttcccttatgtgctcagggtggtgagcgaagtcctcagctccaatgggtccacctcgatgggctcggtctgcggcagcaccctggccctcatggatgctggtgttccactgaaggctccagtcagcggagccgccatgggcttgatcaaggaagatgctgagattcgcatcctcactgacatccagggaatcgaggacttcctcggtgatatggacttcaaggtggctggaacaaaagatggcatcacggccctgcagatggacatgaagatcaccggccttccggtcaaaaccattgcagaagctgtcaatcaggcccgccctgccaggatccacatcctcgagaagatgctggaagccatcgacgctcccagaactaccctctctccccatgccccgcgcctgctgagcttcagaatcgatccagaactgatcggcacagtgattggaccaggtggtcgcacaatcaagggcatcacagaacgcacgaacaccaagatcgacattgaagacggtggcatcgtcacgattgcttctcatgacggggctgctgcagaggcagcccaacgcatcatcgaaggacttacccgcaaagtaaacgagggggaggtgttcaccggaaccatcacaaggatcattccgatcggggctttcgtagagatcctgcccggcaaagagggcatgatccacatctcccagctgtcagaggctcgcgtggagaaggtcgacgacgtcgtaaaagtaggtgatcaagtaacagtacgaatacgagagattgacaatcgtggccgtatcaacctcacactcagaggcgtgcctcaaaacggcgaagagactcaatcagagccagctccaactcctgtagcccctctcaactaa

SEQ ID NO: 1802 - protein, 723 aa, Prochlorococcus marinus str. MIT 9313
MQGQTQSISFDGREIRLTTGRYAPQAGGSVMMECGDTAVLVTATRSTGREGIDFLPLICDYEERLYAAGRIPGSFMRREGRPPERATLIARLIDRPMRPLFPSWMRDDLQIVATCLSLDERVPADVLAVTGASMATLLASIPFQGPMAAVRVGLLGDDFVLNPSYREIERGDLDLVVAGTPDGVVMVEAGANQLPQGDVIEAIDFGYEAVCELIKAQQTILKDAGIKQVQPEPPTQDQDTKLSTYLEKNCSKSIGEVLKQFEQTKAERDSKLDAIKAKTAEAIDSLKEDDAVRKSVNANSKVLSNNFKALTKKLMREQIIKQGKRVDGRKLDEVRPISSAAGVLPKRVHGSGLFQRGLTQVLSTATLGTPSDAQEMDDLNPGPEKTYLHHYNFPPYSVGETRPMRSPGRREVGHGSLAERAIIPVLPPKDSFPYVLRVVSEVLSSNGSTSMGSVCGSTLALMDAGVPLKAPVSGAAMGLIKEDAEIRILTDIQGIEDFLGDMDFKVAGTKDGITALQMDMKITGLPVKTIAEAVNQARPARIHILEKMLEAIDAPRTTLSPHAPRLLSFRIDPELIGTVIGPGGRTIKGITERTNTKIDIEDGGIVTIASHDGAAAEAAQRIIEGLTRKVNEGEVFTGTITRIIPIGAFVEILPGKEGMIHISQLSEARVEKVDDVVKVGDQVTVRIREIDNRGRINLTLRGVPQNGEETQSEPAPTPVAPLN

SEQ ID NO: 1803 - DNA, 2166 bp, Synechococcus sp. WH 8102
  CDS (1)..(2166): transl_table=11
gtgcaaggacaaacccagtcgatctcctttgatggacgcgagattcgactgaccaccggacgttttgccccccaggcgggcggatccgttcttgttgaatgcggagacaccgccgtgctggtgaccgccacccgctccggcggacgggagggcatcgattttctgcctctgatctgcgattacgaggagaggctctacgccgctggtcggatccccggcagctaccagcggcgtgagggtcgtccccccgagcgggccaccctcaccgcccgtctgatcgaccggccgatgcggcccctgttcccagcttggctgcgggacgaccttcaggtggtcgccacctgtctgtccctggacgaacgtgtcccggcggatgtgcttgccgtgaccggtgcctccatcgccacgctgctggcgggcattcccttcaatggtccgatggcggccgtgcgggtgggcctgctcggcgatgacttcgtgctcaacccgagttatcgcgaaattgaacgcggtgatctcgatctgatcgtcgccggcaccccggatggtgtggtgatggtggaggctggtggcaaccagctacccgaacaggatgtgatcgaagcgatcgacttcggttacgaagcgatctgcgaattgatcaaagcccaggagcaactgctgaaggatctgggcatcgaacaggtgaagccggagacccccacgcaggacaccacagtgccggcttacctggagaagcagtgcaccaaggcgatcagcgaggtgctcaagaaattcgaccagaccaaggatgagcgcgacaaggcccttgatgccatcaaggcggaagccgctgaagccatcgccggcctgaaggaggacgatgccatccgtgtggccaccgcctccaattcgaagctgctcggtaacagcttcaaggcgctgaccaaaaccctgatgcgccagcagatcctcaaagacggcaagcgagtagacggtcgcgccctggatgaggtgcgggccatcagtgccttggctggggtcctccctcgacgggtccatggttccggcctattccagcgtggtctcacccaggtgctctccaccgccaccctgggcacacccagcgatgcccaggagatggatgacctccatcccagcaccgagaagctgtacctgcaccactacaacttcccgccttattccgtcggcgaaacccgaccgatgcgctccccaggacgccgcgaaattggtcatggcgccttggccgaacgggccatcctgccggtgcttcccgccaaggacaccttcccttacgtggtgcgggtggtgagtgaagtactcagttccaacggctctacctcgatgggctccgtctgcggcagcaccctgtcgctgatggatgccggagtccccctcaaggcaccagtgagcggtgcggccatgggcttgatcaaggagggcgatgacatccgcatcctcacggacatccagggaatcgaagatttcctcggcgacatggatttcaaagtcgcaggcagcgagaagggcatcacggccctgcagatggacatgaagatcaccggtctgccggtgaagacgatcgccgaggcgatcaaccaggcccgtccagcccgtctgcacatccttgaaaagatgctggaggcgatcgacacaccacgcgaaggcctgtccccccatgccccgcgcctgctgagcttccggatcgatcccgagctgattggcacggtgatcggtcccggtggccgcacgatcaaaggcatcaccgagcgcaccaacaccaagatcgacatcgaggacagcggaatcgtcaccatcgcctcccatgacggtgcggcggctgatgaagctcagaagatcatcgaaggcctcacccgcaaggtgaatgaaggcgaggtgttctcaggatcgatcacccggatcatccccatcggtgccttcgtcgagatcctgcctggcaaggaaggcatgatccacatttctcaactctccgaagccagggtggagaaggtggaggacgtcgtgaaggtgggtgacgaggtcaccgtgcgtgttcgggaaatcgacaaccgcggccggatcaacctcaccctgcggggcgtgccccagagcggcgacggtgccggggaggagcctcagcccacccctgtggcaccgctgagctga

SEQ ID NO: 1804 - protein, 721 aa, Synechococcus sp. WH 8102
MQGQTQSISFDGREIRLTTGRFAPQAGGSVLVECGDTAVLVTATRSGGREGIDFLPLICDYEERLYAAGRIPGSYQRREGRPPERATLTARLIDRPMRPLFPAWLRDDLQVVATCLSLDERVPADVLAVTGASIATLLAGIPFNGPMAAVRVGLLGDDFVLNPSYREIERGDLDLIVAGTPDGVVMVEAGGNQLPEQDVIEAIDFGYEAICELIKAQEQLLKDLGIEQVKPETPTQDTTVPAYLEKQCTKAISEVLKKFDQTKDERDKALDAIKAEAAEAIAGLKEDDAIRVATASNSKLLGNSFKALTKTLMRQQILKDGKRVDGRALDEVRAISALAGVLPRRVHGSGLFQRGLTQVLSTATLGTPSDAQEMDDLHPSTEKLYLHHYNFPPYSVGETRPMRSPGRREIGHGALAERAILPVLPAKDTFPYVVRVVSEVLSSNGSTSMGSVCGSTLSLMDAGVPLKAPVSGAAMGLIKEGDDIRILTDIQGIEDFLGDMDFKVAGSEKGITALQMDMKITGLPVKTIAEAINQARPARLHILEKMLEAIDTPREGLSPHAPRLLSFRIDPELIGTVIGPGGRTIKGITERTNTKIDIEDSGIVTIASHDGAAADEAQKIIEGLTRKVNEGEVFSGSITRIIPIGAFVEILPGKEGMIHISQLSEARVEKVEDVVKVGDEVTVRVREIDNRGRINLTLRGVPQSGDGAGEEPQPTPVAPLS

SEQ ID NO: 1805 - DNA, 2169 bp, Chromobacterium violaceum ATCC 12472
  CDS (1)..(2169): transl_table=11
gtgaaccaagatagggaaaccctcgtgttcaacaagatcaccaaaaccttccagttcggccgccagaccgtcaccttggaaaccggcgaaatcgctcgccaggcatccggttccgtagtcgtttccgttgacgacaccgtcgtcatggtcagcgtggtgggcggcaaaaacgtcaagccgggccaggacttcttcccgctgaccgtcgactacctcgagcgtacctacgccgccggcaagatcccgggcggcttcttcaagcgcgaaggcaagcagtccgagaaggaagtgctgaccagccgcctgatcgaccgtccgatccgcccgctgttcccggaaggcttctaccatgacgtgcagatcgtcgccaccgtgttgtcgctgaatccggaagtggattccgacatcccggcgatgatcggcgcttccgccgcgctggccatttccggcctgccgttcgccggcccgatcggcgccgcccgcgtcggctacgccaacggcgaatacatcctgaacccgaccaagaccgagctgcaaacctcgcagatggatctggtggtcgccggcacctcgcgcgccgtgctgatggtggaatctgaagccaaggaactgccggaagccgtgatgctgggcgctgtggtgttcggccacgaacagatgcaggctgcgatcaaggccatcaacgaactggccgacgaagtgaatccggtgatgttcgactgggccgctccggccaaggacgaagcgctgatcgcccagatccgcggcatcgccggcgagaagctggccgaagccttccgcctgcgccagaagcaagcccgcaccgtcgccatcaacgaagcttgggacgcggtcaaggccggcctgatcaacgaagaaaccgacaccctgaaggccaacgagatcaagggcatcttcaagagcctggaagctgaaatcgtccgcggccagatcctggctggcgaagcgcgcatcgacggccgcgacacccgcaccgtgcgtccgatcagcatccgcaacaacgtgctgccgcgcacccacggctccgcgctgttcacccgcggcgaaacccaggcgctggtcgtggccacgctgggcaccaagcaggacgagcagatcatcgacgcgctggccggcgagtacaccgagcgcttcatgctgcactacaacttcccgccgtactccaccggcgaagccggccgcatgggcccgccgaagcgccgcgaaatcggccacggccgcctggccaagcgcgcgctggtggccgtgctgccgccggaagacgagttcggctactcgatgcgcgtggtgtccgagatcaccgaatccaacggctcctcgtcgatggcttccgtgtgcggcggctgcctgtcgctgctgtcggccggcgtgccgctgaaggcgcacgtggccggcatcgccatgggcctgatcctggaaggcaaccgcttcgccgtgctgaccgacatcctgggcgatgaagatcacctgggcgacatggacttcaaggtggccggcaccgccgcaggcgtgaccgcgctgcagatggacatcaagatccagggcatcaccaaggaaatcatgcaggttgcgctggagcaggccaaggaaggccgtctgcacatcctgggcctgatgaaggaagccgtggacggcccgcaagagctgtccgcccacgctccgcgcctgtacgtgatgaagatcaacccggagaagatccgcgaagtgatcggcaagggcggcgagaccatccgctccatcaccaaggataccggctgcgagatcaacatcgaagaagacggcaccatcaccatcgcctcggtaagcagcgagggcgcggaagcggccaagaagcgcatcgaagagatcactgtcgaagtcgaagtgggcaaggtgtacgaaggcaccgtggtcaagatcctcgacaacaacgtcggcgccatcgtttccatcctgccgggcaaggacggtctggtccacatctcgcagatcgccaacgagcgcatcaagaatgtgtccgactacctgaaggaaggccaggttgtgaaggtcaaggccatcgaaatggatgaccgcggccgcatccgcctgtccatcaaggcgctgctggaagaagaagcgaaaaccgcccaagcgaccgctgacgccttcggcctgaagacccagtaa

SEQ ID NO: 1806 - protein, 722 aa, Chromobacterium violaceum ATCC 12472
MNQDRETLVFNKITKTFQFGRQTVTLETGEIARQASGSVVVSVDDTVVMVSVVGGKNVKPGQDFFPLTVDYLERTYAAGKIPGGFFKREGKQSEKEVLTSRLIDRPIRPLFPEGFYHDVQIVATVLSLNPEVDSDIPAMIGASAALAISGLPFAGPIGAARVGYANGEYILNPTKTELQTSQMDLVVAGTSRAVLMVESEAKELPEAVMLGAVVFGHEQMQAAIKAINELADEVNPVMFDWAAPAKDEALIAQIRGIAGEKLAEAFRLRQKQARTVAINEAWDAVKAGLINEETDTLKANEIKGIFKSLEAEIVRGQILAGEARIDGRDTRTVRPISIRNNVLPRTHGSALFTRGETQALVVATLGTKQDEQIIDALAGEYTERFMLHYNFPPYSTGEAGRMGPPKRREIGHGRLAKRALVAVLPPEDEFGYSMRVVSEITESNGSSSMASVCGGCLSLLSAGVPLKAHVAGIAMGLILEGNRFAVLTDILGDEDHLGDMDFKVAGTAAGVTALQMDIKIQGITKEIMQVALEQAKEGRLHILGLMKEAVDGPQELSAHAPRLYVMKINPEKIREVIGKGGETIRSITKDTGCEINIEEDGTITIASVSSEGAEAAKKRIEEITVEVEVGKVYEGTVVKILDNNVGAIVSILPGKDGLVHISQIANERIKNVSDYLKEGQVVKVKAIEMDDRGRIRLSIKALLEEEAKTAQATADAFGLKTQ

SEQ ID NO: 1807 - DNA, 2232 bp, Porphyromonas gingivalis W83
  CDS (1)..(2232): transl_table=11
atgcttaacgttgtaagtaagactatcgatctgggagatggtcgttccatcaagatcgaaaccggtaaattggccaagcaggccgatggcgccgtgacagtcaccatgggcaatacggtattgctcgctacagtttgtgcagccaaagacgctaaccccggctgcgacttcatgcctcttcaggtggaatacaaagagaaatactccgccatcggacgcttccccggaggattcactcgccgcgaaggcaaagcttcggattacgagatcctgacctgccgccttgtggatcgtgcccttcgtccgctattcccggacaattatcatgcagaggtattcgtcaatgtgatcctcttttcagccgatggcgaggatatgcccgacgccttggccggtctggctgcttcggcggctcttgccgtttccgatataccgttcaacggccctatcagcgaagtgcgcgtagcacgtgtggacggccgctatatcgtcaatcctactttcgagcagctcgaacgcgcagacatcgacttgatggtcggagccacaatggacaacatcatgatggtcgaaggtgaaatggacgaggtacaggaatccgaaatgctcgaaggcatacgcgtggcacacgaagccatcaaggtacagtgcaaggcgcagctcgaactatccgaagctgtaggaaaacttcaaaagcgtgaatacagccatgaagtaaacgatgaagacctgcgcaagaaagtgcacgacgaatgctatgctcgtgcctatgaggtggctaccagcggaaccggcaaacacgagcgcggcgaagcttttgaaaagatcgtggaagagttcaaagctcaatatacggaagaagaacttgccgagaaggccgaaatgatagctcgctactaccacgatgtggaaaaagaagcgatgcgtcgtgccatcctcgacgaaggcaaacgcctcgatgggcgtaagaccacggagatccgtccgatatggatcgagaccgactgcctacccggcccgcatggctcagctatattcactcgtggtgagacgcagtcgcttacgaccgttacgcttggtacgaagagcgacgaaaagctcgtggacgatgtactcaattatacgaaagagcgattcctgctgcactacaacttccctcctttctctacaggtgaagcccgtccccaacgcggtgtaggccgccgcgagatcggtcatggcaatttggcgcatcgcgccctcaagcgtatgataccgacggactacccctatgtggtacgtgtaatcagcgacattctggagtccaatggctcgtcctcgatggccactgtctgcgccggtactttggctctgcgcgatgccggtgtacagattcgcaagcccgtatccggcattgctatgggcttgatctcagagaatcagggcaagaactacgccatcctctccgatattctcggtgacgaagaccatctcggcgatatggacttcaaggtaacgggtacgaaggacggtattacagccacgcagatggacatcaaggtggatggtctcagctatgagattttggagaatgctctggagcaagccaagcaaggacgcctacacatcctcggcaagatcatggaagctcagcccgagacaagagatgacctcaagcctcatgcaccgcgtatcgagaagatgcatatcggcaaggagtttatcggagcagtcataggcccgggcggaaagatcatccaaggcatacaggagaagagtggtgccacagtgaacatcgaagaggtagatggcatgggtgtcatcgagatcagtggtacgaacaaaccctgcatcgatgctgcaatcggcatgatcaagggcatcgtggctatgccggaagtcggagaaacctatccgggcaagatcacaagtgtgatgccatacggctgcttcgtcgaattcctccccggcaaggaaggacttctgcatatctcggaagtggattggaaacgattcgagaccatcgaggacaccaacctgaaagaaggcgaatccatcaacgttaagctgctcgatatagatccgaagaccggcaagttcaaactcagccgcaaggtgctactggaaaaaccggaaggctacgtggagcctcagccgagagagcggcgtgagcggcgtgaaggaggacgcgaaggaggtcgtaacttcgaacgtcgtggtggtgatcgtgaccaccgcgagcctcgtggctaa

SEQ ID NO: 1808 - protein, 743 aa, Porphyromonas gingivalis W83
MLNVVSKTIDLGDGRSIKIETGKLAKQADGAVTVTMGNTVLLATVCAAKDANPGCDFMPLQVEYKEKYSAIGRFPGGFTRREGKASDYEILTCRLVDRALRPLFPDNYHAEVFVNVILFSADGEDMPDALAGLAASAALAVSDIPFNGPISEVRVARVDGRYIVNPTFEQLERADIDLMVGATMDNIMMVEGEMDEVQESEMLEGIRVAHEAIKVQCKAQLELSEAVGKLQKREYSHEVNDEDLRKKVHDECYARAYEVATSGTGKHERGEAFEKIVEEFKAQYTEEELAEKAEMIARYYHDVEKEAMRRAILDEGKRLDGRKTTEIRPIWIETDCLPGPHGSAIFTRGETQSLTTVTLGTKSDEKLVDDVLNYTKERFLLHYNFPPFSTGEARPQRGVGRREIGHGNLAHRALKRMIPTDYPYVVRVISDILESNGSSSMATVCAGTLALRDAGVQIRKPVSGIAMGLISENQGKNYAILSDILGDEDHLGDMDFKVTGTKDGITATQMDIKVDGLSYEILENALEQAKQGRLHILGKIMEAQPETRDDLKPHAPRIEKMHIGKEFIGAVIGPGGKIIQGIQEKSGATVNIEEVDGMGVIEISGTNKPCIDAAIGMIKGIVAMPEVGETYPGKITSVMPYGCFVEFLPGKEGLLHISEVDWKRFETIEDTNLKEGESINVKLLDIDPKTGKFKLSRKVLLEKPEGYVEPQPRERRERREGGREGGRNFERRGGDRDHREPRG

SEQ ID NO: 1809 - DNA, 2211 bp, Wolinella succinogenes DSM 1740
  CDS (1)..(2211): transl_table=11
atgaatgcaaccattaaagagatagcgcttcccaacaaaacggagacttttgagtttggtgccatcgccaagcaggccaatggatcggtgctctatcgatgtggcaagagcgttttgctggcaagcgtctgctatgagagcgacgagagagtcaaggaggatttcctgcctttgacggtgcagtacatcgaaaagagctacgcggcaggaaaatttcctggaggattcatcaagagagaatcaaagccaggcgattttgagacactcacctcaaggattattgatcgaagccttcgaccccttttccctaaaggctacgcacatcccacccagatcactgtgatggtactcagtgctcaaaatgatgccgatttacaaaccatggcgcttaatgcggcgtcagcggcactttttgtttcagatattcctttgcgcaagcccgtccatggattgcgaattggaaaaattaatggggcgctcgtggtcaaccctactactaaagagatgagcgagagcactcttgatctctttgtttcaggtgtagaggaagatctgctgatgattgagatgcgcacccttgcgagtgatgagatcaacaacacctgctttgtgggggattgcggaatggttgcggcaagcgcgagtgatattttgaaaattcaccaagccaacgaaatgaaagaggaagagctcctagaggccttagagcttgccaaaacttccatcaaaaaggcttcagcgtgttatgttgaggccttcacccctttagcaaaacccgatgcgattttagagcttaagcctgatatcacctcgagtgaaatctatcaatatattaaagaaaatcacgctattgcgatcaaagaggcgatcacgcgcatggccaagagcgaacgccatagtgacctaaagagaatcgccaaagagattgcttcaagtgagcgcgcccaagaatcggagtggagctttgaggcggtctatgagacggtgggtaaatacaagcgtgaggcagtgagagcactgattcttgaagagagaagaagagcggatggaaggggtctcaaagaggttcgacctattgatatccaaaccaatatccttcccaatgcccatgcctcagcactctttacgcgcggagagacgcaagctttggtggtggcgactcttggtggtgatatggatgcgcaaagctatgagctcttgacagagaagggaagctccaaagagcgctttatggtgcactacaatttcccctctttcagtgtgggtgaagcgggcatggtgggggctccgggaagacgagagcttggacacggaaatcttgccaagcgagccttggagccaactattgaggagtggggcgcccagacgattcgtcttgtctcggagattttagaatccaatggttcttcttccatggcgacggtgtgcggaggctcgctcgccctcaaagcggcaggaatcaacaccactgcgttagtggctggagtggcgatggggcttattgtagaggcagagaagcatgccattttgaccgatatcatgggattagaagatcatgatggggatatggattttaaaatcgctggtacaagcacgggaatcacggccatgcagatggatatcaagctgggtggattgagcatggagatactcaaagaggcgctctatcaggccaaagagggcagggagcatatccttggaatcatggaaaaagcccaaagtgagatcatcatcaatgatgagattctcccctctctgcagattttctctatcaaccctgggagaatcgtggacatcatcgggcaggcaggcaagacgatcaaagagatcattgagcgctttgaagtggccatcgacctcaaccgtgacaatggtgaggtgaaagtgacaggaagcaacaagcagaaggtcgaagccgccaaggagcatatcctctctatcagcaaccaagaggctcctcagcgtgtacgtgttgcggatgtctatagcgctggagaggttttcaagggcaaggtcaagaagattgtagattttggagctttcattgaacttcccaagggaggggatggactgctccatgtttccaaaattgtgcagcaccgagaccagagaatcgatgaagtgatcaaagagggcgaggagattgaggtgcaaatcctttcaatcaacaagaacaaggttgaattaggccgtgctacacggcctaattaa

SEQ ID NO: 1810 - protein, 736 aa, Wolinella succinogenes DSM 1740
MNATIKEIALPNKTETFEFGAIAKQANGSVLYRCGKSVLLASVCYESDERVKEDFLPLTVQYIEKSYAAGKFPGGFIKRESKPGDFETLTSRIIDRSLRPLFPKGYAHPTQITVMVLSAQNDADLQTMALNAASAALFVSDIPLRKPVHGLRIGKINGALVVNPTTKEMSESTLDLFVSGVEEDLLMIEMRTLASDEINNTCFVGDCGMVAASASDILKIHQANEMKEEELLEALELAKTSIKKASACYVEAFTPLAKPDAILELKPDITSSEIYQYIKENHAIAIKEAITRMAKSERHSDLKRIAKEIASSERAQESEWSFEAVYETVGKYKREAVRALILEERRRADGRGLKEVRPIDIQTNILPNAHASALFTRGETQALVVATLGGDMDAQSYELLTEKGSSKERFMVHYNFPSFSVGEAGMVGAPGRRELGHGNLAKRALEPTIEEWGAQTIRLVSEILESNGSSSMATVCGGSLALKAAGINTTALVAGVAMGLIVEAEKHAILTDIMGLEDHDGDMDFKIAGTSTGITAMQMDIKLGGLSMEILKEALYQAKEGREHILGIMEKAQSEIIINDEILPSLQIFSINPGRIVDIIGQAGKTIKEIIERFEVAIDLNRDNGEVKVTGSNKQKVEAAKEHILSISNQEAPQRVRVADVYSAGEVFKGKVKKIVDFGAFIELPKGGDGLLHVSKIVQHRDQRIDEVIKEGEEIEVQILSINKNKVELGRATRPN

SEQ ID NO: 1811 - DNA, 2142 bp, Gloeobacter violaceus PCC 7421
  CDS (1)..(2142): transl_table=11
atgatcgagtacagaaagtctgtcacagtccacggacgcgagatcgggttgagtaccggcgtcctggcgcagttggcgggcggttcggtgttggtgcagtcgggggagactgcggtattggtgacggccacgatggccagcaaaccccgggaggggatcgacttctttccattgctggtggattacgaagaacgcctgtacgcggccggacgcattccaggcagtttcgtgcgccgcgaaggccgcccgcccgaaaaagcaattcttgccgcccgcctgattgaccggccgctgcggcccctctttccaaagggcttcatcaacgacgtgcagatcgtggcgacggtgcttgccctcgatatgaacgtgccgccggatatccttgccatcctcggcgcctcgacggcgaccatgctcgcgggcattcccttcgacggaccggtggcggctacccgcgtcggtttgatgggcgacgatttcatcatcaaccccacctacaaagagatcgaagagggcgaactcgacttagtagtggcgggcaccaaaaacgggatcatgatggtcgaggccggggccaactgcctgcccgaggaggacatcatcgatgccatcgactacggctacgaggcggtccaggcgatgctcaccgcccaggaggagttcatccgcgacctgaagattgagccgatggccttcgtcgcccccgccaacgacccggtgctggtttcctttgtcgaagagaaagcttccgaggcggtcgccgaggtgctgcgcagcttcgagctgagcaaagacgagcgcgacgccaagctcgacgctatcgaggcagaactggggaccacctttgcaggtctgggcgaagaagaccccctgcgcgagaaagcggccgccaatgccagcaagttgccggcgctcttcaaatccaccaccaaaaagctgatgcgcaagcagatcctggtggagggcaagcgtgtcgacggccgttccctcgacgaggtgcgtcccatctcaagtgccgtgcgggtgatcccgcgggtgcacggttgtggcctgttcacccggggcaccacccaggtgctctcggtggtgaccctgggcaccgcctccgacgcccaggaactcgacgatctgcacccggacgattccaagcgctacatgcaccactacaactttccgggtttttcggtgggcgaagtgaagcccctgcgcggcgtcggccgccgcgaagtgggccacggcgccctcgccgagcgcgccatcgtgccgatcctgcccgagcacgagcagtttccttacgtgatccgcgtcgtctccgaggtgctctcctccaacggttcaacctcgatgggctcggtgtgcgcctcgaccctcgccctgatggatgccggggtgcccatccgcgaaccggtctccggggtggcgatgggtctaattaaagaaggcgacgaagtgcgcatcctcaccgacatccagggcatcgaggattttctgggggacatggacttcaaggtggcgggcacccgcgacgggatcaccgcgctgcagatggacattaaaatccaggggatcaccctgcagatcctcgaagccgccatccagcagtccaaggcgggccgactgcacatcctggagaagatgctgatcgccatcgacaaaccgcgggtcgaactgtcgccctacgcgccgcgcctgctcaccctcaagatcccggtcgacatgatcggtctggtgattggtcccggcggtaagacgatcaagcgcatcgtcgaggagaccggcgccaaggtcgatatcgaagacgacggcaccgtggtggtttcttcgatagacggggcgaaggctctggctgccaagcagatcatcgaggggatgacccgcaccgtcgaagtcgacaaagtttatctgggtacggtcacccggattatccccaacctgggggctttcgtcgaagtcatgcccggcaaagagggcttagtgcatatctcacagcttgctgagcaccgggtgcgcaaagtcgaagacgaactgaacgtcggcgacgaagtcgtcgtgaaagtcaaagagatcgatcaaaaaggccgcatcaacctcacccgccggggaatccacccgagcgaggtcgaggaggcgcgggggcagtag

SEQ ID NO: 1812 - protein, 713 aa, Gloeobacter violaceus PCC 7421
MIEYRKSVTVHGREIGLSTGVLAQLAGGSVLVQSGETAVLVTATMASKPREGIDFFPLLVDYEERLYAAGRIPGSFVRREGRPPEKAILAARLIDRPLRPLFPKGFINDVQIVATVLALDMNVPPDILAILGASTATMLAGIPFDGPVAATRVGLMGDDFIINPTYKEIEEGELDLVVAGTKNGIMMVEAGANCLPEEDIIDAIDYGYEAVQAMLTAQEEFIRDLKIEPMAFVAPANDPVLVSFVEEKASEAVAEVLRSFELSKDERDAKLDAIEAELGTTFAGLGEEDPLREKAAANASKLPALFKSTTKKLMRKQILVEGKRVDGRSLDEVRPISSAVRVIPRVHGCGLFTRGTTQVLSVVTLGTASDAQELDDLHPDDSKRYMHHYNFPGFSVGEVKPLRGVGRREVGHGALAERAIVPILPEHEQFPYVIRVVSEVLSSNGSTSMGSVCASTLALMDAGVPIREPVSGVAMGLIKEGDEVRILTDIQGIEDFLGDMDFKVAGTRDGITALQMDIKIQGITLQILEAAIQQSKAGRLHILEKMLIAIDKPRVELSPYAPRLLTLKIPVDMIGLVIGPGGKTIKRIVEETGAKVDIEDDGTVVVSSIDGAKALAAKQIIEGMTRTVEVDKVYLGTVTRIIPNLGAFVEVMPGKEGLVHISQLAEHRVRKVEDELNVGDEVVVKVKEIDQKGRINLTRRGIHPSEVEEARGQ

SEQ ID NO: 1813 - DNA, 2130 bp, Photorhabdus luminescens subsp. laumondii TTO1
  CDS (1)..(2130): transl_table=11
ttgcttaatccgattgttcgtaaatttcaatatggccaacataccgttgctatcgaaacaggtatgatggcacgccaggccacagctgctgtcatggtcaatatggatgacacggctgtatttgtcactgttgttggtcaaaagaaagtaaaagaaggtcaggatttctttcctctgactgttaactatcaggagcgtacttatgctgctggtcgtgttcctggcagtttctttcgtcgtgaaggtcgtccaggtgaaggagaaacgttagtcgctcgtttgattgatcgtcctctgcgtcctctgttcccggacggtttcctgaacgaggtgcagattgtagcaacagttgtttctgttaacccgcaagttaatccagatattgttgcaatgatcggtgcttctgctgtgctggcactatctggtatcccgttcaatggtccaattggtgctgctcgcgttggttatattaatgatcagtatgtgctgaacccaaccagtgatgagctaaaaaatagccgtttagatctggtggtttcaggtactgctggtgctgttctgatggttgagtctgaagcagacattctaactgaagagcaaatgttaggtgcggtagtattcggtcatgaacaacaacaggtggttattgataacattaatgcgttggctgcggaagcaggcaaagaaaaatggaattgggtgccagaatctgttaatcaagcgttgcatgaccgtgtagctggattggcagaagaccgtttgggtgatgcttatcgtatcactgaaaaacaggagcgttatgctcaggttgatgctatcaaagaggaagttacggcagcactgctggaacaggatgaagctttagaggaagctgaaatccatgaaattctgggtagcttagagaaaaaagttgttcgtagccgcgtcttgcgtggtgaaccacgtattgatggtcgtgaaaaagatatggtgcgtgcattggatgtacgtactggtgttctgcctcgaactcatggctctgcgctgtttacccgtggtgaaactcaggctttggttactgcgactttgggtacagaacgtgatgcacagatcattgacgagttgatgggagagcgcacagatcgtttcctactgcactacaacttcccgccatattctgttggtgaaacaggtatgatgggttcaccaaaacgtcgtgaaattggtcatggtcgtttggccaaacgtggtgtggcggcagttatgccaaaagctaacgaattcccatataccgttcgggtcgtttctgaaatcacggaatcaaacggctcgtcttcaatggcatctgtttgtggtgcatctcttgcgttgatggatgcaggtgtgccgattaaagctgctgttgctggtattgcaatgggattagtgaaagaagacgataattttgttgttctgtctgacatcttgggtgatgaagatcatttgggagacatggactttaaagtagcgggtagctgtgaaggtatcagcgcgctgcaaatggacatcaaaattgaaggcattacccgtgaaattatgcaaattgctctgaatcaggcaaaaggtgcgcgtttgcatatcctgagtgtaatggaacaggcaattaatagcccacgtaatgatatttctgaatttgcaccacgtattcacactattaagatcaatcctgataagatcaaagatgttatcggtaaaggtggttcagttatccgtgcactgacagaagaaaccggtaccaccattgaaattgaagatgatggcacagtgaaaattgctgcaactgatggtgaaaaagcaaaacatgccatcagtcgcattgaagaaataactgctgagatcgaagtagctcgcatttacactggtaaagtaacccgtatcgttgattttggcgcgtttgttgctatcggtggtggtaaagaaggtctggtacatatttctcagattgctgataagcgtgttgagaaagtggctgactatttgcaggttggtcaggaagtctcagttaaagttctggaaattgatcgccagggtcgtgttcgtctgagtattaaagaagcgacagtcggagtaattgtcgaggatacaccagtggcaccacaatcagcagaataa

SEQ ID NO: 1814 - protein, 709 aa, Photorhabdus luminescens subsp. laumondii TTO1
MLNPIVRKFQYGQHTVAIETGMMARQATAAVMVNMDDTAVFVTVVGQKKVKEGQDFFPLTVNYQERTYAAGRVPGSFFRREGRPGEGETLVARLIDRPLRPLFPDGFLNEVQIVATVVSVNPQVNPDIVAMIGASAVLALSGIPFNGPIGAARVGYINDQYVLNPTSDELKNSRLDLVVSGTAGAVLMVESEADILTEEQMLGAVVFGHEQQQVVIDNINALAAEAGKEKWNWVPESVNQALHDRVAGLAEDRLGDAYRITEKQERYAQVDAIKEEVTAALLEQDEALEEAEIHEILGSLEKKVVRSRVLRGEPRIDGREKDMVRALDVRTGVLPRTHGSALFTRGETQALVTATLGTERDAQIIDELMGERTDRFLLHYNFPPYSVGETGMMGSPKRREIGHGRLAKRGVAAVMPKANEFPYTVRVVSEITESNGSSSMASVCGASLALMDAGVPIKAAVAGIAMGLVKEDDNFVVLSDILGDEDHLGDMDFKVAGSCEGISALQMDIKIEGITREIMQIALNQAKGARLHILSVMEQAINSPRNDISEFAPRIHTIKINPDKIKDVIGKGGSVIRALTEETGTTIEIEDDGTVKIAATDGEKAKHAISRIEEITAEIEVARIYTGKVTRIVDFGAFVAIGGGKEGLVHISQIADKRVEKVADYLQVGQEVSVKVLEIDRQGRVRLSIKEATVGVIVEDTPVAPQSAE

SEQ ID NO: 1815 - DNA, 2178 bp, Vibrio vulnificus YJ016
  CDS (1)..(2178): transl_table=11
ttgagacctaataccaacgtccgaatttattttcggcaacaaggaataacaatgttcgaaaaaccagttgttaaaacgttccagtacggtaaccacacggttactctagaaactggcgttatcgcacgtcaagcaaccgctgctgttatggttactatggatgacactgcagtatttgtttctgttgtcggtaagaaagaagctgttccaggtcaggacttcttccctctaaccgtaaactaccaagagcgtacttacgctgcaggtaaaatccctggtggtttcttcaagcgtgaaggccgtccttctgaaggtgaaacgctgactgcacgtctaatcgaccgcccaattcgtcctctattcccagagggttttaataacgaagtacaagttatcgctacggtagtgtctgttaacccagacgtacaaccagatatcccaacaatgattggtacctctgcagcgcttgctatctctggtatcccattcaacggtcctatcggcgcggcacgtgttggtcacattgacggtcaacttgtactaaacccaagcaacactgaactaaacgcatctcgtctagatcttgttgttgcgggtactgaatctgcagtgctaatggttgagtcagaagctgacaaccttactgaagaagaaatgctatctgcagtggtatttggtcacgaccaacaacaagcagtgatcaaagcaatcaacgaattcgcagcagaagttgcgacgccatcttggaactgggttgctcctgaagcgaacacagctcttaacgagaaagtggctgatctagcagaagcgaaacttgttgaagcttacaaaattactgaaaagatggctcgttacgaccgtatccatgagattgcggcagaagttaatgcagttatccttgctgaagatccagaagcagatgcaaaagaaattcacactatcttccacgatcttgagaagacggttgtgcgtcgtagcatcattgctggcaacccacgtatcgatggccgtgaaaaagacatggttcgtgcactagatgtacgtactggcgttcttccacgtactcacggttcttcactattcactcgtggtgagactcaggcgctagtaacggcgacactaggtactcaacgtgatgcgcaaatcatcgacgagctaacgggtgagaagaaagattacttcctactacactacaacttccctccatactgtgtaggcgaaacgggttttgtaggttctccgaagcgtcgtgaaatcggtcacggtaaacttgcgaagcgtggtattgctgcagtaatgccatcaatcgatgagttcccatacacagtacgtgttgtttcagaaatcacagaatctaacggttcatcttcaatggcttctgtatgtggtacttctctagcgcttatggacgctggtgtgccaatcaaggcttctgttgctggtatcgcaatgggtctggttaaagaaggcgacgattttgttgttctttcagatatccttggtgacgaagaccacctaggtgacatggactttaaagttgcgggtacttctactggtatcacagcacttcaaatggacatcaagatcgaaggtatcacaaaagagatcatgcaaattgcgcttaaccaagctcaaggcgcgcgtaagcacatcctatctgtgatggatcaagctatctctggtgctcgtgacgatatctctgagttcgctcctcgcatccacacgatgaagatcagcgcagacaagatcaaagacgttatcggtaaaggtggcgcagtgatccgtgctctaactgaagagacaggcacaaccatcgaaatcgaagatgacggtactatcaagattgcagcaacagaaggtgcggcagcgaaagaagcgatccgtcgtattcaagagatcaccgctgaagttgaagtgggcgtaatctacacaggtaaagtagctcgcctagctgattttggtgcattcgtaacgattcttccaggtaaagatggtcttgttcacatttctcaaatcgctgacaagcgtgtcgagaaagtgtctgactacctaactgaaggtcaagaagttcaagttaaagtacttgaaatcgaccgccaaggccgcgttcgtctaagcatgaaagaagcggtagaaaagccagttgaagcagaagcgccagcggcagaagaagagtaa

SEQ ID NO: 1816 - protein, 725 aa, Vibrio vulnificus YJ016
MRPNTNVRIYFRQQGITMFEKPVVKTFQYGNHTVTLETGVIARQATAAVMVTMDDTAVFVSVVGKKEAVPGQDFFPLTVNYQERTYAAGKIPGGFFKREGRPSEGETLTARLIDRPIRPLFPEGFNNEVQVIATVVSVNPDVQPDIPTMIGTSAALAISGIPFNGPIGAARVGHIDGQLVLNPSNTELNASRLDLVVAGTESAVLMVESEADNLTEEEMLSAVVFGHDQQQAVIKAINEFAAEVATPSWNWVAPEANTALNEKVADLAEAKLVEAYKITEKMARYDRIHEIAAEVNAVILAEDPEADAKEIHTIFHDLEKTVVRRSIIAGNPRIDGREKDMVRALDVRTGVLPRTHGSSLFTRGETQALVTATLGTQRDAQIIDELTGEKKDYFLLHYNFPPYCVGETGFVGSPKRREIGHGKLAKRGIAAVMPSIDEFPYTVRVVSEITESNGSSSMASVCGTSLALMDAGVPIKASVAGIAMGLVKEGDDFVVLSDILGDEDHLGDMDFKVAGTSTGITALQMDIKIEGITKEIMQIALNQAQGARKHILSVMDQAISGARDDISEFAPRIHTMKISADKIKDVIGKGGAVIRALTEETGTTIEIEDDGTIKIAATEGAAAKEAIRRIQEITAEVEVGVIYTGKVARLADFGAFVTILPGKDGLVHISQIADKRVEKVSDYLTEGQEVQVKVLEIDRQGRVRLSMKEAVEKPVEAEAPAAEEE

SEQ ID NO: 1817 - DNA, 2268 bp, Corynebacterium diphtheriae NCTC 13129
  CDS (1)..(2268): transl_table=11
ttgagcacaaagccttccaacgtcgtctttaacattgacgaggaatttggaatcaccgaggcaatcgcaaccatcgataacggtgattttggaaagcgcaccatccgttttgagaccggccagttggcacgccaagcagacggatcagttacaacctatcttgacgacgacacgatgttgttggcaacgaccacggcatctaatcagccacgtgaaggattcgatttcttcccgctgacagtcgacgttgaagagcgtatgtacgcagctggtaggatcccaggatcgttcttccgtcgtgaaggccgtccttccaccgaagcaatcttggcttgccgtttgatcgaccgcccgttgcgccccacctttgttaaggggctacgcaacgaagttcaggtagttatcactgttctttccgtaaacccgcaagacatgtacgatgtcgtggcaattaacggtgcctctgcagcaactcagttgtcaggtttgccggtttctggtcctgttggcggtgtccgaatggcactgatcgcagacgatgctcaccctaaggggcagtggattgctttccctactcatgaacagcatgaacaagcactctttgagctcgtcgtagcaggacgtattgtctcgaagaagcaaggtaaaaagaccgttgatgatgttgccatcatgatggttgaggctggtgctactgagcaggttgtagatcgagttaaagctggagctccagctcctacagaatctgtggttgcagaaggtcttgaggctgctaaaccattcattgaggttctttgccgtgcgcaggctggattggccgagcgtgcagccaaggaaacccaagaattcccactcttcccgccatacactgacgttgtttacgatgcagtggagaagaaggtttctaagaaactgcgttcgttgctcacgatcaagtccaagcaagatcgtgatgaggcaacgaatgcttacatggaagaaatcgaagcagatctgattgcccagctcggatctgatgatgaggcggctgcatctaaggcaattcgtgcagcatacaatgctgtaatgaagaagattgtccgtcatatgatcttgacggaacacttccgcatcgacggtcgcggtgtcaccgatattcgtgatttaggtgtggaagttgacctcatcccacgcgctcatggttcgtccttgttcgagcgtggcgagactcagattctgggtgtgaccactctcgatatgctcaagatggagcagcagatcgattcattgactccagcaacttcgaagcgttatatccaccactacaacttcccaccgtattccactggtgaaactggccgtgttggctcacctaagcgtcgcgaaattggccacggtgctttggctgagcgtgcactggttcctgtgatcccaagtcgtgaagagttcccttatgcaatccgacaggtgtctgaggctttgggctcgaacggttctacctcgatgggctctgtatgtgcgtccaccttgtctttgtacaacgcaggtgtaccgttgaaagctcccgttgctggtattgcgatgggcttggtgtctgatgaagtagacggtgagactcgttatgtcgctttgactgacatcttgggtgcagaagacgcctttggtgatatggacttcaaggttgctggtactcgccagttcattaccgctttgcagctagatacaaagcttgatggcattccttctgaggtgcttgctcaggcgctatcccaggcgaatgatgcgcgtaacaccattttggatacgatggcagaagtaatcgaaactccagatgagatgagcgactacgcgccacgtattactgcgattaccgttccagtgaacaagatcggtgaggttatcggtccaaagggcaagaccattaactctattaccgaagaaactggcgctaacatttctattgaagaagacggcacagtttatgtttcggccgccagcggtgctgctgcagaggctgcaatcgaaaagattaacgctatcgctaacccacagctgcctaaggtcggagagcgtttcctcggcactgtcgtaaagaccactgcatttggtgctttcgtatccttgctgccaggacgcgatggactggttcacatctccaagcttggtggtggcaagcgtatcgaaaaggttgaagatgtagtcaacgtgggagataaactcgaggttgaaatcctagatattgacaaccgtggcaagatttccttggctccagtgaaaaacgaggactaa

SEQ ID NO: 1818 - protein, 755 aa, Corynebacterium diphtheriae NCTC 13129
MSTKPSNVVFNIDEEFGITEAIATIDNGDFGKRTIRFETGQLARQADGSVTTYLDDDTMLLATTTASNQPREGFDFFPLTVDVEERMYAAGRIPGSFFRREGRPSTEAILACRLIDRPLRPTFVKGLRNEVQVVITVLSVNPQDMYDVVAINGASAATQLSGLPVSGPVGGVRMALIADDAHPKGQWIAFPTHEQHEQALFELVVAGRIVSKKQGKKTVDDVAIMMVEAGATEQVVDRVKAGAPAPTESVVAEGLEAAKPFIEVLCRAQAGLAERAAKETQEFPLFPPYTDVVYDAVEKKVSKKLRSLLTIKSKQDRDEATNAYMEEIEADLIAQLGSDDEAAASKAIRAAYNAVMKKIVRHMILTEHFRIDGRGVTDIRDLGVEVDLIPRAHGSSLFERGETQILGVTTLDMLKMEQQIDSLTPATSKRYIHHYNFPPYSTGETGRVGSPKRREIGHGALAERALVPVIPSREEFPYAIRQVSEALGSNGSTSMGSVCASTLSLYNAGVPLKAPVAGIAMGLVSDEVDGETRYVALTDILGAEDAFGDMDFKVAGTRQFITALQLDTKLDGIPSEVLAQALSQANDARNTILDTMAEVIETPDEMSDYAPRITAITVPVNKIGEVIGPKGKTINSITEETGANISIEEDGTVYVSAASGAAAEAAIEKINAIANPQLPKVGERFLGTVVKTTAFGAFVSLLPGRDGLVHISKLGGGKRIEKVEDVVNVGDKLEVEILDIDNRGKISLAPVKNED

SEQ ID NO: 1819 - DNA, 2169 bp, Rhodopseudomonas palustris CGA009
  CDS (1)..(2169): transl_table=11
atgttcaatatccattccgtggaaatcgattggggtggccgtcccctcaagcttgaaaccggcaaggtcgcccgccaggccgacggcgccgtcgtcgcgacctatggcgagaccgtcgtgctcgccaccgtggtggccgccaaggcgccgcgtgaaggcgtcgacttcctccccctcaccgtcgactaccaagaaaaggcctacgcggccggccgcattcccggcggctacttcaagcgtgaaggccgtccgaccgagaaggagacgctggtctcccgtctgatcgaccgcccgatccgtccgctgttcgccgacggctggcgcaacgagacccaggtcatcgtcaccgttctgtcgcacgacatggagaacgatccggacgtgctggcgatggtcgccgcctccgcggcgctgacgctgtccggcgtgccgttcaagggcccgatcggcgccgcccgcgtcggcttcatcaacgacgaatacgtgctcaatcccgtgctcgacgagatggccgaaacccagctcgagctggtggtggccggtaccgccgacgctgtgctgatggtcgaatccgaagccaaggagctgtcggaagagatcatgctcggcgcggtgatgttcggtcaccgccacttccagccggtgatcgacgcgatcatcgacctcgccgagaaggccgccaaggagccgcgcgaactcaccgtcgtcgacgacagcgagatcgaaaaggaaatgctcggcctggtcgagcaggagctgcgtgccgcctacgccatcccggtcaagcaggaccgctacgccgcggtcggcaaggtcaaggagaaggcgattgcgcacttcttcccggaaggccaggagccgaaatacgacaagctgcgcatcgccggcgtgttcaaggagctcgaggccaagatcgttcgctggaacatcctcgacaccggcaagcgcatcgacggccgtgacagcaagaccgttcgcaacatcctggctcaggtcggcgtgctgccgcgtactcacggttcggcgctgttcacccgcggtgaaacccaggcgatggttgtgaccacgctcggcaccggcgaagacgagcagtatgtcgactcgctgtcgggaacgtacaaagagacgttcctgctgcactacaacttcccgccctactcggtcggcgagaccggccgcctcggcggcaccaagcgccgcgagatcggccacggcaagctggcgtggcgcgcgatccatccggtgctgccgccgcatcacgagttcccctacaccatccgcgtcgtctcggagatcaccgagtcgaacggttcgtcctcgatggcgtcggtgtgcggtgcctcgctggcgctgatggacgcgggtgtgccgctgaagcggccgaccgcgggtatcgcgatgggtctgatcctggaaggtgagcgcttcgccgtgctgtccgatatcctcggcgacgaggaccacctcggcgacatggacttcaaggtggcgggcaccgaggcgggcatcacctcgctgcagatggacatcaagatcgccggcatcaccgaagagatcatgaaggtggcgctcggccaggccaaggacggccgcatccatatcctgggtgagatgtccaaggcgctcgaccgtgcccgcgccgagctcggcgaacacgcgccgcggatcgagaccttcaagatcccgaccgacaagatccgcgaagtgatcggtaccggcggtaaggtgatccgcgagatcgtcgaaaagactggcgccaaggtcaacatcgaggacgacggcaccgtgaaggtggcttcgtcggatggtgagtcgatcaaggccgcgatcaagtggatcaagtcgatcgcgtccgatccggaagtcggcgagatctacgaaggcaccgtcgtcaaggtgatggagttcggcgcgttcgtgaacttcttcggcgccaaggatggtctggtgcacatcagccagctcgccgccggccgcgtgcagaagacatccgacgtcgtcaaggaaggcgacaaggtcaaggtcaagctgctcggcttcgacgaccgcggcaagacccggctgtcgatgaaggtggtcgatcagaccaccggtgaagacctcgaagccaagcagaaggcggaagccaaggccgaaggcgaagcgcccgcgcaggctgccggcgagtaa

SEQ ID NO: 1820 - protein, 722 aa, Rhodopseudomonas palustris CGA009
MFNIHSVEIDWGGRPLKLETGKVARQADGAVVATYGETVVLATVVAAKAPREGVDFLPLTVDYQEKAYAAGRIPGGYFKREGRPTEKETLVSRLIDRPIRPLFADGWRNETQVIVTVLSHDMENDPDVLAMVAASAALTLSGVPFKGPIGAARVGFINDEYVLNPVLDEMAETQLELVVAGTADAVLMVESEAKELSEEIMLGAVMFGHRHFQPVIDAIIDLAEKAAKEPRELTVVDDSEIEKEMLGLVEQELRAAYAIPVKQDRYAAVGKVKEKAIAHFFPEGQEPKYDKLRIAGVFKELEAKIVRWNILDTGKRIDGRDSKTVRNILAQVGVLPRTHGSALFTRGETQAMVVTTLGTGEDEQYVDSLSGTYKETFLLHYNFPPYSVGETGRLGGTKRREIGHGKLAWRAIHPVLPPHHEFPYTIRVVSEITESNGSSSMASVCGASLALMDAGVPLKRPTAGIAMGLILEGERFAVLSDILGDEDHLGDMDFKVAGTEAGITSLQMDIKIAGITEEIMKVALGQAKDGRIHILGEMSKALDRARAELGEHAPRIETFKIPTDKIREVIGTGGKVIREIVEKTGAKVNIEDDGTVKVASSDGESIKAAIKWIKSIASDPEVGEIYEGTVVKVMEFGAFVNFFGAKDGLVHISQLAAGRVQKTSDVVKEGDKVKVKLLGFDDRGKTRLSMKVVDQTTGEDLEAKQKAEAKAEGEAPAQAAGE

SEQ ID NO: 1821 - DNA, 2148 bp, Onion yellows phytoplasma OY-M
  CDS (1)..(2148): transl_table=11
gtgttaaaaaaagtttttgaaactactaatttaaaagattcttttcaagtcgaaataggaacttacgccagaaacgttgatgcttccattttagtacgctaccaagatacagtggttcttacaactactgtttttagtcgcaaacccaataatcttgattttttacctcttactgttatttatcaagaaaaattatatgctgctggaaaaattcctggcagttttttacgccgagaaggacgttccaacgatcacgaaatcctcacttcacgcctcatcgaccgttctttacgccccctattccctgattattttcaacaagaagtgcaagtaattaatacagttttaagcctagaccctgattttaaaagcgagcttgcctccatgcttggaagctctctttctctattgatttctgaaatccccttttttgaagctatttctggagtttatgtaggaaaaatcaacgacaagtttatcatcaatcccactttgcaacaacttgccaattctactctacatttgatggttgcaggtaccaaacacaacgttactatgatagaagcacacgccaatgaagttagcgaacaagactttttagaagccattaattttgctcaccaatatattaaaaaactgtgcttatttcaagaaaatatcaagcaacaatttgcacctgctaaaataacaaacaccttgcaccaaaccgaacaaacccaacaacaagccttttttgccaaacaccaatcccaagttaaacaagctattttaagttgcaacagcaaaaacgatttacaacaattaaaagaacaaatcctagatcaagccaaacaaactccttttttcaaaactattgacactgccactgtttttgattacgaagcccacaaaaaacatttacaaacaacagaaaccctatttcaaaaattatccaaacaagaaacacgttctttaattttgcaagaaaaaataagaccagataaaagaggattagaagaaataagaactcttgaatctcaaattgatttgttgccccgcgctcatggttctgctttgtttactagaggacaaacccaaagccttgctgcagtgaccttaggatgtttatcagaaagcaaaattattgacggtctaagcgacgaacaaaataaacgttttatgcttcattacaactttcctcctttttcagttggtgcagttggtcgttatactgcccctagtagacgagaaatcggacacggcactcttgccgaaaaagctatatctcaagttttgccagaagaaaaagacttcccctacactattagagtagtttctgaaattctagaatctaacggctcttcttctcaagccactgtttgtgcttcttctttggcattaatggcatcaggagttcctttaaaaaaagcagttgcaggaatgtcagtaggattagtttttgaccaagcaacgaataaatacgttattttaagcgatatccaaggtttagaagaccacgttggagacatggatttaaaaatcgcaggcaccaataaaggaattactgctttacaaatggatcttaaaattcaaggaatccattttaaaattttgcaagaagcttttttgcaagccaaaaaaggacgccttcatattttagaacacatgagccaaacaatttctcaacctcgtttagaagtttcgaagtacgcccctaaagtttgtatgatgcaaatcaaaccagaaaaaattcgtgatattattggaagtggtggcaaaatcatcaatcaaattattgaatctcatgatggtgtaaaaatcgatattgaacaagacggacgcgtttttgtaatgcattccaacttagaaacagtcaaaaaaacagtcgcttttattgaaagtttaatccaagaaattcaaataggcacttgttatcaagcctctattttgcgttttttaagtgacaaacaaggaaaaatgattggagctgtggcacaagtttgtccaggaatcgaaggacttatccacgttaatcaaaagaaatttcaaaaaatcaccgatgttttaaaaataggtgaaacagtttcggttaaatgcaccaaaatcaacgaccgcggaagaattgattttttgcttttgcccaaaaatacacaagaaaaaaactcttag

SEQ ID NO: 1822 - protein, 715 aa, Onion yellows phytoplasma OY-M
MLKKVFETTNLKDSFQVEIGTYARNVDASILVRYQDTVVLTTTVFSRKPNNLDFLPLTVIYQEKLYAAGKIPGSFLRREGRSNDHEILTSRLIDRSLRPLFPDYFQQEVQVINTVLSLDPDFKSELASMLGSSLSLLISEIPFFEAISGVYVGKINDKFIINPTLQQLANSTLHLMVAGTKHNVTMIEAHANEVSEQDFLEAINFAHQYIKKLCLFQENIKQQFAPAKITNTLHQTEQTQQQAFFAKHQSQVKQAILSCNSKNDLQQLKEQILDQAKQTPFFKTIDTATVFDYEAHKKHLQTTETLFQKLSKQETRSLILQEKIRPDKRGLEEIRTLESQIDLLPRAHGSALFTRGQTQSLAAVTLGCLSESKIIDGLSDEQNKRFMLHYNFPPFSVGAVGRYTAPSRREIGHGTLAEKAISQVLPEEKDFPYTIRVVSEILESNGSSSQATVCASSLALMASGVPLKKAVAGMSVGLVFDQATNKYVILSDIQGLEDHVGDMDLKIAGTNKGITALQMDLKIQGIHFKILQEAFLQAKKGRLHILEHMSQTISQPRLEVSKYAPKVCMMQIKPEKIRDIIGSGGKIINQIIESHDGVKIDIEQDGRVFVMHSNLETVKKTVAFIESLIQEIQIGTCYQASILRFLSDKQGKMIGAVAQVCPGIEGLIHVNQKKFQKITDVLKIGETVSVKCTKINDRGRIDFLLLPKNTQEKNS

SEQ ID NO: 1823 - DNA, 2094 bp, Geobacter sulfurreducens PCA
  CDS (1)..(2094): transl_table=11
atgactgaacacaaggttaacgtagaattcggtgggcggaccataacgatcgcaacgggcaagtgggccaagcaggctagtggcgccgtggtggttagttgcggggacaccgtggttctcgtgactgccgtagcaaccaaatcggcccgggaaggacaggactttttccctctgacggtgaattatcaggagaaagcgtatgccggcggcaagattcccggcggcttcttcaagcgcgaagggcgtccctccgacaacgagactctcacgtcccgctttatcgatcgtccgatccgtccgcttttccctgagagttttctgaacgatacccagattatggcaactgtcgtctcggcggaccaggataatgatcccggcatccttgccatgatcggcgcatctgccgcccttgaggtctccgatattccgttcctcggccccatcgccggcgtcaaggttgggcgcgtggacggccagtttgtatgcaatcccacggtagagcaactggagaaaagcgatcttgaaatcgttgttgcggcgagccgcgatgcggtcatcatggtagaggggggggctgcagaggcgtccgaaaaggatgtcctggaagctattttcttcggtcacgccgctgttcagccgattatcgaggcccaaaccgatctccggaagctggctggcgttcccaagcgcgaggttgcggccacgtctgttgatgaggccctgaagactcgggtgaaggatcttgcctatgccgggatcaaggaggccgtccggatcgtcgccaagcaggagcgtcacaaccgcatcggcgagatcaccgcgcaaacccttgaaacacttctgcccgagtatgaaggacgtgagtcggagattaaggggttcctcggcgacttcgagtatgaactcgtccgtgagcatatcatcaaggacggctaccgcattgacggtcgggacaccacaactatccgtcctatcagcattgaggtcagcatgttgccgcgtgcccacggctccgctctcttcactcgtggtgaaacccaggcgctcgtggcatcgactctcgggacttccattgacgagcagcggattgattcactgtacggcgagacccgcaagcgcttcctccttcactacaacttcccgccgttctcggtcggggaaacgagcttccgtctcgctccgggccggcgcgaaatcggccacggcatgctggccgaaagagctcttgagcgcgtcgtgcccaagcacgaggattttccgtacaccatcagaattgtctccgatatcctcgagagcaacggttcctcctccatggcaaccgtgtgcggcggcgcactggcgatgatggatgcaggcgtgccgatcaaggctccggtggccggtatcgccatgggcctcatcaaggaaggggagggcatcgccatcctttccgacattctcggtgatgaggatcatcttggcgatatggatttcaaggtggccggcaccgaagcaggggtaaccgccatccagatggacatcaagatcaccggtgtcacccgcgagatcatggagaaagccttgctgcaggcccgtgacggcagactccatatcctgggcaagatgaatcaggccattgccgctccgcggactgatctctcaccctatgctccccgcatcaccaccatctgggtcaagaccgacaagatccgcgacgtcatcgggtcaggaggaaagaatatccgcggcatcaccgaggcgaccggcgtatccatcgatatcgaggacagcggccgcatcaatattgccagcaccagcaaagaagcctgcgacaaggctatcaagatgatccgcgacctcacggccgaggccgaagagggtaagctctacatgggcaccgtcaaaaaagtcatggattttggcgcattcgtggagatattccccggcaccgacggacttgtccatatatccgaactggataccgagcgtgtgaagaacgtgaccgacgttctcaatgagggtgacaaggtgctggtgaagtgtatcggcatagacaagcagggcaagataaagctgtcgcggaaagaggcgctcggcgccgtactgcccgaatag

SEQ ID NO: 1824 - protein, 697 aa, Geobacter sulfurreducens PCA
MTEHKVNVEFGGRTITIATGKWAKQASGAVVVSCGDTVVLVTAVATKSAREGQDFFPLTVNYQEKAYAGGKIPGGFFKREGRPSDNETLTSRFIDRPIRPLFPESFLNDTQIMATVVSADQDNDPGILAMIGASAALEVSDIPFLGPIAGVKVGRVDGQFVCNPTVEQLEKSDLEIVVAASRDAVIMVEGGAAEASEKDVLEAIFFGHAAVQPIIEAQTDLRKLAGVPKREVAATSVDEALKTRVKDLAYAGIKEAVRIVAKQERHNRIGEITAQTLETLLPEYEGRESEIKGFLGDFEYELVREHIIKDGYRIDGRDTTTIRPISIEVSMLPRAHGSALFTRGETQALVASTLGTSIDEQRIDSLYGETRKRFLLHYNFPPFSVGETSFRLAPGRREIGHGMLAERALERVVPKHEDFPYTIRIVSDILESNGSSSMATVCGGALAMMDAGVPIKAPVAGIAMGLIKEGEGIAILSDILGDEDHLGDMDFKVAGTEAGVTAIQMDIKITGVTREIMEKALLQARDGRLHILGKMNQAIAAPRTDLSPYAPRITTIWVKTDKIRDVIGSGGKNIRGITEATGVSIDIEDSGRINIASTSKEACDKAIKMIRDLTAEAEEGKLYMGTVKKVMDFGAFVEIFPGTDGLVHISELDTERVKNVTDVLNEGDKVLVKCIGIDKQGKIKLSRKEALGAVLPE

SEQ ID NO: 1825 - DNA, 2274 bp, Mycobacterium avium subsp. paratuberculosis K-10
  CDS (1)..(2274): transl_table=11
atgtctgtcgctgaaattgaagaaggcgtgttcgaggcgaccgccaccatcgacaacgggagcttcggcacccgcaccatccgcttcgagaccggccggttggcccagcaggccgccggcgccgtcgtcgcctacctcgacgacgagaacatgctgttgtcggcgaccaccgccagcaagagccccaaggagcacttcgacttcttcccgcttaccgtcgacgtcgaggagcggatgtacgccgcgggccgcatccccggctcgttcttccgccgcgagggccgcccctccaccgacgccatcctgacctgccggctcatcgaccgcccgctgcggccgtcgttcgtcgacggcctgcgcaacgaaatccaggtcgtcgtcacgattttgagcctggaccccaacgacctgtacgacgtgctggcgatcaacgccgcgtcggcctccacccagctgggcggtctgccgttctccggccccatcggcggggtgcgggtggcgctgatcgacggcacctgggtggcgttcccgacggtcgagcagctcgagcgcgcggtgttcgacatggtggtggccgggcgcaaggtcgacggcgccgacgggcccgacgtcgccatcatgatggtcgaggccgaggccacctccaacgtcatcgaactcatcgacggcggcgcccaggcgcccacggaaaccgttgtggcccaaggccttgaggccgccaagccgttcatcgaggtgctgtgcaccgcgcagcaggagctcgccgacaaggccgccaggcccaccagcgactacccgaccttccccgactacggcgacgacgtctactactcggtggcgtcggtggccaccgacgagctgtccaaggcgctgaccatcggcggcaaggccgaacgcgacgcgcgcaccgacgagctcaaggccgaggtgctggcccgactggccgaaacctatgagggccgcgagaaagaggtcagcgccgcgttccgctcgctgaccaaaaagctggtgcgccagcgcatcctgaccgaccacttccgcatcgacggccgcggcatcaccgacatccgcgcgctgtccgccgaggtcgccgtggttccgcgggcacacggcagcgcgctgttccagcgcggtgaaacccagatcctgggggtgaccacgctggacatggtcaagatggcccagcagatcgactcgctggggcccgagaccacgaaacgctatatgcaccactacaatttcccgccgttctccactggcgagaccggccgggtgggctcgcccaagcgccgcgagatcggccacggcgcgctggccgagcgcgccctggtgccggtgctgccgagcctcgaggacttcccgtatgccatccggcaggtgtccgaggcgctgggctccaacggctcgacgtcgatgggctcggtctgcgcgtccacgctggcgctgctcaacgccggggtgccgctcaaggcgccggtggcaggcatcgcgatgggcctggtgtccgacgacatagaagttgaggcgggagacggcacaaaatcgcttgagcgccgcttcgtcaccctgaccgacatcctgggcgccgaggacgcgttcggcgacatggacttcaaggtggccggcaccaaggacttcgtcaccgcgctgcagctggacaccaagctcgacggcatcccgtcgcaggtgctggccggggcgctgagccaggccaaggatgcccgcctgaccatcctcgaggtgatggccgaggccatcgacgagcccgacgagatgagcccgtacgcgccgcgggtcaccaccatccgggtcccggtggacaagatcggcgaggtgatcggccccaagggcaagatcatcaacgccatcaccgaggagaccggcgcccagatctccatcgaggacgacggcaccgtgttcgtcggggccaccgacggcccgtcggcgcaggccgcgatcgaccggatcaacgccatcgccaacccgcagctgcccaccgtcggtgagcggttcctcggaaccgtggtcaagacaacggatttcggcgcgttcgtgtcgctgctgcccgggcgtgacggcctggtgcacatctccaaactcggcaagggcaagcgcatcgccaaggtcgaggacgtggtgaacgtcggcgacaagctgcgcgtggagatcgccgacatcgacaagcgcggcaagatctcgctggtcctggtggaggaagacaactcggcacccgccgacaccccggcggccgcccctgccgatgccaccagctga

SEQ ID NO: 1826 - protein, 757 aa, Mycobacterium avium subsp. paratuberculosis K-10
MSVAEIEEGVFEATATIDNGSFGTRTIRFETGRLAQQAAGAVVAYLDDENMLLSATTASKSPKEHFDFFPLTVDVEERMYAAGRIPGSFFRREGRPSTDAILTCRLIDRPLRPSFVDGLRNEIQVVVTILSLDPNDLYDVLAINAASASTQLGGLPFSGPIGGVRVALIDGTWVAFPTVEQLERAVFDMVVAGRKVDGADGPDVAIMMVEAEATSNVIELIDGGAQAPTETVVAQGLEAAKPFIEVLCTAQQELADKAARPTSDYPTFPDYGDDVYYSVASVATDELSKALTIGGKAERDARTDELKAEVLARLAETYEGREKEVSAAFRSLTKKLVRQRILTDHFRIDGRGITDIRALSAEVAVVPRAHGSALFQRGETQILGVTTLDMVKMAQQIDSLGPETTKRYMHHYNFPPFSTGETGRVGSPKRREIGHGALAERALVPVLPSLEDFPYAIRQVSEALGSNGSTSMGSVCASTLALLNAGVPLKAPVAGIAMGLVSDDIEVEAGDGTKSLERRFVTLTDILGAEDAFGDMDFKVAGTKDFVTALQLDTKLDGIPSQVLAGALSQAKDARLTILEVMAEAIDEPDEMSPYAPRVTTIRVPVDKIGEVIGPKGKIINAITEETGAQISIEDDGTVFVGATDGPSAQAAIDRINAIANPQLPTVGERFLGTVVKTTDFGAFVSLLPGRDGLVHISKLGKGKRIAKVEDVVNVGDKLRVEIADIDKRGKISLVLVEEDNSAPADTPAAAPADATS

SEQ ID NO: 1827 - DNA, 2274 bp, Wolbachia endosymbiont of Drosophila melanogaster
  CDS (1)..(2274): transl_table=11
atgtttaaaattataaaaaaatctatagagtggggtggtcgtgccttatctttagaaacaggaaaaatagcacgccaagctcatggttcagtagttgtaaattacggtgatacttctgttttagtaactgttgtacgtaaaaagaaggaagaaagcgttgatttcctacctttaaatgtgcagtttatcgcaaaaagctatgccatgggtaagatccctggcgggttttttaaaagagaaggcaagccatctgatagagaaactttaatctcaagagtaatagatagaagtataagaccactattcccagaaggatttcatgatgaaattagtgtggtgtgcaatctattaacttatgatacagtcaatcctcctgaagtgccagcattgattggtgctgttgcagctcttgcaatttctggtgttccctttcactttactatagctggagtgatggttggttgtgatgaaaataataactatatactcaacccttctgttcaagagatgaaagcaagcagcttggatctgtttttgtctggtgatgaaaattcaattttaatggttgaatcagaagtgaaagagctctctgaagaaaatgtttttaatgcaataaaatttggccatgaacaccttaagcctgtcattaagctcataaaagagtttgctgatacaattggcaataaacctgagagctttgcccctattgatgcatcagatataacacaagagctcgaaaaatacggtaaagattttgaaaaagcatattcgcaaacagtaaaacaagagcgagttcaagctctagaagcgatcagagagaatatattgaatactcttaaagaaactggaaaagacgaaaagttaattacgtatgcagtaaaaaactttgaaagatctttagtacgtgaaataattaggaagaaaagtgtaaggatagacggtcgtaagcatgatgagatacgtcagatagaagttgaagttgatattctgtccaaaactcacggttctgcactatttacaagaggcaatactcaggcactggttgttactgctcttggcaccactcaagatgagcaaattgtggatgatattgaaggggatagacgtgagcatttcatgttgcattataactttccctcatttgctgttggagaaacttctgctgcgcgtgcaccaggaagaagagaaatcggtcatggcaaacttgcttggaaagcaattcatcctgttttacccgataagtctgaatttccttatacaataagagtagtgtccgaaattttggagtctgatggttcttcttctatggcaacagtttgtgggacttctcttgctttaatggatacgggtgtgccaataaaggcccctgttgctggaattgctatgggtctcatcaaagataaagacgagtatgtaatactttccgatatacttggtgatgaagattatcttggtgatatggactttaaagtagcaggaactagtgaaggggttacggcgctacaaatggacatgaaaatttctggtataagctttgaaattgttgaaaaatctttagaacaggcaaaagctggaagattacatattttagaaaaaatgaatgcagtgatttcagaacacagtgatgatgtcaaagaccatgcaccaaggatgttatcattttacatagataaagacaaaatttctgctgctataggttctaaggggaaaaatatacgcagtgtgtgtgaaagaagtaatgcaaaaattgaaataggagatgatggtaaagtttctgtttttgctacgagtggcactgaagctgaaattgcaaagagtatgatgattgattcaataacagaactagaacaaggttctatagttgatgtcaaggttgtaagaatagagaagtctattgtagagcttgaatttcttaatggcagaaaaggaaaaatgcacataagtgaagtagctaatgaacatatagattctatagagagcgtacttaaacaagatgatactttcaaagcactagtaattgacttcgaaaaaggtgggtgtccaaagttgtcaagacgtcgggttgatcaagagacgggagagttttttgaaggtgagctttacaacgaggaaaggaaagatggtccaaatgacagggataattattacaataattcatttagtagaaaacctggaggaagtcaccataagaggcctcctcgtcctcattctggtttcagcaacagaaataggccgaaatttggtaataatgattcatcatcaggtttttattaa

SEQ ID NO: 1828 - protein, 757 aa, Wolbachia endosymbiont of Drosophila melanogaster
MFKIIKKSIEWGGRALSLETGKIARQAHGSVVVNYGDTSVLVTVVRKKKEESVDFLPLNVQFIAKSYAMGKIPGGFFKREGKPSDRETLISRVIDRSIRPLFPEGFHDEISVVCNLLTYDTVNPPEVPALIGAVAALAISGVPFHFTIAGVMVGCDENNNYILNPSVQEMKASSLDLFLSGDENSILMVESEVKELSEENVFNAIKFGHEHLKPVIKLIKEFADTIGNKPESFAPIDASDITQELEKYGKDFEKAYSQTVKQERVQALEAIRENILNTLKETGKDEKLITYAVKNFERSLVREIIRKKSVRIDGRKHDEIRQIEVEVDILSKTHGSALFTRGNTQALVVTALGTTQDEQIVDDIEGDRREHFMLHYNFPSFAVGETSAARAPGRREIGHGKLAWKAIHPVLPDKSEFPYTIRVVSEILESDGSSSMATVCGTSLALMDTGVPIKAPVAGIAMGLIKDKDEYVILSDILGDEDYLGDMDFKVAGTSEGVTALQMDMKISGISFEIVEKSLEQAKAGRLHILEKMNAVISEHSDDVKDHAPRMLSFYIDKDKISAAIGSKGKNIRSVCERSNAKIEIGDDGKVSVFATSGTEAEIAKSMMIDSITELEQGSIVDVKVVRIEKSIVELEFLNGRKGKMHISEVANEHIDSIESVLKQDDTFKALVIDFEKGGCPKLSRRRVDQETGEFFEGELYNEERKDGPNDRDNYYNNSFSRKPGGSHHKRPPRPHSGFSNRNRPKFGNNDSSSGFY

SEQ ID NO: 1829 - DNA, 2094 bp, Bdellovibrio bacteriovorus HD100
  CDS (1)..(2094): transl_table=11
atgaaaacgactgtcacaacatcggtgggtggaaaacaaattaccatcgaaacaggccgtttggcgaaacaagcggatggcgccgctttggtaagctccggtaacaacatggttcttgttactgcaacttcctcaaaaaaagcctctgaactggatttcttccctctgactgttgagtacattgagaagttctacgcaacaggcaaaatcccaggtggttacttcaaacgtgaagcaaaaccaaccaacgacgcggttctgatcgctcgtcttatcgaccgtccaatccgccctgtattccctgaaggctaccgccacgaaacacaaatcgttgcgacggtgttgtctgcggatggcgcattcccactggaaattctagcgagccttggtgcatccgcggctttgcattgctctgacattccattcaacggcccgacagcagctgtgcaaatcgcacgcgttgacggtcagttcgttgccaatccaactccacagcagatggaaaaatctgacatggacatgatcgttgcgggtactcgcaatggtttgttgatggttgaaggtgaaacgaaattcatctctgaagcagacgccttggcagccttgaaattcggtcaccagtctttgattcctcttctgaacgcacaggatgagttgcgtgaaaaagccggttctgtggcgaaacgcgctttcactgctccatccatcgatgcagacttcaaagccaaagctgaaagcctgttgagacctaaaattgcggcggctctttccatcaaggaaaaacaagaccgttatgcagctgccaacgaagcagcagcagaagctgaaaaagctcttcttgctgacatcgctgacaaagagcttttgaagcagcgtaaaaaagaactgaactctatcgttgaagatctgaaataccaggaagctcgttccatgattctggatcgcgctgttcgtatcgacggtcgtgacgtgaaaactgttcgtcctatcgcgaacgaagtgggtatcctgcctcgcgctcacggttccggcttgttcacccgtggtgaaactcaagtattgggcactgtgactttgggtacggctgatgacgaacaaatggtggattcactgttgggtcttcagaagcgcaagttcatgcttcactacaacttccctccatactctgtgggtgaagtgggtcgtatgtccggtaccagccgtcgtgagatcggtcacggtaacctggctgagcgcgcgatcaaagcggttcttccagacttcgaaaaattcccttacacaatccgtatcgtgtctgaagttttggaatccaatggttcctcttccatgggtactgtttgctccggtatcatggcattgcttgacgccggtgttcctttgaaaggcaacgttgccggtgtggcaatggggctgatcaaggaaggtgaccgcgttgcggttctgacggacatccttggtgacgaagatcacctgggtgacatggacttcaaagtggcgggttctcctgcgggtatcactgctttgcagatggatatcaaaattgactctgtttccttcgaagtgatggagcaggctttggcgcaagctaaagaaggccgcgctcacatcctgaacgaaatggaaaaagtgatgaaggttcctcgtggtcagatctctgaatttgcacctcgtatcgaaaccatcaaaatcaagccagacaagatccgtgaagtgatcggctccggtggtaaagtgatccgtggtatcactgaagctactggcgttaagatcgagatccaggacgacggtactatcaacatcgcgtctgctgatccggaagcaaccaagaaagcaattgcaatgatcaacgacatcatcgctgaagctgaagtgggcaagacctacaaaggccgcatcgtgaaaatcgctgagttcggtgctttcgttgaaatccttccgaacacacaaggtcttttgcacatctctgaaatctccaacgaacgtgtacgcgcagtttctgacgtactaaaagaaggtgaaatcatcgatgtgaaagttcttgaagtggaccgttctggtcgcgtcaagctttcccgcaaggctttgctacagtaa

SEQ ID NO: 1830 - protein, 697 aa, Bdellovibrio bacteriovorus HD100
MKTTVTTSVGGKQITIETGRLAKQADGAALVSSGNNMVLVTATSSKKASELDFFPLTVEYIEKFYATGKIPGGYFKREAKPTNDAVLIARLIDRPIRPVFPEGYRHETQIVATVLSADGAFPLEILASLGASAALHCSDIPFNGPTAAVQIARVDGQFVANPTPQQMEKSDMDMIVAGTRNGLLMVEGETKFISEADALAALKFGHQSLIPLLNAQDELREKAGSVAKRAFTAPSIDADFKAKAESLLRPKIAAALSIKEKQDRYAAANEAAAEAEKALLADIADKELLKQRKKELNSIVEDLKYQEARSMILDRAVRIDGRDVKTVRPIANEVGILPRAHGSGLFTRGETQVLGTVTLGTADDEQMVDSLLGLQKRKFMLHYNFPPYSVGEVGRMSGTSRREIGHGNLAERAIKAVLPDFEKFPYTIRIVSEVLESNGSSSMGTVCSGIMALLDAGVPLKGNVAGVAMGLIKEGDRVAVLTDILGDEDHLGDMDFKVAGSPAGITALQMDIKIDSVSFEVMEQALAQAKEGRAHILNEMEKVMKVPRGQISEFAPRIETIKIKPDKIREVIGSGGKVIRGITEATGVKIEIQDDGTINIASADPEATKKAIAMINDIIAEAEVGKTYKGRIVKIAEFGAFVEILPNTQGLLHISEISNERVRAVSDVLKEGEIIDVKVLEVDRSGRVKLSRKALLQ

SEQ ID NO: 1831 - DNA, 2097 bp, Treponema denticola ATCC 35405
  CDS (1)..(2097): transl_table=11
atgagaaaaagagtaacttataaaatcggcgaacatgatttaattttagaaaccggttatttggcaaaacaggccaatggttctatttatgcggaatatgccggttccgcaattttagctacaatctgtgcctcgggacaggctcaggaaggtttagactatgtccccctaacggttgattataacgaaaaatattatgcagccggaaaaatccccggaggctttataaaaagagagggtagaccaaaggataaggaaatccttgtttcccgtcttatagacaggcccatgcgccccttgtttaacaaagaattcggacgtgagatccagttggttcccacctgtatttcaacggatatgataaacccgcccgacatccttgcagttatcgcaagctctgcagctgttcatatttcggatataccctttgacggccccgttgcagctgcccgtgtcgcctataaaaacggagaatacattataaacccgacatttagccaaattgaaacggccgatatggaaatcgtagttgccggaacaaaagagggcattaccatggtcgaaggcggtgctaacgaggtttccgaagaggtaatgctcacagccttggaaaaagcccatgaaatgatcaagtctctttgcaagatgcaggaagatttacgcgaacttgccggaaaagaaaaacttcccctcgttccccttgaagccgagctcgaaaataagcaggcaatttatgacgaagccttcccccgtttaagcaaaaccctctatctttcaacaaagatggaacgccgagaagaatcggacaaggtaaaaaaagaattggccgaaaaatatgccgaacagcttgaagacgaaattcagcttaaactttttaacgccctctttgaagagatggagtataatattttaagaaccaatatcttggacaagggcttgcgggttgacggaagaggcactaaggacattcgtcccataacttgcgaaatcggagttcttccccgtccccacggttcggcagtctttacacgaggcgaaacccaatccttgggcgttgtaacgataggaacagtctttgacgaacagatatatgatgacatcgagggagacagaagagaaaactttattcttcactataatttcccgcccttctcggtaggggaggtcggaagactcggaacgggccgaagagaaatcgggcacggaaaccttgcacaccgctccctttatccgatggttcccgaaagggaaaaattcccctatacggtccgtgttgtttcggaggtcttggaatcgaacggttcttcttcgatggctaccgtatgctcgggaaccctttccatgcttcatgcgggcgttcccatgaaaaagccggttgccggtattgccatggggcttatcaccgaaggaaatgaccgctacgccattctttccgacattcttggagaagaagatcacttaggcgatatggactttaaggttgcaggtacggccgacggaattacgggcttccagatggacataaagattgcaggtgtttcgcctgaaattatgaaaaatgcccttgcacaggccaaagaaggaagaatgcatattctcggcataatgaaccagtgtatttccgctcccaatgcggaactttcccaatatgctccaagggttgagatgatgacaatacccgaagacaagatcggtgcactaatcggccccggcggaaagaatgtaaaagccatttcggataagtataatgtaacaatcaataccgaaaatgacggtaccgtaaccatttacagcaaggacggaacttcggatcttaaaggcgcaaagagtattgttaagggcatcacaagcgatcccgaagtcggaatggtctatgacggaaccgtaaaaaagattatggacttcggtgcctttgttgaaatacttcccggaaaagaaggtctttgccatatttcaaaactttcacgctccagagtcgaaaaggtttcggatgtgcttaaagaaggacaggaaatacccgttaaacttttggaaatcgataagctcggaaggctcaacctttcttatgtcgatgctcttgaagagcgttccaaataa

SEQ ID NO: 1832 - protein, 698 aa, Treponema denticola ATCC 35405
MRKRVTYKIGEHDLILETGYLAKQANGSIYAEYAGSAILATICASGQAQEGLDYVPLTVDYNEKYYAAGKIPGGFIKREGRPKDKEILVSRLIDRPMRPLFNKEFGREIQLVPTCISTDMINPPDILAVIASSAAVHISDIPFDGPVAAARVAYKNGEYIINPTFSQIETADMEIVVAGTKEGITMVEGGANEVSEEVMLTALEKAHEMIKSLCKMQEDLRELAGKEKLPLVPLEAELENKQAIYDEAFPRLSKTLYLSTKMERREESDKVKKELAEKYAEQLEDEIQLKLFNALFEEMEYNILRTNILDKGLRVDGRGTKDIRPITCEIGVLPRPHGSAVFTRGETQSLGVVTIGTVFDEQIYDDIEGDRRENFILHYNFPPFSVGEVGRLGTGRREIGHGNLAHRSLYPMVPEREKFPYTVRVVSEVLESNGSSSMATVCSGTLSMLHAGVPMKKPVAGIAMGLITEGNDRYAILSDILGEEDHLGDMDFKVAGTADGITGFQMDIKIAGVSPEIMKNALAQAKEGRMHILGIMNQCISAPNAELSQYAPRVEMMTIPEDKIGALIGPGGKNVKAISDKYNVTINTENDGTVTIYSKDGTSDLKGAKSIVKGITSDPEVGMVYDGTVKKIMDFGAFVEILPGKEGLCHISKLSRSRVEKVSDVLKEGQEIPVKLLEIDKLGRLNLSYVDALEERSK

SEQ ID NO: 1833 - DNA, 2139 bp, Bacillus cereus ATCC 10987
  CDS (1)..(2139): transl_table=11
atgagtcaagaaaagcaagtcttctcgatagatttagctggtcgccagctaacagttgaaacaggtcagcttgcaaagcaagcgaacggagcagtattagtaagatatggcgatacagcggttctatctacagcaactgcatcaaaagaagcaaaaaatgtagatttcttcccacttacagtaaactatgaagagcgtttatatgcagtcggaaaaattcctggcggtttcattaaacgtgaaggtcgtccaagtgaaaaagcaattttggcaagtcgtttaatcgaccgtccaattcgtccacttttcgcagatggtttccgtaacgaagtacaagttgtcagcatcgtaatgagtgttgatcaagattgttcttctgaaatggcagctatgcttggttcttcattagcgttatcgatttcagacattccatttgaaggtccgatcgcgggtgcaacagttggtcgtattaacggcgaattcgttatcaacccaacagtagaacagcaagaacaaagtgatattcaccttgttgtagctggtacaaaagatgcaattaacatggttgaagcaggagcagatcaagtgcctgaggaaacaatgttagaagcaattatgtttggtcatgacgaaattaaacgtctaattgcattccaagaagagattgtacaagctgtaggtaaagagaaatcagaagtaaaactttatgaagttgacgctgatcttaaccaatctgtacgtgaaatggctgagaaggatatgcattctgcaattcaagtacatgagaaacatgcacgtgaagatgcaattaacgaagtgaaaaagcgtgtaattgagcattacgaagcgcaagaagctgatgctgatacattaggacaagtaaatgagattttatataaaattgtaaaagaagaagtacgtcgtcttattacagttgagaaaatccgcccagatggccgtaaaggtgacgaaatccgtccattagcatcagaggttggcattttatctcgtacacacggttctggtttattcacacgtggacaaacacaagcattaagtatttgtacattaggcgcattaggcgatgtgcaaattttagatggccttggtgtagaagaatcaaaacgctttatgcaccattacaatttcccatcatttagtgttggtgaaacaagaccaatgcgtggaccaggtcgtcgtgaaattggtcacggtgcactaggagaacgtgctcttgagcctgtaattccgtctgaaaaagatttcccatacacagtccgtcttgtatctgaagtattagaatcaaatggttctacttcacaagcgagtatttgtggtagtactttagcaatgatggatgctggtgttccacttaaagctccagttgcaggtattgcaatgggcctagttaaatcaggtgagcattacacaattttaactgatattcaaggtatggaagatcatttaggtgatatggactttaaagtagcaggtacagcacacggtgtaactgcactacaaatggacattaaaatcgatggtctatctcgtgaaattttagaagaggcattacaacaagcgaaagttggtcgtatgcacattctagatcatatgttatctgtaattgcagagccacgcactgaattatcagcgtacgctccaaagattattacaatgacaattaacccagataaaatccgtgacgttatcggaccaagcggtaaacaaatcaataaaattattgaagaaactggcgttaaaattgacatcgagcaagatggtacagtattcatttcttcaataaatcaagaaatgaacgacaaagctaagaaaattatcgaggatatcgttcgcgaagtacaagtaggggaaatctacgaaggaaaagtgaaacgtgttgagaaattcggtgctttcgttgaattattcagcggtaaagatggattagttcacatttctgaacttgcacttgagcgtgtaggtaaagtagaagacgttgtgaaaatcggtgatgtaattacagttaaagttatcgagattgacaagcaaggtcgcgtgaatttatctagaaaagtattgctaaaagaagagcaagaaaaagaagctgctaaagaagaaaacaaacaagagcagcaataa

SEQ ID NO: 1834 - protein, 712 aa, Bacillus cereus ATCC 10987
MSQEKQVFSIDLAGRQLTVETGQLAKQANGAVLVRYGDTAVLSTATASKEAKNVDFFPLTVNYEERLYAVGKIPGGFIKREGRPSEKAILASRLIDRPIRPLFADGFRNEVQVVSIVMSVDQDCSSEMAAMLGSSLALSISDIPFEGPIAGATVGRINGEFVINPTVEQQEQSDIHLVVAGTKDAINMVEAGADQVPEETMLEAIMFGHDEIKRLIAFQEEIVQAVGKEKSEVKLYEVDADLNQSVREMAEKDMHSAIQVHEKHAREDAINEVKKRVIEHYEAQEADADTLGQVNEILYKIVKEEVRRLITVEKIRPDGRKGDEIRPLASEVGILSRTHGSGLFTRGQTQALSICTLGALGDVQILDGLGVEESKRFMHHYNFPSFSVGETRPMRGPGRREIGHGALGERALEPVIPSEKDFPYTVRLVSEVLESNGSTSQASICGSTLAMMDAGVPLKAPVAGIAMGLVKSGEHYTILTDIQGMEDHLGDMDFKVAGTAHGVTALQMDIKIDGLSREILEEALQQAKVGRMHILDHMLSVIAEPRTELSAYAPKIITMTINPDKIRDVIGPSGKQINKIIEETGVKIDIEQDGTVFISSINQEMNDKAKKIIEDIVREVQVGEIYEGKVKRVEKFGAFVELFSGKDGLVHISELALERVGKVEDVVKIGDVITVKVIEIDKQGRVNLSRKVLLKEEQEKEAAKEENKQEQQ

SEQ ID NO: 1835 - DNA, 2097 bp, Leptospira interrogans serovar Copenhageni str. Fiocruz L1-130
  CDS (1)..(2097): transl_table=11
atgacacacacaatttccggccagtatggccgagatacgatcgttttagaaaccggaagctgggcaaaacaagcacacggagccgttgtttataaatctggaaatttagttttacttgctaccgtatgcgctgctgatgaagcaaaagaagggcaggacttttttccacttacttgtgaatataccgaaaaactttattcagttggtcgttttcctggtggttattttaaaagagaagccaaacccccggaacatgaaattttaatttctagaattatagacaggccaattcgtcccttatttccagaaggttatttctgcgaagtgcaacttcaagttcaagtactttctgcagatggggacgtttctgttgcaggacatgctttaaatgctgcaagcgctgcattagcagtttctgatattccctttaatggcccaattgcaggcgcaagaattggtagagtcaacggagaattgattctaaatcctactactaaagaaatcttaaattccgatttagatttggtcgttgccggaactaaaactcacattgtaatgattgagggagaagcaaaagaacttagtaatgaagaaatgattgctgctcttcgttttgctcaaaaacatattgcagaatttgtaactcttcaagaagaatatgcgaaaaaaatcggagtcgtcaaacgcgaagttaaattgaaagttcgggatgaagaacttctttctaaggtaaaagaatatgcgtttgcaaaactaactacggctaatcaaactccagataaaactgcacgtaataaagaaatttctaatgtaaataaggaagtagtagaatttttcaaagatacgattgaagactctgacaagattaaggatataaaagcatatcttcacgaattggaatatgaaattgtaagagaacaagttcttacaaaaggaactcgttttgatggtagaaagttagacgaaatccgttctatttccgtggaaatcaatcctcttcccggtcctcatggttctgcagtttttacgagagggcagactcagtctttgggagttgtgactttagggaccggttctgataatcaaagatacgaaactttagaaggtcagaaagaaaaatctttcatgctacattataattttcccgcgttttctgtgggggaagttcgtagatcttccggtccaggtagaagggaaatcggtcatggaaatctcgcagaacgtgcgttaaaacttgttcttcctaaaccggatgagtttccttatgtaatccgggttgtatctgaaattttagaatccaacggctccagttctatggcttctgtttgttccggttctttggcgcttatggctgcgggtgttccgattcagggaagtgtttctggaattgcaatggggcttttttctgattcttccggtaagtatgcagttttatccgatattgcgggtctggaagaccattttggtgatatggattgtaaaatcgccggaaccagaaaaggaattaccgcgtttcaaatggatttgaaagtgactggtgtcagcttcgatgttttggaaagcgttttcgaacaagcacagagaggtagatttcatattttggatattatggagaaacatatatccaaggcttcctcgacgttagccggaactgcgcctcgtatcatcgttagaaatattcctaaagatagaatcggggaattgatcgggcctggtggcaaaaacgttagagggattagcgaacttaccggagctgaactttatatagaagacgatggaaaagtgactatctctggttccaaccaagagtccgcagaaaaagcggccaaaatggtagatgggttttttgcagaggtagaagtaggaaaaatttacgaaggaaaagtaaaacgaatcgccgatttcggtgcatttgtggaaattcttccaggtaaagaaggcctttgccatatttccaagatcgattttaaaagagtaaattcggtcaaagatatagttaaagaaggcgatattattcgagtgaaagttttaaacgtagataaaaccggaaaaattgatctttccagaaaagacgctctcgaagaagaacaagtataa

SEQ ID NO: 1836 - protein, 698 aa, Leptospira interrogans serovar Copenhageni str. Fiocruz L1-130
MTHTISGQYGRDTIVLETGSWAKQAHGAVVYKSGNLVLLATVCAADEAKEGQDFFPLTCEYTEKLYSVGRFPGGYFKREAKPPEHEILISRIIDRPIRPLFPEGYFCEVQLQVQVLSADGDVSVAGHALNAASAALAVSDIPFNGPIAGARIGRVNGELILNPTTKEILNSDLDLVVAGTKTHIVMIEGEAKELSNEEMIAALRFAQKHIAEFVTLQEEYAKKIGVVKREVKLKVRDEELLSKVKEYAFAKLTTANQTPDKTARNKEISNVNKEVVEFFKDTIEDSDKIKDIKAYLHELEYEIVREQVLTKGTRFDGRKLDEIRSISVEINPLPGPHGSAVFTRGQTQSLGVVTLGTGSDNQRYETLEGQKEKSFMLHYNFPAFSVGEVRRSSGPGRREIGHGNLAERALKLVLPKPDEFPYVIRVVSEILESNGSSSMASVCSGSLALMAAGVPIQGSVSGIAMGLFSDSSGKYAVLSDIAGLEDHFGDMDCKIAGTRKGITAFQMDLKVTGVSFDVLESVFEQAQRGRFHILDIMEKHISKASSTLAGTAPRIIVRNIPKDRIGELIGPGGKNVRGISELTGAELYIEDDGKVTISGSNQESAEKAAKMVDGFFAEVEVGKIYEGKVKRIADFGAFVEILPGKEGLCHISKIDFKRVNSVKDIVKEGDIIRVKVLNVDKTGKIDLSRKDALEEEQV

SEQ ID NO: 1837 - DNA, 2142 bp, Thermus thermophilus HB27
  CDS (1)..(2142): transl_table=11
atggaaggcacacccaatgtcccccaagcccaccgctacgagctcaccctggcggggcggcccctcgtcctggagacgggcaagtacgccaagcaggcctcggggtccgtcctggtccgctacgccgacaccgtggtcctggccacggcccaagcctcggagacgccggtggaggccgacttcctccccctcacggtggagtttgaggaaaggcactacgccgtggggaagatcccgggaagcttcatgcgccgggaggggcgtcccggggagaaggccatcctctccgcccgcatgacggaccgccccatcaggcccctcttccccaaggggttccgccacgaggtccagatcatcgtcaccgtcctctccgccgaccagaagaacccgccggacatcctgggccccatcgcggcgagcgccgccctcatgctctcggacatcccctgggagggccccatcgccgccgtgcgggtgggcctcatcggcgggagcttcgtcctgaaccccaccctgcaggagctggaggaaagccagctggacctggtggtggcggggagcaaagaggccatcctcatggtggaggcggaggccggggaggtggacgaggagaccctggtccaggccctggagttcgcccacaaggagatgcagcccatcctggagctccaggaggccatggcccgggaactcgccaaacccaagatggcctggactcccccggaaagcctccccgaggaggagaaggaggccctctaccgcctggccctggagcgggggctttcccaggtcctgcagacggcgagcaagggggaaaggagccgggcccttgcggagttcgccgaacgcctcatcgccgaggccctccccaagggggaggacggcaccccggacgagggcaagaagcccctctacgagagcgcctttgacgaggtggtgcgcagggagcttaggaggctcgtcctcgaggagggcaagcgggcggacggccgcgggcccaaggacctcaggcccatctggattgaggtggacgtcctgccccgggcccacggctccgccgtcttcacccggggcgaaacccaggtcctgggcaccgtcaccctgggcacgggccgggacgagcagatcctggacgacctgggcatagacgagaccgagaagttcctcgtccactacaacttcccccccttctccaccggggaggtgcggcgcctaaggggggtctcccgccgcgaggtggggcacggaaatttggccaagcgggccctcaaggcggtgatgcccaaggaggaggacttcccctacaccatccgcgtggtgggggacgtcctggagtccaacggcagtagctccatggccacggtctgcgccggctgcctcgccctcatggacgcgggcgtgcccatccgggccccggtggccggggtggccatgggcttggtgtgggaggagaaccgggcggtgatcctcacggatatcctgggcctcgaggacgccctcggcgacatggacttcaaggtggccgggacccgcaagggggtcaccgccttgcagatggacaacaaggtggggggccttccccgcgaggtcctgaaggaggccctcctccaggcccgggaggccaggctcaagatcctggacctgatggagaccgtcctccccgccccccggcccgagctcaagcccttcgccccccggatcctctccctcaaggtgcccgtggagaagatcgggctcgtcatcggccccgggggcaagaacgtgcgcgccctggaggagcttggggtggaggtggacattgaggaggacgggacggtccgcatctactccagcgacctcaacgccgccctcgaggcgaagaagcgcatagaggacctcacccgcgaggccaaggtgggcgagatctacgagggcaccgtcacccgcatcacccccttcggcgccttcatcagcctcttccccggcaccgaggggcttctccacatcagccagatcgccccgggccgcgtggagcgggtggaggaccacctcaaggtgggggacgtgatcaaggtcaaggtccaccgcattgacgagcggggcaagattgacctgatccgccccgagctggaaggcaagattccccccaggcggcgcaagtag

SEQ ID NO: 1838 - protein, 713 aa, Thermus thermophilus HB27
MEGTPNVPQAHRYELTLAGRPLVLETGKYAKQASGSVLVRYADTVVLATAQASETPVEADFLPLTVEFEERHYAVGKIPGSFMRREGRPGEKAILSARMTDRPIRPLFPKGFRHEVQIIVTVLSADQKNPPDILGPIAASAALMLSDIPWEGPIAAVRVGLIGGSFVLNPTLQELEESQLDLVVAGSKEAILMVEAEAGEVDEETLVQALEFAHKEMQPILELQEAMARELAKPKMAWTPPESLPEEEKEALYRLALERGLSQVLQTASKGERSRALAEFAERLIAEALPKGEDGTPDEGKKPLYESAFDEVVRRELRRLVLEEGKRADGRGPKDLRPIWIEVDVLPRAHGSAVFTRGETQVLGTVTLGTGRDEQILDDLGIDETEKFLVHYNFPPFSTGEVRRLRGVSRREVGHGNLAKRALKAVMPKEEDFPYTIRVVGDVLESNGSSSMATVCAGCLALMDAGVPIRAPVAGVAMGLVWEENRAVILTDILGLEDALGDMDFKVAGTRKGVTALQMDNKVGGLPREVLKEALLQAREARLKILDLMETVLPAPRPELKPFAPRILSLKVPVEKIGLVIGPGGKNVRALEELGVEVDIEEDGTVRIYSSDLNAALEAKKRIEDLTREAKVGEIYEGTVTRITPFGAFISLFPGTEGLLHISQIAPGRVERVEDHLKVGDVIKVKVHRIDERGKIDLIRPELEGKIPPRRRK

SEQ ID NO: 1839 - DNA, 2109 bp, Parachlamydia sp. UWE25
  CDS (1)..(2109): transl_table=11
atggagtattatttaatgcaacgtgaaactatttcagttcctgttggtgcacaagaaattatttttgaaacaggtaaaattgctcgtcaagctggaggagctgttgttgtccgatgtggagaaacagttgtcttcacaacggcttgtgccgccccaaatgctgattccacgaccgattttttacctcttcgtgttgattatcaggaaaaattttcgtcagcaggtaaaacacttggtggatttattaaaagagaaggtcgcccgactgagaaagaagttcttgtttctcgtttaattgatcgtcctattcgcccaatgtttgaagaaggttattacaatgaagttcaacttctttcttttgtttggtcttatgatggaattaactcaccagaacctctagcaatttgtggagcttctgcagctctagtcatttccgatattcctcttattaaacctgttggagctgtacgtatagggtttattgatgctcaatttatcgtcaacccaactatagaacaacaaaagcaatctaaactagatttgttgatagcaggaaccgaggaagctgttttaatgattgaaggcttctgtgatttcttaacagaagatcaagtattggaagctattgaaataggccatcgtagcatcaaaacgatttgccaaacacttgaacagtggcgtgcaaaagtgggtaaaccaaaaaatcgtgaaactcttagacaattaccaaaagaattgtatgcagatgtagaatcaattgcgaatcccctcttagaaaaagcactccgaatttgtgaaaagcaaaaacgggaagaagccctagctgaagtcaccaaggctgtcaatgatcgtttgatgccagaaaacgaagagcctaaatacccagccaaacatatcgcttatgtcattaaagacgtctcttctaaaatgatgcgtcaaatgattttaaatgaaaatgttcgttccgatggaagaacatcaacagatatacgatttattgatattgaacaaagtcttctcccccgtgctcacggaagctctttatttacaagaggtgaaacacaagcattagctgtatgtacattgggcggtgcttcaatggcacaacgatttgaagatttagaaggagaaggtaacaaccgtttctacttacaatattcttttcctccttactcagtcggagaagtaggaagagttggagctccgggaagacgagaaatcggacatggaaagttagcggaaagagctttaatggcagtcatccccacgaaagaacaatttccttacacaatccgtttggaatctaacattacagaatctaacggatcctcttctatggcaactgtttgcggaggctgcttagcgctcatggatgcaggtgtggctattaaacgtccagttgcgggaatcgcaatgggactaatattagaaaatgaacgctttattatcctatcagatattctgggaattgaagatgcgctcggtgatatggatttcaaggtaaccggagatcaaaacggcattactgctttccaaatggacatcaaagtagaaggcattaccattgaaattatgcgggttgctttaaaacaagctaaagaaggccgcgtccatatcctaaataagatgctagctgtatgcccaacgtataagggtgaaatgtctcgttatgcaccacgcattgaaacgatccaaattaaaccaagcaaaattgcagttgttatcggcccaggtggaaaacaaatcagagcaatcatcgaacagacaggtgttcaaattgatattgatgatacgggtcttgttaacattgctgccatagatttagtaagcattgaaaaagcaaaagccattattcatggtctgaccgctgaaattgagattggtagaatttattctggaaaagccatttctattgcaccctttggtgtttttgtggaaatccttcccggtaaagaaggcctttgccatatttctgaatttgatgtaaatcgtatcaacagcttagatgaatttgtaaaacaaggtgatatgctcatggtaaaagttctcgatatcaacgaacgaggacaaattaaattgagccgcaaagccactttacaaagtcaatag

SEQ ID NO: 1840 - protein, 702 aa, Parachlamydia sp. UWE25
MEYYLMQRETISVPVGAQEIIFETGKIARQAGGAVVVRCGETVVFTTACAAPNADSTTDFLPLRVDYQEKFSSAGKTLGGFIKREGRPTEKEVLVSRLIDRPIRPMFEEGYYNEVQLLSFVWSYDGINSPEPLAICGASAALVISDIPLIKPVGAVRIGFIDAQFIVNPTIEQQKQSKLDLLIAGTEEAVLMIEGFCDFLTEDQVLEAIEIGHRSIKTICQTLEQWRAKVGKPKNRETLRQLPKELYADVESIANPLLEKALRICEKQKREEALAEVTKAVNDRLMPENEEPKYPAKHIAYVIKDVSSKMMRQMILNENVRSDGRTSTDIRFIDIEQSLLPRAHGSSLFTRGETQALAVCTLGGASMAQRFEDLEGEGNNRFYLQYSFPPYSVGEVGRVGAPGRREIGHGKLAERALMAVIPTKEQFPYTIRLESNITESNGSSSMATVCGGCLALMDAGVAIKRPVAGIAMGLILENERFIILSDILGIEDALGDMDFKVTGDQNGITAFQMDIKVEGITIEIMRVALKQAKEGRVHILNKMLAVCPTYKGEMSRYAPRIETIQIKPSKIAVVIGPGGKQIRAIIEQTGVQIDIDDTGLVNIAAIDLVSIEKAKAIIHGLTAEIEIGRIYSGKAISIAPFGVFVEILPGKEGLCHISEFDVNRINSLDEFVKQGDMLMVKVLDINERGQIKLSRKATLQSQ

SEQ ID NO: 1841 - DNA, 2283 bp, Desulfovibrio vulgaris subsp. vulgaris str. Hildenborough
  CDS (1)..(2283): transl_table=11
atgaccaatatattcaacgccatgcgcgtcaccgccactgtcggcggcaaggagatcgtcttcgagacaggtcgcctcgccaatcaggccgatggtgccgtgtggatacagtgcggcggtaccgtggtgctcgtcaccgcgtgctcgcaagccactgaccgcgacctcggcttcttcccgctcaccgtcgaatactccgagaagatgtacgccgccggccgcatccccggcagcttcttccgacgcgagatcggccgccccagcgagcgcgagaccctcgtctcccgcctcatcgaccgccccatccgtccgctcttccccaagggcctcaaggatgaggtgcaggtgctcgccaacgtcatctcctccgaccagaacaacgactccgacgtgctcgccgtcaccggcgcctccaccgcactcggcctgtcgtccatcccgttcgacggcccggtcgccggtgcgcgcatcggtcgcatcgacggtcagttcgtcatcaaccccaccatcaaggagatggagcgcagcgacctcaacatcgtgctcgccgcctcgcgtgatgccgtggtgatggtcgaaggcgaagccagcttcgtgcccgaagcggtcatcgtcgaagccctcgaatggggtcacaaggaaatccagcccctcatcgacgcacagctgaagctgcgcgagatggctggcaaggccaagcgcgagttcaccgcaccggtcgaagatgcagaccttgccgcacgtgtggccgcccttgccaccgcagaccttgacgtagcccttcgcattcccgagaagatggcccgcaaggatgcccgcaaggccgtcaaggagaaggtgatggaggcccttgtggccgaccccgcctacgccgaagacaccactccgctgcgcgccgtgggcgacatcctctctgcgcttgagaagcgcatcgtgcgcgaacgcatcgtgcgcgaaggccgccgcatcgacggtcgcgacaccaccaccgttcgccccattctcatcgaagcgggcatcctgccccgcgcccatggttccgccctgttcgcgcgcggcgagaccaagtcgctggtcgtggccaccctcggtagttccaccgacgaacagcgcatggactcgctgaccggcgacgtcaccaagcgcttcatgctgcactacaacttcgccccctactgcgtgggtgaagtgaagcccgtgcgcgtctcccgccgcgaaatcggccacggcgcactggccgaaaaggccctgcgtcccatcctgcccctcggcgaagactttcccttcaccctgcgcgtggtcgccgagacgatggaatccaacggttcgtcgtccatggccgccgtctgcggcggctgcctctcgctgatggacgccggtgtgcccatcaccgcccctgtggccggtgtggccatgggcctcatcaaggagggcgaccagtacgtggtgctcaccgacatcctcggtgacgaagacgccctcggcgacatggacttcaagatagccggtaccagcgaaggcatcacggctgtccagatggacatcaaggtcaagggcctgcccaccgatgtcatggcccgcgccatgcagcaggcccgtgatgcgcgcctgcacatcctcggcgagatgggcaaggttctcgaagccccccgtgccgaactttccgcctacgcgccgcagcatgccgaggtgttcgtcaaccccgacatcatccgcatcatcatcggccccggcggcaagaacatcaaggccatcaccgccaccaccggcgcgtccatcgacatcgaggacagcggccgcgtctccatcttcgcgcccacgctcgaagccatggaaatggcccgcgagatggtgcagtactacgaccagcgcgccgacatcggcaagaactacaccggcaaggtgcgcaaggtcctcgaaatcggcgccatcgtcgaaatcctgcccaacctcgaagccctcgtgcacatctcgcagcttgacaccaacagggtcgagcaggcgtccgacgtggcccgcctcggcgaggacatggtcgtgaaggtcatcgagatcaacggcgaccgcatccgcgccagccgcaaggccgtcctgcttgaagagcagggcatcgaatggaagcccgaagacaccgctcgcccctccggtccccgcgaaggtggacgccgtgacggcggacgtgatggtcgccgcgacggcggtcgtgacggtcgccgtgatggcggacgtgacggtggtcgccgcgatggcggacgtcgcgacggcggacgcgaccgcaactaa

SEQ ID NO: 1842 - protein, 760 aa, Desulfovibrio vulgaris subsp. vulgaris str. Hildenborough
MTNIFNAMRVTATVGGKEIVFETGRLANQADGAVWIQCGGTVVLVTACSQATDRDLGFFPLTVEYSEKMYAAGRIPGSFFRREIGRPSERETLVSRLIDRPIRPLFPKGLKDEVQVLANVISSDQNNDSDVLAVTGASTALGLSSIPFDGPVAGARIGRIDGQFVINPTIKEMERSDLNIVLAASRDAVVMVEGEASFVPEAVIVEALEWGHKEIQPLIDAQLKLREMAGKAKREFTAPVEDADLAARVAALATADLDVALRIPEKMARKDARKAVKEKVMEALVADPAYAEDTTPLRAVGDILSALEKRIVRERIVREGRRIDGRDTTTVRPILIEAGILPRAHGSALFARGETKSLVVATLGSSTDEQRMDSLTGDVTKRFMLHYNFAPYCVGEVKPVRVSRREIGHGALAEKALRPILPLGEDFPFTLRVVAETMESNGSSSMAAVCGGCLSLMDAGVPITAPVAGVAMGLIKEGDQYVVLTDILGDEDALGDMDFKIAGTSEGITAVQMDIKVKGLPTDVMARAMQQARDARLHILGEMGKVLEAPRAELSAYAPQHAEVFVNPDIIRIIIGPGGKNIKAITATTGASIDIEDSGRVSIFAPTLEAMEMAREMVQYYDQRADIGKNYTGKVRKVLEIGAIVEILPNLEALVHISQLDTNRVEQASDVARLGEDMVVKVIEINGDRIRASRKAVLLEEQGIEWKPEDTARPSGPREGGRRDGGRDGRRDGGRDGRRDGGRDGGRRDGGRRDGGRDRN

SEQ ID NO: 1843 - DNA, 2172 bp, Listeria monocytogenes str. 4b F2365
  CDS (1)..(2172): transl_table=11
atgtctgaaaaacaagtattttcaacagaatgggcaggtaagacattatctgtcgaagtaggtcaattagcaaaacaagcaagtggagcagccttaattcgttacggcgatacggtcgttttaacagcggcagtaggttctaaaaaaccacgtccaggcgactttttcccactaacagttaactatgaagaaaaaatgtactccgttggtaaagttcccggtggatttttaaaacgtgaaggacgtcctagtgaccgtgcgacattaacagcgcgtctaattgaccgtccaattcgtccattatttgcagaaggtttccgtaatgaagttcaaattacatctactgttttcagtgtggatcaagattgttctccagaaatggcagcaatgcttggctcttctgttgcattagttatttccgatattccatttgaaggaccgatcgctggtgtggatgtgggtcgtatcgatggaaaatacgttatcaacccaactatcgaacaagcagaaaaaagtgatattagcttaaccgttgcaggaacttatgatgcaatcaacatggtagaagctggagcgaaagaagtttcagaagaagcaatgcttgaagcaatcatgttcggtcacgaagaaattaaacgtctttgtgaattccaacaacaaattatcgctgcagttggtaaagaaaaacgcgaaattgaacttttcgtaagcgatcctgaacttgaagcagaagtaaaagcagcaagtgaaggcaaaatgaaagcagctatcaaaacagaagagaaaaaagcacgtgaagcagcaattgaagatgtaaaagaagaaattttagaaagctataaagcaaaagaactagaaaacgaagcagaaattcttagcgaagtagctcatattcttgaaatgatcgaaaaagacgaaatgcgtcgtttaatttctcaagataaaatccgtccagatggtcgtaaagtaaacgaaattcgtccactttcttctgaagttggtatgcttcctcgtgtccatggttcaggtttattcactcgtggtcaaacacaagctctaagtgtatgtacactggcaccgcttcgtgaacaccaaatcattgatggtttagggacagaagagtacaaacgctttatgcatcattataacttcccgcaatttagtgttggggaaacaggtcctcgtcgtgctccaggccgtcgtgaaatcggtcacggtgcattaggtgaacgtgcgttacaatatgttattccttccgaagaggaattcccgtacacaatccgtttagtatctgaagttcttgaatctaatggctctagttcgcaagcaagtatttgtggttctacacttgcaatgcttgatgctggtgttccaattaaagcgccagttgcaggtatcgcaatgggtcttgtcaaacttggcgatgattacaccattctttctgatatccaaggtatggaagatcactttggcgatatggactttaaagttgctggaacaaaagatggtatcacagcacttcaaatggacatcaagattgatggcttaagccgccaaattttggacgaagcattaacgcaagcaaaagaagggcgcctacacattctagaacacttgactagcacaattagcgcaccacgtgaagaactttctgcttatgctccaaaaatcattacacttaacatcaaacctgagaaaatcaaagatgttattggacctggcggaaaacaaatcaatgcaattattgatgaaactggcgtaaaaattgatatcgaacaagatggtacagtgtacattgcttctcaagatcaagcaatgaaccgtaaagcaattgctatcatcgaagacatcgttcgtgaagtggaagtgggagaagtttatactggaaaagttcgtcgtatcgaaaaatttggcgcatttgttgaattattcaaaggtacagatggcttagttcacatttctgaattagcacatgaacgtgttggtaaagtagaagatatcctaaaactaggtgatgaagttactgttaaagttatcgaagtagaccaacaaggtcgcgttaacttatcacgtaaagctttgcttgagaaaaaagaacaaccagaaggcgataaaaaaccacaagcagagaaaaaattctatcctaaaacgaaaaaaccagaatctaaataa

SEQ ID NO: 1844 - protein, 723 aa, Listeria monocytogenes str. 4b F2365
MSEKQVFSTEWAGKTLSVEVGQLAKQASGAALIRYGDTVVLTAAVGSKKPRPGDFFPLTVNYEEKMYSVGKVPGGFLKREGRPSDRATLTARLIDRPIRPLFAEGFRNEVQITSTVFSVDQDCSPEMAAMLGSSVALVISDIPFEGPIAGVDVGRIDGKYVINPTIEQAEKSDISLTVAGTYDAINMVEAGAKEVSEEAMLEAIMFGHEEIKRLCEFQQQIIAAVGKEKREIELFVSDPELEAEVKAASEGKMKAAIKTEEKKAREAAIEDVKEEILESYKAKELENEAEILSEVAHILEMIEKDEMRRLISQDKIRPDGRKVNEIRPLSSEVGMLPRVHGSGLFTRGQTQALSVCTLAPLREHQIIDGLGTEEYKRFMHHYNFPQFSVGETGPRRAPGRREIGHGALGERALQYVIPSEEEFPYTIRLVSEVLESNGSSSQASICGSTLAMLDAGVPIKAPVAGIAMGLVKLGDDYTILSDIQGMEDHFGDMDFKVAGTKDGITALQMDIKIDGLSRQILDEALTQAKEGRLHILEHLTSTISAPREELSAYAPKIITLNIKPEKIKDVIGPGGKQINAIIDETGVKIDIEQDGTVYIASQDQAMNRKAIAIIEDIVREVEVGEVYTGKVRRIEKFGAFVELFKGTDGLVHISELAHERVGKVEDILKLGDEVTVKVIEVDQQGRVNLSRKALLEKKEQPEGDKKPQAEKKFYPKTKKPESK

SEQ ID NO: 1845 - DNA, 2139 bp, Bacillus anthracis str. Sterne
  CDS (1)..(2139): transl_table=11
atgagtcaagaaaagcaagtcttctcgatagatttagctggtcgccagctaacagttgaaacaggtcagcttgcaaagcaagcgaacggagcagtattagtaagatatggcgatacagcggttctatctacagcaactgcatcaaaagaagcaaaaaatgtagatttcttcccacttacagtaaactatgaagagcgtttatatgcagtcggaaaaattcctggcggtttcattaaacgtgaaggtcgtccaagtgaaaaagcaattttggcaagtcgtttaatcgaccgtccaattcgtccgcttttcgctgatggtttccgtaacgaagtacaagttgtcaacatcgtaatgagtgttgatcaagattgttcttctgaaatggcagctatgcttggttcttcattagcgttatcgatttcagatattccatttgaaggtccaattgcgggtgcaacagttggtcgtattaacggcgaattcgttatcaacccaacagtagaacagcaagaacaaagtgatattcaccttgttgtagctggtacgaaagatgcaattaacatggttgaagcaggagcagatcaagtgcctgaggaaacaatgttagaagcaattatgtttggtcatgacgaaattaaacgtctaattgcattccaagaagagattgtacaagctgtaggtaaagagaaatcagaagtaaaactttatgaagttgacgctgatcttaaccaagctgtacgtgaaatggctgagaaggatatgcattctgcaattcaagtacatgagaaacatgcacgtgaagatgcgattaacgaagtgaaaaagcgtgtaattgagcattacgaagcgcaggaagctgacgctgatactttaggacaagtaaatgagattttatataaaattgtaaaagaagaagtacgtcgtcttattacagttgaaaaaatccgcccagatggccgtaaaggtgacgaaatccgtccattagcatcagaggttggcattttatctcgtacacacggttctggtttgttcactcgtggacaaacacaagcattaagtatttgtacattaggtgcattaggcgatgtgcaaattttagacggtcttggtgtagaagaatcaaaacgctttatgcaccattacaatttcccatcatttagtgttggtgaaacaagaccgatgcgtggaccaggtcgtcgtgaaatcggtcacggtgcactaggagaacgtgctcttgaacctgtaattccatctgaaaaagacttcccatacacagtacgtcttgtgtctgaagtattagaatcaaatggttctacgtcacaagcaagtatttgtggtagtactttagcgatgatggatgctggtgttccacttaaagctccagttgcaggtattgcaatggggctagttaaaactggtgagcattacacaattttatctgatattcaaggtatggaagatcatttaggtgatatggactttaaagtagcaggtacagcacatggtgtaactgcattacaaatggacattaaaatcgatggtctatctcgtgaaattttagaagaggcattacaacaagcgaaagttggtcgtgtgcacattctaaatcatatgttatctgttattgcagagccacgcactgaattatcagcgtacgctccaaagattattacaatgacaattaacccagataaaatccgtgacgttatcggaccaagcggtaaacaaatcaataaaattattgaagaaactggcgttaaaattgacatcgagcaagatggtacagtattcatttcttcaataaatcaagaaatgaacgacaaagctaagaaaattattgaagatatcgttcgcgaagtacaagtaggtgaaatctacgaaggaaaagtgaaacgtgttgagaaattcggtgctttcgttgaattattcagcggtaaagatggattagtgcacatttctgaacttgcacttgagcgtgtaggtaaagtagaagacgttgtgaaaatcggtgatgtaattacagttaaagttatcgagattgacaagcaaggtcgcgtgaatctatctagaaaagtattgctaaaagaagagcaagaaaaagaagctgctaaagaagaaaacaaacaagagcagcaataa

SEQ ID NO: 1846 - protein, 712 aa, Bacillus anthracis str. Sterne
MSQEKQVFSIDLAGRQLTVETGQLAKQANGAVLVRYGDTAVLSTATASKEAKNVDFFPLTVNYEERLYAVGKIPGGFIKREGRPSEKAILASRLIDRPIRPLFADGFRNEVQVVNIVMSVDQDCSSEMAAMLGSSLALSISDIPFEGPIAGATVGRINGEFVINPTVEQQEQSDIHLVVAGTKDAINMVEAGADQVPEETMLEAIMFGHDEIKRLIAFQEEIVQAVGKEKSEVKLYEVDADLNQAVREMAEKDMHSAIQVHEKHAREDAINEVKKRVIEHYEAQEADADTLGQVNEILYKIVKEEVRRLITVEKIRPDGRKGDEIRPLASEVGILSRTHGSGLFTRGQTQALSICTLGALGDVQILDGLGVEESKRFMHHYNFPSFSVGETRPMRGPGRREIGHGALGERALEPVIPSEKDFPYTVRLVSEVLESNGSTSQASICGSTLAMMDAGVPLKAPVAGIAMGLVKTGEHYTILSDIQGMEDHLGDMDFKVAGTAHGVTALQMDIKIDGLSREILEEALQQAKVGRVHILNHMLSVIAEPRTELSAYAPKIITMTINPDKIRDVIGPSGKQINKIIEETGVKIDIEQDGTVFISSINQEMNDKAKKIIEDIVREVQVGEIYEGKVKRVEKFGAFVELFSGKDGLVHISELALERVGKVEDVVKIGDVITVKVIEIDKQGRVNLSRKVLLKEEQEKEAAKEENKQEQQ

SEQ ID NO: 1847 - DNA, 2202 bp, Bartonella quintana str. Toulouse
  CDS (1)..(2202): transl_table=11
atgtttaaaacgcataagatagaaattgaatgggccggtcggccactcaccctcgagacggggaaaatagcgcgtcaagctgatggtgcagtaattgccacctacggtgaaaccattgtcttagcaaccgttgtgtcagcaaaaaacccaaaaccagaccaggatttttttccactcactgttaattatcaagaaaaattctatgctgttggcagaatacccggtggttatttaaaacgtgaaagccggcctactgaaagtgaaacattgatttcacgtttaattgatcgtccaattcgtcccctctttgctgacggctataaaaatgatacgcaagtcattgtatccgttatacaatatgatctcgaaaataatcctgatatccttgctatgattgcatcttctgccgcattaactctgtcaggtgttccttttatgggccccattgctggtgctcgtgtcggctactgtaacaagcaatacattctcaatccccatattgatgaaatgcctgaatcaaaactcgatcttgttgttgctggaacagaaagtgctgtgttgatggttgaatcagaagcacaagaattacctgaagacatcatgttgggtgcagtcatgtttgggcacaaaggctttcaacccgttcttgatgctatcatcaagcttgctgaagttgccgcaaaagatccacgcgactttattcccgaggatctctctgatcttgaaacagctatgttggaaatggtcgaacaagacatccgaaaagcttatacaattactgataaacaggaacgttctactgcaattgatgtacttaaaacagaaatcatcaataaatttatgtcagaaacagaagaaaactgtaaatttagtgcagaccaaatcgcaacagttttcaaacagttgcaagcaaaaattgttcgctcaaacattcttgatacgaaaaagcgtattgatgggcgcgacctttcaacagtacgtcctatacaatcggaagttggtattttaccccgaacacatggatcagcactctttactcgtggagaaacacaagcaattgtcgttgcaacactaggaaccggtgaagatgaacaatatgttgactctttaacgggtatgtataaagaaacattcctccttcattacaattttccaccattttcagtaggtgaaacagggcgtcttggctctcctggtcgccgcgagatcggacatggcaaactggcgtggcgtgccattcatcctatgttgccaactaaggaatcttttccttataccattcgtgctgtatcagaaatcactgaatccaatggatcctcttcaatggcaacagtttgcggaacttcacttgctctcatggatgccggtgtccctctggtacgccctattgcaggtattgccatgggtttgattaaagaaggggaacgcttcgccattctgtctgatattttaggagatgaagatcatctcggagacatggattttaaagtagcggggacaaacaatggtattactgctttacaaatggatataaaaattgatggtattaccgaagagattatgaaaatcgcacttgagcaagccagagatggccgaattcatattctcaatgaaatggccaaagctttaaccagtgcgcgtgatgaacttagtgaattttctccacgcattgaagttatgaacattgctgttgataaaatacgcgatgttatcggctctggcggcaaagtaattcgagaaattgtggaacaaactggagctaaaattaatattgaagataatggaacaattaaaatcgcttctgccgatgctaaaaccattgaagcagcaaagcgctggatccattcaattgttgacgagcctgaagttggtggtatctaccaaggaacagttgtaaaaactgcagaattcggcgcatttgtaaatttctttggctcacgtgatgggctcgttcatatctctcaacttacaacagaacgtgtcacaaaaacaacaaatgttgttaaagaaggcgataaagtttgggttaaattgatgggctttgatgagcgtggtaaagttcggttatcgatgaaaattgtcgaccaacagaccggaaaagaaattactggtgataattcgataaaagcagaaaaagaaaagtatgctgatacaaaaaataaccctgaaaacaaacgccttcgtaagaaaaaagaagaataa

SEQ ID NO: 1848 - protein, 733 aa, Bartonella quintana str. Toulouse
MFKTHKIEIEWAGRPLTLETGKIARQADGAVIATYGETIVLATVVSAKNPKPDQDFFPLTVNYQEKFYAVGRIPGGYLKRESRPTESETLISRLIDRPIRPLFADGYKNDTQVIVSVIQYDLENNPDILAMIASSAALTLSGVPFMGPIAGARVGYCNKQYILNPHIDEMPESKLDLVVAGTESAVLMVESEAQELPEDIMLGAVMFGHKGFQPVLDAIIKLAEVAAKDPRDFIPEDLSDLETAMLEMVEQDIRKAYTITDKQERSTAIDVLKTEIINKFMSETEENCKFSADQIATVFKQLQAKIVRSNILDTKKRIDGRDLSTVRPIQSEVGILPRTHGSALFTRGETQAIVVATLGTGEDEQYVDSLTGMYKETFLLHYNFPPFSVGETGRLGSPGRREIGHGKLAWRAIHPMLPTKESFPYTIRAVSEITESNGSSSMATVCGTSLALMDAGVPLVRPIAGIAMGLIKEGERFAILSDILGDEDHLGDMDFKVAGTNNGITALQMDIKIDGITEEIMKIALEQARDGRIHILNEMAKALTSARDELSEFSPRIEVMNIAVDKIRDVIGSGGKVIREIVEQTGAKINIEDNGTIKIASADAKTIEAAKRWIHSIVDEPEVGGIYQGTVVKTAEFGAFVNFFGSRDGLVHISQLTTERVTKTTNVVKEGDKVWVKLMGFDERGKVRLSMKIVDQQTGKEITGDNSIKAEKEKYADTKNNPENKRLRKKKEE

SEQ ID NO: 1849 - DNA, 2202 bp, Bartonella henselae str. Houston-1
  CDS (1)..(2202): transl_table=11
atgttcaaaacacacaagatagaaattgaatgggcaggcaggccactaacccttgagacagggaaaatagcgcgtcaagctgatggcgcagtcattgctacctacggtgaaactattgtcttagcaaccgtggtatcagcaaaaagccccaaaccagaccaagacttttttccactcaccgttaattatcaagaaaaatcctatgctgttggtagaatccccggtggttatttaaaacgtgaaagccgaccaagtgaaaatgaaactttaatttcacgtttaattgatcgtccgattcgccccctcttcgctgacggttataaaaatgatacacaagtcattgtatctgttatacagcatgatcttgaaaataacccagatattctcgcaatgattgcatcttctgctgcattaactctgtcaggtgttcctttcatgggccccattgccggagctcgtgttggctattgtaacggacaatatattctcaatccccatatcgatgaaatgtccgaatcaaaactcgatctcgttgttgccggaacagaaaatgctgtattgatggttgaatcagaagctcaagaattgcctgaagacatcatgttgggtgccgttatgtttggacacaaaggtcttcaacctattcttgatgctattatcaaacttgccgaagttgctgcaaaagatccacgcgattttgttcccgaagatctctctgatctcgaaacagctatgctggaaatggccgaaaaggatatacgaaaagcctatacaattaccgataaacaggaacgttacgctgcacttgatgcacttaaaacagaaatcatcaataaatttatgccagaaacagaagaagactgtaaatttagtgtagatcaaattgcaaccgttttcaaacagttgcaagcaaaaattgttcgctcaaatattcttgatacgaaaaagcgtattgatggacgcgacctttcaacagtacgtcccatccaatcggaggttggtattttaccccgaacacacggatcggcactctttacccgtggagaaacacaagcaattgtcgttgcaacactaggaaccggtgaagatgaacaatatatcgattctttaacgggtatgtataaggaaacattcctccttcattataattttccaccattttcagtgggtgaaacaggacgtcttggctctcctggtcgccgcgaaatcgggcatggtaaactggcgtggcgtgccattcatcctatgttgccaagtaaggaatcctttccttacaccattcgtgctgtttcagaaatcactgaatccaatggatcttcttccatggcaacagtttgcggaacttcccttgctctcatggatgccggtgttcctctggcacgtcccgttgcaggtattgccatgggcttgattaaagaaggtgaacgttttgctgtgctctctgatatcttaggagatgaagatcatcttggagacatggattttaaagtagccggaacagcaaatggtattaccgccttgcaaatggatatcaaaattgatggtattaccgaagagattatgaaaatcgcgcttgaacaagccaaaggtggtcgaatccatatccttaatgaaatggccaaagctttaaccagtgcacgtgctgaactcagtgaattttctccacgcatcgaagttatgaacattgctgttgataaaattcgcgatgttatcggtactggcggtaaagttattcgagaaatcgttgaacaaactggagcaaaaatcaatatcgaagatgatggaaccattagaattgcttctgccgatgccaaaactattgaagcagcaaaacgctggattcattcgattgttgatgaacctgaagttggcgttatttatcaaggaacagttgtaaaaactgcagaattcggtgcatttgtaaacttttttggctcacgtgatgggcttgtgcatatctctcaacttacaacagaacgtgtcacaaaaacaacagatgttgttaaagaaggcgataaagtttgggttaaattaatgggttttgatgagcgtggtaaagttcgcttatcaatgaaaatcgtcgaccaaaagaccggtaaagaaattattggtgaggattcgataaaagcagaacaagaaaaatacacagaggaaacacataaatctgaaaacaagcgccgtcgtaagaaaaaagaagagtaa

SEQ ID NO: 1850 - protein, 733 aa, Bartonella henselae str. Houston-1
MFKTHKIEIEWAGRPLTLETGKIARQADGAVIATYGETIVLATVVSAKSPKPDQDFFPLTVNYQEKSYAVGRIPGGYLKRESRPSENETLISRLIDRPIRPLFADGYKNDTQVIVSVIQHDLENNPDILAMIASSAALTLSGVPFMGPIAGARVGYCNGQYILNPHIDEMSESKLDLVVAGTENAVLMVESEAQELPEDIMLGAVMFGHKGLQPILDAIIKLAEVAAKDPRDFVPEDLSDLETAMLEMAEKDIRKAYTITDKQERYAALDALKTEIINKFMPETEEDCKFSVDQIATVFKQLQAKIVRSNILDTKKRIDGRDLSTVRPIQSEVGILPRTHGSALFTRGETQAIVVATLGTGEDEQYIDSLTGMYKETFLLHYNFPPFSVGETGRLGSPGRREIGHGKLAWRAIHPMLPSKESFPYTIRAVSEITESNGSSSMATVCGTSLALMDAGVPLARPVAGIAMGLIKEGERFAVLSDILGDEDHLGDMDFKVAGTANGITALQMDIKIDGITEEIMKIALEQAKGGRIHILNEMAKALTSARAELSEFSPRIEVMNIAVDKIRDVIGTGGKVIREIVEQTGAKINIEDDGTIRIASADAKTIEAAKRWIHSIVDEPEVGVIYQGTVVKTAEFGAFVNFFGSRDGLVHISQLTTERVTKTTDVVKEGDKVWVKLMGFDERGKVRLSMKIVDQKTGKEIIGEDSIKAEQEKYTEETHKSENKRRRKKKEE

SEQ ID NO: 1851 - DNA, 2139 bp, Bacillus thuringiensis serovar konkukian str. 97-27
  CDS (1)..(2139): transl_table=11
atgagtcaagaaaagcaagtcttctcgatagatttagctggtcgccagctaacagttgaaacaggtcagcttgcaaagcaagcgaacggagcagtattagtaagatatggcgatacagcggttctatctacagcaactgcatcaaaagaagcaaaaaatgtagatttcttcccacttacagtaaactatgaagagcgtttatatgcagtcggaaaaattcctggcggtttcattaaacgtgaaggtcgtccaagtgaaaaagcaattttggcaagtcgtttaatcgaccgtccaattcgtccgcttttcgctgatggtttccgtaacgaagtacaagttgtcagcatcgtaatgagcgttgatcaagattgttcttctgaaatggcagctatgcttggttcttcattagcgttatcgatttcagatattccatttgaaggtccaattgcgggtgcaacagttggtcgtattaacggcgaattcgttatcaacccaacagtagaacagcaagaacaaagtgatattcaccttgttgtagctggtacgaaagatgcaattaacatggttgaagcaggagcagatcaagtgcctgaggaaacaatgttagaagcaattatgtttggtcatgacgaaattaaacgtctaattgcattccaagaagagattgtacaagctgtaggtaaagagaaatcagaagtgaaactttatgaagttgacgctgatcttaaccaagctgtacgtgagatggctgagaaggatatgcattctgcaattcaagtacatgagaaacatgcacgtgaagatgcaattaacgaagtgaaaaagcgtgtaattgagcattacgaagcgcaggaagctgacgctgatactttaggacaagtaaatgagattttatataaaattgtaaaagaagaagtacgtcgtcttattacagttgaaaaaatccgcccagatggccgtaaaggtgacgaaatccgtccattagcatcagaggttggcattttatctcgtacacacggttctggtttgttcactcgtggacaaacacaagcattaagtatttgtacattaggtgcattaggcgatgtgcaaattttagacggtcttggtgtagaagaatcaaaacgttttatgcaccattacaatttcccatcatttagtgttggtgaaacaagaccgatgcgtggaccaggtcgtcgtgaaatcggtcacggtgcactaggagaacgtgctcttgaacctgtaattccatctgaaaaagacttcccatacacagtacgtcttgtgtctgaagtattagaatcaaatggttctacttcacaagcaagtatttgtggtagtactttagcaatgatggatgctggtgttccacttaaagctccagttgcaggtattgcaatggggctagttaaaactggtgagcattacacaattttatctgatattcaaggtatggaagatcatttaggtgatatggactttaaagtagcaggtacagcacatggtgtaactgcattacaaatggacattaaaatcgatggtctatctcgtgaaattttagaagaggcattacaacaagcgaaagttggtcgtgtgcacattctaaatcatatgttatctgttattgcagagccacgcactgaattatcagcgtacgctccaaagattattacaatgacaattaacccagataaaatccgtgacgttatcggaccaagcggtaaacaaatcaataaaattattgaagaaactggcgttaaaattgacatcgagcaagatggtacagtattcatttcttcaataaatcaagaaatgaacgacaaagctaagaaaattatcgaagatatcgttcgcgaagtacaagtaggtgaaatctacgaaggaaaagtgaaacgtgttgagaaattcggtgctttcgttgaattattcagcggtaaagatggattagttcacatttctgaacttgcacttgagcgtgtaggtaaagtagaagacgttgtgaaaatcggtgatgtaattacagttaaagttatcgagatcgacaagcaaggtcgcgtgaatctatctagaaaagtattgctaaaagaagagcaagaaaaagaagctgctaaagaagaaaacaaacaagagcagcaataa

SEQ ID NO: 1852 - protein, 712 aa, Bacillus thuringiensis serovar konkukian str. 97-27
MSQEKQVFSIDLAGRQLTVETGQLAKQANGAVLVRYGDTAVLSTATASKEAKNVDFFPLTVNYEERLYAVGKIPGGFIKREGRPSEKAILASRLIDRPIRPLFADGFRNEVQVVSIVMSVDQDCSSEMAAMLGSSLALSISDIPFEGPIAGATVGRINGEFVINPTVEQQEQSDIHLVVAGTKDAINMVEAGADQVPEETMLEAIMFGHDEIKRLIAFQEEIVQAVGKEKSEVKLYEVDADLNQAVREMAEKDMHSAIQVHEKHAREDAINEVKKRVIEHYEAQEADADTLGQVNEILYKIVKEEVRRLITVEKIRPDGRKGDEIRPLASEVGILSRTHGSGLFTRGQTQALSICTLGALGDVQILDGLGVEESKRFMHHYNFPSFSVGETRPMRGPGRREIGHGALGERALEPVIPSEKDFPYTVRLVSEVLESNGSTSQASICGSTLAMMDAGVPLKAPVAGIAMGLVKTGEHYTILSDIQGMEDHLGDMDFKVAGTAHGVTALQMDIKIDGLSREILEEALQQAKVGRVHILNHMLSVIAEPRTELSAYAPKIITMTINPDKIRDVIGPSGKQINKIIEETGVKIDIEQDGTVFISSINQEMNDKAKKIIEDIVREVQVGEIYEGKVKRVEKFGAFVELFSGKDGLVHISELALERVGKVEDVVKIGDVITVKVIEIDKQGRVNLSRKVLLKEEQEKEAAKEENKQEQQ

SEQ ID NO: 1853 - DNA, 2097 bp, Staphylococcus aureus subsp. aureus MRSA252
  CDS (1)..(2097): transl_table=11
atgtctcaagaaaagaaagtttttaaaactgaatgggcaggaagatctttaacgattgaaacagggcaattagctaaacaagcaaatggcgctgtattggttcgttatggagatacagtcgtgttatcgacggcaactgcatcaaaagaacctcgtgatggagatttcttcccattaacagtgaactatgaagaaaaaatgtacgctgcgggtaaaattcctggtggatttaaaaagagagaaggacgtcctggtgacgatgcaacattaactgcgcgattaattgatagaccaattagacctttattccctaaaggatataagcatgatgttcaaattatgaacatggtattaagtgcagatcctgattgttcaccacaaatggctgcaatgattggttcatctatggcgcttagtgtgtcggatattccattccaagggccaatcgccggtgtaaatgtgggttatattgatggtaaatatatcattaacccaacagtagaagaaaaagaagtttctcgtttagaccttgaagtagctggtcataaagatgcagtaaacatggtagaagcaggcgctagtgagattactgaacaagaaatgttagaggcgattttctttggtcatgaagagattcaacgtttagttgatttccaacaacaaatcgtcgaccacattcaacctgttaaacaagaatttattccaacagagcgtgatgaagcgctagttgaacgtgtaaaatctttaaccgaagaaaaaggacttaaagaaacagttttaacatttgataaacaacaacgagatgaaaatcttgataacttaaaagaagaaatcgtcaatgaatttatcgatgaagaagatccagagaatgaattacttattaaagaagtttatgcaattttaaatgaattagtgaaagaagaagttcgacgtttaattgcagatgaaaaaattagaccagacggccgtaaacctgatgaaatccgtccattagattctgaagttggtattttacctagaacgcatggttcaggtctatttacacgtggtcaaactcaagcactttcagttttaacattaggtgctttaggtgattatcaattaattgatggtttaggacctgaagaagaaaaaagattcatgcatcattataacttcccgaatttttcagtaggtgaaactggtccagtacgtgcgccaggtcgtcgtgaaattggacatggtgcgttaggtgaaagagcattaaaatatattattcctgatactgctgatttcccatatacaattcgtattgtaagtgaggtacttgaatcaaacggttcatcatctcaagcgtcaatttgtggatcaacattagctttaatggatgcgggcgtaccgattaaagcaccagttgctggtattgctatgggccttgttacacgtgaagatagctatacgattttaacagatatccaaggtatggaagatgcattaggtgatatggactttaaagtcgctggtactaaagaaggtattacagcaatccaaatggatattaaaattgacggtttaacgcgtgaaattatcgaagaggctctagaacaagcgagacgtggtcgtttagaaataatgaatcatatgttacaaacaattgatcaaccacgtactgaattaagtgcttacgcgccaaaagttgtaactatgacaattaaaccagataagattagagatgttatcggacctggtggtaaaaaaattaacgaaattattgatgaaacaggcgttaaattagatatcgaacaagatggtactatctttattggtgccgttgatcaagctatgataaatcgtgctcgtgaaatcattgaggaaattacacgtgaagcggaagtaggtcaaacttatcaagccactgttaaacgtattgaaaaatacggtgcgtttgtaggcctattcccgggtaaagatgcgttgcttcacatttcacaaatttcaaaaaatagaattgaaaaagtggaagatgtattaaaaattggtgacacaattgaagttaaaattactgaaattgataaacaaggtcgagtaaatgcatcacacagagcattagaagaataa

SEQ ID NO: 1854 - protein, 698 aa, Staphylococcus aureus subsp. aureus MRSA252
MSQEKKVFKTEWAGRSLTIETGQLAKQANGAVLVRYGDTVVLSTATASKEPRDGDFFPLTVNYEEKMYAAGKIPGGFKKREGRPGDDATLTARLIDRPIRPLFPKGYKHDVQIMNMVLSADPDCSPQMAAMIGSSMALSVSDIPFQGPIAGVNVGYIDGKYIINPTVEEKEVSRLDLEVAGHKDAVNMVEAGASEITEQEMLEAIFFGHEEIQRLVDFQQQIVDHIQPVKQEFIPTERDEALVERVKSLTEEKGLKETVLTFDKQQRDENLDNLKEEIVNEFIDEEDPENELLIKEVYAILNELVKEEVRRLIADEKIRPDGRKPDEIRPLDSEVGILPRTHGSGLFTRGQTQALSVLTLGALGDYQLIDGLGPEEEKRFMHHYNFPNFSVGETGPVRAPGRREIGHGALGERALKYIIPDTADFPYTIRIVSEVLESNGSSSQASICGSTLALMDAGVPIKAPVAGIAMGLVTREDSYTILTDIQGMEDALGDMDFKVAGTKEGITAIQMDIKIDGLTREIIEEALEQARRGRLEIMNHMLQTIDQPRTELSAYAPKVVTMTIKPDKIRDVIGPGGKKINEIIDETGVKLDIEQDGTIFIGAVDQAMINRAREIIEEITREAEVGQTYQATVKRIEKYGAFVGLFPGKDALLHISQISKNRIEKVEDVLKIGDTIEVKITEIDKQGRVNASHRALEE

SEQ ID NO: 1855 - DNA, 2097 bp, Staphylococcus aureus subsp. aureus MSSA476
  CDS (1)..(2097): transl_table=11
atgtctcaagaaaagaaagtttttaaaactgaatgggcaggaagatctttaacgattgaaacagggcaattagctaaacaagcaaatggcgctgtattggttcgttatggagatacagtcgtgttatcgacggcaactgcatcaaaagaacctcgtgatggagatttcttcccattaacagtgaactatgaagaaaaaatgtacgctgcgggtaaaattcctggtggatttaaaaagagagaaggacgtcctggtgacgatgcaacattaactgcgcgattaattgatagaccaattagacctttattccctaaaggatataagcatgatgttcaaattatgaacatggtattaagtgcagatcctgattgttcaccacaaatggctgcaatgattggttcatctatggcgcttagtgtgtcggatattccattccaagggccaatcgccggtgtaaatgtgggttatattgacggtaaatatatcattaacccaacagtagaagaaaaagaagtttctcgcttagaccttgaagtagctggtcataaagatgcagtaaacatggtagaggcaggcgctagtgagattactgaacaagaaatgttagaggcgattttctttggtcatgaagagattcaacgtttagttgatttccaacaacaaatcgtcgaccacattcaacctgttaaacaagaatttattccagtagagcgtgatgaagcgctagttgaacgtgtaaaatctttaaccgaagaaaagggacttaaagaaacagttttaacatttgataaacaacaacgagatgaaaatcttgataacttaaaagaagaaatcgtcaatgaatttatcgatgaagaagatccagaaaatgaattacttattaaagaagtttatgcaattttaaatgaattagtgaaagaagaagttcgacgtttaattgcagatgaaaaaattagaccagacggccgtaaacctgatgaaatccgtccattagattctgaagttggtattttacctagaacgcatggttcaggtctatttacacgtggtcagactcaagcactttcagttttaacattaggtgctttaggcgattatcaattaattgatggtttaggacctgaagaagaaaaaagattcatgcatcattacaacttcccgaatttttcagtaggtgaaactggtccagtacgtgcgccaggtcgtcgtgaaattggacatggtgcgttaggtgaaagagcattaaaatatattattcctgatactgctgatttcccatatacaattcgtattgtaagtgaggtacttgaatcaaatggttcatcatctcaagcgtcaatttgtggatcaacattagcattaatggatgcgggcgtaccgattaaagcaccagttgctggtattgctatgggccttgttacacgtgaagatagctatacgattttaactgatatccaaggtatggaagatgcattaggtgatatggactttaaagtcgctggtactaaagaaggtattacagcaatccaaatggatattaaaattgacggtttaacgcgtgaaattatcgaagaggctctagaacaagcgagacgtggtcgtttagaaataatgaatcatatgttacaaacaattgatcaaccacgtactgaattaagtgcttacgcgccaaaagttgtaactatgacaattaaaccagataagattagagatgttatcggacctggtggtaaaaaaattaacgaaattattgatgaaacaggcgttaaattagatattgaacaagatggtactatctttattggtgccgttgatcaagctatgataaatcgcgctcgtgaaatcattgaggaaattacacgtgaagcggaagtaggtcaaacttatcaagccactgttaaacgtattgaaaaatacggtgcgtttgtaggcctattcccgggtaaagatgcgttgcttcacatttcacaaatttcaaaaaatagaattgaaaaagtggaagatgtattaaaaatcggtgacacaattgaagttaagattactgaaattgataaacaaggtcgagtaaatgcttcacacagagcattagaagaataa

SEQ ID NO: 1856 - protein, 698 aa, Staphylococcus aureus subsp. aureus MSSA476
MSQEKKVFKTEWAGRSLTIETGQLAKQANGAVLVRYGDTVVLSTATASKEPRDGDFFPLTVNYEEKMYAAGKIPGGFKKREGRPGDDATLTARLIDRPIRPLFPKGYKHDVQIMNMVLSADPDCSPQMAAMIGSSMALSVSDIPFQGPIAGVNVGYIDGKYIINPTVEEKEVSRLDLEVAGHKDAVNMVEAGASEITEQEMLEAIFFGHEEIQRLVDFQQQIVDHIQPVKQEFIPVERDEALVERVKSLTEEKGLKETVLTFDKQQRDENLDNLKEEIVNEFIDEEDPENELLIKEVYAILNELVKEEVRRLIADEKIRPDGRKPDEIRPLDSEVGILPRTHGSGLFTRGQTQALSVLTLGALGDYQLIDGLGPEEEKRFMHHYNFPNFSVGETGPVRAPGRREIGHGALGERALKYIIPDTADFPYTIRIVSEVLESNGSSSQASICGSTLALMDAGVPIKAPVAGIAMGLVTREDSYTILTDIQGMEDALGDMDFKVAGTKEGITAIQMDIKIDGLTREIIEEALEQARRGRLEIMNHMLQTIDQPRTELSAYAPKVVTMTIKPDKIRDVIGPGGKKINEIIDETGVKLDIEQDGTIFIGAVDQAMINRAREIIEEITREAEVGQTYQATVKRIEKYGAFVGLFPGKDALLHISQISKNRIEKVEDVLKIGDTIEVKITEIDKQGRVNASHRALEE

SEQ ID NO: 1857 - DNA, 2094 bp, Acinetobacter sp. ADP1
  CDS (1)..(2094): transl_table=11
atgtcgatgtttaatattattcgtaaagaatttcagtttggtcaacatcaggtggtactagaaacgggtcgcgttgcacgtcaagcaaacaccgttttagtcacgatgggtggtgtgacggtattggttgcagtcgttgcacaacctaaagcgaaagcgggtcaagactttttcccactgactgtgaactatcaagaaaaacaatatgctgctggtcgtatcccaggtggttatggcaagcgtgaaggccgtgcgtctgaagctgaaactttaatttcacgtttgattgaccgtccaattcgtccgttgttcccagaaggttacttcaacgaaattcaaatcaccgcgacagtggtttcttctgacaaaacgatggatgccgatattgcagccatgctaggtgcttcagcggcattgtcaattgcgggtacgccattccgtggtccaatcggtggtgcacgtgttggtttgatcaatggcgaatacgttttaaacccaaattttgagcaacttgctcagtctgaccttgaccttgtcgttgcgggtacagagtctgctgtactcatggttgaatctgaagcaaaagaactttcagaagatcaaatgctaggcgctgtactttttggtcatgacgaaatgcaaattgcagttcaagcgatcaaagagtttgctgcggcggctggtgcagttgaatcaacttgggttgcgccaacgaaaaacgaaacattgcttgagcaattaaaggcagcgtttgaagctaaaatttctgaagcatataccattgcggtgaaacaagatcgttatacagcacttgatgcactttatgcagaagctgtagctcagttcgttccagaaaatgacgaaacgggtattgccgatgaagtcaacgaattattcgaagaccttaaataccgtaccgtacgtgacaacatcttgtcaggtaagccacgtattgatggtcgtgatactaaaactgttcgtgctatcgacgttcaagtgggcgtattagatcgtgcacatggttctgcattatttacacgtggtgaaactcaggcgttggtgaccaccactttgggtaatacgcgtgatgcgttaatggttgatacccttgcgggtactaaaactgacaacttcatgttgcactacaacttcccagcatactcagtgggtgaaactggtcgtgaatctggtccaaagcgccgtgaaattggtcatggtcgtttggcacgtcgtggtgttcaagccgttttacctgcagctgaccgcttcccgtacgtgattcgtatcgtatcagacattactgaatcaaatggttcatcgtcaatggcgtctgtatgtggtgcatcactttcattgatggatgcaggtgttccattgaaagcaccagttgcgggtatcgcaatgggcctagtcaaagaaggtgagcgttttgctgtactttctgacatcttgggtgacgaagatcatttaggtgatatggactttaaggttgctggttctgccaatggtattactgcacttcaaatggacatcaaaattgaaggcatcactgaagaaatcatggaagttgcattgaatcaggcgtatgcaggtcgtatgcacatcctgaatgaaatgaacaaagtgatttcacgtgcgcgtgctgaaatttcagcacatgcaccaacgtttgaagtcattacgatcaatccagacaagattcgtgacgtgattggtaagggcggcgcgacgattcgtcagatcactgaagaaaccaaagccgcaattgatattgaagacaatggtacagtgcgtgtatttggtgaaaccaaagcggctgcacgtgccgcaattgcaaaaattcaggccttaacggctgaagttgaacctggcaaaatctatgatggtaaagtcatccgtatcgtagaatttggtgcgttcgtgaatatcatgccaggtactgatggtttgctacatatttcacagatttcaaatgaacgtgtagccaatgtctctgatgttcttaaagaaggtcaggatgttaaagtacaagttgcagatgtcgacaaccgtggtcgtatcaaattgagtatgaaagatattgaacaagcttaa

SEQ ID NO: 1858 - protein, 697 aa, Acinetobacter sp. ADP1
MSMFNIIRKEFQFGQHQVVLETGRVARQANTVLVTMGGVTVLVAVVAQPKAKAGQDFFPLTVNYQEKQYAAGRIPGGYGKREGRASEAETLISRLIDRPIRPLFPEGYFNEIQITATVVSSDKTMDADIAAMLGASAALSIAGTPFRGPIGGARVGLINGEYVLNPNFEQLAQSDLDLVVAGTESAVLMVESEAKELSEDQMLGAVLFGHDEMQIAVQAIKEFAAAAGAVESTWVAPTKNETLLEQLKAAFEAKISEAYTIAVKQDRYTALDALYAEAVAQFVPENDETGIADEVNELFEDLKYRTVRDNILSGKPRIDGRDTKTVRAIDVQVGVLDRAHGSALFTRGETQALVTTTLGNTRDALMVDTLAGTKTDNFMLHYNFPAYSVGETGRESGPKRREIGHGRLARRGVQAVLPAADRFPYVIRIVSDITESNGSSSMASVCGASLSLMDAGVPLKAPVAGIAMGLVKEGERFAVLSDILGDEDHLGDMDFKVAGSANGITALQMDIKIEGITEEIMEVALNQAYAGRMHILNEMNKVISRARAEISAHAPTFEVITINPDKIRDVIGKGGATIRQITEETKAAIDIEDNGTVRVFGETKAAARAAIAKIQALTAEVEPGKIYDGKVIRIVEFGAFVNIMPGTDGLLHISQISNERVANVSDVLKEGQDVKVQVADVDNRGRIKLSMKDIEQA

SEQ ID NO: 1859 - DNA, 2121 bp, Erwinia carotovora subsp. atroseptica SCRI1043
  CDS (1)..(2121): transl_table=11
ttgctgaatccgatcgttcgtaagtttcaatatggtcagcataccgtcacattagagacaggtatgatggcacgccaggctaccgccgctgtgatggtaagcatggatgacacagcggtattcgttaccgttgtcggcgctaaaaacgctaaacccggccaaagtttcttcccattgacggttaactatcaggagcgtacctacgctgctggacgtttccccggtggttttttccgccgtgaaggtcgtccaagtgaaggcgaaacgctgacttcccgtctgattgaccgtccgattcgccctctgttcccagaaggcttcctgaatgaagttcaggtgattgcgactgtggtttccgtcaacccacaggttagccctgatatcgttgccatgattggtgcttctgcggcgctgagcctgtctggtatcccgttcagcggccctatcggtgttgcacgcgtcggttacctgaacgaccagtatgtcctgaacccaacgacagatgaactgaaagaaagccgtctggatctggtcgttgcaggtactcaaggcgctgttctgatggtggaatccgaagctgaattgctgagtgaagatcagatgctcggtgcggtggtctttggccacgagcaacagcaaatcgttatcgaaaacatcaactcactggttgcagaagctggcaaaccgaagtgggaatggcatgcgccagcagttaatgtttctttagagcagcgcgtacaggctctgtctgaagcacgtttgggtgacgcttaccgcattaccgaaaaacaagagcgttatgcacaagttaacgttatcaaaactgacgttgttgccgctctgcaagccgaagatgaaacgctgaatgccggtgagatccaggaaattctgggcaacattgagaaaaacgttgtgcgtggccgtgtactggctggcgaaccgcgtatcgatggccgtgaaaaagacatgattcgtggtctggatgtgcgtactggcgtactgccgcgtacccacggttctgcgctgttcacccgtggtgaaacgcaggcgttggtaactgcaacgctgggtactgagcgtgacgcgcaaaatatcgatgaactgaccggtgaacgtaccgatcgcttcctgctgcactacaacttccctccgtactgtgtcggtgaaaccggtatggttggttcgcctaagcgccgtgaaatcggtcacggtcgtctggctaaacgcggcgtgttggctgtaatgccgaaggcgaacgaattcccgtacaccgtgcgtgtggtgtctgaaatcacggaatctaacggttcttcttccatggcgtctgtctgcggtgcttctctggcgctgatggatgcaggtgtgccaattaaatcagccgttgcgggtatcgcgatgggtctggtgaaagaaggcgacaactttgttgtgctgtccgacattctgggtgacgaagaccacctaggcgatatggacttcaaggttgctggtagccgtgaaggtatcaccgcgctgcaaatggatatcaagatcgaagggattactcgtgagatcatgcaggttgctttgaatcaagccaaaggtgcgcgtttgcacattctgggtgtgatggagcaggcaatcagcacgccgcgtggcgatatctccgaatttgcaccacgtattcacaccatcaaaatcagtaccgataagattaaagacgtgatcggtaaaggtggttctgtgattcgtgcgctgacggaagaaacgggcacgactattgaaattgaagacgatggtactgtgaggattgcttcaaccgacggcgaaaaagcgaaacacgcgattcgtcgtattgaagagatcactgccgaaatcgaagttggccgcgtgtatcagggtaaagttacccgcatcgttgattttggtgctttcgttgctatcggcggcggcaaagaaggcttggtgcatatttctcagatcgcagacaagcgcgtagagaaagtgactgactatctgcagatgggtcaggaagtgccggtcaaggttctggaagttgatcgtcagggccgcgtgcgcttaagcatcaaagaagccaatccgcaaactcaggaagcggcagccccgtcttctgaggaataa

SEQ ID NO: 1860 - protein, 706 aa, Erwinia carotovora subsp. atroseptica SCRI1043
MLNPIVRKFQYGQHTVTLETGMMARQATAAVMVSMDDTAVFVTVVGAKNAKPGQSFFPLTVNYQERTYAAGRFPGGFFRREGRPSEGETLTSRLIDRPIRPLFPEGFLNEVQVIATVVSVNPQVSPDIVAMIGASAALSLSGIPFSGPIGVARVGYLNDQYVLNPTTDELKESRLDLVVAGTQGAVLMVESEAELLSEDQMLGAVVFGHEQQQIVIENINSLVAEAGKPKWEWHAPAVNVSLEQRVQALSEARLGDAYRITEKQERYAQVNVIKTDVVAALQAEDETLNAGEIQEILGNIEKNVVRGRVLAGEPRIDGREKDMIRGLDVRTGVLPRTHGSALFTRGETQALVTATLGTERDAQNIDELTGERTDRFLLHYNFPPYCVGETGMVGSPKRREIGHGRLAKRGVLAVMPKANEFPYTVRVVSEITESNGSSSMASVCGASLALMDAGVPIKSAVAGIAMGLVKEGDNFVVLSDILGDEDHLGDMDFKVAGSREGITALQMDIKIEGITREIMQVALNQAKGARLHILGVMEQAISTPRGDISEFAPRIHTIKISTDKIKDVIGKGGSVIRALTEETGTTIEIEDDGTVRIASTDGEKAKHAIRRIEEITAEIEVGRVYQGKVTRIVDFGAFVAIGGGKEGLVHISQIADKRVEKVTDYLQMGQEVPVKVLEVDRQGRVRLSIKEANPQTQEAAAPSSEE

SEQ ID NO: 1861 - DNA, 2202 bp, Propionibacterium acnes KPA171202
  CDS (1)..(2202): transl_table=11
gtggagggacctggactcgagttcaccgaggccattatcgataacggcaagcttggtaagcatgtcgtccgttttgaggcgggactgctggctcagcaggcggatggatccgccgccgtctaccttgatggtgacactatgctgctgtcggccactacggccgctaaaactcctcgcgattccatcgactttttcccgctgacggtcgacgtcgaggagcgcatgtatgccgccgggcgtatccccggctcctttttccgccgtgagggacgcccgtccgagggtgccatcctcgcctgccgcctcattgaccgcccgctgcgtccgtccttcgttaagggactgcgcaacgaggtccaggtcgtcgtcactgtcatggctctcaacccggccgtttactacgacgtcgtcgccatcaatgccgcctcgatgtccacccagcttgctggtctgcccttctccgggccgattggtggcgtccggatggctctcatcgacgaccagtgggtgtgcttcccttccgtcgatcagcgtaaggagtcgaccttcgatatggtcgtcgctggtcgtgtgctagccgacggcgacgttgccatcatgatggttgaggcagagtcgaccccggctacttggggcctcgtgcgcggcgggcgcaccgctccgacggaggaagtcgtcgctaccggtctggaggccgccaagcctttcatcaaggtgctgtgtgacgctcaggtcgctctggctgccaagctgcctaaggagacctacgacttcccggttttcaaggactacgaggatgacgtctacgctgccgtcgaggagaaggctgctgacgagctctcccgcatcgagcagattgctgcgaagttggagcgtcaggaggctgagtccgagctcaaggcccgcatcaaggccgagctcgctgagacgttcccggaacgcgaggctgagatttccggagcgtttaaggccgtcatgaaaaagatcgtccgcaagcgcgtccttgacgagggcgtgcgaatcgacggtcgtggaccgcgtgatatccgctccctgtcggctgaggtcggcattattccgcgggtccacggttcagccctgttccagcgcggcgagacccagattctgggcgtgtcgactctcaacatgctcgatatggagcaaaagcttgacaccctctccccggaaaacacccggcggtacatgcacaactacaacatgccgccgtactccaccggtgaaaccggccgtgttggttccccgaagcgtcgcgagattggtcacggtaacctcgccgagcgggccctcattccggtgttgccgacccgcgaggagttcccctacgccatccgcgaggtttccgaggctattggctctaatggttcgacctcgatggggtcggtttgcgcctccaccctcgccttgctcaatgccggtgtgccgctgcgcgcctcggtcgctggaatcgccatgggcctcatgagcgagactgacgaggacggcaagaccaagtacctggctctcaccgacatcctcggtgctgaggacgccctcggcgacatggactttaaggtggccggtactagcgagttcgtcactgcactgcagctggacaccaagctcgacgggatccctgccgacgtgctcgccggtgctctcaagcaggctaaggaggctcgcaccgcgatccttgaggtgatgaacgaggccatcgattctcccgatgaaatggccccgactgctccgcgcatcattaccgttcacatcccagtggacaagatcggtgaggtcatcggccccaagggcaagatgattaaccagattcaggacgacactggcgccaatatctctattgaggacgatggcacgattttcatcggggctgataacggagattcggccgagtctgcccgttcgatgattaacgcgatcgctaacccacagatgcccgaggtcggtgagcgttacctcggcaccgtcgtcaagacgacgagctttggcgctttcgtctctttgctgcccggcaaggatggtctgttgcacatctccaagatgcgtgaccttaacgacggtaaacgcgtcgaggccgtcgaggacgtgctgtcggtcggtcagaagatccaggtggagatcgccgaggtcgatgaccgtggcaagctctccttggtgctggcttccgacgaagacgacgctgatgagtga

SEQ ID NO: 1862 - protein, 733 aa, Propionibacterium acnes KPA171202
MEGPGLEFTEAIIDNGKLGKHVVRFEAGLLAQQADGSAAVYLDGDTMLLSATTAAKTPRDSIDFFPLTVDVEERMYAAGRIPGSFFRREGRPSEGAILACRLIDRPLRPSFVKGLRNEVQVVVTVMALNPAVYYDVVAINAASMSTQLAGLPFSGPIGGVRMALIDDQWVCFPSVDQRKESTFDMVVAGRVLADGDVAIMMVEAESTPATWGLVRGGRTAPTEEVVATGLEAAKPFIKVLCDAQVALAAKLPKETYDFPVFKDYEDDVYAAVEEKAADELSRIEQIAAKLERQEAESELKARIKAELAETFPEREAEISGAFKAVMKKIVRKRVLDEGVRIDGRGPRDIRSLSAEVGIIPRVHGSALFQRGETQILGVSTLNMLDMEQKLDTLSPENTRRYMHNYNMPPYSTGETGRVGSPKRREIGHGNLAERALIPVLPTREEFPYAIREVSEAIGSNGSTSMGSVCASTLALLNAGVPLRASVAGIAMGLMSETDEDGKTKYLALTDILGAEDALGDMDFKVAGTSEFVTALQLDTKLDGIPADVLAGALKQAKEARTAILEVMNEAIDSPDEMAPTAPRIITVHIPVDKIGEVIGPKGKMINQIQDDTGANISIEDDGTIFIGADNGDSAESARSMINAIANPQMPEVGERYLGTVVKTTSFGAFVSLLPGKDGLLHISKMRDLNDGKRVEAVEDVLSVGQKIQVEIAEVDDRGKLSLVLASDEDDADE

SEQ ID NO: 1863 - DNA, 2133 bp, Streptococcus pyogenes MGAS10394
  CDS (1)..(2133): transl_table=11
atgtcaaaacaaacctttacaacaacatttgcagggaacccccttgttgttgaagttggtcaagtcgctaagcaagccaatggggcaaccgttgttcgttacggagaatcaactgtcctgaccgcagctgtcatgtctaagaaaatggcaacgggtgatttcttccctcttcaagttaattacgaagaaaaaatgtatgccgctggtaaattcccaggaggtttcatgaagcgtgagggacgcccttcaacagatgcgaccttgacagctcgcttgattgaccgtccgattcgtcccatgtttgccgaaggtttccgtaacgaagtacaagtgactaacactgttctttcttatgatgaaaatgctagcgctccaatggcagcgatgtttggctcatctctggccttgtccatctcagatattccatttaatggaccgattgcaggtgttcaagttggctatattgatggcgagttcatcatcaacccagataaagaacaaatggaagcgtcactcttagaattaaccgttgctggtagcaaagaagccatcaatatggttgagtctggtgccaaagaattatcagaagacatcatgcttgaggctcttttaaaaggtcaccaagctattcaagaattaattgccttccaagaacaaatcgtagcagttgttggtaaagaaaaagctgaggttgaactgttacaggttgatgcagacttacaagctgatattgtggctaagtacaatgctcaactgcaaaaagctgttcaagttgaagagaaaaaagcgcgtgaagcagccacagaagccgttaaagaaatggttaaggctgaatacgaagaacgttacgcagaagacgaaaacctagcaaccattatgcgtgacgtggcagaaatccttgaacaaatggagcatgctgaagtgcgccgcctcattacagaggacaagattcgtcctgacggtcgtaagattgacgaaattcgtccgcttgatgctgtggttgacttcttgccaaaggtccatggatcaggtctttttacgcgcggtcaaactcaggcgctatcaattttgaccttggcaccaatgggagaaactcaaatcattgatggtctggccccagagtacaaaaaacgcttcttgcatcactacaatttcccgcaatattcagttggtgaaacgggtcgttacggagctgctggtcgtcgtgaaattggacacggtgccttaggtgaacgcgctcttgaacaagtcttgccaagcttagaagagtttccttatgccattcgtttagttgccgaagttctagaatctaacggttcgtcttctcaggcttctatctgtgctggtacccttgctctgatggctggtggtgtaccaatcaaggctcctgtggcagggattgccatgggtctcatttccgatgggacaaattatactgtcttgaccgatatccaaggtcttgaagaccactttggagatatggactttaaagtggcaggaactcgtgaagggattacagcccttcaaatggatattaagattgcagggattacgcctcaaatcctagaagaagctcttgcacaagctaaaaaagctcgctttgaaatccttgatgtgattgaagcaactatcgctgaaccacgtcctgagttagccccaactgcaccgaaaattgacaccatcaagattgacgtagacaaaatcaaagtggttatcggtaaaggtggcgaaactattgacaagattattgccgaaacgggtgtcaaaattgatattgatgacgaaggaaatgtctctatctactcaagtgaccaagctgccattaaccgcactaaagaaatcatcgctggcctagtacgtgaagctaaggtaggcgaagtttaccatgctaaggttgtccgtattgagaaatttggtgcctttgtcaacctctttgacaagacagatgcacttgttcacatttctgaaattgcttggactagaacgaccaacgtgtcagatgtccttgaagtgggtgaagacgttgatgttaaggtcattaagattgatgagaagggtcgtgtggatgcctcaatgaaagctttgattccacgcccaccaaaaccagagaaaaaagaagaaaaacatgactaa

SEQ ID NO: 1864 - protein, 710 aa, Streptococcus pyogenes MGAS10394
MSKQTFTTTFAGNPLVVEVGQVAKQANGATVVRYGESTVLTAAVMSKKMATGDFFPLQVNYEEKMYAAGKFPGGFMKREGRPSTDATLTARLIDRPIRPMFAEGFRNEVQVTNTVLSYDENASAPMAAMFGSSLALSISDIPFNGPIAGVQVGYIDGEFIINPDKEQMEASLLELTVAGSKEAINMVESGAKELSEDIMLEALLKGHQAIQELIAFQEQIVAVVGKEKAEVELLQVDADLQADIVAKYNAQLQKAVQVEEKKAREAATEAVKEMVKAEYEERYAEDENLATIMRDVAEILEQMEHAEVRRLITEDKIRPDGRKIDEIRPLDAVVDFLPKVHGSGLFTRGQTQALSILTLAPMGETQIIDGLAPEYKKRFLHHYNFPQYSVGETGRYGAAGRREIGHGALGERALEQVLPSLEEFPYAIRLVAEVLESNGSSSQASICAGTLALMAGGVPIKAPVAGIAMGLISDGTNYTVLTDIQGLEDHFGDMDFKVAGTREGITALQMDIKIAGITPQILEEALAQAKKARFEILDVIEATIAEPRPELAPTAPKIDTIKIDVDKIKVVIGKGGETIDKIIAETGVKIDIDDEGNVSIYSSDQAAINRTKEIIAGLVREAKVGEVYHAKVVRIEKFGAFVNLFDKTDALVHISEIAWTRTTNVSDVLEVGEDVDVKVIKIDEKGRVDASMKALIPRPPKPEKKEEKHD

SEQ ID NO: 1865 - DNA, 2286 bp, Leifsonia xyli subsp. xyli str. CTCB07
  CDS (1)..(2286): transl_table=11
ttggaaggtcccgaaatcacattcgccgaagccatgctcgacaacggccgcttcggcgcccgcaccgtccggttcgagaccgggcgcatcgctcagcaggcccagggcgctgtcgccgcctacctcgacgaggaaaccatgctgctgagcgccaccagcgccagcaagcacccgaaggacaacttcgacttcttcccgctgaccgtcgacgttgaggagcgctcctacgccgccggcaagatccccggctcgttcttccgccgtgagggccggccgtcgaccgaagccatcctggtctgccgcctgatcgaccgcccgctgcgcccgtcgttcgtcgacggcctgcgcaacgaggtccagatcgtcgtcaccgtcctcagcatcgctccggacgagttctacgacgcgctggcgatcaacgcggccagcgcctccacgcagatctccggtctgccgttctccggacccatagcgggtgtgcgcctggcgctcatcccgggcaacggcgcgcacgaggaccaatgggtcgcgttcccgaaggcttcgcagctggaggaggccgtgttcgatctcatcgtggtgggccgcgtgctcaccaacgaggacggcaccgagggcgacgtcgcgatcatgatggtcgaggcggaggccaccgagggctcctggaacctcatccagggcggtgcggtgaagccgaacgaagaggtcgtcgcccaggggctggaggcggccaagccgttcatccgccagctcgtcggcgcccaggcggccctcgccaaacagtccgcgaaggcgatcgccgactacccggtgttcctgccctactcgcaggagacctacgacagcgtcgccgccctggcctacgacgaactcgtgaacgtctaccagatcgccgacaaggtcgagcgccagaacgccgacgatgccctcaaggagcgcgtcaaggccgccctcgccgagaaggcgcaggccggcgctctcgacgccgaggcgctcacgcagttctcggcggcgtacaagtccgtctcgaaggtcgtcatgcgcggccgcgtcctccgcgagggcgtccgcatcgacggccgcggcctgaccgacatccgcccgctcgacgccgaggtgcagatcatcccgcgtgtccacggctcggcggtcttccagcgcggcgagacccagatcctgggcgtcaccacgctgaacatgctcaagatggagcagcagatcgactcgctctcgccagtcaccaagaagcgctacctgcaccactacaacttcccgccgtactcgaccggcgagaccggtcgcgtcggctccccgaagcgtcgcgagatcgggcacggcttcctcgccgagcgtgcgctcgttccggtgctgccgagccgcgaggagttcccgtacgcgatccgccaggtctccgaggcgctgagctccaacggctcgacctcgatgggctcggtttgcgcgtccaccctgtcgctgctgaacgccggtgtgccgctgcgcgccccggtcgccggcatcgctatggggctgatctccgatgtcatcgacggtgagacccgctacgcggcgctgaccgacatcctgggcgcggaggacgcgctcggcgacatggacttcaaggtcgccggaaccagcgagttcgtcaccgccatccagctcgacacgaagctcgacggcatcccgtcgtcggtgctcgccagcgccttgaagcaggcgaaggacgcccgcaccacgattctgagcgtgctcgacgccgcgatcgacgccccggacgagatggccccgactgcgccgcgtgtgatctcggttcagatcccggtcgacaagatcggcgagctgatcggcccgaaaggcaagacgatcaacgccatccaggacgagaccggcgccgacatctccatcgatgaggacggcaccgtctacatcggcgctgtcgacggcccttcggccgaggcggcccgcgcccaggtgaacgtgatcgccaaccccaccaacccggaggtcggcgagcagttcctcggaaccgtcgtcaagaacgccgcgttcggtgcgttcgtctcgctcctgccgggcaaggacggcttgctgcacatctccgaggtgcgcaagctggccggcggcaagcgggtggagagcgtcgacgacgtcctcagcatcggtcagaagattctggtggagatcaccaagatcgacgaccgcggcaagctttcgctcgccccggtgcttgccgacgaggccgagactcacggccacgacgccgccagcgagggtcccaccgaaggctga

SEQ ID NO: 1866 - protein, 761 aa, Leifsonia xyli subsp. xyli str. CTCB07
MEGPEITFAEAMLDNGRFGARTVRFETGRIAQQAQGAVAAYLDEETMLLSATSASKHPKDNFDFFPLTVDVEERSYAAGKIPGSFFRREGRPSTEAILVCRLIDRPLRPSFVDGLRNEVQIVVTVLSIAPDEFYDALAINAASASTQISGLPFSGPIAGVRLALIPGNGAHEDQWVAFPKASQLEEAVFDLIVVGRVLTNEDGTEGDVAIMMVEAEATEGSWNLIQGGAVKPNEEVVAQGLEAAKPFIRQLVGAQAALAKQSAKAIADYPVFLPYSQETYDSVAALAYDELVNVYQIADKVERQNADDALKERVKAALAEKAQAGALDAEALTQFSAAYKSVSKVVMRGRVLREGVRIDGRGLTDIRPLDAEVQIIPRVHGSAVFQRGETQILGVTTLNMLKMEQQIDSLSPVTKKRYLHHYNFPPYSTGETGRVGSPKRREIGHGFLAERALVPVLPSREEFPYAIRQVSEALSSNGSTSMGSVCASTLSLLNAGVPLRAPVAGIAMGLISDVIDGETRYAALTDILGAEDALGDMDFKVAGTSEFVTAIQLDTKLDGIPSSVLASALKQAKDARTTILSVLDAAIDAPDEMAPTAPRVISVQIPVDKIGELIGPKGKTINAIQDETGADISIDEDGTVYIGAVDGPSAEAARAQVNVIANPTNPEVGEQFLGTVVKNAAFGAFVSLLPGKDGLLHISEVRKLAGGKRVESVDDVLSIGQKILVEITKIDDRGKLSLAPVLADEAETHGHDAASEGPTEG

SEQ ID NO: 1867 - DNA, 2079 bp, Desulfotalea psychrophila LSv54
  CDS (1)..(2079): transl_table=11
atgtttaataaagttgaagctgatattgatggcaagcttatttccattgaaactggaaaattagccaagcaggcatctggatcgattgtgatcagttgtggtggtaccgtggtacttgtgaccgtggttggcgccaagaccagcaatcccaatgttgactttttgccactcaccattgagtatcaagaaaagttttctgcagtaggtcgtgttcccggtaactattttcgtcgtgagattggtcgtccttctgaccaagaggtgcttacctgtcgaattattgatcgtccccttcgtccgctcttccctgaaggttatagatcagagactcaagttattgccaccgtactttcggcagatcaggtgaactcacctgatgttcttgccttgaccggtgcttcagcggcactttctatttctcatattccatttgcaggtccagtggctggtggtcgtattgcctatattgatggtaaatatgtacttaacccaacattcgcagagcttgaatcttcttccatggatctgatggttgcctgtacccgtaacgctattgttatggttgagggtaaggccgacgaactcagtgaagatgaaattcttggcgctattttctttgcctttgaaaaccttcagccccttatcaatcttcaggatgaactccaacgagctaatggtttagaaaaaatcgttgttgagtcccctgtgattgatgcagaacttaaggcaaaggttgttgagattgctgcggccggtatgcaaaaagtttataccaccgtagacaagttggagcgtggtaaggtttatgatgatctgaagaaagaagttgtggctcagcttgacactgaagagggtctgcgtgcctctgagatcagcagccttctctctgatttcaagaagacttatctgcgtgaaaagactgtaaacacaggcgtgcgtattggtggtcgtgcctgggatgagattcgtgatatctccagtgaaacagaatatttgccaaagacccatggatctgctctttttacccgtggtgagactcaggcacttgttactgcaacccttggtagtgagcgcgataagcaacgtgttgagacccttaacggcgagacttctcgtcgttttatgcttcactataacttccctccatactgtgttggcgaggctcgtttccttcgtggtccttcccgacgtgatattggtcatggaactcttgcaacccgtggcttagaggctgttcttccaagtgaagaagatttcccatatgcaattcgtgtggtttccgagattcttgaatctaacggatcatcgtctatggcttcagtttgtggtggtagtatggccatgatggatgcgggtgtaccccttaagcgtcctgtttccggtattgccatggggcttatcaaggaaggcgagggtgttgctattctctctgatatccttggtgatgaggatcacttgggcgatatggatttcaaagtggttggtacctgtgatggtattaccgctctgcagatggatatcaagattgacggtgttagccgtgatattatgtccaatgctcttgatcaggcaaaacgtggtcgtatgcacatcttggaagagatgagcaagggtattgccgaggctcgtgccgaggtggttgagcatgcgcctaagtatttcattcataagatcagccaagacaagattcgtgacattattggacccggcggtaagatcatcaaagagctttctgcacagtacgatgcaaaaatcgaagttgatgacagcggtttggtaaaaatgtttgttgctaacggtgcacttgccgaggcccttgtggagagagtaaaatctatcactgcagaggtagaggttggagcggtatataccggaaaggttaagaccatcaaagactttggtgcctttgtagagattcttcctggtaccgatggattggttcatatctctgagcttgcccttgagcgagttaaggatgtgaccgatgttgtcaacgagggcgacaccatagaggtgaaggttcttgatgttgataatcgcggccgtatccgtcttagtcgtaaggcattgctcggttaa

SEQ ID NO: 1868 - protein, 692 aa, Desulfotalea psychrophila LSv54
MFNKVEADIDGKLISIETGKLAKQASGSIVISCGGTVVLVTVVGAKTSNPNVDFLPLTIEYQEKFSAVGRVPGNYFRREIGRPSDQEVLTCRIIDRPLRPLFPEGYRSETQVIATVLSADQVNSPDVLALTGASAALSISHIPFAGPVAGGRIAYIDGKYVLNPTFAELESSSMDLMVACTRNAIVMVEGKADELSEDEILGAIFFAFENLQPLINLQDELQRANGLEKIVVESPVIDAELKAKVVEIAAAGMQKVYTTVDKLERGKVYDDLKKEVVAQLDTEEGLRASEISSLLSDFKKTYLREKTVNTGVRIGGRAWDEIRDISSETEYLPKTHGSALFTRGETQALVTATLGSERDKQRVETLNGETSRRFMLHYNFPPYCVGEARFLRGPSRRDIGHGTLATRGLEAVLPSEEDFPYAIRVVSEILESNGSSSMASVCGGSMAMMDAGVPLKRPVSGIAMGLIKEGEGVAILSDILGDEDHLGDMDFKVVGTCDGITALQMDIKIDGVSRDIMSNALDQAKRGRMHILEEMSKGIAEARAEVVEHAPKYFIHKISQDKIRDIIGPGGKIIKELSAQYDAKIEVDDSGLVKMFVANGALAEALVERVKSITAEVEVGAVYTGKVKTIKDFGAFVEILPGTDGLVHISELALERVKDVTDVVNEGDTIEVKVLDVDNRGRIRLSRKALLG

SEQ ID NO: 1869 - DNA, 2238 bp, Rickettsia typhi str. Wilmington
  CDS (1)..(2238): transl_table=11
atgtttaatgaaataactaagagcgtgatatggaataggcaagtgcttgagattagtacaggtaaaatagcaagacaagctgatgcagcagttactgtaaaaatgggtaattcaattttattatgtacgtgtgtagtagcgaacaaagtgaaagatggtataggatttttccctttaacaattaattatagagaaatggcatattctgctggtaagataccaggggggtttttaaaacgtgaagggaaagcatcagataaagaaattttagtatctcgtttaatagatagaccaattagaccattatttcatcaagcttttatacatgaaacgcatataacttgcagtgttctttcatatgatcctgaaactcctgtagatatacttgcaattataggtgcatctgctgcacttagcatatcccctgccccttatctagaaatagttgctgcaagtaaagtaggtttaattaatggtgaatttgttttaaatcctacacttgaattattaaaaacaagtcagcttgatttagtagtagcaggaacaaaagattcagtgatgatggttgaatcagaagcacatttactctctgaagaaaaaatgttagaagcaataaaatttggatttgaaaatttccagacagtcatcaagctaattaaagaattcgcgaaagaagctaaaaagcctaaattcgaaatgcaagatttatatccttcttcattaaagaaagaaattgggaaattatttgcaaaagaaattgaacaagcttttgcgataaaatctaagcaggaacgtaatgctaatttagctttaatacatgaaaaagttcttacacattttgtatgcgatatagaaaataaaaaatataataattatcaaattgaatcaactttaaaagctatttcagcagatatattacgtaataaaattttagaacaaaatatacgtattgatggaagaagcacaacagatataagacaaattgcttgtgaagtaggtttattaccatcagcacacggatcagctttatttactagaggtgaaacgcaaagtttagttagtactacatttgggactagtttagatgagcaaatagttgacagtttagaaggtgaatataaagaacgttttatgctaaattatatattcccgccctattctgtcaatgaagcaatgccaatgaaagctcctagtcgtcgtgaagttggacacggtaaacttgcatggcgtgctattaatccaatattacctaataaagtacaatttccttattctattagagtagttgctgaaactactgagtctaacggttcttcttcgatggcaactgtttgcggtagttctcttgctttaatgtatgctggcgtgccaataaaagcaccggttgctggtattgctatgggtcttattaaggaaggtgataaatttgctatattatcggatattatcggtgatgaagattatttcggtgatatggattttaaagttgcaggcactagtaaagggattactgcattacaaatggatattaaaatatcaggaatagattttaaaataatccaagtagctttagagcaagcacgacacggtcgtttgcatatactggagcaaatgaataaaattatcagtaaaccaaatagtgaactaagtaaaaacgccccttcttctactactataaaaatagacaaagataaaattaaagatattatagggccaggtggtaaaataataaaggaaatttgtgaaactagtaatgcgaaaatagatataagcgatgacggcacggtttctgtttatgctgcagatagggataagataaaagttgcattggataaaattaaagcgattgctgttgagcctgaaattggtgaaatatttaacggtacggtaatgaaagttttagattctggtgcttttattaattatttagggaataaagacggctttgttcatattagtgaaatttcagaaacaagaatagacaaggttagcagtgttttaaaacaaggtgatatagtaaaagttaagctaataggctttgataataaaggtaaagcaaaactaactattaaaaatgcttgcaaagatcactctttaaataatccaaaacaaaaaaataatgttaaagaagattcagaacctgagcagcgacgtgatgctagtaaaaaacgtacttggaatgaagataataatactgaaatgtctgaagtaattacagaacgtaaatattttacataa

SEQ ID NO: 1870 - protein, 745 aa, Rickettsia typhi str. Wilmington
MFNEITKSVIWNRQVLEISTGKIARQADAAVTVKMGNSILLCTCVVANKVKDGIGFFPLTINYREMAYSAGKIPGGFLKREGKASDKEILVSRLIDRPIRPLFHQAFIHETHITCSVLSYDPETPVDILAIIGASAALSISPAPYLEIVAASKVGLINGEFVLNPTLELLKTSQLDLVVAGTKDSVMMVESEAHLLSEEKMLEAIKFGFENFQTVIKLIKEFAKEAKKPKFEMQDLYPSSLKKEIGKLFAKEIEQAFAIKSKQERNANLALIHEKVLTHFVCDIENKKYNNYQIESTLKAISADILRNKILEQNIRIDGRSTTDIRQIACEVGLLPSAHGSALFTRGETQSLVSTTFGTSLDEQIVDSLEGEYKERFMLNYIFPPYSVNEAMPMKAPSRREVGHGKLAWRAINPILPNKVQFPYSIRVVAETTESNGSSSMATVCGSSLALMYAGVPIKAPVAGIAMGLIKEGDKFAILSDIIGDEDYFGDMDFKVAGTSKGITALQMDIKISGIDFKIIQVALEQARHGRLHILEQMNKIISKPNSELSKNAPSSTTIKIDKDKIKDIIGPGGKIIKEICETSNAKIDISDDGTVSVYAADRDKIKVALDKIKAIAVEPEIGEIFNGTVMKVLDSGAFINYLGNKDGFVHISEISETRIDKVSSVLKQGDIVKVKLIGFDNKGKAKLTIKNACKDHSLNNPKQKNNVKEDSEPEQRRDASKKRTWNEDNNTEMSEVITERKYFT

SEQ ID NO: 1871 - DNA, 2115 bp, Yersinia pseudotuberculosis IP 32953
  CDS (1)..(2115): transl_table=11
ttgctgactccgattattcgtaaattccagtatggtcaacataccgtaactatcgaaactggtatgatggctcgccaggccactgcagccgtaatggtaagcatggacgacactgcagtattcgtgactgttgttggtcaaaagaaagccaaaccaggccagagtttcttccctctgacggttaactatcaggagcgtacttacgctgctggccgtatcccaggtagcttcttccgtcgtgaaggccgcccaagtgaaggcgaaacactgacttcacgtctgatcgaccgcccaattcgcccactgttcccagacagcttcctgaacgaagttcaagtgattgcaaccgtcgtttcggttaacccacaaattaacccagacatcgtggcactgattggtgcatctgcggcactgagcttgtcaggcattccatttaacggcccaatcggtgctgctcgcgttggttttatcaacgaccagtatgtgctgaacccaaccactgacgagctgaaagagagccgtttggatctggttgttgccggtactgcgggtgcagtgctgatggttgaatcagaagccgatattctgtccgaagagcaaatgttgggcgcggtcgtcttcggccacgaacaacagcaagttgtgattgaaaatattaacgctttggttgctgaagctggtaaacctaagtgggattggcaggcagagcctgtcaacgaagcactgcatgcgcgtgttgctgaactggccgaagcgcgtctgggcgatgcataccgtatcactgaaaaacaagaacgttatacgcaagttgatgctatcaaagctgacgtgaccgaagcgctattagcgcaggacgacacattagatgccgctgaaattcaggatatcctggccagcgttgagaaaaatgttgtgcgtagccgtgtgctgcgtggtgagccacgtattgatggtcgcgaaaaagacatgatccgtggtttggatgtacgtactggcatcttgccacgtactcatggttctgccttgttcacccgcggtgaaactcaggcgttggttaccgctacgctgggtacggcacgtgacgcacaaaacattgatgagttgatgggtgagcgcacagattcattcctgttacactataatttccctccgtattgtgtaggcgaaacagggatggttggctcacctaagcgtcgtgagattggccatggccgccttgcgaaacgtggtgttctggctgtgatgccaagtgcgagcgagttcccttacactattcgtgtggtttctgaaatcaccgagtctaatggttcttcctcaatggcttctgtttgtggtgcttctctggctctgatggatgcgggcgtgccaattaaagccgctgttgctggtattgcaatgggcctggtaaaagagggtgataactttgtcgttctgtctgacattctgggtgacgaagatcacttgggcgacatggactttaaagtagccggtagccgtgacggtgtgaccgcactgcaaatggacattaaaattgaaggtattacccgcgaaattatgcaggtagctctgaatcaggctaagggtgcacgtttgcacattctgggcgtgatggaacaggctatcagcacaccacgtggcgatatctctgagtttgctccacgtatctacaccatgaagatcaaccctgagaaaatcaaggatgtgatcggtaaaggtggttcggtgatccgtgcgctgactgatgaaactggcaccacgattgaaatcgaagatgatggtaccattaagattgcagcaactgatggcgataaagcaaaacacgctatccgtcgtatcgaagagattactgctgaaatcgaagtgggccgtatttacgcaggtaaagtcacccgtatcgttgatttcggtgcatttgttgctatcggtggcggtaaagaaggtctggtacatatttctcaaatcgctgataagcgtgtagagaaagtgacagactacctgcagatgggtcaagatgtgccagttaaagtaatggaagttgatcgtcagggccgtatccgcctgagcatcaaagaagccactactcctgacgcagaagcaccagaagcagcagagtaa

SEQ ID NO: 1872 - protein, 704 aa, Yersinia pseudotuberculosis IP 32953
MLTPIIRKFQYGQHTVTIETGMMARQATAAVMVSMDDTAVFVTVVGQKKAKPGQSFFPLTVNYQERTYAAGRIPGSFFRREGRPSEGETLTSRLIDRPIRPLFPDSFLNEVQVIATVVSVNPQINPDIVALIGASAALSLSGIPFNGPIGAARVGFINDQYVLNPTTDELKESRLDLVVAGTAGAVLMVESEADILSEEQMLGAVVFGHEQQQVVIENINALVAEAGKPKWDWQAEPVNEALHARVAELAEARLGDAYRITEKQERYTQVDAIKADVTEALLAQDDTLDAAEIQDILASVEKNVVRSRVLRGEPRIDGREKDMIRGLDVRTGILPRTHGSALFTRGETQALVTATLGTARDAQNIDELMGERTDSFLLHYNFPPYCVGETGMVGSPKRREIGHGRLAKRGVLAVMPSASEFPYTIRVVSEITESNGSSSMASVCGASLALMDAGVPIKAAVAGIAMGLVKEGDNFVVLSDILGDEDHLGDMDFKVAGSRDGVTALQMDIKIEGITREIMQVALNQAKGARLHILGVMEQAISTPRGDISEFAPRIYTMKINPEKIKDVIGKGGSVIRALTDETGTTIEIEDDGTIKIAATDGDKAKHAIRRIEEITAEIEVGRIYAGKVTRIVDFGAFVAIGGGKEGLVHISQIADKRVEKVTDYLQMGQDVPVKVMEVDRQGRIRLSIKEATTPDAEAPEAAE

SEQ ID NO: 1873 - DNA, 2148 bp, Borrelia garinii PBi
  CDS (1)..(2148): transl_table=11
ttgaaaataggtagagacgagttagtgtttgagacgggatttatggctaaacaggctaatggatcagttcttgcaacttatggaggatcttcagttcttgcgactgtttgttgttcaaacaatgttagagaagatttagattttgttccactttctgttgaatataatgagaaatattatgcagccggtaagattccaggaggatttattaaaagagaaggaaagccaaaggataaagaaatacttgtttctaggttaatagataggccaatgagacccctttttgataaaagatttggtcgagagattcaagtaattcctacgactttagctacagatcagctcaatcctcctgatattgttggaatgaatgctgcttttacagcagtttttttatcagatattccgtttaatggtccaattgcagctgttaggatggtttatttaaatggtaagtttatagtaaatccttcttttgaagagattcatgattctgatcttgatattgttgttgctggaagtttaaatggaattacaatggtagaaggtggtgctaatgaggttagtgaggatattttactgtcagcaatagacggtgcacatgaatatattaaacaaatttgcaatgctcaaaaagaatttttagatattgtaggggagaaggaaaaacttcctttagcttttgaagaaaaaatatttgaatttaaggaggagcttaaggattttatttatactgatcttaaagaggcttgttttgttaagggaaagcttaatagagataaggctataactttactgcgaaataaatcttatgagcatttttcttctcttgagaaattgactgatagtaatgagtctcttttttataaagcttttgatgattttgagagagagattgttagaaattctattcttaacgataaaattagaacagatggtcgaactcctaatgagataagagatattattgcagaagttgatattttgagtagaacgcatggatctgcgctttttacaagaggagagacacaggctttagcagtaactactcttggcacaagcattgatgagcaaataatggatgatattgatggcgacaagcgtcttaattttatgcttcattacaattttcccccattttcagttggtgagaccggtaggctcatgactggtaggcgtgagattggtcatggtcatttagcccaaagagctttagaatcaatggttcctggaaaaaacgattttccgtatactattagggtagtttctgaaattttggagtctaacggatcttcttcaatggctactgtttgtgctggaagcatgtctttaatgtctgcaggagttcctgttaaaagacaagttgcaggaatagccatggggcttattagtgaaggggataaatatgtagttttgagtgatattcttggagaagaggatcatttaggtgatatggactttaaagtggctggtacaaaaaatggaatcactggatttcaaatggatattaaaattgaaaatgttactaagcatttaatgagggatgctcttgagcaggcaagaataggtaggatgcacatactgtctgttatggatactgtaatttcggattcaagagttggtatatccaagtatgctcccaaaattgttcaattgcaaattgatattgacaagatatctcttgtaataggatctactggaaaaactgttaaggctataacagatgaatttgaagttaaggttcaaattgagcaaaatgggaaaattattcttttcggtgatgatgattttaagatgcaaaaggctaaagaaagaatagagagtattgtaagggaaccaaaggtaggtgaaatttatgaaggaatcgttaaaaagattaatagctttggagcttttattgaacttactcctacaaaggaaggatttttaagtactcgtttgaaatctagagacaataagtatggttctggaagatttgggactggtaatagatatcccagatttggtggtggagataatataagaggtaatgtagggttggttcgccctccaaaattagaagaaggtcagcaaattaaagttaaaataattgatatagataaatttggaaaaattgatcttgaagttgttagagataaagattattaa

SEQ ID NO: 1874 - protein, 715 aa, Borrelia garinii PBi
MKIGRDELVFETGFMAKQANGSVLATYGGSSVLATVCCSNNVREDLDFVPLSVEYNEKYYAAGKIPGGFIKREGKPKDKEILVSRLIDRPMRPLFDKRFGREIQVIPTTLATDQLNPPDIVGMNAAFTAVFLSDIPFNGPIAAVRMVYLNGKFIVNPSFEEIHDSDLDIVVAGSLNGITMVEGGANEVSEDILLSAIDGAHEYIKQICNAQKEFLDIVGEKEKLPLAFEEKIFEFKEELKDFIYTDLKEACFVKGKLNRDKAITLLRNKSYEHFSSLEKLTDSNESLFYKAFDDFEREIVRNSILNDKIRTDGRTPNEIRDIIAEVDILSRTHGSALFTRGETQALAVTTLGTSIDEQIMDDIDGDKRLNFMLHYNFPPFSVGETGRLMTGRREIGHGHLAQRALESMVPGKNDFPYTIRVVSEILESNGSSSMATVCAGSMSLMSAGVPVKRQVAGIAMGLISEGDKYVVLSDILGEEDHLGDMDFKVAGTKNGITGFQMDIKIENVTKHLMRDALEQARIGRMHILSVMDTVISDSRVGISKYAPKIVQLQIDIDKISLVIGSTGKTVKAITDEFEVKVQIEQNGKIILFGDDDFKMQKAKERIESIVREPKVGEIYEGIVKKINSFGAFIELTPTKEGFLSTRLKSRDNKYGSGRFGTGNRYPRFGGGDNIRGNVGLVRPPKLEEGQQIKVKIIDIDKFGKIDLEVVRDKDY

SEQ ID NO: 1875 - DNA, 2289 bp, Symbiobacterium thermophilum IAM 14863
  CDS (1)..(2289): transl_table=11
gtgccgcccggtgcaccagacggtcctgggcacagaaggaggaccaacgtgaccgcatcgttttcgatggagctcgggggccgcacgatgaccctcgagaccggccgcctggccaaacaggccagcgggtcggtattggtgaactacggggacagcgtggtgctctgcaccgcagtaggcagcgcaaccccaagggaaggtgtggacttctttccgctgaccgtagactacgaggagcgcatgtactccgtgggccggattccgggcaactggttccggcgcgagggccggcccacgagcaaggcgatcctctgggcccggctgacggaccggcccatccggccgctgttcccggagggcttccgcaacgacgtgcaggtggtctgcaccgtgctgtcggtggatccggaccatcccgtggagatcatgggcatgatcggcgcctcggcggcgctgaccatctccgacatccccttcgaggggcccatcggcggcgtcatcgtggggctggtggacggccagttcgtcatcaaccccacggctgagcagcaggagcgcagcgagatgcatctggtcgtggccggcaccgagcacgcggtgctcatggtggaggcgggcgccaaggaggtgcccgagcagaccatgctggacgccatcctgttcggccacgaggtcatcaagaacaccatcatcccgacgatcaagcagatgcaggccgaggtgggcaagcccaagcgggaggtggtgctcttcaacccgccccccgagctggagcaggcggtgcgggaggcggccaccgtccggctgcgggaggcggttcgcaatccggacaagctggcccgggaggaggccgtcgccgcggtgggcgaggccgttcaggccgagctggcggagcagttccccgaatcggagaagcacatcgcctacctgctgaagaaggtgctgaaggaggaggtgcgccgggcgatcatcgaggagggcatccggcccgacgggcgcagcctcaccgagatccggcctatcgagtgcgccgtggacctcctgccccggcctcacggctccggcctcttccagcggggccagacccaggtgctctcgatctgcaccctgggcaccctgggcgacatgcagaagctggatgacctcacgctggaagagaccaagcggttcatgcaccactacaacttcccgccctactccgtcggcgagacgcggccgctgcgcggccccggccgccgcgaaatcggccacggcgcgctggccgagcgggctctggagcccgtcattcctcccgaggaggagttcccgtacaccatccgagtcgtgtcggaggtgctggagtccaacggctcgtcctcgatggcctcggtctgcggctccacgctggcgctgatggcggccggcgtgcccatcaaggcgccggtggccggcgtggccatgggtctggtggaggatcccgagaccggccgctacgccgtgctcaccgacatccagggcatcgaggacgccctgggcgacatggacttcaaggtggccggcactaagaagggcgtcaccgccctgcagatggacatgaagatctccggcaccagccgggagatcctggagaaggccttgatgcaggcgcgcgagggccgcatgttcatcatggagaagatgctggcctgcatctccgagccgcgcaaggagctgtcgccttgggcgccgcgcatcatcacgatgaagatctcgccggagaagatccgggacgtcatcggcaagggcggctccaccatcaacaagatcatcgaggagaccaaggtgggccacaccaaggtggagatcgacatccaggacgacggcacgatctacatcgccgccgtgaacctggaggccggcgagcgggcccgccagatgatcgaggcgctggtgaaggatcccgagcccggcatgatctacaccggccgggtcacgcggctcatgcagttcggcgcgttcgtcgagatcctccccggcaaggaagggcttgtgcacatcagcgagctgtcggacaagcgggtagcccgggtcgaggacgtggtcaacatcggcgacgaggtgaccgtgaaggtcacggagatcgaccggctcggccgcatcaacctctccatcaaggacgccatgccgaagcaggcggcctcccagccgtcagggcggccggaggcccgccagccccagccgaagcccggccagggcaagcccggtccggccaaggccggggccggcaggccgggtcccggcaagccgggtccgggccgacacggtcgatag

SEQ ID NO: 1876 - protein, 762 aa, Symbiobacterium thermophilum IAM 14863
MPPGAPDGPGHRRRTNVTASFSMELGGRTMTLETGRLAKQASGSVLVNYGDSVVLCTAVGSATPREGVDFFPLTVDYEERMYSVGRIPGNWFRREGRPTSKAILWARLTDRPIRPLFPEGFRNDVQVVCTVLSVDPDHPVEIMGMIGASAALTISDIPFEGPIGGVIVGLVDGQFVINPTAEQQERSEMHLVVAGTEHAVLMVEAGAKEVPEQTMLDAILFGHEVIKNTIIPTIKQMQAEVGKPKREVVLFNPPPELEQAVREAATVRLREAVRNPDKLAREEAVAAVGEAVQAELAEQFPESEKHIAYLLKKVLKEEVRRAIIEEGIRPDGRSLTEIRPIECAVDLLPRPHGSGLFQRGQTQVLSICTLGTLGDMQKLDDLTLEETKRFMHHYNFPPYSVGETRPLRGPGRREIGHGALAERALEPVIPPEEEFPYTIRVVSEVLESNGSSSMASVCGSTLALMAAGVPIKAPVAGVAMGLVEDPETGRYAVLTDIQGIEDALGDMDFKVAGTKKGVTALQMDMKISGTSREILEKALMQAREGRMFIMEKMLACISEPRKELSPWAPRIITMKISPEKIRDVIGKGGSTINKIIEETKVGHTKVEIDIQDDGTIYIAAVNLEAGERARQMIEALVKDPEPGMIYTGRVTRLMQFGAFVEILPGKEGLVHISELSDKRVARVEDVVNIGDEVTVKVTEIDRLGRINLSIKDAMPKQAASQPSGRPEARQPQPKPGQGKPGPAKAGAGRPGPGKPGPGRHGR

SEQ ID NO: 1877 - DNA, 2118 bp, Bacillus licheniformis ATCC 14580
  CDS (1)..(2118): transl_table=11
atgggacaagagaaacatgtcttttccatagattgggccggccgcaagctcacagtagaaaccggccagcttgcaaaacaagcaaacggagctgtcatggtgcgttatggagacactgcagtgctcagcaccgcaacggcttcaaaagaacctaaaaccgtagactttttcccgttaaccgtaaattacgaagaaagactttacgccgtcggaaagattccgggcgggtttattaaaagagagggaagaccgagcgaaaaagcgattctcgccagccggttaatcgacaggccgatccgcccgctgttcgcagacggcttccggaatgaagttcaagtcgtcagcatcgtcatgagcgttgaccaggattgttcgtcagaaatggcggcaatgtttggatcatctcttgcgctgtgcgtatccgacatcccgtttgaagggccgatcgccggagtgacggtaggccgggttgacaacaaattcatcatcaatccgacacttgaacagcttgaaaaaagcgacattcatctcgtcgtagcgggaacgaaggacgcgatcaacatggttgaagcgggagcagacgaagttccggaagagatcatgcttgaagcgatcatgttcggtcacgaggagatcaaacggctgattgccttccaggaggaaatcgtcgccgctgtcgggaaagaaaaatcagaaatcaccctgtatgagatcgattccgatctgaaagaaaaagtgcggggaatggccgaatcgaacctcttaaaagccattcaggttcatgaaaagcatgcgcgcgaggacgcgatcagcgaagtgaaaaacgaggttttggccaagtttgaagaagaggaacacgatgaagaaacgctgaaacaagtgaaagacattttgtcccagcttgttaaaaatgaagtgcgccgtctgattacggaggaaaaagttcgtcctgacggcagggctgtcgatgagatccgcccgctttcttcagaagtcggactgcttccgagaacacacggttcaggactttttacaaggggacagactcaggcgctcagcatttgtacgctcggtgcgcttggcgatgtgcagattttagacggtctcggcgtcgaagaatccaaacgctttatgcaccattacaacttcccgcagttcagcgtcggggaaacagggccgatgcgcgggccgggacgccgcgaaatcgggcacggagccctcggggaacgagcgcttgagccgattgttccgtctgaaaaagacttcccgtacaccatccgcctcgtctctgaagtgcttgaatcaaacggttccacttcccaggcgagcatttgtgcaagcacgctagcgatgatggatgcaggggtgccgattaaagccccggttgccggaatcgcgatgggtcttgtcaaatcaggtgacaactataccgtcttaaccgatattcaaggtatggaagaccatctcggggatatggactttaaagtggcgggaacgtccaaaggcgtcacagctctgcaaatggatattaagatcgaaggcttatcgagagagattttggaagaggctcttcagcaggcgaaaaaaggcagaatggagatccttgaaagcatgctgagcacattggctgaatcaagaaaagagctttctccttatgcgccgaaaatcttgacgatgtcgatcaatccggataaaatccgcgacgtcatcggaccaagcggaaaacaaatcaataagatcattgaagatacaggcgttaaaatcgatattgaacaagacggcacaatcttcatttcttctaccgatgaaagcatgaaccaaaaagcgaagaaaatcatcgaagaccttgtcagagaagttgaagtcggacagctttacttaggtaaagtgaagcggattgaaaaattcggagctttcgttgaactgttcagcggaaaagacggtcttgtccatatttcagagcttgcgctcgaacgggtaggaaaagtcgaagatgtcgtcaaaatcggcgacgagctccttgtaaaggttactgaaatcgataaacaaggacgcgtcaacttatcaagaaaagctgtactgcgtgaacagaaggaaaaagaagaacaaaaatcgtaa

SEQ ID NO: 1878 - protein, 705 aa, Bacillus licheniformis ATCC 14580
MGQEKHVFSIDWAGRKLTVETGQLAKQANGAVMVRYGDTAVLSTATASKEPKTVDFFPLTVNYEERLYAVGKIPGGFIKREGRPSEKAILASRLIDRPIRPLFADGFRNEVQVVSIVMSVDQDCSSEMAAMFGSSLALCVSDIPFEGPIAGVTVGRVDNKFIINPTLEQLEKSDIHLVVAGTKDAINMVEAGADEVPEEIMLEAIMFGHEEIKRLIAFQEEIVAAVGKEKSEITLYEIDSDLKEKVRGMAESNLLKAIQVHEKHAREDAISEVKNEVLAKFEEEEHDEETLKQVKDILSQLVKNEVRRLITEEKVRPDGRAVDEIRPLSSEVGLLPRTHGSGLFTRGQTQALSICTLGALGDVQILDGLGVEESKRFMHHYNFPQFSVGETGPMRGPGRREIGHGALGERALEPIVPSEKDFPYTIRLVSEVLESNGSTSQASICASTLAMMDAGVPIKAPVAGIAMGLVKSGDNYTVLTDIQGMEDHLGDMDFKVAGTSKGVTALQMDIKIEGLSREILEEALQQAKKGRMEILESMLSTLAESRKELSPYAPKILTMSINPDKIRDVIGPSGKQINKIIEDTGVKIDIEQDGTIFISSTDESMNQKAKKIIEDLVREVEVGQLYLGKVKRIEKFGAFVELFSGKDGLVHISELALERVGKVEDVVKIGDELLVKVTEIDKQGRVNLSRKAVLREQKEKEEQKS

SEQ ID NO: 1879 - DNA, 2115 bp, Mannheimia succiniciproducens MBEL55E
  CDS (1)..(2115): transl_table=11
gtgaatccaattgtaaaacaatttaaatacggtcaacacaccgtaacattggaaaccggcgctattgcccgtcaggcaacggcagccgtaatggcaagtatggacgatactacggtatttgtttccgtggtggcaaagaaagatgtaaaagaaggtcaggatttcttcccgttaaccgtagattatcaagaacgtacttatgcggcaggtaaaatcccgggtggtttctttaaacgtgaaggtcgtccttccgaaggcgaaacgttaatcgcgcgtttaatcgaccgtccgattcgtccgttgttccctgaaggtttcttaaacgaaattcaaatcattgcgacagtagtgtctgtcaatccgcagatcagccctgatttagtggcgatgatcggcgcttcagcggcactttcattatccggcgtgcctttcaacggtcctatcggtgcggcacgtgtcggtttcattaacgatcaattcgtattaaacccaaccatggcggaacaaaaacaaagccgtttggatttagtggttgcgggtacggacaaagctgtgttaatggtggaatccgaagcggatattttaactgaagagcaaatgttggctgcggtggtgttcggtcatcaacagcaacaggttgtggttgaagccattaaagaatttgtggcggaagctggtaaacctcgctgggactgggttgctccggaaccggattcagcattaatcagcaaagtgaaagcaatcgccgaaaaccgtttgggtgacgcataccgcatcactgaaaaacaagtgcgttacgaacaaatcgacgccattaaagcggatgtgattgcacaaatcacagcggaagatgaagaagttagcgaaggcaaaatcgttgatattttcaccgcacttgaaagccaaatcgtgcgcggacgtatcattgccggcgaaccgcgtattgacggtcgtaccgttgacacggtgcgcgccttagacatttgcaccggcgtgttgccgcgcacccacggttcggcaatttttacccgtggtgaaacccaatcattagcggtggttaccttaggtacggaacgcgatgcgcaaattcttgatgaattaacgggcgaacgccaggatactttcttattccactacaatttccctccgtattctgtaggtgaaacgggtcgtgtcggttcgccgaaacgtcgtgagatcggtcacggtcgtttagctaaacgtggtgtggcagctgtaatgccaagcatcagcgaattcccgtatgtggttcgcgtagtgtctgaaatcactgaatcaaacggttcttcatcaatggcgtctgtttgcggcgcatcattggcgttgatggatgccggtgtgccggttaaatccgccgtagcgggtatcgccatgggcttggtgaaagaagacgataaatttgtggtgctttccgacattttaggtgacgaagaccatttaggcgatatggacttcaaagtagcgggtacccgtaccggtgtgactgcacttcaaatggatattaaaatcgaaggtattacgccggaaattatgcaaattgctttgaaccaggcgaaaagtgcgcgtatgcacattttaggtgtaatggaacaagcgatttcggcgccacgtgcggaaatttccgaattcgcaccgcgtatttacaccatgaaaattgatccgaagaaaatcaaagacgtgattggtaaaggtggtgcgacgattcgtgcgttaaccgaagaaaccggtacctctatcgatattgatgatgacggtacggtgaaaatcgccgctgttgacggcaatgcggtgaaaaccgtgatggcgcggattgaagacattaccgccgaagtggaagcgggcgcggtttacaccggtaaagtgacccgtcttgcggatttcggcgctttcgtggctatcgttggcaacaaagaaggattagttcatatttctcaaattgcggaagaacgcgttgagaaagtaagtgattatcttcaagtcggtcaagaagttcaggttaaagtggtggaaatcgatcgtcagggtcgtatccgtttaactatgagagaccttggttcaaaagaagaatctcaagaactatctgttgaacaatag

SEQ ID NO: 1880 - protein, 704 aa, Mannheimia succiniciproducens MBEL55E
MNPIVKQFKYGQHTVTLETGAIARQATAAVMASMDDTTVFVSVVAKKDVKEGQDFFPLTVDYQERTYAAGKIPGGFFKREGRPSEGETLIARLIDRPIRPLFPEGFLNEIQIIATVVSVNPQISPDLVAMIGASAALSLSGVPFNGPIGAARVGFINDQFVLNPTMAEQKQSRLDLVVAGTDKAVLMVESEADILTEEQMLAAVVFGHQQQQVVVEAIKEFVAEAGKPRWDWVAPEPDSALISKVKAIAENRLGDAYRITEKQVRYEQIDAIKADVIAQITAEDEEVSEGKIVDIFTALESQIVRGRIIAGEPRIDGRTVDTVRALDICTGVLPRTHGSAIFTRGETQSLAVVTLGTERDAQILDELTGERQDTFLFHYNFPPYSVGETGRVGSPKRREIGHGRLAKRGVAAVMPSISEFPYVVRVVSEITESNGSSSMASVCGASLALMDAGVPVKSAVAGIAMGLVKEDDKFVVLSDILGDEDHLGDMDFKVAGTRTGVTALQMDIKIEGITPEIMQIALNQAKSARMHILGVMEQAISAPRAEISEFAPRIYTMKIDPKKIKDVIGKGGATIRALTEETGTSIDIDDDGTVKIAAVDGNAVKTVMARIEDITAEVEAGAVYTGKVTRLADFGAFVAIVGNKEGLVHISQIAEERVEKVSDYLQVGQEVQVKVVEIDRQGRIRLTMRDLGSKEESQELSVEQ

SEQ ID NO: 1881 - DNA, 2190 bp, Legionella pneumophila subsp. pneumophila str. Philadelphia 1
  CDS (1)..(2190): transl_table=11
gtggcaaaaattacaaaagaaatagtattcggtaaccataaattaatcttggaaacaggtgaagtagcacgacaggctgatggtgccgtaatggcaagtatgaatggtacacaagtgctagtgactgtagtttggaaaaaggatggtggtgaaagtaatgattttttcccattaacagtgaattatcaagaaaagttctatgccataggtaaaatccctggtggctttaacaaacgtgaaggacggccatctgataatgaaacattaatttctcggttaatagatagaccgatccggccattattcccggataatttttttaacgaagtacagataattgctactgtactgtccttaaatcccgaggtatctcctgatattatcgctatgattggagcctccgcagcgctttcaatttctggcgtgccatttaatggccctataggtgccgctcgagtaggctataaagatggcgtttatctgctcaatccaagtagaaaagaacaagaagagtctaagcttgatttggttattgcgggaacaaaagatgccattttgatggtggaatcagaagcgcaggaattaagtgaagacatcatgcgtggtgctatgttatatggccatgaaatgatgaaaaatgtcataaaatcaatagaagaacttgctagagacgtgggtaagagtaaacctgagtggaaagcaccagaaattgatacagtactaaaagctagaatcaatgacgtagctaggaatgaagttgaagccgcttatcttattaaggacaagcaacaacggtatcagcgattagacgagttaagagagcaaactatttctgctttactggctgaaaatgatgagttaaatgcagatgttattgccaatatgtttggtgagctagaacgttctatagtacgtaatcgtattcttgacggcgagcctcgcatcgatggtcgtgatcacagaacagttaggcctatttctattcgtaccaaattcttggaaagaactcatggttcctgtttgtttaccagaggagaaactcaagctattgttgttgccactttgggtaatgaacgtgatgcacagatattagacggaattagtggcgaaagcagagatcgatttatgcttcattataatttccctccttattctgtcggcgaaacagggcaagtgggcagtcctaaacggcgtgaaattgggcatggccgtttagccaagcgtgctttaatggctgtactgcctgatgctaatgagtttccttatgtgctacgtattgtatctgagattacggaatccaatggctccagttctatggctactgtttgtggaacaagtctggcattgatggatgccggggtacctttaaaagcaccagtcgctggtgtggccatgggcttaatcaaggaaggtgatcgttatgctgtattaacagacatattgggtgatgaggatcatttaggtgatatggactttaaagtggccggtacggaaaaagggattactgctttgcagatggatatcaaaatttccgggattaccaatgaaattatggaacaggctttggagcaagcattggaaggtcgtacccatattcttggtgtcatgaataatgctcttgccgagcatagaaccgagttatctcagcacgctccaagaatcacaaccatgaaagtcgctgaagataaaatccgcacaattattggcaaaggtggggcaacgattaaagggcttattgaaagtaccggcgtatctatagatattgatgactcaggggttgtccaattattttctccggataagatggctttggaagaggcgcaaaaacaaattaaagctttaattgctgaaattgaagtgggtcagacttatcaagggaaagtaagcaagatagttgactttggagcttttatcaatttactgcctggtaaagatggcttactgcatatttcacaaatatgtgccgacagaacacaaaaggtagaagaggtattgcaggaaggtcaggaaattgaggtctttgttgctgggatagataagcaagggcgagtcaaactggagtggaaggataagccgcaagctgaagccaaagaggtcgaagacgccccggtatctgctacgtttcttacaatggaagagcaatctgaagaaattaattcaggcaacaaaatctctgaagaagaggaataa

SEQ ID NO: 1882 - protein, 729 aa, Legionella pneumophila subsp. pneumophila str. Philadelphia 1
MAKITKEIVFGNHKLILETGEVARQADGAVMASMNGTQVLVTVVWKKDGGESNDFFPLTVNYQEKFYAIGKIPGGFNKREGRPSDNETLISRLIDRPIRPLFPDNFFNEVQIIATVLSLNPEVSPDIIAMIGASAALSISGVPFNGPIGAARVGYKDGVYLLNPSRKEQEESKLDLVIAGTKDAILMVESEAQELSEDIMRGAMLYGHEMMKNVIKSIEELARDVGKSKPEWKAPEIDTVLKARINDVARNEVEAAYLIKDKQQRYQRLDELREQTISALLAENDELNADVIANMFGELERSIVRNRILDGEPRIDGRDHRTVRPISIRTKFLERTHGSCLFTRGETQAIVVATLGNERDAQILDGISGESRDRFMLHYNFPPYSVGETGQVGSPKRREIGHGRLAKRALMAVLPDANEFPYVLRIVSEITESNGSSSMATVCGTSLALMDAGVPLKAPVAGVAMGLIKEGDRYAVLTDILGDEDHLGDMDFKVAGTEKGITALQMDIKISGITNEIMEQALEQALEGRTHILGVMNNALAEHRTELSQHAPRITTMKVAEDKIRTIIGKGGATIKGLIESTGVSIDIDDSGVVQLFSPDKMALEEAQKQIKALIAEIEVGQTYQGKVSKIVDFGAFINLLPGKDGLLHISQICADRTQKVEEVLQEGQEIEVFVAGIDKQGRVKLEWKDKPQAEAKEVEDAPVSATFLTMEEQSEEINSGNKISEEEE

SEQ ID NO: 1883 - DNA, 2142 bp, Burkholderia mallei ATCC 23344
  CDS (1)..(2142): transl_table=11
atgtctctgttcaataaaatcgtgaaggaattccagtggggccagcagaaggtgcgcctcgaaaccggtgaaatcgcgcgccaggcaagcggcgccgtgatcgtcgacatcgaggacaccgtcgtgctcgcgaccgtcgtcggcgcgaagtcggcgaagccgggccaggatttcttcccgctcaccgtcgactacatcgagaagacctactcggccggcaagatcccgggcggcttcttccgccgcgaaggccgtccgtcggagcacgaaacgctgacgtcgcgcctcatcgaccgcccgctgcgcccgctcttccccgaaggcttctataacgaagtgcaggtcgtgatccacgtgctgtccgtgaacccggagattccggcggacatcccggcactcatcggcgcatcggctgcgctcgccgtgtccggtctgccgttcaacggcccggtcggcgccgcgcgcgtcgcgtacgtgaacaacgaatatgtgctgaatccgacgcgtgagcagatcaaggcgtcgcgcctcgatctcgtcgtcgcgggcacggagcgtgcggtgctgatggtcgagtcggaagccgaccaactgccggaggacgtgatgctcggcgcggtggtgttcggccacgagcagatgcaaacggcgatcgacgcgatccacgagctcgtgcgcgaaggcggcaagcccgagtgggactggcagccggcgccgaaggacgaggcgctgaacgcgcgcgtgaccgaactcgcgcagccggagctgctcgccgcctaccagatccgcgacaagcaggcgcgcttgacgaagctgaaggaagtgtacgcggcgacgtcggcgaagctggaggaagaagcggtggcggccggcacggtcgcggcggacaaggcgaccgtcggcaacatcctgttcgacctcgaggcgaagatcgttcgcggccagatcctgaacggcgagccgcgcatcgacggccgcgacacgcgcacggtgcgcccgatcgaaatccgcacgggcgtgctgccgcgcacccacggctcggcgctgttcacgcgcggcgagacgcaggcgctcgtcgtcgcgacgctcggcacgaagggtgacgaacagatcatcgacgcgctcgaaggcgaataccgcgagcgcttcatgctccactacaacatgcccccgttcgcgaccggcgaaacgggccgcgtcggctcgccgaagcgccgtgagatcggccacggccggctcgcgaagcgcgcgctcgtcgcgtgcctgccgagcgccgacgaattcggctactcgattcgcgtcgtgtcggaaatcaccgaatcgaacggctcgtcgtcgatggcgtcggtgtgcggcggctgtctcgcgctgatggacgccggcgtgccgatgaaggcgcacgtcgcgggcatcgcgatgggcctgatcctcgagggcaacaagttcgcggtgctgaccgatatcctcggcgacgaggaccacctcggcgacatggacttcaaggtggccggcacggcggacggcgtgaccgcgctgcagatggacatcaagatccagggcatcacgaaggaaatcatgcaggtcgcgctcgcgcaggcgaaggaaggccgcatgcacatcctcggcaagatgaaggacgcggtcgcgggcgcgaacacgcaactgtccgaattcgcgccgcgcatgatcacgatcaagatcaacccggaaaagattcgcgacgtgatcggcaagggcggctcggtgatccgcgcgctgaccgaagaaaccggcacgacgatcgacatctcggatgacggcgtcgtgacgatcgcgagcacgaacagcgaagggatggccgaggcgaagaagcgcatcgagaacatcacggccgagatcgaagtcggccacgtgtacgaaggcacggtgctcaagctgctcgatttcggcgcgatcgtgaacctgctgccgggcaaggacggcctgctgcacatctcggaaatcgtcaacgagcgcgtgaaggacatcaacgactacctgaaggaaggccagcaggtgaaggtcaaggtgatccagacggacgagaaggggcgcgtgcgtctgtcggcgaaggcgctgctgaacgaggcggccgcccaggcggatacgccgccgcagcagtaa

SEQ ID NO: 1884 - protein, 713 aa, Burkholderia mallei ATCC 23344
MSLFNKIVKEFQWGQQKVRLETGEIARQASGAVIVDIEDTVVLATVVGAKSAKPGQDFFPLTVDYIEKTYSAGKIPGGFFRREGRPSEHETLTSRLIDRPLRPLFPEGFYNEVQVVIHVLSVNPEIPADIPALIGASAALAVSGLPFNGPVGAARVAYVNNEYVLNPTREQIKASRLDLVVAGTERAVLMVESEADQLPEDVMLGAVVFGHEQMQTAIDAIHELVREGGKPEWDWQPAPKDEALNARVTELAQPELLAAYQIRDKQARLTKLKEVYAATSAKLEEEAVAAGTVAADKATVGNILFDLEAKIVRGQILNGEPRIDGRDTRTVRPIEIRTGVLPRTHGSALFTRGETQALVVATLGTKGDEQIIDALEGEYRERFMLHYNMPPFATGETGRVGSPKRREIGHGRLAKRALVACLPSADEFGYSIRVVSEITESNGSSSMASVCGGCLALMDAGVPMKAHVAGIAMGLILEGNKFAVLTDILGDEDHLGDMDFKVAGTADGVTALQMDIKIQGITKEIMQVALAQAKEGRMHILGKMKDAVAGANTQLSEFAPRMITIKINPEKIRDVIGKGGSVIRALTEETGTTIDISDDGVVTIASTNSEGMAEAKKRIENITAEIEVGHVYEGTVLKLLDFGAIVNLLPGKDGLLHISEIVNERVKDINDYLKEGQQVKVKVIQTDEKGRVRLSAKALLNEAAAQADTPPQQ

SEQ ID NO: 1885 - DNA, 2142 bp, Burkholderia pseudomallei K96243
  CDS (1)..(2142): transl_table=11
atgtctctgttcaataaaatcgtgaaggaattccagtggggccagcacaaggtgcgcctcgaaaccggtgaaatcgcgcgccaggcaagcggcgccgtgatcgtcgacatcgaggacaccgtcgtgctcgcgaccgtcgtcggcgcgaagtcggcgaagccgggccaggatttcttcccgctcaccgtcgactacatcgagaagacctactcggccggcaagatcccgggcggcttcttccgccgcgaaggccgtccgtcggagcacgaaacgctgacgtcgcgcctcatcgaccgcccgctgcgcccgctcttccccgaaggcttctataacgaagtgcaggtcgtgatccacgtgctgtccgtgaatccggagattccggcggacatcccggcactcatcggcgcatcggctgcgctcgccgtgtccggtctgccgttcaacggcccggtcggcgccgcgcgcgtcgcgtacgtgaacaacgaatatgtgctgaatccgacgcgtgagcagatcaaggcgtcgcgcctcgatctcgtcgtcgcgggcacggagcgtgcagtgctgatggtcgagtcggaagccgaccaactgccggaggacgtgatgctcggcgcggtggtgttcggccacgagcagatgcaaacggcgatcgacgcgatccacgagctcgtgcgcgaaggcggcaagcccgagtgggactggcagccggcgccgaaggacgaggcgctgaacgcgcgcgtgaccgaactcgcgcagccggagttgctcgccgcctaccagatccgcgacaagcaggcgcgctcgacgaagctgaaggaagtgtacgcggcgacgtcggcgaagctggaggaagaagcggtggcggccggcacggtcgcggcggacaaggcgaccgtcggcaacatcctgttcgacctcgaggcgaagatcgttcgcggccagatcctgaacggcgagccgcgcatcgacggccgcgacacgcgcacggtgcgcccgatcgaaatccgcacgggcgtgctgccgcgcacccacggctcggcgctgttcacgcgcggcgagacgcaggcgctcgtcgtcgcgacgctcggcacgaagggtgacgaacagatcatcgacgcgctcgaaggcgaataccgcgagcgcttcatgctccactacaacatgcccccgttcgcgaccggcgaaacgggccgcgtcggctcgccgaagcgccgtgagatcggccacggccggctcgcgaagcgcgcgctcgtcgcgtgcctgccgagcgccgacgaattcggctactcgattcgcgtcgtgtcggaaatcaccgaatcgaacggctcgtcgtcgatggcgtcggtgtgcggcggctgtctcgcgctgatggacgccggcgtgccgatgaaggcgcacgtcgcgggcatcgcgatgggcctgatcctcgagggcaacaagttcgcggtgctgaccgatatcctcggcgacgaggaccacctcggcgacatggacttcaaggtggccggcacggcggacggcgtgaccgcgctgcagatggacatcaagatccagggcatcacgaaggaaatcatgcaggtcgcgctcgcgcaggcgaaggaaggccgcatgcacatcctcggcaagatgaaggacgcggtcgcgggcgcgaacacgcaactgtccgaattcgcgccgcgcatgatcacgatcaagatcaacccggaaaagattcgcgacgtgatcggcaagggcggctcggtgatccgcgcgctgaccgaagaaaccggcacgacgatcgacatctcggatgacggcgtcgtgacgatcgcgagcacgaacagcgaagggatggccgaggcgaagaagcgcatcgagaacatcacggccgagatcgaagtcggccacgtgtacgaaggcacggtgctcaagctgctcgatttcggcgcgatcgtgaacctgctgccgggcaaggacggcctgctgcacatctcggaaatcgtcaacgagcgcgtgaaggacatcaacgactacctgaaggaaggccagcaggtgaaggtcaaggtgatccagacggacgagaaggggcgcgtgcgtctgtcggcgaaggcgctgctgaacgaggcggccgcccaggcggatacgccgccgcagcagtaa

SEQ ID NO: 1886 - protein, 713 aa, Burkholderia pseudomallei K96243
MSLFNKIVKEFQWGQHKVRLETGEIARQASGAVIVDIEDTVVLATVVGAKSAKPGQDFFPLTVDYIEKTYSAGKIPGGFFRREGRPSEHETLTSRLIDRPLRPLFPEGFYNEVQVVIHVLSVNPEIPADIPALIGASAALAVSGLPFNGPVGAARVAYVNNEYVLNPTREQIKASRLDLVVAGTERAVLMVESEADQLPEDVMLGAVVFGHEQMQTAIDAIHELVREGGKPEWDWQPAPKDEALNARVTELAQPELLAAYQIRDKQARSTKLKEVYAATSAKLEEEAVAAGTVAADKATVGNILFDLEAKIVRGQILNGEPRIDGRDTRTVRPIEIRTGVLPRTHGSALFTRGETQALVVATLGTKGDEQIIDALEGEYRERFMLHYNMPPFATGETGRVGSPKRREIGHGRLAKRALVACLPSADEFGYSIRVVSEITESNGSSSMASVCGGCLALMDAGVPMKAHVAGIAMGLILEGNKFAVLTDILGDEDHLGDMDFKVAGTADGVTALQMDIKIQGITKEIMQVALAQAKEGRMHILGKMKDAVAGANTQLSEFAPRMITIKINPEKIRDVIGKGGSVIRALTEETGTTIDISDDGVVTIASTNSEGMAEAKKRIENITAEIEVGHVYEGTVLKLLDFGAIVNLLPGKDGLLHISEIVNERVKDINDYLKEGQQVKVKVIQTDEKGRVRLSAKALLNEAAAQADTPPQQ

SEQ ID NO: 1887 - DNA, 2076 bp, Methylococcus capsulatus str. Bath
  CDS (1)..(2076): transl_table=11
gtgaacccgatccggaagcaatttcagtacggcgctcataccgtttcgttcgaaaccggcgagatcgcccgtcaggccgatgccgcggtcatggtggacatggcgggcaccgtggtgctggtcaccgtggtggggcgcaaggatgcctccccgcacggcgatttctttccccttaccgtcaattaccaggaaaaggcctacgctgccggacgcattccgggcggattcttcaagcgggagggacgtcccagcgaaaaagaaacgctgactgcgcgactgatcgaccggcccatccgaccgctgttcccggacggcttcacccacgaagtccaggtcgttgccaccgtcatgtcgctgaatccggaagtcgaccccgatatcccgtcgatgctgggcgcgtcagcggcactgacgctatcgggcctgcctttcaaaggtccgatcggtgccgcccgggtgggattcgtgaacggcgcctacgtcctgaatccggacggctcggtcgtggagggatcggagctcgacctggtggtcgcgggaaccgccaacgcggtgctcatggtcgaatcggaggcgaaaatcctgcccgaggaagtgatgctgggggcggtcgtgttcggccatgaacagatgcagacggccatccgtgccatcaacgagctggcggaggaagtcggcgtgaccccctggccgtgggaaccgtcggccgtcgacgccgccctggtcgccgcggtcgacgaactggcccgggcgggactgggcgaaggctacaacatcgccgacaagcagctccgtcagcagaagctcaaagaagtccggaaggccgtgatcgacgccctcaccgccgaaggcgctcacgacgaaaacgcggtcaagcgacagatcgagaaactggaagaggaaatcgtccggagcaacatcctccaccacggaaaacggatcgacgggcgtgacctttccacggtgcgccccatcacgatccgtaccggcgtcctgccccgtacccacggctccgccctgttcacccgcggcgaaactcaggcgctggtggtcgcaacgctgggcacgggccgcgatgcgcagctcatcgacgccctggaaggcgagtacaaagagaatttcatgctgcactacaactttcccccctattgtgtgggagagaccggcgccatcggctcgcccaaaaggcgcgaaatcggccacgggcgcctagccaagcgcggcgtgcaggcgatcatgccgacgatggacgaattcccctatgtcatccgcatcgtctcggagatcaccgaatccaatggctccagctccatggcatcggtctgcggcagcagcctggcgttgatggatgcgggggtgccgaccaaaggcgccgtggccggtatcgccatggggttgatcctcgaaggcgaagaattcgccgtcctgtcggacatcatgggtgacgaggaccacctgggcgacatggacttcaaggtcgccggcacccgcgacggtgtcaccgcgctgcagatggacatcaagatcgacggcatcacgccggaaatcatgcgccaagcgttgcatcaggcccgcgagggacggatgcacatcctggacaagatggcgcaggcgctgccggccccgcgcagcgaaatgtccgattacgcgccgcgcatcaccagcttcaccatcgaccccagcaagatccgggaagtgatcggcaaaggcggtgcgaccatccgcgccatcaccgaagaaaccggcaccagcatcgacatcagcgacgatggtgtcgtcaagatcgcctcggtcgacaaacaggctggtctggaggcccgccgccgtatcgaggacatcacggcggaggtcgaggtcggtaaagtctacgagggcaaggtcgcgaggctgatggacttcggcgccttcgtcaccatcctgcccggtaaggatggcttggtgcacatctcccagatctccgacgagcacgtcgagaaggtcagcgacaagctggcggagggggacatggtcaaagtcaaggtgctggagatcgaccgccagggccgggtgcgcttgagcatgaaggccgtcgagtaa

SEQ ID NO: 1888 - protein, 691 aa, Methylococcus capsulatus str. Bath
MNPIRKQFQYGAHTVSFETGEIARQADAAVMVDMAGTVVLVTVVGRKDASPHGDFFPLTVNYQEKAYAAGRIPGGFFKREGRPSEKETLTARLIDRPIRPLFPDGFTHEVQVVATVMSLNPEVDPDIPSMLGASAALTLSGLPFKGPIGAARVGFVNGAYVLNPDGSVVEGSELDLVVAGTANAVLMVESEAKILPEEVMLGAVVFGHEQMQTAIRAINELAEEVGVTPWPWEPSAVDAALVAAVDELARAGLGEGYNIADKQLRQQKLKEVRKAVIDALTAEGAHDENAVKRQIEKLEEEIVRSNILHHGKRIDGRDLSTVRPITIRTGVLPRTHGSALFTRGETQALVVATLGTGRDAQLIDALEGEYKENFMLHYNFPPYCVGETGAIGSPKRREIGHGRLAKRGVQAIMPTMDEFPYVIRIVSEITESNGSSSMASVCGSSLALMDAGVPTKGAVAGIAMGLILEGEEFAVLSDIMGDEDHLGDMDFKVAGTRDGVTALQMDIKIDGITPEIMRQALHQAREGRMHILDKMAQALPAPRSEMSDYAPRITSFTIDPSKIREVIGKGGATIRAITEETGTSIDISDDGVVKIASVDKQAGLEARRRIEDITAEVEVGKVYEGKVARLMDFGAFVTILPGKDGLVHISQISDEHVEKVSDKLAEGDMVKVKVLEIDRQGRVRLSMKAVE

SEQ ID NO: 1889 - DNA, 2295 bp, Nocardia farcinica IFM 10152
  CDS (1)..(2295): transl_table=11
atgacgcagacaagtgaacgcaagtcctcggccgtggaggtcgagccgggtgtgttcgaatcggtcgcgctgatcgacaacggcagctacggcacccgcacggtgcggttcgagaccggcaggctggcgcgccaggccgccgggtcggtcgtggcctacctggacgacgagaccatgctcctgtcggccaccaccgcgggcaagaccccgaaggaccagttcgacttcttcccgctgacggtcgacgtcgaggagcggatgtacgccgcgggccgcatccccggctcgttcttccgccgcgagggccgcccctccaccgacgcgatcctgacctgccgcctgatcgaccgcccgctgcgcccgtcgttcgtcgacggcctgcgcaacgaggtccaggtcgtggtcaccgtgctgagcctggatccgaaggatctctacgacgtggtggccatcaacgccgcctccgcgtccacccagatcgcgggcctgccgttctccggcccggtcggcggcgtgcgcgtcgccctgatcccggaccagggtgcgaactccgcgggcggtggccagtgggtggcgttcccgaccgtggagcagctcgagggcgccgtgttcgacatggtggtcgcgggccgggtcgtggaatccggtgacgtcgcgatcatgatggtcgaggccgaggccaccgaaaaggtcatcgagctggtcgagggcggcgcgcaggcgccgaccgaggccgtggtggccgagggactcgaggcggccaagccgttcatcgcccggctgtgccgcgcccagcaggacctggccgagctggcggccaagccgaccgaggagttcccgctcttcccgccctacggccccgacgtgtacgaggccgtcgaaggcgcggccgaggccgagctgggcgaggcgctgagcatcgcgggcaagcaggagcgcgaggagaagatcgacgagatcaagctcgccgtgctcgaccggctggccgagcagttcgccggccgggagaaggagctgggcgcggcgttccgctcggtcaccaagaagctggtccgtcagcgcatcctcaccgacggtttccgcatcgacggccgcggtctggccgacatccgcgcgctctcggccgaggtggccgtggtgccgcgcgcgcacggctcggcgctgttcgagcgcggtgagacccagatcctgggcgtcaccacgctggacatggtgaagatggcgcagcaggtcgactcgctcggcccggagaccagcaagcgctacatgcaccactacaacttcccgccgttctccaccggtgagaccggccgggtcggttcgcccaagcggcgcgagatcggccacggtgcgctggccgagcgggcgctgatcccggtgctgcccagccaggaggatttcccgtacgcgatccgtcaggtctccgaggcgctgggctccaacggctcgacctcgatgggctcggtgtgtgcctccaccctgtcgctgctcaacgccggtgtgccgctcaaggcgccggtcgcgggcatcgcgatgggcctggtgtcggacaccgtcaccaacgacaagggtgagcaggaggtccgctacgtcgcgctgaccgacatcctcggcgccgaggacgccttcggcgacatggacttcaaggtcgcaggcacccgcgagttcgtcaccgcgctgcagctggacaccaagctcgacggcatcccctcgcaggtgctcgccggtgcgctgagccaggcgcacgacgcccgcaccaccatcctggacgtgatggccgaggccatcgccaccccggacgagatgagcccctacgctccgcgcgtcaccgcgatcaagatcccggtcgacaagatcggcgaggtgatcgggcccaagggcaaggtcatcaaccagatcaccgaggacaccggcgccaacatctccatcgaggacgacggcaccgtgttcgtcggcgcgaccgacggcccctcggcccaggccgcgatcgacgcgatcaacgccatcgccaacccgcagctgcccaaggtgggcgagcgcttcctcggcacggtcgtcaagaccaccgccttcggcgcgttcgtctcgctgctgccgggtcgcgacggtctggtgcacatctccaagctgggcaacggcaagcgcgtcgccaaggtcgaggacgtggtgaacgtcggcgacaagctgcgcgtggagatcgccgacatcgacaaccggggcaagatctcgctggtcccggtcgacgagaacgccgacgagcccgcggcggatgccgtcgacgccggaaccgagtag

SEQ ID NO: 1890 - protein, 764 aa, Nocardia farcinica IFM 10152
MTQTSERKSSAVEVEPGVFESVALIDNGSYGTRTVRFETGRLARQAAGSVVAYLDDETMLLSATTAGKTPKDQFDFFPLTVDVEERMYAAGRIPGSFFRREGRPSTDAILTCRLIDRPLRPSFVDGLRNEVQVVVTVLSLDPKDLYDVVAINAASASTQIAGLPFSGPVGGVRVALIPDQGANSAGGGQWVAFPTVEQLEGAVFDMVVAGRVVESGDVAIMMVEAEATEKVIELVEGGAQAPTEAVVAEGLEAAKPFIARLCRAQQDLAELAAKPTEEFPLFPPYGPDVYEAVEGAAEAELGEALSIAGKQEREEKIDEIKLAVLDRLAEQFAGREKELGAAFRSVTKKLVRQRILTDGFRIDGRGLADIRALSAEVAVVPRAHGSALFERGETQILGVTTLDMVKMAQQVDSLGPETSKRYMHHYNFPPFSTGETGRVGSPKRREIGHGALAERALIPVLPSQEDFPYAIRQVSEALGSNGSTSMGSVCASTLSLLNAGVPLKAPVAGIAMGLVSDTVTNDKGEQEVRYVALTDILGAEDAFGDMDFKVAGTREFVTALQLDTKLDGIPSQVLAGALSQAHDARTTILDVMAEAIATPDEMSPYAPRVTAIKIPVDKIGEVIGPKGKVINQITEDTGANISIEDDGTVFVGATDGPSAQAAIDAINAIANPQLPKVGERFLGTVVKTTAFGAFVSLLPGRDGLVHISKLGNGKRVAKVEDVVNVGDKLRVEIADIDNRGKISLVPVDENADEPAADAVDAGTE

SEQ ID NO: 1891 - DNA, 2190 bp, Legionella pneumophila str. Paris
  CDS (1)..(2190): transl_table=11
gtggcaaaaattacaaaagaaatagtattcggtaaccataaattaatcttggaaacaggtgaagtagcacgacaggctgatggtgccgtaatggcaagtatgaatggtacacaagtgctagtgactgtagtttggaaaaaggatagtggtgaaagtaatgattttttcccattaacagtgaattatcaagaaaaattctatgccataggtaaaattcctggtggctttaacaaacgcgaaggacgaccatctgataatgaaacattaatttcgcggctaatagatagaccgatccggccattattcccggataatttttttaacgaagtacagataattgctactgttctgtccttaaatcccgaggtatctcctgatattattgctatgattggagcctccgctgcactttcaatttctggtgttccatttaatggccctataggcgctgctcgagtaggctataaagatggcgtttatctgctcaatccaagtagaaaagaacaagaagaatccaagcttgatttggttattgcgggcacaaaagatgccattttgatggtggaatcagaagcgcaggaattaagtgaagacatcatgcgtggtgctatgttatatggccatgaaatgatgaaaagtgttataaaatcaatagaagaacttgccagagaagtgggtaagagcaaacctgagtggaaagctcctgaaattgatacagtactaaaagctagaatcaatgacgtagcaaggaatgaagttgaagccgcttatcttattaaagacaaacaacaacgctaccagcgattagatgagttaagagagcaaactatttctgccctgctggctgaaaatgatgaattaaatgcagatgttattgccaatatgtttggtgagttagaacgttctatagtacgtaatcgtattcttgacggcgaacctcgcatcgatggtcgtgatcacagaacagttaggcctatttctattcgtaccaaattcttggaaagaactcacggttcctgtttgtttaccagaggagaaacccaagctattgttgttgccactttgggtaatgaacgtgatgcacagatactagacggaattagtggcgaaaccagagatcgatttatgcttcattataatttccctccttattctgtcggtgaaacagggcaagtaggtagtcctaaacggcgtgaaattgggcatggccgtttagccaagcgtgctttaatggctgtactgcctgatactaatgagtttccttatgtgctacgtattgtatctgagattactgaatccaatggctccagttccatggctactgtttgtggaacaagcctggcattgatggatgccggggtacctttaaaagcaccagtcgctggtgtggccatgggcttaatcaaggaaggtgatcgttatgctgtattgacagacatattgggtgatgaggatcatttaggtgatatggattttaaagtagctggtacagaaaaagggattacagctttgcagatggatatcaagatttccggtattaccaatgaaattatggagcgggctctggagcaagcattggaaggtcgtacccatattcttggtgtcatgaacaatgcccttgcagagcatagaaccgagttatctcagcacgctccaagaatcacaaccatgaaagttgctgaagataaaatccgcacaattattggcaaaggtggggcaacaattaaagggcttattgaaagtactggcgtatctatagatattgatgactctggggttatccaattattttctccggataagatggctctggaagaggcgcaaaaacaaattaaagctttaattgctgaaattgaagtgggtcagacttatcaagggaaagtaagcaagatagttgactttggagcttttatcaatttactgcctggtaaagatggcttactgcatatttcacaaatatgtgccgaaagaacacaaaaggtagaagaggtattgcaggaaggtcaggaaattgaggtctttgttgctgggatagataagcaagggcgagtgaaactggagtggaaggataagccgcaagctgaagccaaagaggtcgaaggcgcctctgtatctgctacgtttcttacaatggaagagcaatctgaagaaattaattcaggcaacaaaatctctgaagaagaggaataa

SEQ ID NO: 1892 - protein, 729 aa, Legionella pneumophila str. Paris
MAKITKEIVFGNHKLILETGEVARQADGAVMASMNGTQVLVTVVWKKDSGESNDFFPLTVNYQEKFYAIGKIPGGFNKREGRPSDNETLISRLIDRPIRPLFPDNFFNEVQIIATVLSLNPEVSPDIIAMIGASAALSISGVPFNGPIGAARVGYKDGVYLLNPSRKEQEESKLDLVIAGTKDAILMVESEAQELSEDIMRGAMLYGHEMMKSVIKSIEELAREVGKSKPEWKAPEIDTVLKARINDVARNEVEAAYLIKDKQQRYQRLDELREQTISALLAENDELNADVIANMFGELERSIVRNRILDGEPRIDGRDHRTVRPISIRTKFLERTHGSCLFTRGETQAIVVATLGNERDAQILDGISGETRDRFMLHYNFPPYSVGETGQVGSPKRREIGHGRLAKRALMAVLPDTNEFPYVLRIVSEITESNGSSSMATVCGTSLALMDAGVPLKAPVAGVAMGLIKEGDRYAVLTDILGDEDHLGDMDFKVAGTEKGITALQMDIKISGITNEIMERALEQALEGRTHILGVMNNALAEHRTELSQHAPRITTMKVAEDKIRTIIGKGGATIKGLIESTGVSIDIDDSGVIQLFSPDKMALEEAQKQIKALIAEIEVGQTYQGKVSKIVDFGAFINLLPGKDGLLHISQICAERTQKVEEVLQEGQEIEVFVAGIDKQGRVKLEWKDKPQAEAKEVEGASVSATFLTMEEQSEEINSGNKISEEEE

SEQ ID NO: 1893 - DNA, 2190 bp, Legionella pneumophila str. Lens
  CDS (1)..(2190): transl_table=11
gtggcaaaaattacaaaagaaatagtattcggtaaccataaattaatcttggaaacaggtgaagtagcacgacaggctgatggtgccgtaatggcaagtatgaacggtacacaagtgctagtgactgtagtttggaaaaaggatggtggtgaaagtaatgattttttcccattaacagtgaattatcaagaaaagttctatgccataggtaaaatcccaggtggctttaacaaacgtgaaggacggccatctgataatgaaacattaatttctcggttaatagatagaccgatccggccattattcccggataatttttttaacgaagtacagataattgctactgtcctgtccttaaatcctgaggtatctcctgatattatcgctatgattggagcctccgcagcgctttcaatttctggcgtgccatttaatggccctataggtgccgctcgagtaggctataaagatggcgtttatctgctcaatccaagtagaaaagaacaagaagagtccaagcttgatttggttattgcgggaacaaaagatgccattttgatggtggaatcagaagcacaggaattaagtgaagacatcatgcgtggtgctatgttatatggccatgaaatgatgaaaaatgtcataaaatcaatagaagaacttgctagagacgtgggtaagagcaaacctgagtggaaagcaccagaaatagatacagtactaaaagctagaatcaatgacgtagctaggaatgaagttgaagccgcttatcttattaaagacaagcaacaacggtatcagcgattaggcgaattaagagagcaaactatttctgctttattggctgaaaatgatgagttaaatgcagatgttattgccaatatgtttggtgagctagaacgttctatagtacgtaatcgtattcttgacggcgagcctcgcatcgatggtcgtgatcacagaacagttaggcctatttctgttcgtaccaaattcttggaaagaactcatggttcctgtttgtttaccagaggagaaactcaagctattgttgttgccactttgggtaatgaacgtgatgcacagatattagacggaattagtggcgaaagcagagatcgatttatgcttcattataattttcctccttattctgtcggtgaaacagggcaagtgggcagtcctaaacggcgtgaaattgggcatggccgtttagctaagcgtgctttaatggctgtactgcctgatgctaatgagtttccttatgtactacgtattgtatctgagattaccgaatccaatggctccagttctatggctactgtctgtggaacaagtctggcattgatggatgccggggtacctttaaaagcaccagtcgctggtgtggccatgggcttaatcaaggaaggtgatcgttatgctgtattaacagacatattgggtgatgaggatcatttgggtgatatggactttaaagtggccggtacggaaaaagggattactgctttgcagatggatatcaaaatttccgggattaccaatgaaattatggaacgggctctggagcaagcattggaaggtcgtacccatattcttggtgttatgaataatgctcttgccgaacatagaaccgagttatctcagcacgctccaagaatcacaaccatgaaagtcgctgaagataaaatccgcacaattattggcaaaggcggtgcaacaatcaaaggacttattgaaagtaccggcgtatctatagatattgatgactcaggggttatccaattattttctccggataagattgctttggaagaggcgcaaaaacaaattaaagctttaattgctgaaattgaagtaggtcagacttatcaagggaaagtaagcaagatagttgactttggagcctttatcaatttactgcctggtaaagatggcttactgcatatttcacaaatatgtgccgccagaacacaaaaagtagaagaggtattgcaggaaggtcaggaaattgaagtctttgttgctgggatagataagcaaggacgagtcaaactggagtggaaggataagccacaagctgaagccaaagaggtcgaagacgccccggtatctgctacgtttcttacaatggaagagcaatctgaagaaattaattcaggcaacaaaatctctgaagaagaggaataa

SEQ ID NO: 1894 - protein, 729 aa, Legionella pneumophila str. Lens
MAKITKEIVFGNHKLILETGEVARQADGAVMASMNGTQVLVTVVWKKDGGESNDFFPLTVNYQEKFYAIGKIPGGFNKREGRPSDNETLISRLIDRPIRPLFPDNFFNEVQIIATVLSLNPEVSPDIIAMIGASAALSISGVPFNGPIGAARVGYKDGVYLLNPSRKEQEESKLDLVIAGTKDAILMVESEAQELSEDIMRGAMLYGHEMMKNVIKSIEELARDVGKSKPEWKAPEIDTVLKARINDVARNEVEAAYLIKDKQQRYQRLGELREQTISALLAENDELNADVIANMFGELERSIVRNRILDGEPRIDGRDHRTVRPISVRTKFLERTHGSCLFTRGETQAIVVATLGNERDAQILDGISGESRDRFMLHYNFPPYSVGETGQVGSPKRREIGHGRLAKRALMAVLPDANEFPYVLRIVSEITESNGSSSMATVCGTSLALMDAGVPLKAPVAGVAMGLIKEGDRYAVLTDILGDEDHLGDMDFKVAGTEKGITALQMDIKISGITNEIMERALEQALEGRTHILGVMNNALAEHRTELSQHAPRITTMKVAEDKIRTIIGKGGATIKGLIESTGVSIDIDDSGVIQLFSPDKIALEEAQKQIKALIAEIEVGQTYQGKVSKIVDFGAFINLLPGKDGLLHISQICAARTQKVEEVLQEGQEIEVFVAGIDKQGRVKLEWKDKPQAEAKEVEDAPVSATFLTMEEQSEEINSGNKISEEEE

SEQ ID NO: 1895 - DNA, 2124 bp, Photobacterium profundum SS9
  CDS (1)..(2124): transl_table=11
gtgaaccctatcgtaaagactttccagtacggtaaccacacagttaccctagaaactggtgttatggcacgtcaagcgactgctgctgttatggcaagcatggacgatacgtctgtgtttgtatctgttgttggtaagaaagcggctgttgaaggccaagacttctttcctctaacagtaaactaccaagagcgtacatacgctgcaggtaaaatccctggtggcttctttaagcgtgaaggtcgtccttctgaaggcgaaacgcttactgcacgtctaattgaccgtcctatccgtccgttattcccaagtgcattcaaaaacgaagtacaagttattgcgactgtggtttctgtaaacccagaagtaaacccagacatgatcactatgatcgcaacgtcggcggcacttgctatttcaggtctaccgttcaacggccctatcggtgcagcacgtgttggttttattaacgatcaattcgttcttaacccaagcaacactgagctagaagaaagccgtctagaccttgttgtttctggtactaaagacgcagttctaatggttgaatcagaagctgatcgcttatctgaagagacaatgctacaagctgttgtttatggtcacgaccaacaacaagttgttatcaatgcaatcaacgagtttgcggctgaagtagcaacgcctgcttgggattggactgcaccagtagtgaatgctgaacttaaagcacgcgtggctgataaagctgcaactcgcctttctgatgcataccaaatcactgaaaaaatggcacgttacgacgaagtgggttctattaagaacgacgttgttgctagccttcttgctgaagacgaaacgcttgatgagcgtgaacttcgtggcatgttaagctctcttgagaagcacgttgtacgtggccgcatcatcgcgggtcacccacgtatcgatggtcgtgaaaaagacatggttcgtgcgttagacgtacgcactggtgtacttccacgtactcacggttcttctttgttcacacgtggtgaaactcaggcgctagtaactgctacgctgggtactcaacgtgacgcacaaatcatcgacagcatcatgggtgagaagaaagatcacttccttctacactacaacttccctccatactgtgtaggtgagactggtttcgttggttcaccaaagcgtcgtgaaatcggccatggtaaattagctaagcgtggtattgcagcagtaatgccttctgttgaagaattcccatacacagtacgtgttgtatcggaaatcactgaatctaacggttcatcttcaatggcttctgtatgtggtacttctctagcgcttatggatgctggtgtgccaattaaagcatctgttgcgggtatcgcaatgggtcttgttaaagaaggcgacgatttcgttgttctttctgacatccttggtgacgaagatcacctaggtgacatggactttaaagtagcgggtactgacgacggtatcacagcacttcagatggatatcaagattgaaggtatcacgaaagagatcatgcagatcgctctaaatcaagctaaaggtgcacgtaagcacatccttagtgtgatggacgatgcaattggcactcaccgtgatgatatctctcagtttgctcctcgtattcatacgatgaagatcaactctgacaagattaaagacgttatcggtaaaggtggtgctgttatccgtgcactaactgaagaaactggtactacaattgaaatcgaagatgacggtacaatcaagattgcagcaactgaaggtgctgcagctaaagaagctattcgtcgtatcgaagaaatcactgctgacgttgaagttggtcgcatctatactggtaaagtaatgcgtatcgtagacttcggtgcattcgtatcagttattggtgctaaagaaggcttggtacacatttctcaaatcgctcaagagcgtgtagagaaagtatctgaccatctgcaaatgggtcaagaagttcaagttaaagtacttgaaatcgaccgtcagggtcgtattcgcctaagcatgaaagaagctgttgcagatcaaaaccctgcgacagtacaagacgaacagccacaaggctaa

SEQ ID NO: 1896 - protein, 707 aa, Photobacterium profundum SS9
MNPIVKTFQYGNHTVTLETGVMARQATAAVMASMDDTSVFVSVVGKKAAVEGQDFFPLTVNYQERTYAAGKIPGGFFKREGRPSEGETLTARLIDRPIRPLFPSAFKNEVQVIATVVSVNPEVNPDMITMIATSAALAISGLPFNGPIGAARVGFINDQFVLNPSNTELEESRLDLVVSGTKDAVLMVESEADRLSEETMLQAVVYGHDQQQVVINAINEFAAEVATPAWDWTAPVVNAELKARVADKAATRLSDAYQITEKMARYDEVGSIKNDVVASLLAEDETLDERELRGMLSSLEKHVVRGRIIAGHPRIDGREKDMVRALDVRTGVLPRTHGSSLFTRGETQALVTATLGTQRDAQIIDSIMGEKKDHFLLHYNFPPYCVGETGFVGSPKRREIGHGKLAKRGIAAVMPSVEEFPYTVRVVSEITESNGSSSMASVCGTSLALMDAGVPIKASVAGIAMGLVKEGDDFVVLSDILGDEDHLGDMDFKVAGTDDGITALQMDIKIEGITKEIMQIALNQAKGARKHILSVMDDAIGTHRDDISQFAPRIHTMKINSDKIKDVIGKGGAVIRALTEETGTTIEIEDDGTIKIAATEGAAAKEAIRRIEEITADVEVGRIYTGKVMRIVDFGAFVSVIGAKEGLVHISQIAQERVEKVSDHLQMGQEVQVKVLEIDRQGRIRLSMKEAVADQNPATVQDEQPQG

SEQ ID NO: 1897 - DNA, 2226 bp, Streptococcus thermophilus LMG 18311
  CDS (1)..(2226): transl_table=11
atggctaaacaaacttttgagatgacctttgaaggacgcccacttgttgtggaagtgggacaggtagccaagcaggctaatggtgccgttgtagtacgttatggagatacaaccgtattgtcagtagctgttatgtctaaaaagatggcaactgcaaatttctttcctttacaggttaattatgaggaaaaaatgtatgcggctggtaagttcccaggaggctttagcaagcgtgagggacgaccttcgactgatgccactttgactgctcgtcttattgaccgtcctattcgtcccatgtttgcggagggttttcgtaacgaagttcaagtcattaatactgttctctcttatgatgagaatgctagtgcgccaatggccgctatgtttgggagttctttagcactttctatttcggatattcctttcaatggtccaattgctggggttcaagtggcttatgcagcagaagatttcatcatcaacccaagtgcatcagataaagaagtttcacatttagacttgatagtggcaggtaccaaggaagccatcaatatggtagaagcaggtgctcaggaattgtcagaggacatcatgttgcaagcacttttgaagggacatgaagctattcaagagttggttgatttccaaaattatattgttgcggctgttggtaaggaaaaggctgaggttgaactgttccaagtggatgctgatttgaaggctgaaattgaagcagtttattatgatcagttagctaaggctgttcaggtggaagaaaaactggcgcgtgaggcagcaaccaaggctgttaaagaagaggtcctcgcttcttatcaagaacgttttgcagaagatgaagataaggaaaccattctacgtgatgtggtagaaatccttgagcagatggaacatgctgaagtgcgccgtctgattacagaagacaagattcgtcctgatggtcgtcgtgtggatgaaattcgtcctttggatgctgaaattgactttctgccaaatgttcatggatcaggtctctttacacgtgggcaaacccaggccttatcagtcttgactttagcccctatgagtgatacacaactcgttgatggtttggatccagagtataagaaacgtttccttcaccactacaatttccctcagtattcggtgggtgaaacagggcgttacggtgcaccaggccgtcgtgaaattggtcacggagctttaggtgaacgtgcccttgctcaagttcttccaagcgttgaagagtttccatatgctatccgtttggtagctgaagtcttggagtcaaatggttcttcttcacaggcttctatttgtgcaggcactttggctcttatggctggtggggtgccgattaaggcacctgttgcgggaattgccatgggtcttatttcagatggaaccaactacactgttctaaccgacattcaaggtttagaagatcattttggtgatatggactttaaggtggctggtacacgtctaggtattacagctcttcagatggatattaagatttcaggaattacacctgctattcttgaggaagctttagctcaagctaaggtggcacgttttgaaattcttgatgttattgagtcagcgattgctgaaccacgttcggaattggccccaacagctcctaagatcgatagtattcagattcctgttgacaagattaaggttgtcatcggtaagggtggtgaaaccattgacaagattatcgctgagacaggtgtcacaattgatatcgatgaagaaggactcgttcagattttctctagtgatcaggatgctattgaccgtgctaaaacaatcatctctgaccttgtacgtgaagctaaggttggcgaggtctacaccgtaccagttgtgcgtattgaaaagttcggtgcctttgtccacctcttcaataagactgatgccttagtccacatttcagaattagcttggaaacacactgagcatgttgaagatgtggttaaggttggggatatggtaaccgttaaaattatcaaaatcgatgaaaaaggtcgtgttgatgcttcaatcaaaaccttgcttcctaaacctgaaaaaaatgaagacggggaaaatggagaagagcatcgtcactgctgttgttctcatcataaaccagaccatcataatgaaagtgtggaagcaccgaaaaaaagtgatgaatcagaaacgaaagaataa

SEQ ID NO: 1898 - protein, 741 aa, Streptococcus thermophilus LMG 18311
MAKQTFEMTFEGRPLVVEVGQVAKQANGAVVVRYGDTTVLSVAVMSKKMATANFFPLQVNYEEKMYAAGKFPGGFSKREGRPSTDATLTARLIDRPIRPMFAEGFRNEVQVINTVLSYDENASAPMAAMFGSSLALSISDIPFNGPIAGVQVAYAAEDFIINPSASDKEVSHLDLIVAGTKEAINMVEAGAQELSEDIMLQALLKGHEAIQELVDFQNYIVAAVGKEKAEVELFQVDADLKAEIEAVYYDQLAKAVQVEEKLAREAATKAVKEEVLASYQERFAEDEDKETILRDVVEILEQMEHAEVRRLITEDKIRPDGRRVDEIRPLDAEIDFLPNVHGSGLFTRGQTQALSVLTLAPMSDTQLVDGLDPEYKKRFLHHYNFPQYSVGETGRYGAPGRREIGHGALGERALAQVLPSVEEFPYAIRLVAEVLESNGSSSQASICAGTLALMAGGVPIKAPVAGIAMGLISDGTNYTVLTDIQGLEDHFGDMDFKVAGTRLGITALQMDIKISGITPAILEEALAQAKVARFEILDVIESAIAEPRSELAPTAPKIDSIQIPVDKIKVVIGKGGETIDKIIAETGVTIDIDEEGLVQIFSSDQDAIDRAKTIISDLVREAKVGEVYTVPVVRIEKFGAFVHLFNKTDALVHISELAWKHTEHVEDVVKVGDMVTVKIIKIDEKGRVDASIKTLLPKPEKNEDGENGEEHRHCCCSHHKPDHHNESVEAPKKSDESETKE

SEQ ID NO: 1899 - DNA, 2142 bp, Thermus thermophilus HB8
  CDS (1)..(2142): transl_table=11
atggaaggcacacccaatgtcccccaagcccaccgctacgagctcaccctggcggggcggcccctcgtcctggagacgggcaagtacgccaagcaggcctcggggtccgtcctggtccgctacgccgacaccgtggtcctggccacggcccaagcctcggagacgccggtggaggccgacttcctccccctcacggtggagtttgaggaaaggcactacgccgtggggaagatcccgggaagcttcatgcgccgggaggggcgtcccggggagaaggccatcctctccgcccgcatgacggaccgccccatcaggcccctcttccccaaggggttccgccacgaggtccagatcatcgtcaccgtcctctccgccgaccagaagaacccgccggacatcctgggccccatcgcagcgagcgccgccctcatgctctcggacatcccctgggagggccccatcgccgccgtgcgggtgggcctcatcggcgggagcttcgtcctgaaccccaccctgcaggagctggaggaaagccagctggacctggtggtggcggggagcaaagaggccatcctcatggtggaggcggaggccggggaggtggacgaggagaccctggtccaggccctggagttcgcccacaaggagatgcagcccatcctggagctccaggaggccatggcccgggaactcgccaaacccaagatggcctggacccccccggaaagcctccccgaggaggagaaggaggccctctaccgcctggccctggagcgggggctttcccaggtcctgcagacggcgagcaagggggaaaggagccgggcccttgcggagttcgccgaacgcctcatcgccgaggccctccccaagggggaggacggcaccccggacgagggcaagaagcccctctacgagagcgcctttgacgaggtggtgcgcagggagctcaggaggctcgtcctcgaggagggcaagcgggcggacggccgcgggcccaaggacctcaggcccatctggattgaggtggacgtcctgccccgggcccacggctccgccgtcttcacccggggcgaaacccaggtcctgggcaccgtcaccctgggcacgggccgggacgagcagatcctggacgacctgggcatagacgagaccgagaagttcctcgtccactacaacttcccccccttctccaccggggaggtgcggcgcctacggggggtttcccgccgcgaggtggggcacggaaatctggccaagcgggccctcaaggcggtgatgcccaaggaggaggacttcccttacaccatccgcgtggtgggggacgtcctggagtccaacggcagtagctccatggccacggtctgcgccggctgcctcgccctcatggacgcgggcgtgcccatccgggccccggtggccggggtggccatgggcttggtgtgggaggagaaccgggcggtgatcctcacggacatcctgggcctcgaggacgccctcggcgacatggacttcaaggtggccgggacccgcaagggggtcaccgccttgcagatggacaacaaggtggggggccttccccgcgaggtcctgaaggaggccctcctccaggcccgggaggccaggctcaagatcctggacctgatggaggccgtcctccccgccccccggcccgagctcaagcccttcgccccccggatcctctccctcaaggtgcccgtggagaagatcgggctcgtcatcggccccgggggcaagaacgtgcgcgccctggaggagcttggggtggaggtggacattgaggaggacgggacggtccgcatctactccagcgacctccaggccgccctcgaggcgaagaagcgcatagaggacctcacccgcgaggccaaggtgggcgagatctacgagggcaccgtcacccgcatcacccccttcggcgccttcatcagcctcttccccggcaccgaggggcttctccacatcagccagatcgccccgggccgcgtggcgcgggtggaggaccacctcaaggtgggggacgtgatcaaggtcaaggtccaccgcattgacgagcggggcaagattgacctgatccgccccgagctggaaggcaagatcccccccaggcggcgcaggtag

SEQ ID NO: 1900 - protein, 713 aa, Thermus thermophilus HB8
MEGTPNVPQAHRYELTLAGRPLVLETGKYAKQASGSVLVRYADTVVLATAQASETPVEADFLPLTVEFEERHYAVGKIPGSFMRREGRPGEKAILSARMTDRPIRPLFPKGFRHEVQIIVTVLSADQKNPPDILGPIAASAALMLSDIPWEGPIAAVRVGLIGGSFVLNPTLQELEESQLDLVVAGSKEAILMVEAEAGEVDEETLVQALEFAHKEMQPILELQEAMARELAKPKMAWTPPESLPEEEKEALYRLALERGLSQVLQTASKGERSRALAEFAERLIAEALPKGEDGTPDEGKKPLYESAFDEVVRRELRRLVLEEGKRADGRGPKDLRPIWIEVDVLPRAHGSAVFTRGETQVLGTVTLGTGRDEQILDDLGIDETEKFLVHYNFPPFSTGEVRRLRGVSRREVGHGNLAKRALKAVMPKEEDFPYTIRVVGDVLESNGSSSMATVCAGCLALMDAGVPIRAPVAGVAMGLVWEENRAVILTDILGLEDALGDMDFKVAGTRKGVTALQMDNKVGGLPREVLKEALLQAREARLKILDLMEAVLPAPRPELKPFAPRILSLKVPVEKIGLVIGPGGKNVRALEELGVEVDIEEDGTVRIYSSDLQAALEAKKRIEDLTREAKVGEIYEGTVTRITPFGAFISLFPGTEGLLHISQIAPGRVARVEDHLKVGDVIKVKVHRIDERGKIDLIRPELEGKIPPRRRR

SEQ ID NO: 1901 - DNA, 2172 bp, Geobacillus kaustophilus HTA426
  CDS (1)..(2172): transl_table=11
atggaacaagagaaacgcgtgttttccatcgatgtggccgggcggccgctcatcattgagaccggcgagctggcgaaacaggcgaatggcgcggcgctcgtccgctacggcgatacggtcgtgttgagcacagccaccgcgtcgcgagaggcgaaaaacgttgactttttcccgctcaccgtcaactacgaggaacggttgtatgcggttggaaaaattcctggcgggtttattaagcgcgaaggtcgcccgagcgagaaagccattttggtgagccgtctcatcgaccgaccgattcgcccgctgtttgccgaaggattccgcaacgaagtgcaagtcgtctcgatggtcatgagcgttgatcaagactgcgcgccggaagtagcggccttaatcggttcgtcggtggcgctgacgatttccgacattccgtttgaagggccgatcgccggtgtcatcgtcggccgcgttgacggccagtttgtcatcaatccgacggtcgagcaaatggaaaaaagcgatctgcatcttgtcgtcgccggcacaaaagatgcgatcaacatggtggaagccggggcggatgaggtgccggaagaagtgattttggaagcgatcatgttcggccatgaggaagtgaagcggctcatcgccttccaagaggaaatcgccgcccaagtcggcaaagaaaaaatggaagtcgtcctttacgagccggatccagcgctggaggcggaaatccgccagcttgccgaagcggacattaagcgagcggtgcaagtgccggagaaactggcgcgcgatgctgccattgaagatgtgaaagctggcgtcatcgccaaatatgaggcggaagaagcggatgaggagaagctcaagcaagtacaggaaattttgcataaactcgtaaaagaggaagtgcgccgtttgatcacggtcgagaaaatccgtccggacgggcgcaaagtcgatgaaatccgtccgctttcatcggcggtcggcgtcctgccgcgtacgcacggctccggtttgtttacgcgcgggcagacgcaagtgttgagcgtttgtacgcttggggcgcttggtgatgtgcaaattttggacgggcttgaccttgaagaatcgaagcggtttatgcaccattacaacttcccgccgttttccgtcggggaaaccgggccgatgcgcgggccggggcgtcgtgaaatcggacacggggcgcttggcgaacgggcgctcgagccggtcgtgccgtcggagcgcgaattcccgtatacgatccgcctcgtttccgaagtgctggagtcgaacggctcgacatcgcaggccagcatttgcgccagcacgctggcgatgatggatgctggggtgccgattaaagcaccggtcgccggcattgccatggggcttgtgaaaaacgacgaccattacacgattttgacagacattcaaggcatcgaagaccatcttggcgatatggactttaaagtcgccggcacgagaaaaggcgtgacggcattgcaaatggacattaaaatcaaaggattgacgcgcgagattttggaagaggcgctcatgcaagcgcgcaaagggcggctcgagattttggatcatatgatgcaaacgctcagcgaaccgcgcaaagagctgtccaaatatgcaccgaaaattttgatcatgcacatcaacccggacaaaatccgggaggtgatcggaccaagcggcaagcagatcaacaaaatcatcgacgaaaccggcgtcaaaatcgacatcgaacaagacggcacgattttcatctcgtctgtggatgaagcggccaaccaaaaagcgaagcaaatcatcgaagacatcgtccgcgaagtcgaagtcggccaagtgtacttaggcaaagtgaaacggattgaaaaattcggcgccttcgttgagttgttcaacggcaaagacgggcttgtccatatttccgagctcgctgaagggcgggtcggcaaagtcgaagacgtcgtttcgattggtgatgaaattttagtgaaagtaacggaaatcgataagcaagggcgcgtcaacctgtcgcgcaaagcggtgttgcgcgatgcccgcaacattggaggggaactgccgcgggaatctagggaaaaacgaggaagacggccggagcgccatcgcatgaagccttag

SEQ ID NO: 1902 - protein, 723 aa, Geobacillus kaustophilus HTA426
MEQEKRVFSIDVAGRPLIIETGELAKQANGAALVRYGDTVVLSTATASREAKNVDFFPLTVNYEERLYAVGKIPGGFIKREGRPSEKAILVSRLIDRPIRPLFAEGFRNEVQVVSMVMSVDQDCAPEVAALIGSSVALTISDIPFEGPIAGVIVGRVDGQFVINPTVEQMEKSDLHLVVAGTKDAINMVEAGADEVPEEVILEAIMFGHEEVKRLIAFQEEIAAQVGKEKMEVVLYEPDPALEAEIRQLAEADIKRAVQVPEKLARDAAIEDVKAGVIAKYEAEEADEEKLKQVQEILHKLVKEEVRRLITVEKIRPDGRKVDEIRPLSSAVGVLPRTHGSGLFTRGQTQVLSVCTLGALGDVQILDGLDLEESKRFMHHYNFPPFSVGETGPMRGPGRREIGHGALGERALEPVVPSEREFPYTIRLVSEVLESNGSTSQASICASTLAMMDAGVPIKAPVAGIAMGLVKNDDHYTILTDIQGIEDHLGDMDFKVAGTRKGVTALQMDIKIKGLTREILEEALMQARKGRLEILDHMMQTLSEPRKELSKYAPKILIMHINPDKIREVIGPSGKQINKIIDETGVKIDIEQDGTIFISSVDEAANQKAKQIIEDIVREVEVGQVYLGKVKRIEKFGAFVELFNGKDGLVHISELAEGRVGKVEDVVSIGDEILVKVTEIDKQGRVNLSRKAVLRDARNIGGELPRESREKRGRRPERHRMKP

SEQ ID NO: 1903 - DNA, 2136 bp, Salmonella enterica subsp. enterica serovar Paratyphi A str. ATCC
  CDS (1)..(2136): transl_table=11
ttgcttaatccgatcgttcgtaaattccagtacggccagcataccgttacgctggaaactggcatgatggcgcgtcaggccactgccgctgttatggtaagcatggatgacaccgccgtattcgttaccgttgtcggccagaaaaaagccaagccaggccaggacttcttcccactgaccgttaactatcaggagcgtacctacgctgctggtcgtatcccgggcagcttcttccgtcgtgaaggccgtccaagcgaaggcgaaaccctgatcgcgcgtctgattgaccgcccggttcgtccgctgttcccggaaggtttcgttaacgaagtgcaggttattgcgaccgtcgtttccgttaacccgcaggttaacccggatatcgtggcgatgatcggcgcatccgctgcgctgtcgctgtccggcattccgttcaacggcccaatcggcgcggcgcgcgtaggttacatcaatgaccagtacgtactgaacccgacccaggacgagctgaaagaaagcaagctggacctggtggttgccggtaccgaagcggctgtgctgatggtggaatccgaagctgaactgctgagcgaagacactatgctgggcgcggtggtattcggtcacgagcagcagcaggttgttatccaggcgatcaacgatctggtgaaagaagccggtaaaccgcgttgggactggcagccggaagccgtcaacgacgcgttgaacgcgcgtgttgctgcgctggctgaatctcgtctgagcgacgcgtaccgcatcaccgataaacaagagcgctatgctcaggttgacgtaatcaaatccgaaaccatcgagcagcttattgcagaagatgaaactctggatgctaacgagctgggtgaaatcctgcacgccatcgagaaaaacgtggtacgtagccgcgtactggcaggcgagccgcgtattgatggccgtgaaaaagacatgatccgtggtctggacgtgcgcactggcgtactgccgcgaactcacggttccgctctgtttacccgtggtgaaacgcaggcgctggttaccgcgactctgggtactgcccgtgacgcgcaggtgcttgatgaactgatgggcgagcgcactgacagcttcctgttccactacaacttccctccgtactccgtaggcgaaaccggcatggtcggttctccgaagcgtcgtgaaattggtcacggtcgtctggcgaagcgcggcgtgctggcagtgatgccggacatggataaattcccgtacaccgttcgcgtggtgtctgaaatcaccgaatccaacggttcttcttctatggcttccgtgtgcggcgcttctctggcgctgatggacgctggcgtgccaattaaagccgccgtagcaggtatcgctatgggtctggtgaaagaaggcgacaactacgttgtactgtctgacattctgggcgacgaagatcacctgggcgatatggacttcaaagtggcgggttcccgcgacggtatctctgcgctgcagatggatatcaaaattgaaggtatcaccaaagagatcatgcaggttgcgttgaaccaggctaaaggtgcgcgtctgcacatcctgggcgtgatggaacaggcgatcaacgcgccgcgcggcgatatctctgaatttgcgccgcgtatccataccatcaagatcagcacggacaagatcaaagacgtgatcggtaaaggcggttctgtgatccgcgcgctgactgaagagaccggcaccaccatcgaaattgaagatgacggtactgtgaagatcgcggcgaccgacggtgaaaaagcgaaatacgctatccgtcgtatcgaagagatcaccgcagagatcgaagtcggccgtatctacaatggtaaagtgacccgtatcgttgactttggcgcgtttgttgccatcggcggcggtaaagaaggtctggttcacatctctcaaatcgcggataagcgtgtagagaaagtgaccgattatctgcagatgggtcaggaagtcccggttaaggttctggaagttgaccgccagggccgtgtacgtctgagcattaaagaagcaaccgagcagtctcaacctgcggctgcgccggaagctccggcgagcgaacaggccgagtaa

SEQ ID NO: 1904 - protein, 711 aa, Salmonella enterica subsp. enterica serovar Paratyphi A str. ATCC
MLNPIVRKFQYGQHTVTLETGMMARQATAAVMVSMDDTAVFVTVVGQKKAKPGQDFFPLTVNYQERTYAAGRIPGSFFRREGRPSEGETLIARLIDRPVRPLFPEGFVNEVQVIATVVSVNPQVNPDIVAMIGASAALSLSGIPFNGPIGAARVGYINDQYVLNPTQDELKESKLDLVVAGTEAAVLMVESEAELLSEDTMLGAVVFGHEQQQVVIQAINDLVKEAGKPRWDWQPEAVNDALNARVAALAESRLSDAYRITDKQERYAQVDVIKSETIEQLIAEDETLDANELGEILHAIEKNVVRSRVLAGEPRIDGREKDMIRGLDVRTGVLPRTHGSALFTRGETQALVTATLGTARDAQVLDELMGERTDSFLFHYNFPPYSVGETGMVGSPKRREIGHGRLAKRGVLAVMPDMDKFPYTVRVVSEITESNGSSSMASVCGASLALMDAGVPIKAAVAGIAMGLVKEGDNYVVLSDILGDEDHLGDMDFKVAGSRDGISALQMDIKIEGITKEIMQVALNQAKGARLHILGVMEQAINAPRGDISEFAPRIHTIKISTDKIKDVIGKGGSVIRALTEETGTTIEIEDDGTVKIAATDGEKAKYAIRRIEEITAEIEVGRIYNGKVTRIVDFGAFVAIGGGKEGLVHISQIADKRVEKVTDYLQMGQEVPVKVLEVDRQGRVRLSIKEATEQSQPAAAPEAPASEQAE

SEQ ID NO: 1905 - DNA, 2418 bp, Anaplasma marginale str. St. Maries
  CDS (1)..(2418): transl_table=11
atgtttgatataacgaggaagtgtgtagagtggggagataggctattagttattgagagtggtaagatagctcgccaggcggatggtgccgttgttgttgattatggggggacttctgtactgtcaaccgttgtctcgcaaaagtccaaggagccggttgattttttgccgttgacagttcagtttcttgcgaagagttatgctataggtagaattccaggtgggttcttcaagcgggagggtaagccctctgatagagaaacgctgatctcgcggttggttgatagaagcattaggccgctgtttcccacggggttttgcgacgagattgtcattgtgtgcaatttgctatcttatgaccaagtgagcccaccggaaaccgtggcgctcataggtgcggctgcggctctggctatatcgggaataccgtttcccacacccatagccggtgcgaaaattggttacatcagagaggaagagcgctacatactgaacccctcggctgaggaattggccaggagcgagctcgacatgttttattcgggtacgaaaagctctgtggttatggtggagtcggaggcatctgaactttccgaagaggaaatgctgggtgctgtgactttcgggcacgaaaattgtgctcaggtcttggatttgattgaagaatttgctgaggctgcgggcccgaaggacgttgtcgagtttgttccgcacgacataggcaaggtggtatccgatataagtagtggctactcagagaaattttcggtcgcgtacagtgaccacaataagaaaaccagagtgctccagcttgatgccgccagggaaggcctgtactcagatttgtgcaggaaacacgttgaggagagcggtgagtataccgagcaggaggtcctcttagcgatcaaaacattcgagcggtctttggttcgtgccagagtcttggacacacttaagcgtgttgatggtagaggcttcgatcagatacgcaacattgaaatagaagtcgatttaatccccaggtctcacggctccgcgctgtttacccgtggtgacacgcaggctctagtaataactgcgcttggtactccgcaggatgaacaggtggttgatggcttcgacggagaccggagggagaggtttttattgcattacaacttcccgtcttatgcggttggtgaggctgcggcgcttcgtcctccaggtaggagagaaatagggcatggaaaactcgcttggagggctattcacccggttttgccgacaaaggcggattttccttacaccattagggttgtgtctgagattactgagtccgacgggtcctcctctatggccacagtgtgcggcgcgtctcttgcgctcatggataccggcgtgccacttaagtcttccgtggctggaattgccatgggcctcattaaggaaggtgacagatacgcggtgctgtccgacattatcggggacgaggattatcttggggatatggacttcaaggttgccggaaccaaggatggtattactgctctccagatggacatgaaaatacggggcataggctttgacataattgaaaagtccctccagcaggctaaggatggtaggctgttcatcataggtaagatggataaggtaatcaaggaatccagagagggggtgcgagaccacgtgcccaggatggaatccatgattatcgataagaataaaatcaaaaacgtcataggtaccggcgggaagaacgtcagggaaatttgtgagaagactggcgttaagattgaaatatctcaagatggcaccgttatgatatacgctgtaagcagggatgccgttgaagaggcgaagaacatgataatgtgcatagtctctgagcctgaggtcggtaaggtttttagtggcgtgatcagcgaaattgccaagtacggtgcgtttgtcagcttcttgggcggtagaagagggcttgtgcacattagcgagataaaaaacgaacacataggttcggtgtccgatgtcctggctgttgatgataaggtgaaggttctcgttatcggtatcgataaagatcacgtgcagctctcaatgcgtagagttgatcaagatagtggggatctgttggagcatgagtcatattcttctagcaagaagaatggccctcagtccggagatgccagcggcggcgcttccgggttccgagactatgcttccggccccgctagggaaagaaggcgtagtggcggcagtggcggaaggcccgtgcgtcgccgtagtgctggaagttcaggtagcggcagtggcggatattacagtgttcctcagcatgttggtacgcctgatccggtaaatggtaacgacagacgtagaggtagcgggccgcagcatgcctctggtgggggcggcaacaagaagcccaggttcttttag

SEQ ID NO: 1906 - protein, 805 aa, Anaplasma marginale str. St. Maries
MFDITRKCVEWGDRLLVIESGKIARQADGAVVVDYGGTSVLSTVVSQKSKEPVDFLPLTVQFLAKSYAIGRIPGGFFKREGKPSDRETLISRLVDRSIRPLFPTGFCDEIVIVCNLLSYDQVSPPETVALIGAAAALAISGIPFPTPIAGAKIGYIREEERYILNPSAEELARSELDMFYSGTKSSVVMVESEASELSEEEMLGAVTFGHENCAQVLDLIEEFAEAAGPKDVVEFVPHDIGKVVSDISSGYSEKFSVAYSDHNKKTRVLQLDAAREGLYSDLCRKHVEESGEYTEQEVLLAIKTFERSLVRARVLDTLKRVDGRGFDQIRNIEIEVDLIPRSHGSALFTRGDTQALVITALGTPQDEQVVDGFDGDRRERFLLHYNFPSYAVGEAAALRPPGRREIGHGKLAWRAIHPVLPTKADFPYTIRVVSEITESDGSSSMATVCGASLALMDTGVPLKSSVAGIAMGLIKEGDRYAVLSDIIGDEDYLGDMDFKVAGTKDGITALQMDMKIRGIGFDIIEKSLQQAKDGRLFIIGKMDKVIKESREGVRDHVPRMESMIIDKNKIKNVIGTGGKNVREICEKTGVKIEISQDGTVMIYAVSRDAVEEAKNMIMCIVSEPEVGKVFSGVISEIAKYGAFVSFLGGRRGLVHISEIKNEHIGSVSDVLAVDDKVKVLVIGIDKDHVQLSMRRVDQDSGDLLEHESYSSSKKNGPQSGDASGGASGFRDYASGPARERRRSGGSGGRPVRRRSAGSSGSGSGGYYSVPQHVGTPDPVNGNDRRRGSGPQHASGGGGNKKPRFF

SEQ ID NO: 1907 - DNA, 2151 bp, Idiomarina loihiensis L2TR
  CDS (1)..(2151): transl_table=11
gtgaatccaataactaaacaatttcagtacggtcagcacacagtcactttagaaactggcgtaatagcacgtcaggcgactgcttctgtgcttgccagcatcgatgacacaacagtcctggtcactgtggttgcgaaaaaagaagctcgcgaagggcaaaacttttttccattaacggtaaattaccaagagaaaacttacgcagccggtaaaattccaggtggcttctttaagcgtgaaggccgtccaagcgaaaatgaaactctgacttgtcgtttaatcgaccgtccaattcgcccattattccctgatggtttcatgaacgaagtgcaagttgttgcaactgttgtttctgtaaaccctcaaattaatcctgatattgttgccttaattggtacttcagcagcgctgtctatttctggtgttcctttcgcaggcccaatcggtgcagctcgtgttggtgtcgtgaacgatgaatacgttttaaacccaaccgcagatgagttagaaaactcgaaactggacctagtggttgccggtactgataaagctgtcttaatggttgaatcagaagctcaattgctgtctgaagaccaaatgcttggtgccgttatgtacggtcacgaagcaatgcaggacgttattaaagccattactgaatttactgcagaagcaggcaaagagaagtgggattggcaggcacctgcaaaagatgaaagcttacagaccaaaattcgtgaattggcagagcaaggtattggcgaagcctaccgcactaccgacaaagcagaacgtaaaggtaagcttgaccaggttaaagagcagatggtcgagaagctgactgctgaagatgaaaatgtcgatttagaagaatctggcaaaattttccatgacctggaaagtgacattgtccgtagccgtattattgccggtgaaaagcgtattgatggccgcgaccctgacatggttcgtgctattagtgtggctactggtgtattaccgcgtactcacggttcagcattgtttacccgtggtgagactcaggcgttggtaactgcgactttaggtaccgatcgtgatgctcagatgattgatgagctgaccggtatgaacacgaatcgcttcatgctgcattataacttccctccatactgtgttggtgaaacgggtatggttggttcgccaaaacgtcgtgaaattggtcatggtcgtttggctaaacggggtattcaggcggttatgcctagccacgacgagttcccatacaccattcgtgtggtgtcagaaattactgaatcaaacggttcaagctctatggcctcagtttgtggttcttcactggcgttgatggatgcaggtgtaccaatcaagtcttctgtagcgggtattgctatgggcttggttaaagaaggcgacaagcatgttgttctgtctgatattcttggtgatgaagatcacttaggtgatatggactttaaagtagcgggtaacactgatggtattactgcgctgcaaatggacattaaaattgacggcattactcgcgacatcatggaaagtgccttagcgcaggctaaatcagctcgcttacacattctgaaagtgatggacgaagctattggcggtcaccgtgaagaactgtctacttatgcacctcgctttaccaccatcaaaattgatcaggacaagatcaaagacgttatcggtaaaggcggagcggttattcgcgagctgactgagtcaactaataccaacattgagattggtgatgatggtactatcaaagttgcagccagcgaccaggctgatgctgacgccgctattgagaaaatcaaacagctaacggctaacgttgaagttggcaaaatttaccagggtaaagtagcacgtatcgtagactttggtgcctttgttactgttctgcccggtaaagatggcttagttcacatttctcaaattgcagaagaacgtgttaacgacgtaaatgaatacctgaaagttggtgatgttgttccggttaaagtactggaaattgaccgtcagggtcgcgtacgtttaagcatgaaagaagcggctgagaaaaaagaagaaccagcacctgaagcgccggcagagccagcagctgaagaagaaaacaaaagcgaagagtaa

SEQ ID NO: 1908 - protein, 716 aa, Idiomarina loihiensis L2TR
MNPITKQFQYGQHTVTLETGVIARQATASVLASIDDTTVLVTVVAKKEAREGQNFFPLTVNYQEKTYAAGKIPGGFFKREGRPSENETLTCRLIDRPIRPLFPDGFMNEVQVVATVVSVNPQINPDIVALIGTSAALSISGVPFAGPIGAARVGVVNDEYVLNPTADELENSKLDLVVAGTDKAVLMVESEAQLLSEDQMLGAVMYGHEAMQDVIKAITEFTAEAGKEKWDWQAPAKDESLQTKIRELAEQGIGEAYRTTDKAERKGKLDQVKEQMVEKLTAEDENVDLEESGKIFHDLESDIVRSRIIAGEKRIDGRDPDMVRAISVATGVLPRTHGSALFTRGETQALVTATLGTDRDAQMIDELTGMNTNRFMLHYNFPPYCVGETGMVGSPKRREIGHGRLAKRGIQAVMPSHDEFPYTIRVVSEITESNGSSSMASVCGSSLALMDAGVPIKSSVAGIAMGLVKEGDKHVVLSDILGDEDHLGDMDFKVAGNTDGITALQMDIKIDGITRDIMESALAQAKSARLHILKVMDEAIGGHREELSTYAPRFTTIKIDQDKIKDVIGKGGAVIRELTESTNTNIEIGDDGTIKVAASDQADADAAIEKIKQLTANVEVGKIYQGKVARIVDFGAFVTVLPGKDGLVHISQIAEERVNDVNEYLKVGDVVPVKVLEIDRQGRVRLSMKEAAEKKEEPAPEAPAEPAAEEENKSEE

SEQ ID NO: 1909 - DNA, 2100 bp, Azoarcus sp. EbN1
  CDS (1)..(2100): transl_table=11
ttgcctaccgctatcaagaaaacctttgcgtacggtgcccataccgtaacgctcgaaacaggcgagatcgctcgccaggccggcggtgccgtgatcgtcaacatggatgacacgatcgtgctggcaacggtcgtcgccgccaaggaggccaaggcgggccaggatttcttcccgcttaccgtcgactacgtcgagaagttctacgccgcggggcgcatccccggcggcttcttcaagcgcgaaggccgtcccaccgagaaggaaacgctgaccagccgcctgatcgaccgtccgatccgtccgcttttcccggaaggcttctataacgaagtccaggtcatcatcaccgtgctgtcgctcaacccggaggtcgatccggacatccccgcgatgattggcgcatcggcggcgctggcgatttccggcgttccgttcgacggcccgatcggcgcatgccgcgtcgggtacagcggcggccagtacctgctcaacccgacggtcgagcagctcaaggcgagcgagctcaacctggttgtcgccggtaccgaagcggccgtgctgatggtcgagtcggaagccagggaactgtcggaagaagtcatgctcggtgcggtcgtgttcggccaccagcagatgcaggtcgcgatccgcgcgatcaacgagctggtcgaagtggcaggcaagcccgagtgggactggcagccgccggcgaaaaacgagccgctgatcgcccgcatcaaggaactggccggtgcccatctcgaagaagccttccgcatcacgagcaagcaggcccgcacccagcgtatcaacgagatccgcaagcagacgttcggcgtcgtggccgacggggtcgaagtgccgccgaccggcaacgagctgaaggacatctttcacgacctcgaagccggtgtcgttcgcagccgcatcctcgcaggcgagccgcgcatcgacggacgcgatacgcgtaccgtgcggcccatcgacatccgcgtcggcgtgctgccgcgcacgcacgggtcggcattgttcacgcgcggcgaaacccaggcgctcgtcattgcgacgctcggcaccgggcgcgacgaacagatcatcgacgcgatcgccggcgagtaccgcgaaagcttcttgctgcattacaactttccgccgttctccaccggtgaaacgggtcgcatgggcgtgacgaagcgccgcgaggtcggacatggccgcctcgccaagcgcgcgctgatcgcggccctgccggcggacgaggacttcagctatacggttcgcgtcgtgtccgagatcaccgagtcgaacggttcgagctcgatggcgtcggtatgcggggcgtcgctggcaatgatggacgcgggcgtgccgatgaaggcgcacgtcgctggcatcgcgatgggcctgatcaaggaaggcaatcgcttcgccgtcctgaccgacattctcggcgacgaggatcatctcggcgacatggacttcaaggtcgcgggcaccgagaacggcatcaccgcactgcagatggacatcaagatccagggcatcacgaaggagatcatgcaggtcgctctggcccaggccggcgagggacggatccatatcctcgcgttgatgaagcaggcgctggcgtcgcatcgcggcgaagtgtcggagttcgctccgcgcatgctgacgatgaagatcaatccggagaaaatccgcgacgtcatcggcaagggcggggcagtgatccgcggcctgcaggaagaaaccggtactgtcatcgaactgcaggacgacggcagcgtcacgatctcgtcggtcagcgccgaaggcgcgcagctcgcgaaggaaaagatcgaggcgatcacggccgaagtcgaagtcggcaaggtctacaacggaacggtggtccgcctcctggatttcggcgcgatcgtcaacatcatgcccggtcgcgacgggctgctgcacgtctcgcagatcgcgaacgagcgcgtcaataacgtcgccgactacgtgaaggaagggcaggcggtgcgcgtcaaggtgctggagaccgacgagcgcggcaagattcgcctgagcatgaaggcactgctggaccagccggccgagtaa

SEQ ID NO: 1910 - protein, 699 aa, Azoarcus sp. EbN1
MPTAIKKTFAYGAHTVTLETGEIARQAGGAVIVNMDDTIVLATVVAAKEAKAGQDFFPLTVDYVEKFYAAGRIPGGFFKREGRPTEKETLTSRLIDRPIRPLFPEGFYNEVQVIITVLSLNPEVDPDIPAMIGASAALAISGVPFDGPIGACRVGYSGGQYLLNPTVEQLKASELNLVVAGTEAAVLMVESEARELSEEVMLGAVVFGHQQMQVAIRAINELVEVAGKPEWDWQPPAKNEPLIARIKELAGAHLEEAFRITSKQARTQRINEIRKQTFGVVADGVEVPPTGNELKDIFHDLEAGVVRSRILAGEPRIDGRDTRTVRPIDIRVGVLPRTHGSALFTRGETQALVIATLGTGRDEQIIDAIAGEYRESFLLHYNFPPFSTGETGRMGVTKRREVGHGRLAKRALIAALPADEDFSYTVRVVSEITESNGSSSMASVCGASLAMMDAGVPMKAHVAGIAMGLIKEGNRFAVLTDILGDEDHLGDMDFKVAGTENGITALQMDIKIQGITKEIMQVALAQAGEGRIHILALMKQALASHRGEVSEFAPRMLTMKINPEKIRDVIGKGGAVIRGLQEETGTVIELQDDGSVTISSVSAEGAQLAKEKIEAITAEVEVGKVYNGTVVRLLDFGAIVNIMPGRDGLLHVSQIANERVNNVADYVKEGQAVRVKVLETDERGKIRLSMKALLDQPAE

SEQ ID NO: 1911 - DNA, 2247 bp, Zymomonas mobilis subsp. mobilis ZM4
  CDS (1)..(2247): transl_table=11
atgttcgatattaaacgccaggaaatcgattggggcggaaaaaaactgacactggaaaccggacaggttgcccgtcaggcagatggcgccgtcattgcgaccttaggtgaaacggtcgtattatgcgcggtaacggcagcaaaaacggtaaaagaaggtcaggatttctttcctttgaccgtccattatcaggaaaaatattcagcagcaggccgtattcccggtggctttttcaagcgtgaacgtggcgcaaccgaacgggaaacgctgatttcacggttaatcgaccgtccaatccgtcctctgtttccggaaggtttctataacgaaaccttggtcattgcgcaggtcatgtcctatgacggcgagaatgaaccggatatcttggcgatgatcgctgcttctgcggctcttgctctttccggtgtgcctttcttgggccccatcggtgctgcccgtgtgggttatcaagatggcgagttcattcttaacccgaccttggaacagcttgaaaaaagtgatcttgatctggttgtcggggctacccgtgatgccgtgatgatggttgaatcggaagcgaatgagcttcccgaagaagtcatgctcaatgccgtttcttttgcgcatgaatctttacagccggttatcaaagctatcatcaatctggcagaacaggccgctaaagagccttgggaactggtcagctatgatgacagcgcattggctgccaaagtcgaagaactctgctacgacaatttcgataaggcctatcgtctgactcgcaaggctgaacgtgttgacgccttgagcaaggccaaagcggttcttgacgaagccttcccagaagctgatccgacagaaaagctgcgcatccagaagcttgcgaagaagctggaagcaaaaatcgtccgcaccgccattctgaaagaaggccggagaattgacggacgcgatctgaaaacagttcgcccgatccgctctcaggttggattcttgccccgcacgcatggttctgccctgtttacgcgtggtgaaacacaggctttggtttcaaccacccttggaacggcggatgctgaacagatgatcgacggtttaaccggccttcattatgaacgcttcatgctgcattacaacttccccccatattcggtcggtgaagttggtcgttttggtgctccgggtcgtcgtgaaatcggccatggtaaactggcatggcgtgcgcttcatccggttttgccgagcaaggctgatttcccgtataccatccgtgttttgtcggatatcaccgaatctaatggttcctcttccatggcaaccgtttgcggtggctgccttgcattgatggatgccggtgttcccttaacgcgtccggtttccggtatcgccatgggtcttattctggaaaaagacggcttcgctattttgtccgatatcatgggtgatgaagatcacttgggtgatatggactttaaggtcgccggtaccgaaaaaggtatcaccagcctccagatggacatcaaggttgctggcattaccgaagaaatcatgcagaaagctttggaacaggctaaaggtggccgtgctcatatcttgggtgaaatgtccaaagcgctgggtgaagtccgctccgaaatttctaatttggcaccgcgcattgaaacaatgagcgtaccaaaagacaaaatccgtgatgttatcggaacgggcggaaaagttatccgtgaaatcgtggcgaccacaggtgccaaggtcgatatcgaagatgacggcacggttcgtctgtcttcttctgatccggccaatattgaagcagcccgtgaatggatcaatggtattgttgaagaaccggaagtaggcaaaatctataacggtaaagtcgtcaatatcgttgatttcggtgccttcgtaaacttcatgggtggccgtgacggcttggtacatgtttcggaaatcaagaacgaacgtgtcaacaaggtcagcgatgtcctgtccgaaggtcaggaagtcaaagtcaaggttcttgaaattgacaaccgtggcaaggttcgcctgtctatgcgtgttgtcgatcaggaaaccggcgcagagctggatgataaccgtccgccacgtgagaacgcagaacgtcgcggtggtgagcgtcctcgtcgtgatcggggccctcgtcgggaatctggcgatcgtccggcaagacgtgatatggaaccggaatttgctccggcattcctgcgcaaagatagctaa

SEQ ID NO: 1912 - protein, 748 aa, Zymomonas mobilis subsp. mobilis ZM4
MFDIKRQEIDWGGKKLTLETGQVARQADGAVIATLGETVVLCAVTAAKTVKEGQDFFPLTVHYQEKYSAAGRIPGGFFKRERGATERETLISRLIDRPIRPLFPEGFYNETLVIAQVMSYDGENEPDILAMIAASAALALSGVPFLGPIGAARVGYQDGEFILNPTLEQLEKSDLDLVVGATRDAVMMVESEANELPEEVMLNAVSFAHESLQPVIKAIINLAEQAAKEPWELVSYDDSALAAKVEELCYDNFDKAYRLTRKAERVDALSKAKAVLDEAFPEADPTEKLRIQKLAKKLEAKIVRTAILKEGRRIDGRDLKTVRPIRSQVGFLPRTHGSALFTRGETQALVSTTLGTADAEQMIDGLTGLHYERFMLHYNFPPYSVGEVGRFGAPGRREIGHGKLAWRALHPVLPSKADFPYTIRVLSDITESNGSSSMATVCGGCLALMDAGVPLTRPVSGIAMGLILEKDGFAILSDIMGDEDHLGDMDFKVAGTEKGITSLQMDIKVAGITEEIMQKALEQAKGGRAHILGEMSKALGEVRSEISNLAPRIETMSVPKDKIRDVIGTGGKVIREIVATTGAKVDIEDDGTVRLSSSDPANIEAAREWINGIVEEPEVGKIYNGKVVNIVDFGAFVNFMGGRDGLVHVSEIKNERVNKVSDVLSEGQEVKVKVLEIDNRGKVRLSMRVVDQETGAELDDNRPPRENAERRGGERPRRDRGPRRESGDRPARRDMEPEFAPAFLRKDS

SEQ ID NO: 1913 - DNA, 2145 bp, Silicibacter pomeroyi DSS-3
  CDS (1)..(2145): transl_table=11
atgtttgatgtaacgacgaaatcgatgcagtggggcgaagaaacgctgacactggaatcgggcaagattgcccgtcaggccgacggttcggtggtcgccaccctgggcgagacccgcgtgatggccaacgtgacctttgcccgtgagcagaagccgggccaggacttctttcccctgacggttcactatcaggaaaaatactatgccgccggcaaggtgccgggcggtttcttcaagcgcgaggcgcgcccgaccgagaaagagacgctgaccgcgcgtctgatcgaccgtccgatccgcccgctgttcgtgccgggcttcaagaacgaagtgctggtgatgtgcaccgtgctttcgcacgacctcgtcaacgatcccgatatcgttgcgatgatcgccgcttcggctgcgctgaccatctcgggcgtgcccttcatgggcccgatcgcaggctgccgcgtcggctatgtcgatggcgaatatgtcctgaacccgaccgtcgacgacatgcaggacctgcgcctgaaccccgaacagcgtctggacctggttgttgccgggaccaaggacgccgtgatgatggtggaatccgaggcctatgaactgaccgaggccgagatgctgggcgccgtgacctttgcgcacgcacagatccagccggtggtcgacctgatcgtttcctttgccgaacaatgcgccaaggaaccgttcgatttcaccccgccggattactccgacctctacgccgccgtcaaagccgccggtgaagagcagatgcgcgccgcgttcgcgatcaccgacaagcaggagcgcaccgcggccgtagccgccgcgcgcgaggccatcaaggccgcgctgaccgaggaacagctggcagacggcaacctcggctcggccctgaagaaactcgaagccggcattctgcgcggcgacgtggtcaagggtggcaagcggatcgacggacgtgacaccaccaccgtgcgtccgatcgtggccgaaaccggcctgctgccgcggacccacgggtctgccctgttcacccggggcgagacccagggtctggtcgtgaccacgctgggcaccggcgatgacgaacagttcatcgacgcgctgcacggcaacttcaaatccaacttcctgctgcattacaacttccccccctattcggtgggcgaggttggccgcgtggggtcgcccggccgtcgcgaaatcggccatggcaaactggcctggcgcgcgcttcaggcggtgctgccggcgccgaccgacttcccctataccatccgcgtggtgtccgagatcaccgagtccaacggctcgtcctcgatggcatcggtctgcggcgggtcgctgtcgatgatggatgcgggcgtgccgctgaaatccgccgttgccggtgtggccatgggcctgatcctggaagacgacggctcttatgcggttctgaccgacatcctgggtgacgaagaccacctgggtgacatggacttcaaggtggcgggcaccgaaaacggcatcacctcgctgcagatggacatcaaggtcgcgggcatcacgcccgagatcatggagaaagccctgtcgcaggccaaggatggccggatgcacattctggccgagatgaacaaggcgctgtccggcgctgccgacttctcggtccacgcaccgcgcatcgagaccatgcagatccccaccgacaagatccgcgaagtgatcggttcgggcggcaaggtgatccgcgagatcgtcgaagtgtcgggcgccaaggtcgacatcaacgacgatggcatcatcaagatcgcctcgcccaacggcgactcgatcaagaaggcctatgacatgatctggtccatcgtggccgagcccgaagagggtcaggtctataccggcaaggtcgtgaagatcgtcgatttcggcgccttcgtgaacttctttggcaagcgcgacggtctggtgcatgtgtcccagatcgaaaaccgccgcctgaaccatccctcggacgttctgaaggaaggccaggaagtgaaggtcaagctcttgggctttgacgatcgcggcaaggtgcgcctgtcgatgaaggttgtcgatcaggaaaccggcgaagagatcgttccggagaagaaagaagcctctgaggcggaataa

SEQ ID NO: 1914 - protein, 714 aa, Silicibacter pomeroyi DSS-3
MFDVTTKSMQWGEETLTLESGKIARQADGSVVATLGETRVMANVTFAREQKPGQDFFPLTVHYQEKYYAAGKVPGGFFKREARPTEKETLTARLIDRPIRPLFVPGFKNEVLVMCTVLSHDLVNDPDIVAMIAASAALTISGVPFMGPIAGCRVGYVDGEYVLNPTVDDMQDLRLNPEQRLDLVVAGTKDAVMMVESEAYELTEAEMLGAVTFAHAQIQPVVDLIVSFAEQCAKEPFDFTPPDYSDLYAAVKAAGEEQMRAAFAITDKQERTAAVAAAREAIKAALTEEQLADGNLGSALKKLEAGILRGDVVKGGKRIDGRDTTTVRPIVAETGLLPRTHGSALFTRGETQGLVVTTLGTGDDEQFIDALHGNFKSNFLLHYNFPPYSVGEVGRVGSPGRREIGHGKLAWRALQAVLPAPTDFPYTIRVVSEITESNGSSSMASVCGGSLSMMDAGVPLKSAVAGVAMGLILEDDGSYAVLTDILGDEDHLGDMDFKVAGTENGITSLQMDIKVAGITPEIMEKALSQAKDGRMHILAEMNKALSGAADFSVHAPRIETMQIPTDKIREVIGSGGKVIREIVEVSGAKVDINDDGIIKIASPNGDSIKKAYDMIWSIVAEPEEGQVYTGKVVKIVDFGAFVNFFGKRDGLVHVSQIENRRLNHPSDVLKEGQEVKVKLLGFDDRGKVRLSMKVVDQETGEEIVPEKKEASEAE

SEQ ID NO: 1915 - DNA, 2082 bp, Francisella tularensis subsp. tularensis SCHU S4
  CDS (1)..(2082): transl_table=11
gtgaaaatatttagagaagtttttgaactaggtaacaaagaaataattcttgaaacaggtggtatggcacgtcaagcagatgggtcagtgactgtaagttgtgggaataatgttgtattggtgacaacagtagttaaaaaatcagtagctgatggtactgacttttttcctttatctgtgcattatttagagaaaacttacgctgctggtaaaataccgggtggtttcttaagaagagagggaagaccttcagaagaacaaattcttatttctaggctaatagacagatctataagaccatcatttccagatgggttttttaacgaaattcaaatcgttgctacagttttatcttatgatggtgctttttcacctgatatactagctttaataggtgcttcggcatctttagcaatatctggagcaccttacgatgatgttgttgctggtgtaagagtgggttatacaaatggtaagtatattcttaatccaaataaacaggatttgagagattcagatctagatctagtagtctctggaacagatgatgctattttaatggttgaatctgaagctaatagccttccagaatctgttatgcttggtggtatcttatatgcgcacaagcatttaaaaactattattaactcgattaatagacttgctaaagtagcatctaaacctcgtatagaatattctatatatcaaatcaacaagtttcttaaatcacaaattaagtcacaattttttggtgaaattaagaatgcctatactatagcgtcaaagcaagaaagaaacttaaaacttaatgcaattagaaaaaatgttcttgagtatattttctctagtgatgttgatggtaacgagtatactgaaaaagaaatattagaagctttccacgatattgaaaaagatcttgtaagatcaaatattcttgagggtaaaccaagaatagatggtagatgtacagagactatccgacctatcaatgtcaaaataggtgttttaccgggggtacatggatctgctttgtttacacgtggtgagactcaagctttagttgtaactactttaggtagtgatagagatgcacagcttgtggaatctttagatggcatagagaaatgtcgttatatgttgcattataactttccaccatattctgtgggagagtgtggtatggttggtatggctccaaagcgtcgcgagattggtcatgctaacttagctaagcgcgcaactcaagcagtattccctaatgaagaagcatacccgtatgttgttagagttgtctctgaaattctagagtcaaatggttcaagctctatggcgacagtatgtggttcttctttatcaatgatggatgctggtgtaccaattgctgagccagtagcaggtattgctatgggacttattaaagatggtgcaaaatatgctgtgttatcagatattctaggcgatgaagatcatttgggtgatatggattttaaagttgctggtactagatatggtgttacagcattacagatggatattaaaatcaaaggcatctcaagagaaattcttgagcaagcattagagcaggcaagagcaggtagattacatattctaggaatcatgaatgaagtaataaaagagcataaagaagctgtatctgatgtggcgccacaaattcatgtgatgaatataaatcctgctaaaattaaagatgtcgttggtcgaggaggtgctactgtaaaaggtatagttgagaagactggtgcacaaattgatactagtgattctggtgaagttaaggtttttgctaaagacaaaaaatctatggatatggctgtagcaatgatagaagaaatcgttgcagaagtggaagaagggcaagtttacaagggcaaaatagttaagcttttagattctggagtatttgttaatcttcttggtagtcaagatggatatttaccattctctgaaattgaacaagctggcatgaaaactaactcgttagtagaaggtcaaggcttagaagttttagttcaaaatatcgatagaggtggtagagttaaactttctcttgtagcgaggtaa

SEQ ID NO: 1916 - protein, 693 aa, Francisella tularensis subsp. tularensis SCHU S4
MKIFREVFELGNKEIILETGGMARQADGSVTVSCGNNVVLVTTVVKKSVADGTDFFPLSVHYLEKTYAAGKIPGGFLRREGRPSEEQILISRLIDRSIRPSFPDGFFNEIQIVATVLSYDGAFSPDILALIGASASLAISGAPYDDVVAGVRVGYTNGKYILNPNKQDLRDSDLDLVVSGTDDAILMVESEANSLPESVMLGGILYAHKHLKTIINSINRLAKVASKPRIEYSIYQINKFLKSQIKSQFFGEIKNAYTIASKQERNLKLNAIRKNVLEYIFSSDVDGNEYTEKEILEAFHDIEKDLVRSNILEGKPRIDGRCTETIRPINVKIGVLPGVHGSALFTRGETQALVVTTLGSDRDAQLVESLDGIEKCRYMLHYNFPPYSVGECGMVGMAPKRREIGHANLAKRATQAVFPNEEAYPYVVRVVSEILESNGSSSMATVCGSSLSMMDAGVPIAEPVAGIAMGLIKDGAKYAVLSDILGDEDHLGDMDFKVAGTRYGVTALQMDIKIKGISREILEQALEQARAGRLHILGIMNEVIKEHKEAVSDVAPQIHVMNINPAKIKDVVGRGGATVKGIVEKTGAQIDTSDSGEVKVFAKDKKSMDMAVAMIEEIVAEVEEGQVYKGKIVKLLDSGVFVNLLGSQDGYLPFSEIEQAGMKTNSLVEGQGLEVLVQNIDRGGRVKLSLVAR

SEQ ID NO: 1917 - DNA, 2151 bp, Synechococcus elongatus PCC 6301
  CDS (1)..(2151): transl_table=11
atgccacaactcagcaagtcgttgtcctttgatggacgcgatattcggctggagctgggcctgttcgccccacaggctggaggttccgttctgattagctcaggggacaccgccgttttggtggctgcgacccgttcgacggcacgggaagggattgattttctgccgttgactgtcgattacgaagagcggatgtatgcagccggtcgcattccgggcggctttctccgccgtgaagggcgtcctcctgaacgcgcaaccctgactagccgcttgatcgatcgcccgctgcgtccgctgttccccagttggctgcgggatgatctgcaggtcgtggcaaccacactctcgatggacgagacagttccccccgacgttctggcggcgactggcgcttcgatcgctaccttagttgccaaaattcccttctacgggccaatggcagcggtacgagtaggcttagttggcgatgatttcatcatcaaccccacctaccgcgagattgaaaaaggcgaccttgacctcgtagtggctggtacccccgctggggtgatcatggtcgaggctggagctaaccagctgccagaagccgacgtgatcgaagcgatcgactttggctatgaagccgttcaagagttgattaaggctcagcagagtctgctggcggagttgggcatcgagcagatcctgccggaagcacccaacgccgacaataccctcgagaacttcgtccgcgatcgcgccagtagcggtgttcagcaagtgctgcagcactttagcttcaccaagtcggagcgcgatgcagccttagatgaggttaaagccagcgtcgttgaagcgatcgctgctctgccagaagaggatccggttcgtagcgtcactgccgcagaacccaaagcgctgggcaacaccttcaaagccctgaccaaaaccttgatgcgtcagcaaatcctgcgcgatggtgttcgggtcgatggtcggaaactcgatcaggtgcggccgatctccagtcaggttggcttgctgccgccgcgagtccatggttctggcctgtttcagcggggtctgacgcaggtgctgtcgatcgcgactctcggcacgcctggggatgcgcaagaactggatgatctgcatcccgacacccagaagcgctacctgcatcactacaacatgcccccctattccgttggcgaaacgcggccgatgcgatcgcccggtcggcgggaaattggccatggcgctttggcagagcgcgcgttgcttcccgtgttgccgtccaaggaagaattcccctacgtgattcgggtggtttccgaggtgctgtcctccaacggctccacctcgatgggctccgtctgcggctcgacgctggcgctgatggatgctggcgtccccatcaaaaagccggtcagcggcgcagccatggggctgatccgcgaaggcgatgagtaccgtgtcctgaccgacatccaagggattgaagacttcttgggtgacatggactttaaggtagcgggcaccgatcagggcattacggctctgcagatggatatgaaaatccatggtctgcccttagagatcattgcggatgccatcaaccaggcgaagccggcgcgtttgcacatcctcaacaagatgctggaagcgatcgccacgcctcgggctgacctttcgacctatgcgccccgcctgttccggattcaaatcaatcctgagcaaattggcttggtcattggtcctggtggcaaaacaatccgctctatcactgagcaaactggtgccaagatcgacatcgaagatacgggagccgtgaccatctcggcagtcgatgctgattcggcgctgcgagcgaagtcgatcatcgaaggcatgacccgcacaatcactgccggcgatgtctacatcggcaaagtgacccgcatcatcccgattggagcctttgtggagttcctgccgggcaaagaaggcatgattcacatctcgcaaattgccgattatcgggtggctcgtgttgaagatgagctgacggtgggcgatgaggtcgtggtcaaagtccgcgagattgaccaaaagggtcgggttaacctcacccgtaaagggattgatccggaggaagtctcagcagcacgggcggctgtcgaagcgtcttag

SEQ ID NO: 1918 - protein, 716 aa, Synechococcus elongatus PCC 6301
MPQLSKSLSFDGRDIRLELGLFAPQAGGSVLISSGDTAVLVAATRSTAREGIDFLPLTVDYEERMYAAGRIPGGFLRREGRPPERATLTSRLIDRPLRPLFPSWLRDDLQVVATTLSMDETVPPDVLAATGASIATLVAKIPFYGPMAAVRVGLVGDDFIINPTYREIEKGDLDLVVAGTPAGVIMVEAGANQLPEADVIEAIDFGYEAVQELIKAQQSLLAELGIEQILPEAPNADNTLENFVRDRASSGVQQVLQHFSFTKSERDAALDEVKASVVEAIAALPEEDPVRSVTAAEPKALGNTFKALTKTLMRQQILRDGVRVDGRKLDQVRPISSQVGLLPPRVHGSGLFQRGLTQVLSIATLGTPGDAQELDDLHPDTQKRYLHHYNMPPYSVGETRPMRSPGRREIGHGALAERALLPVLPSKEEFPYVIRVVSEVLSSNGSTSMGSVCGSTLALMDAGVPIKKPVSGAAMGLIREGDEYRVLTDIQGIEDFLGDMDFKVAGTDQGITALQMDMKIHGLPLEIIADAINQAKPARLHILNKMLEAIATPRADLSTYAPRLFRIQINPEQIGLVIGPGGKTIRSITEQTGAKIDIEDTGAVTISAVDADSALRAKSIIEGMTRTITAGDVYIGKVTRIIPIGAFVEFLPGKEGMIHISQIADYRVARVEDELTVGDEVVVKVREIDQKGRVNLTRKGIDPEEVSAARAAVEAS

SEQ ID NO: 1919 - DNA, 2133 bp, Bacillus clausii KSM-K16
  CDS (1)..(2133): transl_table=11
atggatcaagaacgtcatgagttttcaattgactgggctggccggacattaagtgtcgaagtcggtcaattagccaaacaagccaacggagcggttctcgtccgttatggcgatactgctgttctatcaacagcgactgcttcaaaagaaccgaaagaccttcctttctttccgttaacggtcaattatgaagaacgtttatatgcagcgggaaaaattccaggtgggtttattaaaagggaagggcgtccaagcgaacgggcgattttaacaagccgtttgattgaccgtccaattcgaccgctgtttccagacgggtttcgtaacgatgtccaagtaatcagcattgtgatgagctctgaccaagacgcctctcctgaaatggcagcaatgatcggttcatcactggctctgtgtgtgtctgacattccgtttgaagggccgattgctggtgtgactgttggaagaattaatggcgaattcattatgaacccaacgccagctcaacttgcagagagcgacattgacctaactgttgctggaacaaaagaagcgatcaacatggtcgaagccggtgctaaagaagtcccagaagacgtaatgttagaagccattttagccgggcatgagaacattaaaaaaatgattgctttccaagaaaaagtggtggaagtttgcggcaaagaaaaacgtgaagtgcagctgaaaacttttgacgctgaattggaagcacgcttgcgtgaaagcgcggaagcgagcatcaaagaagcggttcggattgcggaaaaacacgcgcgtcaagatgcgatcgatgagatcattgctgcacaagtggaacaacattcagacgatgacagcatcaatgtggatgaagtaaaagagattttgcaaatgttcgtgaaggaagaagtccgtcgcttaattactgtcgaaaaaatccgtcctgatggacgaggcgttgatgaaatccgcccgctctcgtcacaaatcaagctgttgcctcgtacacatggctccggtctctttacaagaggacaaacacaagcacttagtgtctgtacgcttggtgcccttggcgatgtacaagtgctagatggtttgggcatcgaagagacgaagcggtttatgcaccactacaattttccgcagtttagcgttggcgaaaccggtccgattcgcgcgccaggacgccgggaaatcggtcatggagcccttggcgaacgtgcgcttgagcaagtcattccaagtgagcaagagtttccttatacgatccggctcgtatctgaagtgttggagtcgaacggatcaacttcacaagcgagcatttgtgcaagcacgttagcgatgatggacgcaggtgtgccaattaaagcgccagtggcaggcattgcgatggggcttgtcaaacaaggggaacatatgacggtgctcactgatatccaaggcatggaagacgcccttggcgatatggactttaaagtcgctggcacagcgaatggcgttacagctttgcaaatggatataaaaatttccggcattaaccgggaagtgctcgaacaagcccttgaacaagcaaaacaaggccgaatgaaaattttaagcaacatgatggaggccattgacaaacctcgtgccgagttgtcggagtatgcgccaaaaattttgacgctaacgatcaatcctgacaaaattcgcgatgtcattggaccaagtgggaaagtcattaataaaattattgaggaaacaggcgtgaaaatagacattgagcaagacggcactgtctacatttcttccctagataccgccatgaaccaaaaagcgaaacaaatcattgaagatcttgttcgagaagttcaagtcggcgaaacataccatgggaaagtcaaacgcattgaaaagtttggtgcctttgtcgaactgtttaaaggcaaggatggcttgctgcatatctcacaaattgctgaagagcggatcaacaaagtcgaagatgtctttaagctcggtgatgaagtagatgttcgcgtcactgaaattgacaatcaaggacgagttaatttgtctcgcaaagtcctgttaaaagaacaacgggaaaagctagaaaaagaagaagcaaaagatacagcgaacgaataa

SEQ ID NO: 1920 - protein, 710 aa, Bacillus clausii KSM-K16
MDQERHEFSIDWAGRTLSVEVGQLAKQANGAVLVRYGDTAVLSTATASKEPKDLPFFPLTVNYEERLYAAGKIPGGFIKREGRPSERAILTSRLIDRPIRPLFPDGFRNDVQVISIVMSSDQDASPEMAAMIGSSLALCVSDIPFEGPIAGVTVGRINGEFIMNPTPAQLAESDIDLTVAGTKEAINMVEAGAKEVPEDVMLEAILAGHENIKKMIAFQEKVVEVCGKEKREVQLKTFDAELEARLRESAEASIKEAVRIAEKHARQDAIDEIIAAQVEQHSDDDSINVDEVKEILQMFVKEEVRRLITVEKIRPDGRGVDEIRPLSSQIKLLPRTHGSGLFTRGQTQALSVCTLGALGDVQVLDGLGIEETKRFMHHYNFPQFSVGETGPIRAPGRREIGHGALGERALEQVIPSEQEFPYTIRLVSEVLESNGSTSQASICASTLAMMDAGVPIKAPVAGIAMGLVKQGEHMTVLTDIQGMEDALGDMDFKVAGTANGVTALQMDIKISGINREVLEQALEQAKQGRMKILSNMMEAIDKPRAELSEYAPKILTLTINPDKIRDVIGPSGKVINKIIEETGVKIDIEQDGTVYISSLDTAMNQKAKQIIEDLVREVQVGETYHGKVKRIEKFGAFVELFKGKDGLLHISQIAEERINKVEDVFKLGDEVDVRVTEIDNQGRVNLSRKVLLKEQREKLEKEEAKDTANE

SEQ ID NO: 1921 - DNA, 2160 bp, Campylobacter jejuni RM1221
  CDS (1)..(2160): transl_table=11
atgcaatacagcatagaaattaacaaaaatacagaaatatttaatatagacaaagtcgccaaacaagctgccggtgctgttttaatgagacaaggcaaaagcgttgttctagctacagttgcaagagaagaaaaacaagttgaagaagattttttacctctaaccgtccaatacatcgaaaaggcttatgctgcaggaaaaatccctggtggttatgtcaaaagagaaaccaagccaagcgatgcagaaaccttaacagcacgcattattgatagaagcttacgccctctttttccaaaaggctatgcttatccgactcaaatcgttgtgatggttctctcagctgatcctaaagtagatttgcaagtaatgagcttaaatgccgcaagcgtggcactttatcttagtgatatacctatgaaagctccagtatgtggtgtgcgtataggaaagatagatggaaatttcatacttaatccaaacaatgaagagcttcaaaatagcaccctagatctctatgtagcaggtgtaaaagatgagcttttgatgatagaaatgagagccttacctgatcaaaaagaaaatgaaatctttatcgaagctccttatgctgatgttttaactcaaaccacttcacaaaatatgaatgaacttagcgaagatgaaattttagaagctctaaatttagctcaaaaagctatattaaatggttcaaatgcttatgaagaagcctttagcaaacacaaaaaaaattctcaaatcgaactaaaaaatgagattgaatatcctgaaattttagcttttatagaaaataatttccaaaaacaaatcaaagaagccatcaaccaaatggcaaaaagcgaaagagcaagcgaactaaataaaatcgctaaagaaatttcaaatcttgaaatcgctaaagagtggagcgaagaaagtgtcttaaataccttagctaaagtcaaacgcaaacttattcgtgggcaaattttaaatgaaggcaaaagagctgatggtagaagtttaaacgaagtgcgtcctattagtatagaaaccaatatcttgccaaacgctcatggttcttgtcttttcactcgtggacaaactcaagccctagtggttgcaaccttaggcggagaaaacgatgctcaaatgatagacttgcttacagaaaaaaatcctataagcgaacgctttatggtaaattataattttccaggtttttcagtaggcgaagcaagtcctatcaaagctccaggaagaagagaactaggacatggaaatttagccaaaagagcactttatccaagtgtggatgaaaactatccttatgtaatccgcttagtcagtgaaattttagaaagcaatggctcaagttctatggcaacggtttgtggcggatctttagccttaaaagcagcaggagtgccaagcttaaaacttgttgcaggagtagccatggggcttatctttgaagataacaagtatgctgttttaacagatatcatgggacttgaagatcatgatggggatatggactttaaagtagcaggaagcaaagacggcgttactgctcttcaaatggatataaaactaggtggaatcgatcaagaaacactaaaacaagctttataccaagccaaagaaggaagaattcacattctaaatatcatggaagaagccgccaaagaaatcatagtcaatgaagaagttttacctaaacttgagctttttagcgttgatccttcaaaaatcgttgatattataggacaagccggaaaaaccatcaaagaaatcgtagaaaaatttggcgtttctatagacttagatcgcgaaaaaggtgaagtaaaaatagcaggtagtcaaaatgagcaaatcaaagccgcaaaagactacatcataaacatcacaagctctcaaaaaggaactaaaaaaggctctaaagacaaagatatatcaggctttgaacttgggcaagaatttcaaggtattgttaaaaaaatcgctccttttggagcctttgtggaacttaaaaatggtgttgatggtttattgcatagttcaaaaagcaagcatcttaatttaagcgaaaaccaaagcttaaaagttaaaatcagcgaaattaaaaacggaaaaatttctgtggatttgtgtgagtga

SEQ ID NO: 1922 - protein, 719 aa, Campylobacter jejuni RM1221
MQYSIEINKNTEIFNIDKVAKQAAGAVLMRQGKSVVLATVAREEKQVEEDFLPLTVQYIEKAYAAGKIPGGYVKRETKPSDAETLTARIIDRSLRPLFPKGYAYPTQIVVMVLSADPKVDLQVMSLNAASVALYLSDIPMKAPVCGVRIGKIDGNFILNPNNEELQNSTLDLYVAGVKDELLMIEMRALPDQKENEIFIEAPYADVLTQTTSQNMNELSEDEILEALNLAQKAILNGSNAYEEAFSKHKKNSQIELKNEIEYPEILAFIENNFQKQIKEAINQMAKSERASELNKIAKEISNLEIAKEWSEESVLNTLAKVKRKLIRGQILNEGKRADGRSLNEVRPISIETNILPNAHGSCLFTRGQTQALVVATLGGENDAQMIDLLTEKNPISERFMVNYNFPGFSVGEASPIKAPGRRELGHGNLAKRALYPSVDENYPYVIRLVSEILESNGSSSMATVCGGSLALKAAGVPSLKLVAGVAMGLIFEDNKYAVLTDIMGLEDHDGDMDFKVAGSKDGVTALQMDIKLGGIDQETLKQALYQAKEGRIHILNIMEEAAKEIIVNEEVLPKLELFSVDPSKIVDIIGQAGKTIKEIVEKFGVSIDLDREKGEVKIAGSQNEQIKAAKDYIINITSSQKGTKKGSKDKDISGFELGQEFQGIVKKIAPFGAFVELKNGVDGLLHSSKSKHLNLSENQSLKVKISEIKNGKISVDLCE

SEQ ID NO: 1923 - DNA, 2370 bp, Ehrlichia ruminantium str. Welgevonden
  CDS (1)..(2370): transl_table=11
atgtttaatttgataaggaagtctacagagtggggaggaaagaccttagttttagaaagtggtaaaatagcaagacaagctaatggtgctgtagtggtaacttatggtggaactacagtattgtcaacagtggtagcaggtaaggctaaagagcctgtagattttttaccattaactgtacagtttgttgcaaaaagttatgctgtaggtaagattcctggtggttttttaaaaagagaaggtaaaccatctgatagagaaactttaatttctcgtttaattgatagaagtattaggcctttatttccttcaggtttttatgatgaagttagtatagtatgtaatttattatcatatgatacagttactcctcctgaagtgactgcgttaattggtgcaacagctgctctagctatatctggtgttccttttaatggaatggtggtaggagcaagggtaggatacttattgtcagaagataagtatttgttgaatgcatcagctgatgagatgttgtctagctctttagatttgtttttatcaggtaataaagattctgtgttgatggttgagtctgaagcgtctgaactttctgaatctcaaatgttaggtgcaatttcttttgggcatcaaaattgccaagaagtgataaaattaattgaagaatttagagaagaaagtggaatattaccttttggctttataccacatgatattacttcacttgttgatgatatagcttcctcttatacagagagttttagtatagcatattctaatattgtaaaaaaagagcgggtattagaattagaaaaattacgtgaccaagtgttgtctgatatgttggcaaagtatgagcaacctaatggtaacttacaatgtcaatatagtagtcaagatattattagtgcattaaaaagttttgaaaggtctttagtacgttctaaaattattgaaacttcttctagaatagatggacgtgcttttaatggaatacgtgatatcgaaattgaaatagatgttttacctaaaacacatggttctgcattatttactagaggtaatacgcaagcacttgttgttactgcattaggtactccacaagatgaacaaatagttgatgatttagatggcgataggagagagaattttttattgcattataatttccctccatatgcagttggtgagtcagcagcgttacgtgctcctgggagaagggaaataggtcatggtaagcttgcatggaaggctattcgctatgtattgcctgagaagtcagactttccatatactattagggtagtttctgagataacagaatctgatggttcatcttcaatggctactgtctgtggagcttctttagctcttatggatacaggggtacctattaaggcacctgttgctggtattgcaatgggtcttattaaagaaggtgagaaatttatcattctttcagatatattgggtgatgaagatcatcttggtgatatggattttaaagttgctggtacttcatcaggtattactgcgttgcagatggatatgaaaatttctggtataagcattgaagtgattgagaaatcattacttcaagctaaagatggtagaatgcatattttagataaaatgaatttagttatacaagagtctagagagtgtataaagaaccatgctcctagaatagagtctatttttataaacaaggataaaatccgaaatgttataggtagtggtggaaaaaatatccgtgagatttgtgaaaaaacaggtgcaagggttgagatcatgcaggatggcactgtgatgatatatgcaattaataatgatgcagtagaatatgctaaaaatatgattatggatattgtatctgaaccagaaataggaaaggtttttgatggtactgtcattgagattgtaaagtttggagcttttgttagctttttgggaggtaaacgaggtttaattcatattagtgaaataaaaaatgaacatattaatgcagtaggtagtgtcatttctgtaaatgataaagtcaaggttttagttattggaatagatcgtgaatacgttcaactttctatgcgtagggtagatcaagaaactggtgaacctatagatggagagctttataatataagaaaaactaattctgattctgatgattcatttttatcgtcaggtagtgttaataatagacatggaagtgagaaaaaaagacgtggtagtggtaggtctcgtcgtagtagtggtggatctagttatcatagggatgatctacataacaacggttttggtaatggtaaccgttcttttaatgataacagaaatggtaatgaagttcctagaaaacctaggttcttttag

SEQ ID NO: 1924 - protein, 789 aa, Ehrlichia ruminantium str. Welgevonden
MFNLIRKSTEWGGKTLVLESGKIARQANGAVVVTYGGTTVLSTVVAGKAKEPVDFLPLTVQFVAKSYAVGKIPGGFLKREGKPSDRETLISRLIDRSIRPLFPSGFYDEVSIVCNLLSYDTVTPPEVTALIGATAALAISGVPFNGMVVGARVGYLLSEDKYLLNASADEMLSSSLDLFLSGNKDSVLMVESEASELSESQMLGAISFGHQNCQEVIKLIEEFREESGILPFGFIPHDITSLVDDIASSYTESFSIAYSNIVKKERVLELEKLRDQVLSDMLAKYEQPNGNLQCQYSSQDIISALKSFERSLVRSKIIETSSRIDGRAFNGIRDIEIEIDVLPKTHGSALFTRGNTQALVVTALGTPQDEQIVDDLDGDRRENFLLHYNFPPYAVGESAALRAPGRREIGHGKLAWKAIRYVLPEKSDFPYTIRVVSEITESDGSSSMATVCGASLALMDTGVPIKAPVAGIAMGLIKEGEKFIILSDILGDEDHLGDMDFKVAGTSSGITALQMDMKISGISIEVIEKSLLQAKDGRMHILDKMNLVIQESRECIKNHAPRIESIFINKDKIRNVIGSGGKNIREICEKTGARVEIMQDGTVMIYAINNDAVEYAKNMIMDIVSEPEIGKVFDGTVIEIVKFGAFVSFLGGKRGLIHISEIKNEHINAVGSVISVNDKVKVLVIGIDREYVQLSMRRVDQETGEPIDGELYNIRKTNSDSDDSFLSSGSVNNRHGSEKKRRGSGRSRRSSGGSSYHRDDLHNNGFGNGNRSFNDNRNGNEVPRKPRFF

SEQ ID NO: 1925 - DNA, 2163 bp, Dehalococcoides ethenogenes 195
  CDS (1)..(2163): transl_table=11
ttgataactgccaactcatttgaacgaactattggcggcagaaaacttactatagagagcgggaaaatggcccgccttgcagatgccgcagtaactatccgctatgcggataccgaattactggtaacactttgtgctgccaaaaaaccgcgcgaaggggtggatttcctccccctgactatagactacgaagagcggatgtatgccgcaggcaaaatccccggcgggtttatccgccgcgaaggacgccccagtgaacaggctattttggccggacgtctgacagacagacctctccgcccccttctccccaaggagtggcggaatgaacttcagattattatcaccgtaattgcctcagacaaggaaaatgacgctgatatctggggtgtggtaggtgcttcaaccgttcttaccatgtcacaaataccctacgaaggcccggtgggagccagccgcgtaggttatacaaacggcgaattcgtgcttaaccccacctttgcccagctggaacaaagccagatggatttggtggtagtcagcacccgtaaagccgtagttatgattgaagccgggtctaaggaaattcccgaagaccttatgattaaagcgattgagtttgcccatcaggcaaatcaggagcttattgacctgcaggatgaaatccgcgccaagctgggcaaggaaaaactgccggtgccggtgctggaaatacccgaagaagtcaaagcagcggtagccgcctttgtaaaagggcgagtaaacgaagccctgagccatcaggataaaaccctccgtgaaaatgcggttgaagcccttcagagcgaactggttgaagctttggcagagacatatgccgaaggcgatattctggccgcttatgataaagaaatcaaaaaggctatccgctcaactatacttgaaaaagatatcagggtaaacggacggggtattaagcagctccgccagctggacgctgaaacaggtattctgccccgcgttcacggttcagctttgttcacccggggtgatacccaggttatggccattaccacactgggttctttgcaggaagcccagcagctggacggcttgagtgccgaagataccaagcgttttatgcttcactataattttgcccccttctctaccggtgaagttaagcgttccggctcccccggacggcgtgaaatcggtcatggtgctttagctgaaagggctttggtgcctgtcctgcccactcccgaagaatttccctataccattcgtatggtagctgacgtagtcggttcatcaggctctacttctatgggcagtgtctgttcgtccagtttgtcacttatggatgcaggtgtaccagttaaaaaagctgttgccggtatttccatcggccttattaccggtgaaaatgatacctactgcaccattactgatattgaaggtattgaagataactacggcgatatggatttcaaagttgccggtacccgtgacggcataaccgccatacaggtggatatgaaagtcaagggtatcagctttgacgttatccgtgacgctatctaccaggccaaagaagcccgctataccatactggaagtaatggacaaggctcttgcccagcccaagaccgagcttagcccttacgcccccagaatgtacaagataagcattgacccctccaagattggcagtgttatcggcagcggcggcaagaccatccgctctattattgagcagaccaataccaccgttgatattgaaaatgacggcacagtggtcatcggtgctactgacgaagcttcggcccaaaaagctataaagataattgaagacctgaccaaagatgtagaagccggcagtgtttataccggtaaagttacccggataatgacctttggtgcttttgttgaaatcctgcccggcaaagagggcatggtacacataagcgaactggccgaccacagagtggaaaaagtggaagacgtagttaaagtgggtgacgaaataacagtaaaggtaactgagattgattcacagggcagaataaacctgtcacgccgggtcattctcaatcccaatgctgttcccatctcccgcaaccgtgattcccagccgcgccgttccgggcctttccgccctcaagaccggtctaactcataa

SEQ ID NO: 1926 - protein, 720 aa, Dehalococcoides ethenogenes 195
MITANSFERTIGGRKLTIESGKMARLADAAVTIRYADTELLVTLCAAKKPREGVDFLPLTIDYEERMYAAGKIPGGFIRREGRPSEQAILAGRLTDRPLRPLLPKEWRNELQIIITVIASDKENDADIWGVVGASTVLTMSQIPYEGPVGASRVGYTNGEFVLNPTFAQLEQSQMDLVVVSTRKAVVMIEAGSKEIPEDLMIKAIEFAHQANQELIDLQDEIRAKLGKEKLPVPVLEIPEEVKAAVAAFVKGRVNEALSHQDKTLRENAVEALQSELVEALAETYAEGDILAAYDKEIKKAIRSTILEKDIRVNGRGIKQLRQLDAETGILPRVHGSALFTRGDTQVMAITTLGSLQEAQQLDGLSAEDTKRFMLHYNFAPFSTGEVKRSGSPGRREIGHGALAERALVPVLPTPEEFPYTIRMVADVVGSSGSTSMGSVCSSSLSLMDAGVPVKKAVAGISIGLITGENDTYCTITDIEGIEDNYGDMDFKVAGTRDGITAIQVDMKVKGISFDVIRDAIYQAKEARYTILEVMDKALAQPKTELSPYAPRMYKISIDPSKIGSVIGSGGKTIRSIIEQTNTTVDIENDGTVVIGATDEASAQKAIKIIEDLTKDVEAGSVYTGKVTRIMTFGAFVEILPGKEGMVHISELADHRVEKVEDVVKVGDEITVKVTEIDSQGRINLSRRVILNPNAVPISRNRDSQPRRSGPFRPQDRSNS

SEQ ID NO: 1927 - DNA, 2097 bp, Staphylococcus aureus subsp. aureus COL
  CDS (1)..(2097): transl_table=11
atgtctcaagaaaagaaagtttttaaaactgaatgggcaggaagatctttaacgattgaaacagggcaattagctaaacaagcaaatggcgctgtattggttcgttatggagatacagtcgtgttatcgacggcaactgcatcaaaagaacctcgtgatggagatttcttcccattaacagtgaactatgaagaaaaaatgtacgctgcgggtaaaattcctggtggatttaaaaagagagaaggacgtcctggtgacgatgcaacattaactgcgcgattaattgatagaccaattagacctttattccctaaaggatataagcatgatgttcaaattatgaacatggtattaagtgcagatcctgattgttcaccacaaatggctgcaatgattggttcatctatggcgcttagtgtgtcggatattccattccaagggccaatcgccggtgtaaatgtgggttatattgacggtaaatatatcattaacccaacagtagaagaaaaagaagtttctcgtttagaccttgaagtagctggtcataaagatgcggtaaacatggtagaggcaggcgctagtgagattactgaacaagaaatgttagaggcgattttctttggtcatgaagagattcaacgtttagttgatttccaacaacaaatcgtcgaccacattcaacctgttaaacaagaatttattccagcagagcgtgatgaagcgctagttgaacgtgtaaaatctttaaccgaagaaaaaggacttaaagaaacagttttaacatttgataaacaacaacgagatgaaaatcttgataacttaaaagaagaaatcgtcaatgaatttatcgatgaagaagatccagagaatgaattacttattaaagaagtttatgcaattttaaatgaattagtgaaagaagaagttcgacgtttaattgcagatgaaaaaattagaccagacggccgtaaacctgatgaaatccgtccattagattctgaagttggtattttacctagaacgcatggttcaggtctatttacacgtggtcagactcaagcactttcagttttaacattaggtgctttaggcgattatcaattaattgatggtttaggacctgaagaagaaaaaagattcatgcatcattacaacttcccgaatttttcagtaggtgaaactggtccagtacgtgcgccaggtcgtcgtgaaattggacatggtgcgttaggtgaaagagcattaaaatatattattcctgatactgctgatttcccatatacaattcgtattgtaagtgaggtacttgaatcaaatggttcatcatctcaagcgtcaatttgtggatcaacattagcattaatggatgcgggcgtaccgattaaagcaccagttgctggtattgctatgggccttgttacacgtgaagatagctatacgattttaactgatatccaaggtatggaagatgcattaggtgatatggactttaaagtcgctggtactaaagaaggtattacagcaatccaaatggatattaaaattgacggtttaacgcgtgaaattatcgaagaggctctagaacaagcgagacgtggtcgtttagaaataatgaatcatatgttacaaacaattgatcaaccacgtactgaattaagtgcttacgcgccaaaagttgtaactatgacaattaaaccagataagattagagatgttatcggacctggtggtaaaaaaattaacgaaattattgatgaaacaggtgttaaattagatattgaacaagatggtactatctttattggtgctgttgatcaagctatgataaatcgtgctcgtgaaatcattgaggaaattacacgtgaagcggaagtaggtcaaacttatcaagccactgttaaacgtattgaaaaatacggtgcgtttgtaggcctattcccaggtaaagatgcgttgcttcacatttcacaaatttcaaaaaatagaattgaaaaagtggaagatgtattaaaaatcggtgacacaattgaagttaagattactgaaattgataaacaaggtcgagtaaatgcttcacatagagcattagaagaataa

SEQ ID NO: 1928 - protein, 698 aa, Staphylococcus aureus subsp. aureus COL
MSQEKKVFKTEWAGRSLTIETGQLAKQANGAVLVRYGDTVVLSTATASKEPRDGDFFPLTVNYEEKMYAAGKIPGGFKKREGRPGDDATLTARLIDRPIRPLFPKGYKHDVQIMNMVLSADPDCSPQMAAMIGSSMALSVSDIPFQGPIAGVNVGYIDGKYIINPTVEEKEVSRLDLEVAGHKDAVNMVEAGASEITEQEMLEAIFFGHEEIQRLVDFQQQIVDHIQPVKQEFIPAERDEALVERVKSLTEEKGLKETVLTFDKQQRDENLDNLKEEIVNEFIDEEDPENELLIKEVYAILNELVKEEVRRLIADEKIRPDGRKPDEIRPLDSEVGILPRTHGSGLFTRGQTQALSVLTLGALGDYQLIDGLGPEEEKRFMHHYNFPNFSVGETGPVRAPGRREIGHGALGERALKYIIPDTADFPYTIRIVSEVLESNGSSSQASICGSTLALMDAGVPIKAPVAGIAMGLVTREDSYTILTDIQGMEDALGDMDFKVAGTKEGITAIQMDIKIDGLTREIIEEALEQARRGRLEIMNHMLQTIDQPRTELSAYAPKVVTMTIKPDKIRDVIGPGGKKINEIIDETGVKLDIEQDGTIFIGAVDQAMINRAREIIEEITREAEVGQTYQATVKRIEKYGAFVGLFPGKDALLHISQISKNRIEKVEDVLKIGDTIEVKITEIDKQGRVNASHRALEE

SEQ ID NO: 1929 - DNA, 2106 bp, Staphylococcus epidermidis RP62A
  CDS (1)..(2106): transl_table=11
atgtctcaagagaagaaagtttttaaaactgaatgggctgggcgttctttaactattgagacaggacaattagcaaagcaagctaatggtgctgttttagtgcgttatggagatacagttgtcctatcaactgcaactgcttctaaagaacctagagatggcgattttttcccattaactgtaaattacgaagaaaaaatgtatgctgctggtaaaataccaggaggattcaaaaaaagagaaggtcgccctggtgatgaagcaacgttaacagctcgtctcattgatagacctattcgtccactgtttccaaaaggatatagacatgacgtacaaatcatgaatattgtcttaagtgctgatccagattgctcaccagaaatggcagcaatgattggttcttcgatggcgttaagtgtttcagatattccattccaaggtcccatcgcaggtgtaaatgtaggttatatcgatggcaaatatgtcattaatccttccgtcgctgataaagaaatttctagattagatttagaagttgctggtcataaagatgcggtaaacatggttgaagcaggcgcaagtgaaattactgagagtgagatgcttgaggctattttcttcggacacgaggaaatcaaacgacttgttgcattccaacaagaaatcatcgatcacattcaaccgataaaacaagaatttgtaccggtggaaagagacgaagatttagttgaaaaagtaaaaagtttaactgaagataaaggacttaaggacacggttttaactttcgataagcaacaacgagatgaaaacttagatgctctgaaagaagaagttgttggtcattttctagatgaagaagatcctgaaaatgaaacgcttgttaaagaagtttatgcaattctaaatgacttaattaaagaagaagtaagacgtctaattgcagatgaaaaaatacgacctgatggacgtaaagtagatgaaataagacctcttgaatcagaagttggtttgttaccaagagctcatgggtcaggtttatttactcgtggtcagacacaagcactttcagttttaactttaggcgcacttggagattatcaattaattgatggtttaggacctgaggtagaaaaacgttttatgcatcattataactttcctaatttctctgtaggagaaactggccctgtacgtgcacctggtagacgtgagattgggcatggtgcgcttggtgaaagagcattacgttacattatacctgatactcaagatttcccttatacaattcgtattgtaagtgaagtattagagtctaacggttcatcatctcaagcatcgatttgtggttcaacattagcattaatggatgccggtgtaccaattaaagcgccagtcgcagggattgcaatgggactagtaacgcgtgacgatagctatacaattttaactgatattcaaggaatggaagatgcattaggtgatatggacttcaaagtagcaggtactaaagacggtattactgcgattcaaatggatattaaaattgatggtttaactcgagaagttattgaagaagcactagaacaagcgcgtcaaggacgattagctattatggatcatatgcttcacacgattgaacaaccacgcgaagaattaagtgcttacgcaccaaaagtggtaactatgagtattaatccagataaaattcgagacgtgattggaccaggtggtaagaaaatcaatgaaattatcgacgaaactggagttaaattagatattgaacaagatggtacaatctttataggtgctgtagatcaagcgatgattaaccgtgcaaaagaaattatcgaagatattacacgcgaagcggaagttggacaagtatatcatgctaaagtaaaacgtattgaaaagtatggtgctttcgttgaattgttccctggtaaagacgcgttattacacatttctcaaatttcacaagaaagaattaataaagtagaagatgttcttaaaattggagatacaattgaagtgaaaattactgaaatcgataaacaaggtcgcgttaatgcgtcacataaagtattagagcaatctaaaaattaa

SEQ ID NO: 1930 - protein, 701 aa, Staphylococcus epidermidis RP62A
MSQEKKVFKTEWAGRSLTIETGQLAKQANGAVLVRYGDTVVLSTATASKEPRDGDFFPLTVNYEEKMYAAGKIPGGFKKREGRPGDEATLTARLIDRPIRPLFPKGYRHDVQIMNIVLSADPDCSPEMAAMIGSSMALSVSDIPFQGPIAGVNVGYIDGKYVINPSVADKEISRLDLEVAGHKDAVNMVEAGASEITESEMLEAIFFGHEEIKRLVAFQQEIIDHIQPIKQEFVPVERDEDLVEKVKSLTEDKGLKDTVLTFDKQQRDENLDALKEEVVGHFLDEEDPENETLVKEVYAILNDLIKEEVRRLIADEKIRPDGRKVDEIRPLESEVGLLPRAHGSGLFTRGQTQALSVLTLGALGDYQLIDGLGPEVEKRFMHHYNFPNFSVGETGPVRAPGRREIGHGALGERALRYIIPDTQDFPYTIRIVSEVLESNGSSSQASICGSTLALMDAGVPIKAPVAGIAMGLVTRDDSYTILTDIQGMEDALGDMDFKVAGTKDGITAIQMDIKIDGLTREVIEEALEQARQGRLAIMDHMLHTIEQPREELSAYAPKVVTMSINPDKIRDVIGPGGKKINEIIDETGVKLDIEQDGTIFIGAVDQAMINRAKEIIEDITREAEVGQVYHAKVKRIEKYGAFVELFPGKDALLHISQISQERINKVEDVLKIGDTIEVKITEIDKQGRVNASHKVLEQSKN

SEQ ID NO: 1931 - DNA, 2151 bp, Gluconobacter oxydans 621H
  CDS (1)..(2151): transl_table=11
atgtttgattatttccgcaaggaaatcgaatgggccggacgccccctgatcctggagaccggcaaggtcgcacgccaggcagacggcgccgtcatgatcacgtatggcgacacggtcgtgctctgcaccgccgttggcgccaagagcgtcaagccgggacaggacttcttcccgctgacggtcaactaccaggaaaaggcttatgccgccggcaagatcccgggtgggttcttcaagcgtgaaggccgtccgtccgaagccgaagtcctgaacgcacgtctgatcgaccgtccgatccgtccgctgttcccggagaacttccgtaacgaagtccagatcaccgcaacggtcctgagctacgacaacgagaacgatccggccctcgtgtcgctgatcggctgctcggctgcgctgacgctctccggcattccgttcttcggcccggtcgcctgcgcgcgcatcggccgcatcgacggcaagctggtcgtgaacccgacgcatgacgagatcaaggatagcacgctcgacctgatggtcgccggtacggccgaaggcgtgctgatggttgaatccgaagccagcgagctttcggaagagacgatgctcgaagccgtcacgctgggtcacacgtccttccagccggtcatcgatgccatcatcgcgctggccgagcacgctgcgaaggcaccgtgggatctgccgtcgctgacgaaggaagaaatcgctcttcgcaagcgcgtcgagaaggtcggcaacaagctgatggcggacgcctacaaggagcgtcagaagcaggctcgttacaagaaggtcgccgaagccaaggaccggatcaacgagatcctggccgacgaaggtctggacgtcgaactcgccaagccgatgctcaaggagcttgaggcacaggtcgttcgtggctccatcctcaagacgggcatccgtatcgatggccgtgacctgaagacggtccgcccgatcctggccgaagtcggcatcctgccgcgcgcccatggttcgtccctgttcacgcgtggcgagacgcaggccctcgtggtcgcaacgctcggcacgggtcaggacgagcagatcatcgacgcgctggaaggtgaatatcgttccaacttcatgctgcactacaacttcccgccgtattcggtcggtgagtgtggccgcatgggctctccgggccgtcgtgaaatcggtcacggcaagctggcatggcgcgcaatccacccgctgctgccgagcaaggaagccttcccgtacacgatgcgtgtggtttccgagatcacggaaagcaacggttcgtcttccatggcaaccgtctgcggctcctcgctcgccctgatggatgccggcgttccgctgccacgtccggttgccggcattgccatgggtctgatcaaggaagaccgtggttacgccgtgctgtccgatatcctgggtgatgaagatcacctcggcgacatggacttcaaggtggccggtacggctgacggcgtgaccgcgctgcagatggacatcaagatcacgtccatcacgccggaaatcatgaagatcgctctggagcaggcccgtgaaggccgtatccacatcctcggcgaaatggccaaggccctgacggaaggccgtggcgaggtttcgggcaatgctccgaagatcaccacgatctccgtgccgaaggaaaagatccgcgacgtgatcggttccggcggtaaggtgatccgcgagatcgtcgaatattcgggtgcgaaggtcgatatcggtgacgatggcaccgtgacgatcgctgcttcgaatgacgagcaggcccagaaggccatcgcccgcatcgaaggcatcgtcgccgagccggaaatcggccgcatctatgagggcaaggtcgtcaagactgccgatttcggtgcgttcgtgaacttcctcggcccgcgtgacggtctggttcacatctccgaactggctgaaggccgcgttgcgaagacgtccgatgtcgtcaagcagggtgatgccgtgaaggtcaaggtcatcggatttgatgaccgcggcaaggtcaagctctcgatgagggttgtcgatcaggccacgggcgccgatattacggagagtgtgggggccaagcctggccgtccgccccgtcgcgacgccgaatga

SEQ ID NO: 1932 - protein, 716 aa, Gluconobacter oxydans 621H
MFDYFRKEIEWAGRPLILETGKVARQADGAVMITYGDTVVLCTAVGAKSVKPGQDFFPLTVNYQEKAYAAGKIPGGFFKREGRPSEAEVLNARLIDRPIRPLFPENFRNEVQITATVLSYDNENDPALVSLIGCSAALTLSGIPFFGPVACARIGRIDGKLVVNPTHDEIKDSTLDLMVAGTAEGVLMVESEASELSEETMLEAVTLGHTSFQPVIDAIIALAEHAAKAPWDLPSLTKEEIALRKRVEKVGNKLMADAYKERQKQARYKKVAEAKDRINEILADEGLDVELAKPMLKELEAQVVRGSILKTGIRIDGRDLKTVRPILAEVGILPRAHGSSLFTRGETQALVVATLGTGQDEQIIDALEGEYRSNFMLHYNFPPYSVGECGRMGSPGRREIGHGKLAWRAIHPLLPSKEAFPYTMRVVSEITESNGSSSMATVCGSSLALMDAGVPLPRPVAGIAMGLIKEDRGYAVLSDILGDEDHLGDMDFKVAGTADGVTALQMDIKITSITPEIMKIALEQAREGRIHILGEMAKALTEGRGEVSGNAPKITTISVPKEKIRDVIGSGGKVIREIVEYSGAKVDIGDDGTVTIAASNDEQAQKAIARIEGIVAEPEIGRIYEGKVVKTADFGAFVNFLGPRDGLVHISELAEGRVAKTSDVVKQGDAVKVKVIGFDDRGKVKLSMRVVDQATGADITESVGAKPGRPPRRDAE

SEQ ID NO: 1933 - DNA, 2370 bp, Ehrlichia ruminantium str. Gardel
  CDS (1)..(2370): transl_table=11
atgtttaatttgataaggaagtctacagagtggggaggaaagaccttagttttagaaagtggtaaaatagcaagacaagctaatggtgctgtagtggtaacttatggtggaactacagtattgtcaacagtggtagcaggtaaggctaaagagcctgtagattttttaccattaactgtacagtttgttgcaaaaagttatgctgtaggtaagattcctggtggttttttaaaaagagaaggtaaaccatctgatagagaaactttaatttctcgtttaattgatagaagtattaggcctttatttccttcaggtttttatgatgaagttagtatagtatgtaatttattatcatatgatacagttactcctcctgaagtgactgcgttaattggtgcaacagctgctctagctatatctggtgttccttttaatggaatggtggtaggagcaagggtaggatacttattgtcagaagataagtatttgttgaatgcatcagctgatgagatgttgtctagctctttagatttgtttttatcaggtaataaagattctgtgttgatggttgagtctgaagcgtctgaactttctgaatctcaaatgttagctgcaatttcttttgggcatcaaaattgccaagaagtgataaaattaattgaagaatttagagaagaaagtggaatattaccttttggctttataccacatgatattacttcacttgttgatgatatagcttcctcttatacagagagttttagtatagcatattctaatattgtaaaaaaagagcgggtattagaattagaaaaattacgtgaccaagtgttgtctgatatgttggcaaagtatgagcaacctaatggtaacttacaatgtcaatatagtagtcaagatattattagtgcattaaaaagttttgaaaggtctttagtacgttctaaaattattgaaacttcttctagaatagatggacgtgcttttaatggaatacgtgatatcgaaattgaaatagatgttttacctaaaacacatggttctgcattatttactagaggtaatacgcaagcacttgttgttactgcattaggtactccacaagatgaacaaatagttgatgatttagatggcgataggagagagaattttttattgcattataatttccctccatatgcagttggtgagtcagcagcgttacgtgctcctgggagaagggaaataggtcatggtaagcttgcatggaaggctattcgctatgtgttgcctgagaagtcagacttcccatatactattagggtagtttctgagataacagaatctgatggttcatcttcaatggctactgtctgtggagcttctttagctcttatggatacaggggtacctattaaggcacctgttgctggtattgcaatgggtcttattaaagaaggtgagaaatttatcattctttcagatatattgggtgatgaagatcatcttggtgatatggattttaaagttgctggtacttcatcaggtattactgcgttgcagatggatatgaaaatttctggtataagcattgaagtgattgagaaatcattacttcaagctaaagatggtagaatgcatattttagataaaatgaatttagttatacaagagtctagagagtgtataaagaaccatgctcctagaatagagtctatttttataaacaaggataaaatccgaaatgttataggtagtggtggaaaaaatatccgtgagatttgtgaaaaaacaggtgcaagggttgagatcatgcaggatggcactgtgatgatatatgcaattaataatgatgcagtagaatatgctaaaaatatgattatggatattgtatctgaaccagaaataggaaaggtttttgatggtactgtcattgagattgtaaagtttggagcttttgttagctttttgggaggtaaacgaggtttaattcatattagtgaaataaaaaatgaacatattaatgcagtaggtagtgtcatttctgtaaatgataaagtcaaggttttagttattggaatagatcgtgaatacgttcaactttctatgcgtagggtagatcaagaaactggtgaacctatagatggagagctttataatataagaaaaactaattctgattctgatgattcatttttatcgtcaggtagtgttaataatagacatggaagtgagaaaaaaagacgtggtagtggtaggtctcgtcgtagtagtggtggatctagttatcatagggatgatctacataacaacggttttggtaatggtaaccgttcttttaatgataacagaaatggtaatgaagttcctagaaaacctaggttcttttag

SEQ ID NO: 1934 - protein, 789 aa, Ehrlichia ruminantium str. Gardel
MFNLIRKSTEWGGKTLVLESGKIARQANGAVVVTYGGTTVLSTVVAGKAKEPVDFLPLTVQFVAKSYAVGKIPGGFLKREGKPSDRETLISRLIDRSIRPLFPSGFYDEVSIVCNLLSYDTVTPPEVTALIGATAALAISGVPFNGMVVGARVGYLLSEDKYLLNASADEMLSSSLDLFLSGNKDSVLMVESEASELSESQMLAAISFGHQNCQEVIKLIEEFREESGILPFGFIPHDITSLVDDIASSYTESFSIAYSNIVKKERVLELEKLRDQVLSDMLAKYEQPNGNLQCQYSSQDIISALKSFERSLVRSKIIETSSRIDGRAFNGIRDIEIEIDVLPKTHGSALFTRGNTQALVVTALGTPQDEQIVDDLDGDRRENFLLHYNFPPYAVGESAALRAPGRREIGHGKLAWKAIRYVLPEKSDFPYTIRVVSEITESDGSSSMATVCGASLALMDTGVPIKAPVAGIAMGLIKEGEKFIILSDILGDEDHLGDMDFKVAGTSSGITALQMDMKISGISIEVIEKSLLQAKDGRMHILDKMNLVIQESRECIKNHAPRIESIFINKDKIRNVIGSGGKNIREICEKTGARVEIMQDGTVMIYAINNDAVEYAKNMIMDIVSEPEIGKVFDGTVIEIVKFGAFVSFLGGKRGLIHISEIKNEHINAVGSVISVNDKVKVLVIGIDREYVQLSMRRVDQETGEPIDGELYNIRKTNSDSDDSFLSSGSVNNRHGSEKKRRGSGRSRRSSGGSSYHRDDLHNNGFGNGNRSFNDNRNGNEVPRKPRFF

SEQ ID NO: 1935 - DNA, 2268 bp, Wolbachia endosymbiont strain TRS of Brugia malayi
  CDS (1)..(2268): transl_table=11
atgtttgaaattataaagaaatctatagaatggggtggtcgtaccttatctttagaaacaggaaaaatagcacgtcaagctgatggctcagttgttgtaaattatggtgacacttctattttagtaactgttgtacgtaaaaagaaggaagaaatcgttgatttcttgcctttaaatgtgcaatttatcgcaaaaagctatgctatgggtaggattcctggtggctttttcaaaagagaaggcaagccatctgatagagaaaccttgatttcaagagtaatagatagaagtataagaccactatttttagaaggtttccatgatgaaatcagtatagtgtgcaatttattaacttatgatacagttaaccctcctgaagtgccagcattgattggtgctgttgcagctctcgcaatctccggtgttccttttcactttattatagctggagttttagttggatgtgatggaaataataactatatactcaacccttctgttcaagagatgaaagtcagcagtttagatctgtttttatctggtgatgagcgttcaattttgatggttgaatcagaggcgaaagagctccctgaagaaaatattttgaacgcaataaaatttggccatgaacaccttcaacctgttattaagctcataaaagagtttgctgacacaattggcaataaattcgatagtttcgctcctatcgacatatcagacataatgcaagatcttgaaaagcacagtaaagattttgaagaagcatattcacaaacagtaaaacaagagcgagctcaaactttagaaacgatcagaaataatatattgaatcctctcaaggaagctggaaaagatgagaaattaattacacaagcggtaaaaaactttgaaaggtctttactgcgtaaaataattagagagaaaggtacaaggatagatggtcgtaagtatgatgaaatacgtcaaatagaagttgaagttgatattctatctagaactcatgggtctgcactatttacgagaggtagtactcaggcattggttgttactgctcttggtactacacaagatgagcaaattgtagatgacattgaaggggatagacgtgaacattttatgttacattataattttccttcatttgccgttggagatgcttctgccatacgcgcaccaggaagaagagaaattggtcatggtaaacttgcttggaaagcaattcatcctgttttacctgataaatctgaatttccttatacaataagagtagtatctgaaatcatggaatcagacggctcttcttctatggcaacagtttgtggaacttccctcgcgttaatggatacaggcgtaccaataaagtctcctgtcgctggaattgctatgggcctcattaaagataaaaacgattatgtaatactttccgacatattaggtgatgaagattatcttggtgacatggattttaaagtagcaggaaccagtgaaggaatcacggcactacaaatggacatgaaaatttccggtataagtttcgaaattgttgaaaaatctttagaacaagcaaaagctggaagattacatatcttagaaaaaatgaattcagtgatttcagaacatagtgatgacgtgaagggtcacgcgccaagaatggtatcattttacatagataaagataaaatttctgcagctattggtgctaaagggaaaaatatacgcagtgtatgtgaaagaagtaatgcaaaaattgaaataggagatgatggtaaagtttctgtatttgccatgagtagtgctgaagctgaaattgcaaaaaatatgatgatcgactcaatcacagaattagagcaaggtgctatagttgatgttaaggttgtaaaaatagataagtctattgtagaacttgagcttttcaatggaagaaaaggaaaaatgcacataagtgaagtagccaatcagcacatagaatctattgagagcatacttaaacagggtgacacttttaaagcattggtgattgattttgaaaaaggtgggtgcccaaaactgtcaagacgccgcgttgatcaagaaacaggtgatttttttgaaggcgagctttataacgaagaaaagaaagatagttcaaacgacagggattattataatagtccatttaatagaaaatctgggcaccgcaagaggcctgttcattctcgttctagcttcagtaataggaataatagaccaaaatttggtaatgatgactcatcatcaagtttttattaa

SEQ ID NO: 1936 - protein, 755 aa, Wolbachia endosymbiont strain TRS of Brugia malayi
MFEIIKKSIEWGGRTLSLETGKIARQADGSVVVNYGDTSILVTVVRKKKEEIVDFLPLNVQFIAKSYAMGRIPGGFFKREGKPSDRETLISRVIDRSIRPLFLEGFHDEISIVCNLLTYDTVNPPEVPALIGAVAALAISGVPFHFIIAGVLVGCDGNNNYILNPSVQEMKVSSLDLFLSGDERSILMVESEAKELPEENILNAIKFGHEHLQPVIKLIKEFADTIGNKFDSFAPIDISDIMQDLEKHSKDFEEAYSQTVKQERAQTLETIRNNILNPLKEAGKDEKLITQAVKNFERSLLRKIIREKGTRIDGRKYDEIRQIEVEVDILSRTHGSALFTRGSTQALVVTALGTTQDEQIVDDIEGDRREHFMLHYNFPSFAVGDASAIRAPGRREIGHGKLAWKAIHPVLPDKSEFPYTIRVVSEIMESDGSSSMATVCGTSLALMDTGVPIKSPVAGIAMGLIKDKNDYVILSDILGDEDYLGDMDFKVAGTSEGITALQMDMKISGISFEIVEKSLEQAKAGRLHILEKMNSVISEHSDDVKGHAPRMVSFYIDKDKISAAIGAKGKNIRSVCERSNAKIEIGDDGKVSVFAMSSAEAEIAKNMMIDSITELEQGAIVDVKVVKIDKSIVELELFNGRKGKMHISEVANQHIESIESILKQGDTFKALVIDFEKGGCPKLSRRRVDQETGDFFEGELYNEEKKDSSNDRDYYNSPFNRKSGHRKRPVHSRSSFSNRNNRPKFGNDDSSSSFY

SEQ ID NO: 1937 - DNA, 2115 bp, Xanthomonas oryzae pv. oryzae KACC10331
  CDS (1)..(2115): transl_table=11
gtggcaaaaatcaccaaaaccttccagtacggcaagcacaccgtcacccttgagacgggcgaaatcgctcgccaggcaggcggtgccgtcatcgtcaagttcgacgacaccgtactgctggtcaccgccgtcgccgccaagagcgcgcgcgaagggcaggacttctttcccctgacggtcgattatcaggagaagttctacgccggcggccgcatcccgggcggcttcttcaagcgcgaaggacgtgcgaccgagaaggaaacgttgatctcgcgcctgatcgatcgtccgatccgtccgctgttcccggaggactacaagaacgaagtgcagatcatcgccacggtgatgtcgatgaaccctgacatcgacggcgatatcgccgcgctgatcggcgcatcggccgcgctgtcgctggccggcactccgttcaacggcccgatcgctgcggcgaaggtcggttacaagaatggcgaatacatcctcaacccgaccgtgaccgatctgaaggattcgcagctggagttggtcgtggccggtaccgccaatgcggtgctgatggtcgagtccgaagccgagttgctgtcggaagaagtgatgctgggcgcggtgacgttcggccatcgcgaaatgcagaaagtcatcaacatcatcaacgagctggccgtcgaagccggcaccaagccgtccgattgggtggctccggcgaagaacgacggcatgatcgccgcgctgaaggaagcagtgggcgaccagctcgcttcggctttccaggtgcgcgacaagctgcagcgccgcgatgcgatttcggcgatcaagaaggacgtgctgggtgcgctggcgccgcgcgccacgatcgaaggctgggctgccggtgatctggccaaggaattcggcgagctggaataccagaccatgcgtggctcggtgctcagcaccaaggtgcgtatcgacggccgtgcactggataccgtgcgtccgatcagcgccaaggccggcgtgctgccgcggacccatggctcggcgctgttcacccgcggcgagacgcaggcgatcgtgatcaccacgctcggcaccgcacgcgacggtcaggtcatcgacgcagtctcgggcgagtacaaggaaaacttcctgttccattacaacttccctccgtactcggtaggcgagtgcggtcgtttcggtgcaccgaagcgtcgcgaaatcggtcacggccgtctggccaagcgcggcgtgcttgccgtgatgccgagcctggaagaattcccgtacaccatccgcgtggtttcggaaattaccgagtccaacggttcgtcctcgatggcatcggtgtgcggtagctcgctggcgctgatggacgccggtgtgccgatcaaggcgccggttgccggtatcgcgatgggcctggtcaaggaaggcaacgacttcgtcgtgctttccgacatcctgggcgacgaagatcacctgggcgacatggacttcaaggtggccggtactgccgaaggcgtgtccgcgctgcagatggacatcaagatcgaaggcatcaccgaagagatcatgaagcaggcattgcagcaggccaaggctggtcgtctgcacattctgggcgagatggcgcatgcactgaccacaccgcgtcaggaactgagcgactacgcgccgcgcctgctgaccatcaagattcacccggacaagatccgtgaagtgatcggcaagggcggctcgaccatccaggcgatcaccaaggaaaccggtacgcagatcgacatccaggacgacggcacgatcatcattgcctcggtcaacgcgattgccgcgcaggctgcgaagtcacgcatcgagcagatcacctcggacgtggagccgggccgcatctatgaaggcaaggtcgccaagatcatggacttcggcgcgttcgtcaccatcctgccgggcaaggacggtctggtgcacgtctcgcagatttccagcgagcgcgtggagaaggtcggcgacaagttgaaggaaggcgatctggtccgcgtcaaagtgctggaagtggacaagcagggccgcatccgtctgtcgatcaaggcagtggaagaaggcgaaggcgttccggcttcggccgagtaa

SEQ ID NO: 1938 - protein, 704 aa, Xanthomonas oryzae pv. oryzae KACC10331
MAKITKTFQYGKHTVTLETGEIARQAGGAVIVKFDDTVLLVTAVAAKSAREGQDFFPLTVDYQEKFYAGGRIPGGFFKREGRATEKETLISRLIDRPIRPLFPEDYKNEVQIIATVMSMNPDIDGDIAALIGASAALSLAGTPFNGPIAAAKVGYKNGEYILNPTVTDLKDSQLELVVAGTANAVLMVESEAELLSEEVMLGAVTFGHREMQKVINIINELAVEAGTKPSDWVAPAKNDGMIAALKEAVGDQLASAFQVRDKLQRRDAISAIKKDVLGALAPRATIEGWAAGDLAKEFGELEYQTMRGSVLSTKVRIDGRALDTVRPISAKAGVLPRTHGSALFTRGETQAIVITTLGTARDGQVIDAVSGEYKENFLFHYNFPPYSVGECGRFGAPKRREIGHGRLAKRGVLAVMPSLEEFPYTIRVVSEITESNGSSSMASVCGSSLALMDAGVPIKAPVAGIAMGLVKEGNDFVVLSDILGDEDHLGDMDFKVAGTAEGVSALQMDIKIEGITEEIMKQALQQAKAGRLHILGEMAHALTTPRQELSDYAPRLLTIKIHPDKIREVIGKGGSTIQAITKETGTQIDIQDDGTIIIASVNAIAAQAAKSRIEQITSDVEPGRIYEGKVAKIMDFGAFVTILPGKDGLVHVSQISSERVEKVGDKLKEGDLVRVKVLEVDKQGRIRLSIKAVEEGEGVPASAE

SEQ ID NO: 1939 - DNA, 2130 bp, Vibrio fischeri ES114
  CDS (1)..(2130): transl_table=11
atgttcgcgaatccagtcgtaaaatcatttcagtacggtaaccataccgttactctagaaacgggtgtaattgctcgtcaagctacagctgctgtaatggcaagcatggacgatacatctgtattcgtttctgttgttgctaagaaagaagcggttccaggccaagatttcttcccactaacagttaactaccaagagcgtacgtacgctgcgggcaaaatccctggtggtttctttaagcgtgaaggtcgtccttctgaagctgaaacactaacagctcgtctaattgaccgtccaatccgtcctcttttccctgatgcattcaaaaacgaagtacaggtaattgcaacggttgtttctatcaaccctgaagttaacccagacatgatcactatgatcggtacgtctgcggcattagctatcgctggtattccatttaatggtcctatcggtgctgcacgtgttggtcacatcaacggtgagcttgttcttaacccatcaaatactgaacttgaaaactctaaactagacctagttgtgtctggtacagaaggtgcagtattaatggttgaatcagaagctgataacctaactgaagaagaaatgctttctgctgttgtattcggtcacgaacaacaacaagtagttatcaacgctatcaacgaattcgctgctgaagttgcaactccagcatgggattgggttgctccagaagagaacacagttcttaacgcgcgtattgcagagttagcagaagctaaattagttgaagcttaccaaattactgaaaaaatgactcgttacgatcgcattcatgaaatcgcagctgaagttaacgaagttctagtatctgaaaacgaagacgtgaacctaaaagaagttcacactatcttccacgatctagagaaaacagttgtacgtcgcagcatcatcgctggtaacccacgtatcgatggtcgtgaaaaagacatggttcgtgcgctagacgtacgtactggtgttcttccacgtactcacggttcttctctattcacacgcggtgaaactcaagctcttgttactgcaacgcttggtacacaacgtgatgctcaaatcatcgatagcctaatgggtgagaagaaagatcacttccttctacactacaatttccctccatactgtgtaggtgaaactggttttgttggttctcctaagcgtcgtgaaatcggtcacggtaaactggctaaacgtggtatccaagcggttatgccttctattgaagaattcccatacacagtacgtgtagtatcggaaatcactgaatctaacggttcatcttcaatggcttctgtatgtggtacatctctagctcttatggatgctggtgttccaattaaagcatctgttgctggtatcgcaatgggtcttgtgaaagaaggtgacgatttcgttgttctttctgatattctaggtgacgaagaccaccttggtgatatggactttaaagtagcgggtactaacgaaggtatcactgcacttcaaatggatatcaaaatcgaaggcatcactaaagagatcatgcagatcgctctaaaccaagctcaaggtgcgcgtaagcacatccttaaagttatggatgaagctatctctggtgctcgtgaagagatctctgaatttgctccacgtatccacacaatgaagatcagctctgataagatcaaagatgttatcggtaaaggtggtgcagttatccgtgctctttgtgaagagactggtacaactatcgaaatcgaagatgacggtacgatcaaaatcgctgcaactgaaggcgctgctgctaaagaagcgattcgtcgcatcgaagagatcactgctgaagttgaagttggtaagatctacacaggtaaagttatgcgtatcgtagatttcggtgcgttcgtaacggttcttggtcctaaagaaggtctagttcatatttctcaaatcgcagaagagcgcatcgagaaagtagctgatcacctacaagttggtcaagaagtgaaaactaaagtacttgaaatcgaccgtcaaggccgtatccgtctaagtattaaagaagcaaatgctgaactaaacccagcacctgctgctgaagcaaaagacgcagaataa

SEQ ID NO: 1940 - protein, 709 aa, Vibrio fischeri ES114
MFANPVVKSFQYGNHTVTLETGVIARQATAAVMASMDDTSVFVSVVAKKEAVPGQDFFPLTVNYQERTYAAGKIPGGFFKREGRPSEAETLTARLIDRPIRPLFPDAFKNEVQVIATVVSINPEVNPDMITMIGTSAALAIAGIPFNGPIGAARVGHINGELVLNPSNTELENSKLDLVVSGTEGAVLMVESEADNLTEEEMLSAVVFGHEQQQVVINAINEFAAEVATPAWDWVAPEENTVLNARIAELAEAKLVEAYQITEKMTRYDRIHEIAAEVNEVLVSENEDVNLKEVHTIFHDLEKTVVRRSIIAGNPRIDGREKDMVRALDVRTGVLPRTHGSSLFTRGETQALVTATLGTQRDAQIIDSLMGEKKDHFLLHYNFPPYCVGETGFVGSPKRREIGHGKLAKRGIQAVMPSIEEFPYTVRVVSEITESNGSSSMASVCGTSLALMDAGVPIKASVAGIAMGLVKEGDDFVVLSDILGDEDHLGDMDFKVAGTNEGITALQMDIKIEGITKEIMQIALNQAQGARKHILKVMDEAISGAREEISEFAPRIHTMKISSDKIKDVIGKGGAVIRALCEETGTTIEIEDDGTIKIAATEGAAAKEAIRRIEEITAEVEVGKIYTGKVMRIVDFGAFVTVLGPKEGLVHISQIAEERIEKVADHLQVGQEVKTKVLEIDRQGRIRLSIKEANAELNPAPAAEAKDAE

SEQ ID NO: 1941 - DNA, 2124 bp, Neisseria gonorrhoeae FA 1090
  CDS (1)..(2124): transl_table=11
atgatgttcaataaatacgttaagaccttccaatacggtaatcaaaccgttactttggaaaccggcgaaattgcccgccaagctgccgctgccgttaaagtatcgatgggcgacactgttgtttttgttgccgttaccaccaacaaagaggtcaaagaaggtcaggacttcttcccgttggccgtcgattatttggaacgcacttatgccgcaggcaaaatccccggcggcttcttcaaacgcgaaggcaaacaaagcgaaaaagaaatcctgaccagccgtctgatcgaccgcccgattcgtccgctgttccccgaaggtttctaccacgacatccaaatcgtagcgatggttgtgtccgtcgatcccgaaatcgattccgacattcctgcaatgttgggcgcgtccgccgcgctggtgttgagcggcgtaccgttcgccggcccgattggcgcggcgcgcgtgggttatataaacggcgtgtacgttttgaacccgactaaagccgagttggcgaaatcacaattggacttggtggtcgccggtacttccaaagccgtgttgatggtggaatccgaagccaaaatcctgcccgaagacgtgatgttgggcgcggtggtttacggccacgatcaaatgcaggttgccatcaatgcaatcaatgaatttgccgacgaagtgaatccggaagtttgggattggaaagcacctgaaaccaatgaagaactggttgccaaagtacgcgggattgccggcgaaaccattaaagaagcgttcaaaatccgtcaaaaacaagcgcgttccgccaaattggacgaggcttggaatgcggtaaaagaagccttgattaccgaagaaaccgacacgctggcagccaacgaaatcaaaggtattttcaaacgcttggaagccgatgtcgtccgcagccaaattttggacggacaaccgcgcatcgacggccgcgacacccgcaccgtccgtccgctgaacatccaaaccggcgtattgccgcgcacgcacggttccgcactgtttacccgtggcgaaacccaagcccttgccgtagcgactttgggtacttcgcgcgacgaacaaatcatcgacgcgttgtccggcgaatataccgaccgctttatgctgcactacaactttccgccgtactctaccggcgaagtgggccgcatgggcgcgccgaaacgccgtgaaatcggtcacggccgtttagctaaacgtgcgttgttggccgtattgccgaaacctgaagatttcagctacaccatgcgcgtggtctccgaaattaccgaatccaacggctcttcctctatggcttctgtctgcggcggctgtttgagcctgctgtctgccggcgtgcctttgaaagcacacgttgccggtatcgcgatgggtctgattttggaaggcaataagtttgccgtcctgaccgacattttgggcgacgaagaccacttgggcgatatggactttaaagtggccggtacgaccgaaggcgttaccgcgctgcaaatggacatcaaaatccaaggcattaccaaagagattatgcaaattgctttggcacaggccaaagaagcgcgtttgcacatcttggatcagatgaaagctgccgttgcgggtccgcaagagctgtccgcacacgcgccgcgtttgttcaccatgaaaatcagccaagacaaaatccgtgatgtgattggtaaaggcggcgaaaccattcgttcgattaccgctgaaaccggtactgaaatcaatatcgctgaagacggtaccatcactatcgctgcgactactcaagaagcgggcgatgcagcgaaaaaacgcatcgaagaaatcactgccgaagtggaagtgggcaaagtgtacgaaggtactgtggttaaaatcctcgacaacaacgtcggcgcgattgtcagcgtgatgccgggcaaagacggtttggtacacatcagccaaatcgcacacgagcgcgtacgcaatgtcggcgattacctgcaagtcggtcaggtggtgaacgtgaaagcattggaagtggatgacagaggccgtgtccgtctgtccatcaaagccctgctggatgcgcctgtccgtgaagaaaatgccgccgagtaa

SEQ ID NO: 1942 - protein, 707 aa, Neisseria gonorrhoeae FA 1090
MMFNKYVKTFQYGNQTVTLETGEIARQAAAAVKVSMGDTVVFVAVTTNKEVKEGQDFFPLAVDYLERTYAAGKIPGGFFKREGKQSEKEILTSRLIDRPIRPLFPEGFYHDIQIVAMVVSVDPEIDSDIPAMLGASAALVLSGVPFAGPIGAARVGYINGVYVLNPTKAELAKSQLDLVVAGTSKAVLMVESEAKILPEDVMLGAVVYGHDQMQVAINAINEFADEVNPEVWDWKAPETNEELVAKVRGIAGETIKEAFKIRQKQARSAKLDEAWNAVKEALITEETDTLAANEIKGIFKRLEADVVRSQILDGQPRIDGRDTRTVRPLNIQTGVLPRTHGSALFTRGETQALAVATLGTSRDEQIIDALSGEYTDRFMLHYNFPPYSTGEVGRMGAPKRREIGHGRLAKRALLAVLPKPEDFSYTMRVVSEITESNGSSSMASVCGGCLSLLSAGVPLKAHVAGIAMGLILEGNKFAVLTDILGDEDHLGDMDFKVAGTTEGVTALQMDIKIQGITKEIMQIALAQAKEARLHILDQMKAAVAGPQELSAHAPRLFTMKISQDKIRDVIGKGGETIRSITAETGTEINIAEDGTITIAATTQEAGDAAKKRIEEITAEVEVGKVYEGTVVKILDNNVGAIVSVMPGKDGLVHISQIAHERVRNVGDYLQVGQVVNVKALEVDDRGRVRLSIKALLDAPVREENAAE

SEQ ID NO: 1943 - DNA, 2127 bp, Bacteroides fragilis NCTC 9343
  CDS (1)..(2127): transl_table=11
atgattaacccaattgttaagacgatcgagttgggagatggcagaaccatcacactcgaaacgggaaagctggcaaaacaggcagatggttctgtgatgcttcgcatgggaaacaccatgttgttagctactgtttgtgccgctaaagatgcagttcccggaacagatttcatgccgcttcaggtagagtataaagaaaaattcgcagcattcggccgctttcctggtggttttacaaaaagagaaggaagagcatctgattatgagatccttacttgccgtttagtagaccgtgctctccgtcctttattccccgataactatcacgcagaagtttacgtaaacatcatccttttctcagcagacggtgtagatatgcctgatgcattggccggattggctgcttccgcagcactggctgtttcagatattcctttcaacggaccaatttcagaagtacgtgttgcgcgtatcgatggtaaattcgttatcaacccgactttcgatcagcttgaacaagctgatatggatatcatggttgccgctacttatgaaaacatcatgatggtagaaggtgaaatgagcgaagtgtcggaagccgaactactggaagcaatgaaagtagctcacgaagccatcaaagtacattgcaaagcacagatggaactgactgaaatggttggtaagactgttaaacgcgaatattgtcacgaagaaaacgacgaagaactccgtaaagccgttcatgatgcctgctatgataaatcatatgctatcgcagcttccggcaacagaaacaaacatgaacgccaggatgctttcgatgcaatccgcgacgaattcaaagcacagttctcggaagaagaactggaagaaaaaggtgctctgatcgatcgttattatcatgacgtagagaaagaagcgatgcgccgttgtattcttgatgaaggaaagcgtctggacggacgtaaaacaactgaaatccgcccgatttggtgcgaagtaggctacctgcccggacctcacggatcggctatctttactcgtggtgaaactcaatcattgacttcagtgactctgggtactaaactggatgagaaaatcatcgacgatgttctcgctcacggaaaagaacgcttcctattacactataactttcctcctttctctacaggagaggctaaggctcaacgtggtgtaggacgtcgtgaaatcggacatggaaatctggctcacagagcattgaaaagaatgattccggaagactatccttatgtagtacgtgtcgtttcagatatccttgaatcaaacggttcttcatcgatggctaccgtatgtgccggaactttggccctgatggatgccggtgtgaaaattaaaaaacctgtatcgggtatcgctatgggattgattaaaaacgcaggtgaagaaaaatatgcagtgttgtctgacatccttggagacgaagaccacttgggcgatatggacttcaaagtgacaggtactaaagacggtatcacagctacccagatggatattaaggtagacggtctgtcttacgaaatcctggaacgcgccttaaatcaggcaaaagaaggacgtatgcacatactcggtaaaatagaagaaacaatttccgaaccacgtactgagctgaaagatcacgctcctcgtatcgaaacaatgactattccgaaagaattcatcggtgctgtaatcggcccgggcggaaaaatcattcagggaatgcaggaagaaacaggtgcaacaatcactatcgaagaaatcgacaacgtaggtcgcatcgagatctcaggaactaacaagaaatcgattgatgacgcaatccgcttgattaaaggtatcgttgctgttcccgaagtaggtgaggtatacaaaggtaaagttcgctctatcatgccttacggtgcatttgttgaattccttccgggaaaagacggtttactccatatctctgaaattgactggaaacgtcttgagactgtagaagaagccggcattaaagagggtgacgagatcgaagtgaaattgatcgatattgacccgaagacaggtaaattcaaactttcaagaaaagttttattgccacgtccggaaaagaaataa

SEQ ID NO: 1944 - protein, 708 aa, Bacteroides fragilis NCTC 9343
MINPIVKTIELGDGRTITLETGKLAKQADGSVMLRMGNTMLLATVCAAKDAVPGTDFMPLQVEYKEKFAAFGRFPGGFTKREGRASDYEILTCRLVDRALRPLFPDNYHAEVYVNIILFSADGVDMPDALAGLAASAALAVSDIPFNGPISEVRVARIDGKFVINPTFDQLEQADMDIMVAATYENIMMVEGEMSEVSEAELLEAMKVAHEAIKVHCKAQMELTEMVGKTVKREYCHEENDEELRKAVHDACYDKSYAIAASGNRNKHERQDAFDAIRDEFKAQFSEEELEEKGALIDRYYHDVEKEAMRRCILDEGKRLDGRKTTEIRPIWCEVGYLPGPHGSAIFTRGETQSLTSVTLGTKLDEKIIDDVLAHGKERFLLHYNFPPFSTGEAKAQRGVGRREIGHGNLAHRALKRMIPEDYPYVVRVVSDILESNGSSSMATVCAGTLALMDAGVKIKKPVSGIAMGLIKNAGEEKYAVLSDILGDEDHLGDMDFKVTGTKDGITATQMDIKVDGLSYEILERALNQAKEGRMHILGKIEETISEPRTELKDHAPRIETMTIPKEFIGAVIGPGGKIIQGMQEETGATITIEEIDNVGRIEISGTNKKSIDDAIRLIKGIVAVPEVGEVYKGKVRSIMPYGAFVEFLPGKDGLLHISEIDWKRLETVEEAGIKEGDEIEVKLIDIDPKTGKFKLSRKVLLPRPEKK

SEQ ID NO: 1945 - DNA, 2166 bp, Salmonella enterica subsp. enterica serovar Choleraesuis str
  CDS (1)..(2166): transl_table=11
atgccgtcaaaaattggaaaggatattattttgcttaatccgatcgttcgtaaattccagtacggtcagcataccgttacgctggaaactggcatgatggcgcgtcaggccactgccgctgttatggtaagcatggatgacaccgccgtattcgttaccgttgtcggccagaaaaaagccaagccaggccaggacttcttcccactgaccgttaactatcaggagcgtacctacgctgctggtcgtatcccgggcagcttcttccgtcgtgaaggccgtccaagcgaaggcgaaaccctgatcgcgcgtctgattgaccgcccggttcgtccgctgttcccggaaggcttcgttaacgaagtgcaggttatcgcgaccgtcgtttccgttaacccgcaggttaacccggatatcgtggcgatgatcggcgcatccgctgcgctgtcgctgtccggcattccgttcaacggcccaatcggcgcggcgcgcgtaggttacatcaatgaccagtacgtgctgaacccgacccaggacgagctgaaagaaagcaagctggacctggtggttgccggtaccgaagcggctgtgctgatggtggaatccgaagctgaactgctgagcgaagacactatgctgggcgcggtggtattcggtcacgagcagcagcaggttgttatccaggcgatcaacgatctggtgaaagaagccggtaaaccgcgttgggactggcagccggaagccgtcaacgacgcgttgaacgcgcgtgttgctgcgctggctgaatctcgtctgagcgacgcgtaccgcatcaccgataaacaagagcgctatgctcaggttgacgtaatcaaatccgaaaccatcgagcagcttattgcagaagatgaaactctggatgctaacgagctgggcgaaatcctgcacgctatcgagaaaaacgtggtgcgtagccgcgtactggcaggcgagccgcgtattgatggccgtgaaaaagacatgatccgtggtctggacgtgcgcactggcgtactgccgcgtactcacggttccgctctgtttacccgtggtgaaacgcaggcgctggttaccgcaactctgggtactgcccgtgacgcgcaggtgcttgatgaactgatgggcgagcgtactgacagcttcctgttccactacaacttccctccgtactccgtaggcgaaaccggcatggtcggttctccgaagcgtcgtgaaattggtcacggtcgtctggcgaagcgcggcgtgctggcagtgatgccggacatggataaattcccgtacaccgttcgcgtggtgtctgaaatcaccgaatccaacggttcttcttctatggcttccgtgtgcggcgcttctctggcgctgatggacgctggcgtgccaattaaagccgccgtagcaggtatcgctatgggtctggtgaaagaaggcgacaactacgttgtactgtctgacattctgggcgacgaagatcacctgggcgatatggacttcaaagtggcgggttcccgcgacggtatctctgcgctgcagatggatatcaaaattgaaggtatcaccaaagagatcatgcaggttgcgttgaaccaggctaaaggtgcgcgtctgcacatcctgggcgtgatggaacaggcgatcaacgcgccgcgcggcgatatctctgaatttgcgccgcgtatccataccatcaagatcagcacggacaagatcaaagacgtgatcggtaaaggcggttctgtgatccgcgcgctgactgaagagaccggcaccaccatcgaaattgaagatgacggtactgtgaagatcgcggcgaccgacggtgaaaaagcgaaatacgctatccgtcgtatcgaagagatcaccgcagagatcgaagtcggccgtatctacaatggtaaagtgacccgtatcgttgactttggcgcgtttgttgccatcggcggcggtaaagaaggtctggttcacatctctcaaatcgcggataagcgtgtagagaaagtgaccgattatctgcagatgggtcaggaagtcccggttaaggttctggaagttgaccgccagggccgtgtacgtctgagcattaaagaagcaaccgagcagtctcaacctgcggctgcgccggaagctccggcgagcgaacaggccgagtaa

SEQ ID NO: 1946 - protein, 721 aa, Salmonella enterica subsp. enterica serovar Choleraesuis str
MPSKIGKDIILLNPIVRKFQYGQHTVTLETGMMARQATAAVMVSMDDTAVFVTVVGQKKAKPGQDFFPLTVNYQERTYAAGRIPGSFFRREGRPSEGETLIARLIDRPVRPLFPEGFVNEVQVIATVVSVNPQVNPDIVAMIGASAALSLSGIPFNGPIGAARVGYINDQYVLNPTQDELKESKLDLVVAGTEAAVLMVESEAELLSEDTMLGAVVFGHEQQQVVIQAINDLVKEAGKPRWDWQPEAVNDALNARVAALAESRLSDAYRITDKQERYAQVDVIKSETIEQLIAEDETLDANELGEILHAIEKNVVRSRVLAGEPRIDGREKDMIRGLDVRTGVLPRTHGSALFTRGETQALVTATLGTARDAQVLDELMGERTDSFLFHYNFPPYSVGETGMVGSPKRREIGHGRLAKRGVLAVMPDMDKFPYTVRVVSEITESNGSSSMASVCGASLALMDAGVPIKAAVAGIAMGLVKEGDNYVVLSDILGDEDHLGDMDFKVAGSRDGISALQMDIKIEGITKEIMQVALNQAKGARLHILGVMEQAINAPRGDISEFAPRIHTIKISTDKIKDVIGKGGSVIRALTEETGTTIEIEDDGTVKIAATDGEKAKYAIRRIEEITAEIEVGRIYNGKVTRIVDFGAFVAIGGGKEGLVHISQIADKRVEKVTDYLQMGQEVPVKVLEVDRQGRVRLSIKEATEQSQPAAAPEAPASEQAE

SEQ ID NO: 1947 - DNA, 2085 bp, Chlamydophila abortus S26/3
  CDS (1)..(2085): transl_table=11
atgacatttgaaactatttctgttacccttgaagaaggcaaaacgttagtatttgaaacggggaaaatagcgcgtcaggctaacggcgcagttcttgctcgcatgcaagaaacatgggtcttttcttctgtttgtgcggctaaccttgaggaagctgttgacttcctacctctaagagttgactaccaagaaaagttttcctctataggaaaaactttaggcgggtttattaaaagggaaggtcgcccaacagaaagagaaattttaacttctcgcctgatagatcgctccatgcgtccttcgttacccaaccggttaatgcaggacattcaaattttatcttacgtatggtcatacgacggagtcactcttcctgatcccatcgcaatttgcggtgtttctgcagccttagcaatttctgacattcctcagactagtattgtcgctggtgttcgtgtcggctttgtgaacaatcgttgggtagttaacccaacaaaagcggaaatggacgtttccagaatggaactcgttttagcaggaacagaaaatgctatcctaatgatcgagggacactgcgacttcttcacagaagagcaagttatcgaagctattgagtttggtcacaaacacattgttactatatgcaaggcactaaaggattggcaaaaacacataggtaaagaaaaaaatacaagtggaattgtttctcttccagaggaagtccaatctgccgtaaacacatttgtggaaggaaagtttgttgacctcctgaaaattaaggaaaagaaagctttcgaggctgcttcaaaacagttagaaaatgaagtcatcgaacagctccaagaagaaaatgaagtctttactgcgttcaatattaaaattgcttttaagcaagcaaagtctaacttcatacgtggtttaatacgtgaacaaggtctacgttctgatggacgttctgtaacgactattcgtcctatctctattgatacgtctttcctccccaggactcacggcagttgcttatttactcggggagaaactcaaactatggctgtctgtacgttaggtagcgaagccatggcccaacggtatgaagacttaaatggtgaaggattagccaaattttacttacaatacttcttccctcccttttctgttggagaagtaggaaggatcggctctccaggaagaagagaaatcggtcacggtaaacttgcggaaaaagcattaagtcacacgctacccgatcctatgaagttcccctatactatccgcatagaatccaatattacagaatctaatggttcttcatctatggcatctgtttgcggaggttgtttagctttaatggatgctggggtgcctattaaaactcctatagctggtatagccatgggactaatattagaggatgaccatgtaactattctctcagatatttccggattagaagatcatttaggtgatatggatttcaaggttgctggaaataccgaaggaattacagcatttcaaatggatattaaagtagaaggcattactcctgatattatgcgagctgccctagcccaagctaaagaaggtcgtcaagatattcttgaaaccatgaaacaagctcttgcggctcctaaaaccgacttatcccaatacgctcctcgcattgaaacaatgcaaattaagccgaataaaattgctactgttattgggcccggaggtaaacagattcgtcaaattattgaagaagctggagtacaaattgatattaatgactcgggtcttgtcagtatttctgcctcttcaccacaagccatagagaaagctaaatctattattgaaggcttagttggcgaagttgaagtaggtaagatttatgaaggtcgcgtaacatctgttgtcccttttggagcctttgttgaaattctccctggtaaagaaggtctttgccatatttctgaattttctaaacaacgtatagacaatgttggtgatttcgttaaacagggggacaccctaactgttaaacttttaagcatcaacgaaaaaggacagtacaaactcagtcataaagctactctcagtgagtag

SEQ ID NO: 1948 - protein, 694 aa, Chlamydophila abortus S26/3
MTFETISVTLEEGKTLVFETGKIARQANGAVLARMQETWVFSSVCAANLEEAVDFLPLRVDYQEKFSSIGKTLGGFIKREGRPTEREILTSRLIDRSMRPSLPNRLMQDIQILSYVWSYDGVTLPDPIAICGVSAALAISDIPQTSIVAGVRVGFVNNRWVVNPTKAEMDVSRMELVLAGTENAILMIEGHCDFFTEEQVIEAIEFGHKHIVTICKALKDWQKHIGKEKNTSGIVSLPEEVQSAVNTFVEGKFVDLLKIKEKKAFEAASKQLENEVIEQLQEENEVFTAFNIKIAFKQAKSNFIRGLIREQGLRSDGRSVTTIRPISIDTSFLPRTHGSCLFTRGETQTMAVCTLGSEAMAQRYEDLNGEGLAKFYLQYFFPPFSVGEVGRIGSPGRREIGHGKLAEKALSHTLPDPMKFPYTIRIESNITESNGSSSMASVCGGCLALMDAGVPIKTPIAGIAMGLILEDDHVTILSDISGLEDHLGDMDFKVAGNTEGITAFQMDIKVEGITPDIMRAALAQAKEGRQDILETMKQALAAPKTDLSQYAPRIETMQIKPNKIATVIGPGGKQIRQIIEEAGVQIDINDSGLVSISASSPQAIEKAKSIIEGLVGEVEVGKIYEGRVTSVVPFGAFVEILPGKEGLCHISEFSKQRIDNVGDFVKQGDTLTVKLLSINEKGQYKLSHKATLSE

SEQ ID NO: 1949 - DNA, 2106 bp, Pseudomonas syringae pv. syringae B728a
  CDS (1)..(2106): transl_table=11
gtgaacccggtaatcaaaaagtttcagttcggtcaatcgaccgtaaccctcgagacaggccgtatcgcccgtcaagcctctggtgcagtattggtcaccgttgacgacgacgtcagcgtactcgtgactgtggtcggcgccaaacaggctgacgctggcaaaggcttcttccctctgtccgtgcactatcaggaaaaaacctacgctgccggcaagattcctggtggtttcttcaagcgtgaaggccgtccttccgagaaagaaaccctgacttcgcgcctgatcgaccgtccgatccgcccgttgtttccagaaggcttcatgaacgaagtgcaggtcgtctgcaccgtcgtctccaccagcaagaaaatcgatccggacatcgctgcgatgatcggtacttcggctgccctggccatctccggtatcccgtttgacggtccggtcggtgctgcccgcgttgctttccacgaaagcaccggctacctgttgaacccgacttacgagcagctgcaggcttcgagcctggacatggtcgttgccggtacttccgaagccgttctgatggtcgagtcggaagccaaagagctgaccgaagaccagatgctgggcgccgtgctgttcgcgcatgacgagttccaggtcgtgatcaacgccatcaaggaactggctgccgaagccgccaagcctacctgggactggcagccaaagcctgaagcgactgcactgctgggcgctatccgtgccgagttcggcgacgcgatctcccaggcttacaccatcaccgtcaaagccgaccgctatgcgcgtctgggcgaactgaaagatcaggtcgttgccaagctcgctgtcgaagacggcagcccgtctgccagcgaagtcaaagcggctttcggcgaaatcgaataccgcaccgttcgcgaaaacatcgttaacggcaagccgcgtatcgatggtcgtgacacgcgcaccgttcgtcctctgaacatcgaagtcggcgttctgccgaagactcacggttcggcactgttcacccgtggcgaaactcaggcgctggtggttgccacgctgggtactgcacgtgacgcacagctgctcgataccctcgaaggcgagaagaaagaccccttcatgctgcactacaacttccctccgttctcggtgggcgagtgtggtcgcatgggcggcgcaggtcgtcgtgaaatcggtcacggccgtctggcccgtcgcagtgtccaggccatgctgccaggcgctgacgtgttcccgtacaccatccgtgtcgtgtcggaaatcaccgagtccaacggctccagctccatggcttcggtctgcggtgcttccctggctctgatggacgctggtgtgccgatgaaggcgccggttgccggtatcgccatgggtctggtcaaggaaggcgagaagttcgcgattctgaccgacatcctgggtgacgaagaccacctgggcgacatggacttcaaggtagccggtacctccaaaggtgttaccgcgctgcagatggacatcaagatcaaaggcatcaccgaagagatcatggagatcgccctgggccaggccctggaagctcgcctgaatatcctcggccagatgaaccagatcattggtcagtcgcgtaacgaactgtcggccaacgctccgaccatgatcgcgatgaagatcgacaccgacaagatccgtgacgtgatcggcaagggtggcgcaaccatccgtgccatctgcgaagagaccaaggcttcgatcgacatcgaagacgacggctcgatcaagatcttcggcgagtccaaggaagcggctgaggctgcacgtcagcgcgttctgggcatcaccgcagaagcggaaatcggcaagatctacatcggcaaggttgagcgcatcgtcgatttcggcgcgttcgtcaacatcctgccgggtaaggacggtctggttcatatctcgatgctgagcgatgctcgcgtagagaaagtgaccgacatcctcaaagaaggtcaggaagtcgaagtactggtactggacgtggacaaccgcggccgtatcaagctgtcgatcaaggacgtagccgcagcgaaagcgtcgggcgtctga

SEQ ID NO: 1950 - protein, 701 aa, Pseudomonas syringae pv. syringae B728a
MNPVIKKFQFGQSTVTLETGRIARQASGAVLVTVDDDVSVLVTVVGAKQADAGKGFFPLSVHYQEKTYAAGKIPGGFFKREGRPSEKETLTSRLIDRPIRPLFPEGFMNEVQVVCTVVSTSKKIDPDIAAMIGTSAALAISGIPFDGPVGAARVAFHESTGYLLNPTYEQLQASSLDMVVAGTSEAVLMVESEAKELTEDQMLGAVLFAHDEFQVVINAIKELAAEAAKPTWDWQPKPEATALLGAIRAEFGDAISQAYTITVKADRYARLGELKDQVVAKLAVEDGSPSASEVKAAFGEIEYRTVRENIVNGKPRIDGRDTRTVRPLNIEVGVLPKTHGSALFTRGETQALVVATLGTARDAQLLDTLEGEKKDPFMLHYNFPPFSVGECGRMGGAGRREIGHGRLARRSVQAMLPGADVFPYTIRVVSEITESNGSSSMASVCGASLALMDAGVPMKAPVAGIAMGLVKEGEKFAILTDILGDEDHLGDMDFKVAGTSKGVTALQMDIKIKGITEEIMEIALGQALEARLNILGQMNQIIGQSRNELSANAPTMIAMKIDTDKIRDVIGKGGATIRAICEETKASIDIEDDGSIKIFGESKEAAEAARQRVLGITAEAEIGKIYIGKVERIVDFGAFVNILPGKDGLVHISMLSDARVEKVTDILKEGQEVEVLVLDVDNRGRIKLSIKDVAAAKASGV

SEQ ID NO: 1951 - DNA, 2115 bp, Xanthomonas campestris pv. campestris str. 8004
  CDS (1)..(2115): transl_table=11
gtggcaaaaatcaccaaaaccttccagtacggcaagcacaccgtcaccctggagacgggcgaagtcgctcgccaggcgagcggtgccgtcatcgtcaagatggacgacaccgtactgctggtcaccgccgtcgccgccaagaccgcgcgcgaagggcaggacttcttccccctgacggttgactatcaggagaagttctatgccggcggccgcatcccgggcggcttcttcaagcgcgaaggacgtgcgaccgagaaggaaacgttgatctcgcgcctgatcgatcgtccgatccgtccgctgttcccggaggactacaagaacgaagtgcagatcatcgccacggtgatgtcgatgaacccggacatcgacggcgatatcgccgcgctgatcggtgcgtcggctgcgctgtcgttggccggtacccccttcaacggcccgatcggcgccgccaaggtgggctacaagaacggcgaatacattctcaacccgaccatcaccgagctgaaggattcgcagcttgagctggttgtggccggtacggcgaacgccgtgctgatggtggagtcggaagcggcgctgctgtcggaagaagtgatgctgggcgcggtcacctttggtcatcgcgagatgcagaaggtcatcaacatcatcaacgaactgaccgtcgaagccggcaccaagcccagcacctgggtggccccggccaagaacaccgcgctgatcagcgcgttgaaggaagcggttggcacccagctggcgggtgccttccaggtgcgcgacaagctgcagcgtcgcgacgccatttcggcgatcaagaaggacgtgctcgagtcgctggcaggccgcgtggcttccgaaggctggagctcggccgagctgtcgaaggaattcggcgagctggaataccacaccatgcgtgactcggtgctggagaccaaggtgcgtatcgacggccgtgcactggacaccgtgcgcccgatctcggtacaggccggcgtgctgccgcggacccatggctcggcgctgttcacccgcggcgagacgcaggcgatcgtggtcaccacgctgggcaccgcccgcgacggccaggtgatcgacgcggtcgctggcgagtacaaggaaaacttcctgttccattacaacttccctccgtattcggtgggcgagtgcggccgctttggcgcgccgaagcgtcgcgagatcggccacggccgtctggccaagcgcggcgtgttggccgtgatgccgagcctggaagaattcccgtacaccatccgcgttgtctcggaaatcaccgagtccaacggttcctcgtcgatggcttcggtgtgcggctcctcgctcgcactgatggacgccggcgtgccggtcaaggcaccggtggcgggtatcgccatgggcctggtgaaggaagacgaccgcttcgtggtgctgtccgacatcctgggggacgaagatcacctgggcgacatggacttcaaggtggccggtactgctgaaggcgtgtccgcgctgcagatggacatcaagatcgaaggcattaccgaagagatcatgaagcaggcactgcagcaggccaaggctggccgtctgcacatcctgggcgagatgtccaaggcgctgaccaccccgcgtcaggagctgagcgactacgcgccgcgcctgctgaccatcaagatccacccggacaagatccgcgaagtgatcggcaagggtggctcgaccatccaggcgatcaccaaggaaaccgggacgcagatcgatatccaggacgacggcacgatcatcattgcttcggtcaacgcgattgccgcgcaagctgcgaagtcgcgcatcgagcagatcacctcggacgtggagccgggccgcatctacgaaggcaaggtcgccaagatcatggacttcggtgcgttcgtgaccatcctgccgggcaaggatggcctggtacacgtgtcgcagatttccagcgagcgcgtggagaaggtcggcgacaagttgaaggaaggcgatctggtccgcgtcaaggtgctggaagtggacaagcagggccgcatccgtctgtcgatcaaggcagtggaagaaggcgaaggcgtgcctgcatcggctgagtaa

SEQ ID NO: 1952 - protein, 704 aa, Xanthomonas campestris pv. campestris str. 8004
MAKITKTFQYGKHTVTLETGEVARQASGAVIVKMDDTVLLVTAVAAKTAREGQDFFPLTVDYQEKFYAGGRIPGGFFKREGRATEKETLISRLIDRPIRPLFPEDYKNEVQIIATVMSMNPDIDGDIAALIGASAALSLAGTPFNGPIGAAKVGYKNGEYILNPTITELKDSQLELVVAGTANAVLMVESEAALLSEEVMLGAVTFGHREMQKVINIINELTVEAGTKPSTWVAPAKNTALISALKEAVGTQLAGAFQVRDKLQRRDAISAIKKDVLESLAGRVASEGWSSAELSKEFGELEYHTMRDSVLETKVRIDGRALDTVRPISVQAGVLPRTHGSALFTRGETQAIVVTTLGTARDGQVIDAVAGEYKENFLFHYNFPPYSVGECGRFGAPKRREIGHGRLAKRGVLAVMPSLEEFPYTIRVVSEITESNGSSSMASVCGSSLALMDAGVPVKAPVAGIAMGLVKEDDRFVVLSDILGDEDHLGDMDFKVAGTAEGVSALQMDIKIEGITEEIMKQALQQAKAGRLHILGEMSKALTTPRQELSDYAPRLLTIKIHPDKIREVIGKGGSTIQAITKETGTQIDIQDDGTIIIASVNAIAAQAAKSRIEQITSDVEPGRIYEGKVAKIMDFGAFVTILPGKDGLVHVSQISSERVEKVGDKLKEGDLVRVKVLEVDKQGRIRLSIKAVEEGEGVPASAE

SEQ ID NO: 1953 - DNA, 2244 bp, Rickettsia felis URRWXCal2
  CDS (1)..(2244): transl_table=11
atgtttaacgaaataactaagagtgttacatggaacgggaaagttcttgagcttagtacaggtaagatagcaaggcaagctgacggagcagttacggtaaaaatgggtaattccgttttattatgtacagcagtagtagctaaaaaagcaaaagaaggtatcggcttttttcctttaacgattaattatagagaaatggcatatgctaccggtaaaatccccgggggattttttaaacgtgagggaaaagcatcagatagagaagttttagtatctcgtttaatagatagaccgattagaccgttatttcatccggcttttgtgaatgaaacgcatgtaacttgcagtgttctttcatatgatcctgaaactccggtagatatacttgcaattattggtgcatcggctgcccttagcctatcccctgctccttatctagaaatagttgctgcaagtaaagtcggtttaatcaatggtgaatttgttttaaatccgacacttgaattattaaaaacaagtcagcttgatttagtagttgcaggaacatcagattcagtaatgatggttgaatcggaagctcatttactcgctgaagaacaaatgttagaagccgtaaaatttggatttgaaagcttccagccggtaataaagataattaaagaactagcagaagaagctaaaaaaccaaagcttgaaatgcaagatttatatcctgcctcattaaagaaagaaattgagaagttatttgtaaaagaaattgaacaagcttttgcgattaaatctaaacaggaacgtagtactaatttagatttaatacctgaaaaagttcttacacattttgtaagcgatatagaaaataaaaaatatagtaattatcaaatcgaatcggctttaaaatctattgaatcagatatattacgtaacgagattttagaaaaaaatagacgtatcgatggaagaagtaccacggatataagacaaattgcttgtgaaataggtttattaccttccgcacacggttcagctttatttactagaggcgaaacgcaaagcttagttagcactacattcggtactagtttagatgagcagatagttgacagtttagagggtgagtataaagagcgtttcatgcttaattatatctttccgccctactctgtaaatgaagcaatgccgatgaaagcacctagtcgtcgtgaagtcggacacggtaaactcgcatggcgtgctattaatccaatattacctaataaagtacaatttccttattctattagagtagttgctgaaactacggagtctaacggttcttcttcaatggcaaccgtatgcggtagttctcttgctttaatgtatgccggcgtaccgataaaagcaccggttgcaggtattgctatgggccttgttaaggaaggcaagaaatttgcggtattatccgacattcttggagatgaagattatttcggtgatatggactttaaggttgcaggaactagtgaagggattactgcattacaaatggatatcaaaatatccggagtagattttaaaataatgacagtagctttagagcaagcaagactcggtcgtttgcatatacttgagcaaatgaataaagttattagtaaaccaaatagcgaactaagtaaaaatgctccttctactactactataaaaatagataaggataaaattagagatattataggaccgggcggtaaagtaataaaggaaatttgtgaaactagcggtgctaaaatagatataagcgatgacggcagcgtttctgtttatgcttcagatagagataagctaaaagtcgctttagataaaattaaagctattgccgttgaacctgaaatcggtgaaatatttaacggtacagtaatgaaagtcttagattccggtgcttttattaattatttaggtaataaagacggctttgttcatattagtgaaatttcagaagaaagaatagaaacggttagcagtgttttaaaacaaggcgatatagtaaaagttaagctgataggctttgataataaaggcaaagcaaaactaactattaaaaatgccgataaggataaatcttcaaataatccaaagccaaaaaataatgttaataatgctaaggaaaattcagaacctgagcgacgtgattctagtaaaaaacgagcttggaatgaagattctaacaatgataaagaagaagcaattacggaacgtaagtattttaattga

SEQ ID NO: 1954 - protein, 747 aa, Rickettsia felis URRWXCal2
MFNEITKSVTWNGKVLELSTGKIARQADGAVTVKMGNSVLLCTAVVAKKAKEGIGFFPLTINYREMAYATGKIPGGFFKREGKASDREVLVSRLIDRPIRPLFHPAFVNETHVTCSVLSYDPETPVDILAIIGASAALSLSPAPYLEIVAASKVGLINGEFVLNPTLELLKTSQLDLVVAGTSDSVMMVESEAHLLAEEQMLEAVKFGFESFQPVIKIIKELAEEAKKPKLEMQDLYPASLKKEIEKLFVKEIEQAFAIKSKQERSTNLDLIPEKVLTHFVSDIENKKYSNYQIESALKSIESDILRNEILEKNRRIDGRSTTDIRQIACEIGLLPSAHGSALFTRGETQSLVSTTFGTSLDEQIVDSLEGEYKERFMLNYIFPPYSVNEAMPMKAPSRREVGHGKLAWRAINPILPNKVQFPYSIRVVAETTESNGSSSMATVCGSSLALMYAGVPIKAPVAGIAMGLVKEGKKFAVLSDILGDEDYFGDMDFKVAGTSEGITALQMDIKISGVDFKIMTVALEQARLGRLHILEQMNKVISKPNSELSKNAPSTTTIKIDKDKIRDIIGPGGKVIKEICETSGAKIDISDDGSVSVYASDRDKLKVALDKIKAIAVEPEIGEIFNGTVMKVLDSGAFINYLGNKDGFVHISEISEERIETVSSVLKQGDIVKVKLIGFDNKGKAKLTIKNADKDKSSNNPKPKNNVNNAKENSEPERRDSSKKRAWNEDSNNDKEEAITERKYFN

SEQ ID NO: 1955 - DNA, 2130 bp, Haemophilus influenzae 86-028NP
  CDS (1)..(2130): transl_table=11
gtgaatccaattgttaaacaatttaaatacggtcagcataccgttactctagaaactggcgcgattgcacgtcaagcaacggctgcggttatggcaagcatggacgataccacggtattcgtgactgttgttgctaaaaaagatgtgaaagaaggtcaagacttcttcccattaaccgtaaactaccaagagcgtacttatgcagcgggtaaaatcccaggtggtttcttcaagcgtgaaggtcgtccatctgaaggcgaaactttaattgcacgtttaattgaccgtccaattcgtccattattcccagaaggtttcttcaatgaaatccaagttgtggcaactgtggtttctgtaaacccacaaatcagccctgacttagtggcaatgatcggtgcttctgcagcattaaccttatctggcgtgcctttcaatggtcctatcggtgcagcgcgtgttggttttatcgacaaccaattcgtattaaacccaactatggctgaacaaaaacaaagccgtttggacttagtggttgcaggtactgacaaagccgtattaatggttgaatctgaagctgatattttaactgaagaacaaatgttagcggcagtcgtattcggtcatcaacaacaacaagttgtgattgaagcagtcaaagaatttgcaaaagaagcgggcaaaccacgttgggattgggttgctccacaaccaaacacagatttaatcaacaaagtaaaagcgattgctgaagcacgtttaggcgatgcataccgcattactgaaaaacaagctcgttacgaacagatcgatgcgattaaagcggatgtaattgcgcaaatcacagctgaagatgaagaaatcagcgaaagtaaaatcgtggatatttttaccgcacttgaaagccaaatcgtgcgtggtcgtatcattgcaggcgaaccacgtattgatggtcgtaccgttgatactgttcgtgcattagatatttgcactggtgtattaccacgtactcacggttctgcgatttttactcgtggcgaaacgcaagcattagctgttgcaaccttaggtaccgaacgtgatgcacaaatcattgatgaattaacgggtgaacgtcaagatcacttcttattccattataatttccctccatattctgtaggcgaaacaggtatgatcggctcgccaaaacgtcgtgagatcggtcacggtcgtttagcaaaacgtggtgtagcggctgttatgccaagccttgcagaattcccgtatgttgtgcgtgtagtatctgaaatcactgaatctaacggttcttcttctatggcatctgtatgtggtgcgtctttagcattaatggatgcaggcgttccaatcaaagctgctgttgcaggtatcgcaatgggtttagtgaaagaagaagagaaattcgtggtgctttcagatatcttaggtgatgaagaccatttaggcgatatggactttaaagtagctggtacacgcgaaggtgtaaccgcccttcaaatggatatcaaaattgaaggtatcacccctgaaattatgcaaattgcattaaaccaagcgaaaagtgcacgtatgcacattcttggtgtcatggaacaagcaatcccagctccacgtgcggatatttcagattacgcaccgcgcatctatacaatgaaaatcgatcctaagaaaatcaaagatgtgattggtaaaggtggtgcaacaatccgttcactaactgaagaaactggtacatcaattgatattgatgacgatggtacagtgaaaattgctgcagtagatagcaatgcagcgaaaaacgtaatgggacgtattgaggaaatcgttgcagaagttgaagctggcgcaatttacaaaggtaaagtcactcgtcttgctgattttggtgcattcgtcgcaatcgttggaaataaagaaggtttggttcatatttctcaaattgctgaagagcgtgtagaaaaagttagcgattaccttcaagtgggtcaagaagtaaacgtaaaagttgttgaaatcgatcgtcaaggtcgtattcgtttaacaatgaaagacttggctccaaaacaagaaactgaaattaaccaagaagatcctgtcgaagaacaggaataa

SEQ ID NO: 1956 - protein, 709 aa, Haemophilus influenzae 86-028NP
MNPIVKQFKYGQHTVTLETGAIARQATAAVMASMDDTTVFVTVVAKKDVKEGQDFFPLTVNYQERTYAAGKIPGGFFKREGRPSEGETLIARLIDRPIRPLFPEGFFNEIQVVATVVSVNPQISPDLVAMIGASAALTLSGVPFNGPIGAARVGFIDNQFVLNPTMAEQKQSRLDLVVAGTDKAVLMVESEADILTEEQMLAAVVFGHQQQQVVIEAVKEFAKEAGKPRWDWVAPQPNTDLINKVKAIAEARLGDAYRITEKQARYEQIDAIKADVIAQITAEDEEISESKIVDIFTALESQIVRGRIIAGEPRIDGRTVDTVRALDICTGVLPRTHGSAIFTRGETQALAVATLGTERDAQIIDELTGERQDHFLFHYNFPPYSVGETGMIGSPKRREIGHGRLAKRGVAAVMPSLAEFPYVVRVVSEITESNGSSSMASVCGASLALMDAGVPIKAAVAGIAMGLVKEEEKFVVLSDILGDEDHLGDMDFKVAGTREGVTALQMDIKIEGITPEIMQIALNQAKSARMHILGVMEQAIPAPRADISDYAPRIYTMKIDPKKIKDVIGKGGATIRSLTEETGTSIDIDDDGTVKIAAVDSNAAKNVMGRIEEIVAEVEAGAIYKGKVTRLADFGAFVAIVGNKEGLVHISQIAEERVEKVSDYLQVGQEVNVKVVEIDRQGRIRLTMKDLAPKQETEINQEDPVEEQE

SEQ ID NO: 1957 - DNA, 2295 bp, Corynebacterium jeikeium K411
  CDS (1)..(2295): transl_table=11
atgagtacgaagaagcagaacatccaagcagagctcgttgacccagatgccggtgtgtgggaagtagaggccaccattgataacggtgacttcggcacccgcagcatccgctttgaaaccgggctgttggcccgccaggccgatggggcagtgacggcctacctggacgaggacacgatgctgctgtccaccaccgccgcctcccgccagccgcgcgagggcatcgatttcttcccgctgaccgtggacgtggaagagcgcatgtactccgtcggtcgcattccaggcagcttcttccgccgcgagggtcgcccgggcacggatgcgatcctggccgcccgcctgatcgaccgtccgctgcgtcccaccttcgtgcgcggcctgcgcaacgaggtgcaggtcatcgtgaccgtgctgtcgatggatccgaaggatcgctacgacgtgctggccatcaacggtgcttccgcctccacccagctgtccggcctgccggtttccggcccggtgggtggcgtgcgcatggcgctggttgtcgattccgaccacccggagggccagtgggttgcattcccgacgcgcgagcaggaagagaaggccatcttcgagttggtcgtagccggtcgcgtgaccgagcccgtgaagcctgcccgtggccgtggacgcgggcgcggcaagggtgcaggcagcagcgagccgaacgttgcggtcatgatggtcgaagctggagccaccgataacgtcgtcgagcgcatcgccgagggcgcaccggcaccgaccgaagaggttgtggcgcagggtatcgaggccgctaagccgttcattgccacgctctgtgaggcgcagaacgctctggccaaggctgtggacgccgaaacccgcgaatttgagctgttcccgccctatggcgaggacgttttcgcctctgtccaggcggaagcgctggatgcgttggaagacatcatggccattgctgacaagcaggagcgcgacgaggctctggctgcgaacatgcaggctaacgttgatgaattgctgccggagttcccggagcgcgaggcggagatccgtgcggctcacaacgaggtcaccaaggcagtggtgcgtcgccgcatcctagaggatggcttccgcatcgatggccgcgacagcaccacgatccgcgacctgggcatcgttgtccaactgatcccgcgagctcacggttccgccctgtttgagcgtggcgagacccagatcctgggcgtaaccacgctggatatgctgaagatggagcagcagattgactcgctgggtccggagacctcgaagcgctacattcaccactacaacttcccgccgtactccactggcgagaccggccgcgtgggctccccgaagcgtcgcgaaattggtcacggtgcgctggcggagcgcgcactgacgcccgtcattcccagccgcgatgacttcccttacaccatccgccaggtctccgaagctctgagctccaacggctcgacctccatgggttccgtgtgcgcctcgaccctgagcctgtacaacgccggtgtaccgctgaaggcgccggtggcgggtattgccatgggcctggtgactggaaaggttggcaaggccggcaaggacaagtacgtcaccctgaccgacattctgggcgccgaggatgcctttggcgacatggactttaaggttgcgggtactcccgacttcgtgacggccctgcagctggacaccaagctggacggcattccttccgacgtgttggcggaggcgctgcagcaggcacgtactgctcgcctggagatcctgcagctgatggaagaggccatcgactctccggacgatatgagtgacctggccccacacatcaccagtatcaatatcccgcagaacaagatcggtgaggtcattggcccgaagggcaagaccatcaaccagatcaccgaggagaccggcgcaaatatcaccatcgaggatgatggcacggtgttcatctccgccgttggcggcgagtctgcacgcgaggcagaggagaaaattaacgccatcgccaacccgcagcagccgaaggtgggcgaccgcttcctgggcacggtggtgaagaccaccgcgttcggtgcattcgtttccctgctgccgggtcgtgatggcctgatccacatctccaacctgggtggcgatcgccgcatcgagcgggttgaggacgaggtttcggtgggcgacaagctcgaggtggagatcgcggacatcgataaccgcgggaagatctccctggtcctggtcgaagagaactag

SEQ ID NO: 1958 - protein, 764 aa, Corynebacterium jeikeium K411
MSTKKQNIQAELVDPDAGVWEVEATIDNGDFGTRSIRFETGLLARQADGAVTAYLDEDTMLLSTTAASRQPREGIDFFPLTVDVEERMYSVGRIPGSFFRREGRPGTDAILAARLIDRPLRPTFVRGLRNEVQVIVTVLSMDPKDRYDVLAINGASASTQLSGLPVSGPVGGVRMALVVDSDHPEGQWVAFPTREQEEKAIFELVVAGRVTEPVKPARGRGRGRGKGAGSSEPNVAVMMVEAGATDNVVERIAEGAPAPTEEVVAQGIEAAKPFIATLCEAQNALAKAVDAETREFELFPPYGEDVFASVQAEALDALEDIMAIADKQERDEALAANMQANVDELLPEFPEREAEIRAAHNEVTKAVVRRRILEDGFRIDGRDSTTIRDLGIVVQLIPRAHGSALFERGETQILGVTTLDMLKMEQQIDSLGPETSKRYIHHYNFPPYSTGETGRVGSPKRREIGHGALAERALTPVIPSRDDFPYTIRQVSEALSSNGSTSMGSVCASTLSLYNAGVPLKAPVAGIAMGLVTGKVGKAGKDKYVTLTDILGAEDAFGDMDFKVAGTPDFVTALQLDTKLDGIPSDVLAEALQQARTARLEILQLMEEAIDSPDDMSDLAPHITSINIPQNKIGEVIGPKGKTINQITEETGANITIEDDGTVFISAVGGESAREAEEKINAIANPQQPKVGDRFLGTVVKTTAFGAFVSLLPGRDGLIHISNLGGDRRIERVEDEVSVGDKLEVEIADIDNRGKISLVLVEEN

SEQ ID NO: 1959 - DNA, 2103 bp, Staphylococcus haemolyticus JCSC1435
  CDS (1)..(2103): transl_table=11
atgtctcaagaaaagaaagtgtttaaaactgagtgggctggaagatcgttaacgattgagatagggcaattagcaaaacaagctaatggtgcagttttagtacgttatggagatacggttgtattatctacggctgtagcatctaaagaacctcgtgatggtgactttttcccattaacagttaactatgaagaaaaaatgtatgctgctggtaaaattccaggaggatttaaaaaacgtgaaggtcgtccaggagacgaagcaacattaactgcacgtttaattgatagaccaattcgaccacttttccctaaaggatatcgacatgacgttcaaattatgaacacagtactaagcgctgatccagattgttcgcctgaaatggctgctatgataggttcttcaatggcattaagtgtttcagatattcctttccaaggaccaattgctggtgttaatgtaggttatgttgatggtaaatatgtaattaaccctaccgttgaggaaaaagaagtttcacgtctagacctagaagttgccggccataaagacgctgtaaacatggtagaggctggtgcaagtgaaataactgagaaagaaatgttagaagctattttcttcggacatgatgaaatcaaacgtttagtagcattccaagaagaagtggtagctcacattcagcctgttaaaaaagaatttgtacctgtagaacgtgatgaagcactggtttcaagagttaaaacacttactgaagaaaaaggcttaaaagaaacagttctaacatttgataaacaacaacgtgacgaaaacttggatacgttaaaagctgaaattgcaactgaatttgttgacgaagcagatcctgaaaatgaattgttaattgatgaagtttatgcaattttaaatgacttagttaaagaagaagtacgtcgtcttatcgctgatgaaaaaattagacctgatgggcgtaaaccagatgaaattagaccacttgaatctgaagttggtttattgccacgagcacatggctcaggtttatttacacgtggacaaactcaagctttatctgtattaacattaggagcattaggtgattatcaacttattgatggactaggtcctgaacaagaaaaacgattcatgcatcattacaacttccctaatttctctgttggagagacaggcccagttagagcacctggtcgtcgtgagattggacatggtgcattaggcgagagagcactaaaatacattattccagatacaactgaattcccttacactgtacgtattgtaagtgaagtattagaatctaacggttcatcttcacaagcatcaatttgtggttcaactttagctttgatggatgctggtgtgccaattaaagcgcctgttgcaggtatagcaatgggactagtcacacgtgaagatagttatacgattcttacggatattcaaggtatggaagatgctttaggagatatggattttaaagttgcaggtacaaaagaaggtatcactgcgatacaaatggacattaaaattgatggtttaacacgtgaagtcattgaagaagctctagaacaagctcgacaaggtcgattagcgataatggatcacatgttacaaacaattgatcaacctcgtaaagaattaagtgcttatgctcctaaagtggaaataatgcatattaaacctgaaaaaattagagacgtaattggaccaggtggtaagaaaattaatgaaatcattgatgaaactggggttaaattagatattgaacaagatggtacaatcttcataggtgcaatcgatcaagacatgattaaccgtgctcgtgaaattattgaagatatcacacgtgaagcggaagtaggccaagtttacaatgcaaaagttaaacgtattgaaaagtatggtgcttttgttgaattgtttgccggtaaagatgctttattacacatctctcaaatttcaaaagagcgtattaataaagtagaggatgtattaagtataggcgattcaattgacgtgaaaataactgaaattgacaaacaaggtcgcgtaaatgcttctcataaagcattagatgaaaataaataa

SEQ ID NO: 1960 - protein, 700 aa, Staphylococcus haemolyticus JCSC1435
MSQEKKVFKTEWAGRSLTIEIGQLAKQANGAVLVRYGDTVVLSTAVASKEPRDGDFFPLTVNYEEKMYAAGKIPGGFKKREGRPGDEATLTARLIDRPIRPLFPKGYRHDVQIMNTVLSADPDCSPEMAAMIGSSMALSVSDIPFQGPIAGVNVGYVDGKYVINPTVEEKEVSRLDLEVAGHKDAVNMVEAGASEITEKEMLEAIFFGHDEIKRLVAFQEEVVAHIQPVKKEFVPVERDEALVSRVKTLTEEKGLKETVLTFDKQQRDENLDTLKAEIATEFVDEADPENELLIDEVYAILNDLVKEEVRRLIADEKIRPDGRKPDEIRPLESEVGLLPRAHGSGLFTRGQTQALSVLTLGALGDYQLIDGLGPEQEKRFMHHYNFPNFSVGETGPVRAPGRREIGHGALGERALKYIIPDTTEFPYTVRIVSEVLESNGSSSQASICGSTLALMDAGVPIKAPVAGIAMGLVTREDSYTILTDIQGMEDALGDMDFKVAGTKEGITAIQMDIKIDGLTREVIEEALEQARQGRLAIMDHMLQTIDQPRKELSAYAPKVEIMHIKPEKIRDVIGPGGKKINEIIDETGVKLDIEQDGTIFIGAIDQDMINRAREIIEDITREAEVGQVYNAKVKRIEKYGAFVELFAGKDALLHISQISKERINKVEDVLSIGDSIDVKITEIDKQGRVNASHKALDENK

SEQ ID NO: 1961 - DNA, 2112 bp, Pseudomonas fluorescens Pf-5
  CDS (1)..(2112): transl_table=11
gtgaacccggtaatcaaaaaattccagttcggtcagtcgaccgtaaccctcgagactggccgtatcgcccgtcaggcctccggcgcagtattggtcaccgttgacgacgacgtcagcgtattggtgaccgtggttggcgccaagcaagccgatccaggcaagggcttcttccctctgtctgttcactaccaggaaaagacttacgctgccggtaagatccctggcggtttcttcaagcgcgaaggccgtccttccgagaaagaaaccctgacctcgcgtctgatcgaccgtccgatccgccctctgttcccagaaggcttcatgaacgaagtgcaggttgtctgcaccgtggtttccaccagcaagaagaccgatccggacatcgctgcgatgatcggtacctcggctgccctggcgatctccggcattcctttcgacggcccgatcggcgccgctcgtgtggctttccacgaaagcaccggctacctgctgaacccgacctacgagcaactggctgcttcgagcctggacatggtcgtggccggtaccgaagaagctgtactgatggttgaatcggaagccaaagagctgaccgaagaccagatgctgggtgctgtactgttcgcccacgacgaattccagtcggtgatcaaggctgtcaaagagctggccgccgaagctgccaagcctacctgggactgggactgggctgctgccccagaagccaccgaactgctgggcgctatccgtgccgagttcggcgaagccatctcccaggcttacaccatcaccgtcaaggccgaccgttacgctcgcctgggcgagctgaaagaccaggtggtcgccaagctctccggtgaagaaggccagccttcggcgtccgacgtcaaagccgctttcggcgagatagaataccgcaccgttcgcgaaaacatcgtcaacggcaagccacgtatcgacggccgcgacacccgcaccgtacgtccgctgaacatcgaagtcggcgtactgcccaaaactcacggttcggccctgttcacccgtggcgaaacccaggccctggtggttgcgaccctgggtactgcccgtgacgcacagctgctggacaccctggaaggcgagaagaaagaccccttcatgctgcactacaacttccctccgttctcggtgggcgagtgtggtcgcatgggcggcgctggtcgtcgtgaaatcggtcacggccgtctggcccgtcgttcggtccaggccatgctgccagccgccgacgtgttcccttacaccatccgcgtagtatcggaaatcaccgagtccaacggttccagctccatggcttccgtgtgcggtgcttccctggcgctgatggacgctggtgtaccaatgaaggcgccggttgccggtatcgccatgggcctggtcaaggaaggcgagaagttcgcagtcctgaccgacatcctgggtgacgaagaccacctgggcgacatggacttcaaggtagccggtaccgccaaaggtgtcaccgcgctgcagatggacatcaagatcaagggcatcaccgaagagatcatggagatcgccctgggccaggccctggaagctcgcctgaacatcctcggtcagatgaaccagatcatcggtcagtcccgtaccgagctgtcggccaacgctccgaccatgatcgcgatgaagatcgacaccgacaagatccgtgacgtcatcggtaaaggcggcgccaccatccgcgcgatctgtgaagaaaccaaggcttcgatcgacatcgaggacgacggctcgatcaagatcttcggcgaaaccaaggaagctgcagaggccgcgcgtcagcgcgttctgggcatcaccgcggaagccgagatcggcaagatctacgtcggcaaggttgagcgcatcgttgacttcggtgccttcgtcaacatcctgccgggcaaggacggtctggtgcacatctccatgctgagcgacgctcgcgttgagaaagtcaccgacatcctgaaagaaggccaggaagtggaagtgctggtactggacgtggacaaccgcggccgtatcaagctgtccatcaaagacgtggcagcagccaaggcttcgggcgtttaa

SEQ ID NO: 1962 - protein, 703 aa, Pseudomonas fluorescens Pf-5
MNPVIKKFQFGQSTVTLETGRIARQASGAVLVTVDDDVSVLVTVVGAKQADPGKGFFPLSVHYQEKTYAAGKIPGGFFKREGRPSEKETLTSRLIDRPIRPLFPEGFMNEVQVVCTVVSTSKKTDPDIAAMIGTSAALAISGIPFDGPIGAARVAFHESTGYLLNPTYEQLAASSLDMVVAGTEEAVLMVESEAKELTEDQMLGAVLFAHDEFQSVIKAVKELAAEAAKPTWDWDWAAAPEATELLGAIRAEFGEAISQAYTITVKADRYARLGELKDQVVAKLSGEEGQPSASDVKAAFGEIEYRTVRENIVNGKPRIDGRDTRTVRPLNIEVGVLPKTHGSALFTRGETQALVVATLGTARDAQLLDTLEGEKKDPFMLHYNFPPFSVGECGRMGGAGRREIGHGRLARRSVQAMLPAADVFPYTIRVVSEITESNGSSSMASVCGASLALMDAGVPMKAPVAGIAMGLVKEGEKFAVLTDILGDEDHLGDMDFKVAGTAKGVTALQMDIKIKGITEEIMEIALGQALEARLNILGQMNQIIGQSRTELSANAPTMIAMKIDTDKIRDVIGKGGATIRAICEETKASIDIEDDGSIKIFGETKEAAEAARQRVLGITAEAEIGKIYVGKVERIVDFGAFVNILPGKDGLVHISMLSDARVEKVTDILKEGQEVEVLVLDVDNRGRIKLSIKDVAAAKASGV

SEQ ID NO: 1963 - DNA, 2103 bp, Psychrobacter arcticum 273-4
  CDS (1)..(2103): transl_table=11
atgacaatgtttaataccattaagcgtgaatttcaatacggcaaccagcaagttgtcatcgaaacagggcgtattgctcgccaagcaaactctattttagtacacatgggcggcgttactgtgttggtagcagcggttgtaaagtctgatgccaaagaaggtcaaaacttctttccattgactgtcaactaccaagaaaaaatgtacgctgcaggtaaaattccaggtgcttatggcaagcgtgaaggtcgtgcaagcgagtctgaaaccttaacgtcgcgtctgattgaccgcccaatccgtccgctattccctgaaggctatgtaaacgagattcaaatcacagcgacggttgtatcatctgataaaactcaatcagcagatatcgcagcattaatcggtgcttcagcggcgctagctatctctgatgccccattcaatggtcctgttgctgccgcccgtgttggttttatcaatggtgagtacgtactgaaccctactcttgaagagcttaaagaaagtgatcttgatttggtcgtggctggtacaaagtctgccgtattgatggttgaatctgaagctgcagagttatcagaagatcaaatgctaggcgcagtattatacggtcatcagcagcagcaaatcgttatcgataacattgcctcaatggcagcagaaattggtactgctaagcagcaatataccgctcctgtacgtgatcaagcgttagagactggtatgaaagagcagtttggtgcgcaagtatctgatgcttatacgattactgataagcaagctcgctacagcaagcttaacgaaattaaagacgccgctattgtagcccttgctggcgatgctgaatcagaaagctatagtgatacagtatctgagttaaaagagatttataacgatctaaaatatcgtaccgttcgtgacaatattttgtctggtaagccacgtattgatggtcgtgatttagagaccgttcgtgctcttgatgtacaggttggtgtactaccatttactcatggttcagcactgtttacacgtggtgaaacccaagccttggtaacgactacccttggtaatactcgtgacgtcaatatgattgactcgctagcgggtacgattcgtgaccatttcatgttgcattacaactttccgcatttctcagtaggcgaaacgggtcgtgaaggtattcctaaacgtcgcgaaattggtcatggtcgtctagcacgccgtggtgtacaagcgatgctgcctgatagcgaccgcttcccgtatgtcatccgtgtggtatctgagatcactgaatcaaacggttcatcatcaatggcttctgtttgcggcgcgagcttggcattgatggacgctggtgtaccaattaaagcaccagttgctggtatcgccatgggtctggtcaaagaaggcgagcgtttcgcggtattgtctgacatcttaggtgatgaagatcatcttggcgatatggattttaaagttgctggttctaaagatggtattactgccctgcagatggatattaaaattgaaggtattacaccagatatcatggagcaagcgttaaaacaagcccatgctggtcgtattcatatcctagacgcgatgaacaaagtattgcctgagagccgtactgaaatcaatgctcatgcgcctaattatgcagtaattgagatcaatccagacaaaatccgtgacgttatcggtaaaggtggcgcgacgattcgtcagctaactgaagaaactggtgcggttattgatatcgatgatgcgggtactattcgtatctttggtgaaaacaaagcggcaactaaagcagcgattgctaaaatcgaagcaatcacggcagaagttgaagtgggtaaaacctatgaaggtacggtcgctcgtatcgtcgacttcggtgcttttgttaacgtattaccaaatactgatggcctcgtccatatctcacaaatcgctgatgagcgcgtagaaaacgtttctgactatctaaaagaaggtcaaatcgtgaaagtactggtacaagacgttgataatcgtggtcgtatcaagttgactatgaaaggtattgagcaaagctaa

SEQ ID NO: 1964 - protein, 700 aa, Psychrobacter arcticum 273-4
MTMFNTIKREFQYGNQQVVIETGRIARQANSILVHMGGVTVLVAAVVKSDAKEGQNFFPLTVNYQEKMYAAGKIPGAYGKREGRASESETLTSRLIDRPIRPLFPEGYVNEIQITATVVSSDKTQSADIAALIGASAALAISDAPFNGPVAAARVGFINGEYVLNPTLEELKESDLDLVVAGTKSAVLMVESEAAELSEDQMLGAVLYGHQQQQIVIDNIASMAAEIGTAKQQYTAPVRDQALETGMKEQFGAQVSDAYTITDKQARYSKLNEIKDAAIVALAGDAESESYSDTVSELKEIYNDLKYRTVRDNILSGKPRIDGRDLETVRALDVQVGVLPFTHGSALFTRGETQALVTTTLGNTRDVNMIDSLAGTIRDHFMLHYNFPHFSVGETGREGIPKRREIGHGRLARRGVQAMLPDSDRFPYVIRVVSEITESNGSSSMASVCGASLALMDAGVPIKAPVAGIAMGLVKEGERFAVLSDILGDEDHLGDMDFKVAGSKDGITALQMDIKIEGITPDIMEQALKQAHAGRIHILDAMNKVLPESRTEINAHAPNYAVIEINPDKIRDVIGKGGATIRQLTEETGAVIDIDDAGTIRIFGENKAATKAAIAKIEAITAEVEVGKTYEGTVARIVDFGAFVNVLPNTDGLVHISQIADERVENVSDYLKEGQIVKVLVQDVDNRGRIKLTMKGIEQS

SEQ ID NO: 1965 - DNA, 2073 bp, Candidatus Pelagibacter ubique HTCC1062
  CDS (1)..(2073): transl_table=11
atgttcaaagtatacaagaaggaaattgaagtagcaggtaagaagataagtttagaaacaggtaaagtagcaagacaagcagacggagcaatcattgcttcatgtggtgaaacagttattttagcaacagtagtaggagccaaaaaagtaaatccagatatggattattttcctctgtctgtaaattaccaagaaaaatattatgcaggtggtaaaattcctggtggatactttaaaagagaagcaagaccaactgaaagtgaacaattgatttcaagattaattgatagacccatcagacctttgtttccaagtgaattcaaaaatgaagttcagttattaccaactgtaatctcatatgataaagacaatcaaccagatattttagcaattacagcttcatcagctgcattagccatttcaggaatgccatttatggggcctgtaggtgcttcaagagttggtttagttgatggaaaatacatattaaacccatcaaaagctgagttagaaaactctactttagatttagttgtagctggtactaaagatgctgtgctgatggttgagtcagaaacgtcaggtttaacagaagaagtaatgttagatgcagttaagtttggtcacgaaggttttgttccagtaatcgaaatgatcgaggaacttgcaaaagaatgcagaaaaccagaatggactgttgagaaaaaagatttatcagaagttaagaaaaaacttgaagaaaactttacagaagatttaactaaagcttttgcaacaatagacaaacaagatcgatcaaatcaaatttcagaaatttctgataaagcaaaacaactttttgcagatgatgaaaattactctgatttcaatgttaatgatgaattaaaaaatcttgaaaagaaaattgttagaactgatattcttaaaaataaaaaaagaattgatggcagaggcttggctgatgtaagagctattgagtgtgaagttggtgttttaccaagaactcacggatcagctctatttactagaggcgaaacacaagcgattgtagttactactttaggtacatctgatgacgaacaaagattggaaagtttagatggacagcatagagaaagatttatgcttcattacaacttccctcctttctcagttggtgaaactggaagaattggaactggaagacgtgaagttggtcatggaaaattagcatggagagcaattaactcttcattacctccaaaggaagagtttccatatactttcagaatagtatcagaaattacagaatccaatggttcttcatcaatggcgagtgtttgtggtgcatctcttgcacttatggatgctggagtgccaattaaagagccagttgcaggtattgcaatggggttaattaaagaaggcgatgattttagtgtcttgtcagatattttaggtgatgaagatcaccttggagatatggactttaaagttgctggaactaaagatggaattacttcgcttcaaatggatattaaaattacaggtatcacatttgaaatcatggagcaggctttaaaacaagcaaaagaaggaagaattcatatcttaggtgaaatgaataaagctttaagtgaatcaagagctgatgttggtgaacacactccaaaaatggaacaaattactgttgataaaaaagatattgcagctgtaattggaaaaggtggagcaacgattagagaaattgttgaaaaatcaggtgctaaactagatgtgaacgatgaaggtgtggtaactgttgctgctccggacgaagagtccagaaacattgctatgcaaatgatcaaagacatcacagcaaaagctgaactaaataaaatttactcaggtaaagtaatgaagattatggagtttggtgcatttgtaaatttcttaggtaaacaagatggtcttgttcacatttcagaacttgctactaaaagagtagaaaaagttactgatattgttaaagaaggtgatgaagtaaaagttaaagtgattggtttcgatagaggtaaagttaaactttctatgaaacaagctgctgaataa

SEQ ID NO: 1966 - protein, 690 aa, Candidatus Pelagibacter ubique HTCC1062
MFKVYKKEIEVAGKKISLETGKVARQADGAIIASCGETVILATVVGAKKVNPDMDYFPLSVNYQEKYYAGGKIPGGYFKREARPTESEQLISRLIDRPIRPLFPSEFKNEVQLLPTVISYDKDNQPDILAITASSAALAISGMPFMGPVGASRVGLVDGKYILNPSKAELENSTLDLVVAGTKDAVLMVESETSGLTEEVMLDAVKFGHEGFVPVIEMIEELAKECRKPEWTVEKKDLSEVKKKLEENFTEDLTKAFATIDKQDRSNQISEISDKAKQLFADDENYSDFNVNDELKNLEKKIVRTDILKNKKRIDGRGLADVRAIECEVGVLPRTHGSALFTRGETQAIVVTTLGTSDDEQRLESLDGQHRERFMLHYNFPPFSVGETGRIGTGRREVGHGKLAWRAINSSLPPKEEFPYTFRIVSEITESNGSSSMASVCGASLALMDAGVPIKEPVAGIAMGLIKEGDDFSVLSDILGDEDHLGDMDFKVAGTKDGITSLQMDIKITGITFEIMEQALKQAKEGRIHILGEMNKALSESRADVGEHTPKMEQITVDKKDIAAVIGKGGATIREIVEKSGAKLDVNDEGVVTVAAPDEESRNIAMQMIKDITAKAELNKIYSGKVMKIMEFGAFVNFLGKQDGLVHISELATKRVEKVTDIVKEGDEVKVKVIGFDRGKVKLSMKQAAE

SEQ ID NO: 1967 - DNA, 2118 bp, Colwellia psychrerythraea 34H
  CDS (1)..(2118): transl_table=11
atgttaaatccaattactaaaaaatttcaacttggtaaacatacagtaacacttgaaacaggtgcaattgcacgtcaagcatcagctgcagttatggcaagcatggacgatacctgtgtacttgtttcagttgtaggtaaaaaagaagcgaaaccaggacaagatttcttcccattaacagtgaactaccaagagcgtgcttacgctgctggtaaaattcctggaagtttctttaaacgtgaaggccgtccttcagaagaagaaacacttattgcacgtctaattgaccgtccaattcgtccattattcccagaaggtttcactaacgaagtacaagttattatcactgttgtttcagttaaccctgaaattgcacctgatattatttctttaattggtacttctgcagcattagctatttcaggtcttccatttagtggtcctgttggcgcagcacgcgttggttatactgacggtcaatacattcttaacccgcttcaatctgaattaccaacaagtcaattagacctagttgtatcaggtactgattcagcggtattaatggttgaatctgaagctgacgtattgtctgaagaagtaatgcttggtgctgttgtatatggccatgagcaaatgcaagtagctgtttcagcaatcaaagaatttaaagcagaagttaacactccttcatgggattgggttgctcctgttaaaaatgctgaattattagctaaaattgctgaacttagtgaagcacaagttaacgaagcataccaaattactgaaaaagctgttcgttacgagaaaattaaagaaatccgtagctcagtacttgaagcgttattagcagaaaatgctgatgttgacgttcaagaagctaaagatttgttccatgatttagaaaaaactgtggtacgtggccgtattactgatggcaaccctcgtatcgatggtcgtgatcctgaatcaattcgtgctttagacgtgatgacaggtgtattaccaagaactcatggttctgcagtatttacacgtggtgaaactcaagcattagttacagctacgcttggtactcaacgtgatgcacaacgtcttgatacgttaatgggtgataagactgacccattcatgcttcattacaacttccctccttattgtgtaggtgagactggatttgttggtagcccgaagcgtcgtgaaattggccatggccgtttagcgaaacgtggtatgttggcagttatgccttcacttgaagaattcccgtatgcagtacgtgttgtttctgaaatcactgaatcaaatggttcatcttcaatggcttcagtatgtggtacttcattagcacttatggatgctggtgttccaattaaagcatctgttgctggtatcgcaatgggtcttgttaaagaaggcgaaaaattcgttgttctttctgacatcttaggtgatgaagatcacttaggtgacatggactttaaagtagcgggtaccactggtggtattactgcacttcaaatggacattaaaattgaaggtattactcaagaaattatgcagattgctttaaaccaagcaaaagctgcacgtactcacattttatctgtaatggatgaagctattggtggacacagagatgatatctctgaattcgctcctcgcattcatacaatgaaagttagccaagataagattcgtgacatcattggtaaaggcggcgcaactattcgtcaacttactgaagaaacgggtactactattgaaatcgaagatgacggcacagttaaaattgctgcaacttctggtgagcaagctgaagatgcaatcaaccgcattaaagcactaactgctgaaattgaagtaggtacactttacacaggtaaagttgttcgtatcgttgattttggtgcgttcgttaatgttcttccaggtaaagatggtttagtacatatttcacaaatctctgaagagcgcgttaataacgtaagtgaagtattaactgaaggtcaagaagtgaaagttaaagtacttgaagttgaccgtcaaggccgtgtacgtttaagtatcaaagaagctatggaaaaaccagctgcagaagcaacaccagctgctgagtaa

SEQ ID NO: 1968 - protein, 705 aa, Colwellia psychrerythraea 34H
MLNPITKKFQLGKHTVTLETGAIARQASAAVMASMDDTCVLVSVVGKKEAKPGQDFFPLTVNYQERAYAAGKIPGSFFKREGRPSEEETLIARLIDRPIRPLFPEGFTNEVQVIITVVSVNPEIAPDIISLIGTSAALAISGLPFSGPVGAARVGYTDGQYILNPLQSELPTSQLDLVVSGTDSAVLMVESEADVLSEEVMLGAVVYGHEQMQVAVSAIKEFKAEVNTPSWDWVAPVKNAELLAKIAELSEAQVNEAYQITEKAVRYEKIKEIRSSVLEALLAENADVDVQEAKDLFHDLEKTVVRGRITDGNPRIDGRDPESIRALDVMTGVLPRTHGSAVFTRGETQALVTATLGTQRDAQRLDTLMGDKTDPFMLHYNFPPYCVGETGFVGSPKRREIGHGRLAKRGMLAVMPSLEEFPYAVRVVSEITESNGSSSMASVCGTSLALMDAGVPIKASVAGIAMGLVKEGEKFVVLSDILGDEDHLGDMDFKVAGTTGGITALQMDIKIEGITQEIMQIALNQAKAARTHILSVMDEAIGGHRDDISEFAPRIHTMKVSQDKIRDIIGKGGATIRQLTEETGTTIEIEDDGTVKIAATSGEQAEDAINRIKALTAEIEVGTLYTGKVVRIVDFGAFVNVLPGKDGLVHISQISEERVNNVSEVLTEGQEVKVKVLEVDRQGRVRLSIKEAMEKPAAEATPAAE

SEQ ID NO: 1969 - DNA, 2106 bp, Pseudomonas syringae pv. phaseolicola 1448A
  CDS (1)..(2106): transl_table=11
gtgaacccggtaatcaaaaagtttcagttcggtcaatcgaccgtaaccctcgagacaggccgtatcgcccgtcaagcctctggcgcagtattggtcaccgttgacgacgacgtcagcgtactcgtgactgtggtcggcgccaaacaggctgacgctggcaaaggcttcttccctctgtccgtgcactatcaggaaaaaacctacgctgccggcaagattcctggtggtttcttcaaacgtgaaggccgtccttccgagaaagaaaccctgacctcgcgcctgatcgaccgtccgatccgcccgttgtttccagaaggcttcatgaacgaagtgcaggttgtctgcaccgtcgtctccaccagcaagaaaatcgatccggacatcgctgcgatgatcggtacttcggctgcactggccatctccggtattccgttcgacggtccggtcggtgctgcgcgcgttgctttccacgaaagcaccggctacctgctgaacccgacttacgagcaactgcaggcttcgagcctggacatggtcgtagccggtacttccgaagccgttctgatggttgaatccgaagccaaagagctgaccgaagaccagatgctgggcgctgtgctgttcgcccatgacgaattccaggtggtgatcaacgccatcaaggaactggctgcagaagccgccaagcctgtttgggactggcagccaaagcctgaagccaccgcactgctgggtgctatccgtgccgagttcggcgacgcgatctcccaggcttacaccatcactgtcaaagccgaccgctatgcgcgtctgggcgagctgaaagatcaggtcgttgccaagctggctgttgaagaaggcagcccgtctgccagcgaagtcaaagctgctttcggtgaaatcgaataccgcaccgttcgcgaaaacatcgtcaacggcaagccgcgtatcgatggtcgcgatacccgcacggttcgccctctgaatatcgaagtcggcgttctgccgaagactcacggttcggcactgtttacccgtggcgaaactcaggcgctggttgttgcaacgctgggtaccgcgcgtgacgcacagctgctcgacacccttgaaggcgagaaaaaagaccccttcatgctgcactacaacttccctccgttctcggtgggcgagtgtggtcgcatgggcggcgcgggccgtcgtgaaatcggtcacggccgtctggcccgtcgcagcgttcaggccatgctgccaggcgccgacgtgttcccgtacaccatccgtgtcgtgtcggaaatcaccgagtccaacggttccagctccatggcttcggtctgcggcgcttccctggcactgatggacgctggtgttccgatgaaggcaccggttgccggtatcgccatgggtctggtcaaggaaggcgagaagttcgccattctgaccgacatcctgggtgacgaagatcacctgggcgacatggacttcaaggtagcaggtacctccaaaggtgttaccgcgctgcagatggacatcaagatcaaaggcatcaccgaagaaatcatggagatcgccctgggtcaggccctggaagctcgcctgaacatcctcggtcagatgaaccagatcatcggtcagtcgcgtaacgagctgtcggccaacgctccgaccatgatcgcgatgaagatcgacaccgacaagatccgtgacgtgatcggcaagggtggcgcaaccatccgtgctatctgcgaagagaccaaggcttcgatcgacatcgaagacgacggctcgatcaagatcttcggcgagtccaaggaagcggctgaggcagcacgtcagcgcgttctgggcattaccgcagaagccgagatcggcaagatctacgtcggtaaggttgagcgcatcgtcgatttcggcgcattcgtcaacatcctgccgggcaaggacggtctggttcacatctcgatgctgagcgatgctcgcgtagagaaagtgaccgatatcctcaaggaaggtcaggaagtcgaagtgctggtactggacgtggacaaccgcggtcgtatcaagctgtcgatcaaagacgtagcggcagcgaaagcgtcgggcgtctga

SEQ ID NO: 1970 - protein, 701 aa, Pseudomonas syringae pv. phaseolicola 1448A
MNPVIKKFQFGQSTVTLETGRIARQASGAVLVTVDDDVSVLVTVVGAKQADAGKGFFPLSVHYQEKTYAAGKIPGGFFKREGRPSEKETLTSRLIDRPIRPLFPEGFMNEVQVVCTVVSTSKKIDPDIAAMIGTSAALAISGIPFDGPVGAARVAFHESTGYLLNPTYEQLQASSLDMVVAGTSEAVLMVESEAKELTEDQMLGAVLFAHDEFQVVINAIKELAAEAAKPVWDWQPKPEATALLGAIRAEFGDAISQAYTITVKADRYARLGELKDQVVAKLAVEEGSPSASEVKAAFGEIEYRTVRENIVNGKPRIDGRDTRTVRPLNIEVGVLPKTHGSALFTRGETQALVVATLGTARDAQLLDTLEGEKKDPFMLHYNFPPFSVGECGRMGGAGRREIGHGRLARRSVQAMLPGADVFPYTIRVVSEITESNGSSSMASVCGASLALMDAGVPMKAPVAGIAMGLVKEGEKFAILTDILGDEDHLGDMDFKVAGTSKGVTALQMDIKIKGITEEIMEIALGQALEARLNILGQMNQIIGQSRNELSANAPTMIAMKIDTDKIRDVIGKGGATIRAICEETKASIDIEDDGSIKIFGESKEAAEAARQRVLGITAEAEIGKIYVGKVERIVDFGAFVNILPGKDGLVHISMLSDARVEKVTDILKEGQEVEVLVLDVDNRGRIKLSIKDVAAAKASGV

SEQ ID NO: 1971 - DNA, 2100 bp, Candidatus Blochmannia pennsylvanicus str. BPEN
  CDS (1)..(2100): transl_table=11
ttgttagatccgattattcataaatttaaatatggacagcatactgtaattttagatattggaaccatagctcgtcaagcaaatgctgcagtcatggtgagtatgagtgatactacagtattagttacagtagttagttctaatcaagtcagattagaacaagatttttttcctcttgttgtaaattatcaagaacgcacttatgctgctggaaaatttccaggaggtttttttcgtcgagaaggtcgaccaagtgaaaacgaaacattaacgtctcgcttgattgatcgccctattcggccgttattccctaagggatttattaatgatgtacaagtagttgctacggtagtatcagtaaatccgcaagtaaatccagatattgtagcaataataggagtatctgctgcattgagtttgtctgatattccattttttggacccattggagcagctagagttggttatattaaaaatcaatatgtattaaatccaacaacaacagagttatctaatagtaagttagatttggtgatttcagggactgaatctaatatcttgatggtggaatcagaatcgtgtttactaagtgaaaaagaaattttagacgctattatatttggtcacgaacaacaacaaatagtgattcataatattaataaattagttaaaaaagttggaaaaactaagtattcttggaacgaaaaggaagtgaacatatctttaaaaacgtatttatctgaattgtatgagtctcgtgcgcaagatatatattgtttttttgataaaaaagagcgtcatgctcaagttgatagtattaagaaagatatagtaaaaaccgttcttaatagctaccagcatgctgctgtagatgaaaaagaaataatgtatcttttaaattatttagaagcgcaatcaattcgttatcgtattttaacgaacaaattacgtattgatggacgttcacaagatacaattcggaaaatagatataaaaacaggcatattaccacgtactcatggatcagcattatttactagaggagatactcaagcgctggttgctgttacgcttggcacagaacgtgatgcacagaatattgatggattaactggtattcgtgtggatagatttttattacattataattttccaccatattgtgtaggtgaaataggtgtcataggagctccaaaaaggagagaaataggacatggacgtttagccaaacggggtatgttagcagttatgcctaatgctaatgagtttccgtatacaatacgtgtagtatcagaaattactgaatctaatggatcgtcctccatggcatctatttgtggtacatcattagcgttgatggatgctggagtaccgattaaagcagcagttgctggtgttgctatgggtctgattaaggaaggaaacgatttcgtggtattatctgatattgttagcgatgaagatcatattggagatatggattttaaagtatctggtagtcgtcaaggcataacagcattgcaaatggatattaaaacggacgggattacgtatgatataataaatattgcgttaaaaaaagcaaaaaatgctcgactgcaaatattagatgttatggaacaaattattaagtttcctaatcaggaaatctctaaatttgctcccaggatatatagcattaaagttaatccagataaaattaaagatgttataggaaagggagggtcagttattcgctcattgactgaagaaactaatactattattgatattgaagataatggtatcataaaaatagttgctttagattatgataaagcaaaacaagctattcgtagaattaatgatatcactgcaaacgttgaaataggagccgtttatactggaaaagttagtcacattgtggaatttggggcattcgttactatcctttctggaaaagaagggttagttcatatttcccagatttctgaaagaagaataaataaagtaactgattatttgaaattagggcaaaaagtattagtaaaagtgttagaaatagatcgtcagggacgaattcgtttgagtatgaaaggagtacatcaagtgagtgcatag

SEQ ID NO: 1972 - protein, 699 aa, Candidatus Blochmannia pennsylvanicus str. BPEN
MLDPIIHKFKYGQHTVILDIGTIARQANAAVMVSMSDTTVLVTVVSSNQVRLEQDFFPLVVNYQERTYAAGKFPGGFFRREGRPSENETLTSRLIDRPIRPLFPKGFINDVQVVATVVSVNPQVNPDIVAIIGVSAALSLSDIPFFGPIGAARVGYIKNQYVLNPTTTELSNSKLDLVISGTESNILMVESESCLLSEKEILDAIIFGHEQQQIVIHNINKLVKKVGKTKYSWNEKEVNISLKTYLSELYESRAQDIYCFFDKKERHAQVDSIKKDIVKTVLNSYQHAAVDEKEIMYLLNYLEAQSIRYRILTNKLRIDGRSQDTIRKIDIKTGILPRTHGSALFTRGDTQALVAVTLGTERDAQNIDGLTGIRVDRFLLHYNFPPYCVGEIGVIGAPKRREIGHGRLAKRGMLAVMPNANEFPYTIRVVSEITESNGSSSMASICGTSLALMDAGVPIKAAVAGVAMGLIKEGNDFVVLSDIVSDEDHIGDMDFKVSGSRQGITALQMDIKTDGITYDIINIALKKAKNARLQILDVMEQIIKFPNQEISKFAPRIYSIKVNPDKIKDVIGKGGSVIRSLTEETNTIIDIEDNGIIKIVALDYDKAKQAIRRINDITANVEIGAVYTGKVSHIVEFGAFVTILSGKEGLVHISQISERRINKVTDYLKLGQKVLVKVLEIDRQGRIRLSMKGVHQVSA

SEQ ID NO: 1973 - DNA, 2133 bp, Streptococcus pyogenes MGAS6180
  CDS (1)..(2133): transl_table=11
atgtcaaaacaaacctttacaacaacatttgcagggaaaccccttgttgttgaagttggtcaagtcgctaagcaagccaacggggcaaccgttgttcgttacggagaatcaaccgtcctgaccgcagctgttatgtctaagaaaatggcaacgggtgatttcttcccccttcaagttaattacgaagaaaaaatgtatgccgctggtaaattcccaggaggtttcatgaagcgtgagggacgcccttcaacagatgcgaccttgacagctcgcttgattgaccgcccgattcgtcccatgtttgccgagggttttcgtaacgaagtacaagtgattaacactgtcctttcttatgatgaaaatgctagcgctccaatggcagcgatgtttggctcatctctggccttgtccatctcagatattccatttaatggaccgattgcaggtgttcaagttggctatattgatggtgagttcatcattaacccagataaagaacagatggaagcgtcactcttagaattaaccgttgctggtagcaaagaagccatcaacatggttgaatctggtgccaaagaattatcagaagacatcatgcttgaggctcttttaaaaggtcaccaagccattcaagaattaattgccttccaagaacaaatcgtagcagttgttggtaaagagaaagctgaggttgaactgttacaggttgatgcagacttacaagctgatattgtggctaagtacaatgctcaactgcaaaaagctgttcaagttgaagagaaaaaagcgcgtgaagcagccacagaagccgttaaagaaatggttaaggctgagtacgaagagcgttacgcagaagacgaaaacctagcaaccattatgcgtgacgtggcagaaatccttgaacaaatggagcatgctgaagtgcgccgcctcattacagaggacaagattcgtcctgacggtcgtaagattgacgaaattcgtccgcttgatgctgtggttgacttcttgccaaaggtccatggatcaggtctttttacgcgcggtcaaactcaggcgctatcaattttgaccttggcaccaatgggagaaactcaaatcattgatggtctggccccagagtacaaaaaacgcttcttgcatcactacaatttcccgcaatattcagttggtgaaacgggtcgttacggagctgctggtcgtcgtgaaattggacacggtgccttaggtgaacgcgctcttgaacaagtcttgccaagcttagaagagtttccttatgccattcgtttagttgccgaagttctagaatctaacggttcgtcttctcaggcttctatctgtgctggtacccttgctctgatggctggtggtgtaccaatcaaggctcctgtggcagggattgccatgggtctcatttcagacgggacgaattatacagtcttgaccgatatccaaggtcttgaagaccactttggagatatggactttaaagtggcaggaactcgtgaagggattacagcccttcaaatggatattaagattgcagggattacgcctcaaatcctagaagaagctcttgcacaagctaaaaaagctcgctttgaaatccttgatgtgattgaagcaactatcgctgaaccacgtcccgagttagccccaactgcaccgaaaattgacaccatcaagattgacgtagacaaaatcaaagtggttatcggtaaaggtggcgaaaccattgataagattattgccgaaacgggtgtcaaaattgatattgatgacgaaggaaatgtctctatctactcaagtgaccaagctgccattaaccgcactaaagaaatcatcgctggcctagtacgtgaagctaaggtaggcgaagtttaccatgctaaggttgtccgtattgagaaatttggtgcctttgtcaacctctttgacaagacagatgcacttgttcacatttctgaaattgcttggactagaacgaccaacgtgtcagatgtccttgaagtgggtgaagacgttgatgttaaggtcattaagattgatgagaagggtcgtgtggacgcctcaatgaaagctttgattccacgcccaccaaaaccagagaaaaaagaagaaaaacatgactaa

SEQ ID NO: 1974 - protein, 710 aa, Streptococcus pyogenes MGAS6180
MSKQTFTTTFAGKPLVVEVGQVAKQANGATVVRYGESTVLTAAVMSKKMATGDFFPLQVNYEEKMYAAGKFPGGFMKREGRPSTDATLTARLIDRPIRPMFAEGFRNEVQVINTVLSYDENASAPMAAMFGSSLALSISDIPFNGPIAGVQVGYIDGEFIINPDKEQMEASLLELTVAGSKEAINMVESGAKELSEDIMLEALLKGHQAIQELIAFQEQIVAVVGKEKAEVELLQVDADLQADIVAKYNAQLQKAVQVEEKKAREAATEAVKEMVKAEYEERYAEDENLATIMRDVAEILEQMEHAEVRRLITEDKIRPDGRKIDEIRPLDAVVDFLPKVHGSGLFTRGQTQALSILTLAPMGETQIIDGLAPEYKKRFLHHYNFPQYSVGETGRYGAAGRREIGHGALGERALEQVLPSLEEFPYAIRLVAEVLESNGSSSQASICAGTLALMAGGVPIKAPVAGIAMGLISDGTNYTVLTDIQGLEDHFGDMDFKVAGTREGITALQMDIKIAGITPQILEEALAQAKKARFEILDVIEATIAEPRPELAPTAPKIDTIKIDVDKIKVVIGKGGETIDKIIAETGVKIDIDDEGNVSIYSSDQAAINRTKEIIAGLVREAKVGEVYHAKVVRIEKFGAFVNLFDKTDALVHISEIAWTRTTNVSDVLEVGEDVDVKVIKIDEKGRVDASMKALIPRPPKPEKKEEKHD

SEQ ID NO: 1975 - DNA, 2133 bp, Streptococcus pyogenes MGAS5005
  CDS (1)..(2133): transl_table=11
atgtcaaaacaaacctttacaacaacatttgcagggaaaccccttgttgttgaagttggtcaagtcgctaagcaagccaatggggcaaccgttgttcgttatggcgactcaactgtcctgaccgcagctgttatgtctaagaaaatggcaacgggtgatttcttcccccttcaagttaattacgaagaaaaaatgtatgccgctggtaaattcccaggaggtttcatgaaacgtgagggacgcccttcaacagatgcgaccttgacagctcgcttgattgaccgcccgattcgtcccatgtttgccgaaggttttcgtaacgaagtacaagtgattaacactgtcctttcttatgatgaaaatgctagcgctccaatggcagcgatgtttggctcatctctggccttgtcaatctcagatattccatttaatggaccgattgcaggtgttcaagttggctatattgatggcgagttcatcattaacccagataaagaacagatggaagcatcactcttagaattaactgttgctggtagcaaagaagccatcaatatggttgagtctggtgccaaagaattatcagaagacatcatgcttgaggctcttttaaaaggtcaccaagctattcaagaattaattgccttccaagaacaaatcgtagcagttgttggtaaagaaaaagctgaggttgaactgttacaggttgatgtagacttacaagctgatattgtggctaagtacaatgctcaactgcaaaaagctgttcaagttgaagagaaaaaagcgcgtgaagcagccacagaagccgttaaagaaatggttaaggctgaatacgaagagcgttacgcagaagacgaaaacctagcaaccattatgcgtgacgtggcagaaatccttgaacaaatggagcatgctgaggtgcgccgcctcattacagaagacaagattcgtcctgatggtcgtaagattgacgaaattcgtccgcttgatgctgtggttgacttcttgccaaaagtacatggatcaggtctttttacgcgcggtcaaacgcaggccttgtcagttttgactttggcaccaatgggagaaactcaaatcattgatggtctggccccagagtacaaaaaacgctttttgcatcactacaatttcccgcaatattcagttggtgaaacgggtcgttacggagctgctggtcgtcgtgaaattggacacggtgccttaggtgaacgcgctcttgaacaagtcttgccaagcttagaagagtttccttatgctattcgtttagttgccgaagttctagaatctaacggttcgtcttctcaggcttctatctgtgctgggacccttgccctaatggctggtggtgtgccgattaaagcgcctgtggcagggattgccatgggtctcatttccgatgggacgaattatacagtcttgaccgatatccaaggtcttgaagaccactttggagatatggactttaaagtggcaggaactcgtgaagggattacagcccttcaaatggatattaagattgcaggaattacccctcaaatcctagaagaagctcttgcacaagctaaaaaagctcgctttgaaatccttgatgtgattgaagcaactatcgctgaaccacgtcctgagttagccccaactgcaccgaaaattgacaccatcaagattgacgtagacaaaatcaaagtggttatcggtaaaggtggcgaaactattgacaagattattgccgaaacgggtgtcaaaattgatattgatgacgaaggaaatgtctctatctactcaagtgaccaagctgccattgaccgcactaaagaaattattgcaggtcttgttcgtgaagctaaggtaggcgaagtttaccatgctaaggttgtccgtattgagaaatttggtgcctttgtcaacctctttgacaagacagatgctcttgttcacatttctgaaattgcctggacgagaacgaccaacgtgtcagatgtccttgaagtgggtgaagacgttgatgttaaggtcattaagattgatgagaagggtcgtgtggatgcctcaatgaaagctttgattccacgcccaccaaaaccagagaaaaaagaagaaaaacatgactaa

SEQ ID NO: 1976 - protein, 710 aa, Streptococcus pyogenes MGAS5005
MSKQTFTTTFAGKPLVVEVGQVAKQANGATVVRYGDSTVLTAAVMSKKMATGDFFPLQVNYEEKMYAAGKFPGGFMKREGRPSTDATLTARLIDRPIRPMFAEGFRNEVQVINTVLSYDENASAPMAAMFGSSLALSISDIPFNGPIAGVQVGYIDGEFIINPDKEQMEASLLELTVAGSKEAINMVESGAKELSEDIMLEALLKGHQAIQELIAFQEQIVAVVGKEKAEVELLQVDVDLQADIVAKYNAQLQKAVQVEEKKAREAATEAVKEMVKAEYEERYAEDENLATIMRDVAEILEQMEHAEVRRLITEDKIRPDGRKIDEIRPLDAVVDFLPKVHGSGLFTRGQTQALSVLTLAPMGETQIIDGLAPEYKKRFLHHYNFPQYSVGETGRYGAAGRREIGHGALGERALEQVLPSLEEFPYAIRLVAEVLESNGSSSQASICAGTLALMAGGVPIKAPVAGIAMGLISDGTNYTVLTDIQGLEDHFGDMDFKVAGTREGITALQMDIKIAGITPQILEEALAQAKKARFEILDVIEATIAEPRPELAPTAPKIDTIKIDVDKIKVVIGKGGETIDKIIAETGVKIDIDDEGNVSIYSSDQAAIDRTKEIIAGLVREAKVGEVYHAKVVRIEKFGAFVNLFDKTDALVHISEIAWTRTTNVSDVLEVGEDVDVKVIKIDEKGRVDASMKALIPRPPKPEKKEEKHD

SEQ ID NO: 1977 - DNA, 2304 bp, Thermobifida fusca YX
  CDS (1)..(2304): transl_table=11
atggagggcgtgtattctgccgaggccgtcatcgacaacggccgtttcggcacccgtacgatccgcttcgagaccggtcgcctggcccgccaggccacagggtcggctacggcctaccttgacgacgagacgatggtcctgtcggcgacgaccgtgtcgaagcgccccaaggaggccctggacttcttcccgctcacggtcgacgttgaagaacgcatgtacgccgcggggcgcatccccggctcgttcttccgcagggaggggcgtccctcggaggacgcgatcctcacctgccggctcatcgaccggccgctgcgtccgtccttccagaaagggctgcgcaacgagatccaaatcgttgcgaccgtgctggccctgcacccggaccatctctacgacgtcatcgcgatcaacgccgcgtcgatgtccacccagcttgccggactgccgttctccggcccgatcggcggcgtgcgggtggccctggtcgaaggccagtgggtggcgtttcccacgcactcggagctggccaacgccacgttcgacatggtcgtggccggccgggtgctggacaacggcgacgtcgcgatcatgatggtggaggccgagtccaccccgcacaccctgcgactggtggcggagggagcgatcggccccaacgagcagaccgtcgcggaaggcttggaagccgccaagccgttcatcaaggtgctgtgccgcgcccagcagaccgtggctgaggccgcgggcaagccgcccggcgagtacccgatcttcatcgactaccaggacgacgcgtacgccgccgtcgaggaagcgatccatgacgagctcgccgcggcgctcacgatcgcggacaagcaggagcgggaagccgaactcgaccgggtcaaggcgctggtcgccgagaagctcgccgaggacttcgaaggccgcgaaaaggagctggccgcagcgttccgcgcgctcacccggaagctggtgcgggagcggatcgtcaaggacggggtccgtatcgacggccgcggtgtgaaggacatccggtctctcaccgccgaagtcaacgtcattccgcgcgtgcacgggtcggccttgttcgagcgcggggaaacccagatcctggggatcaccacgctgaacatgctccgcatggagcagaccatcgacacgctcaacccggagcgcaccaagcgctacatgcacaactacaacttcccgccgtactccacgggggagaccgggcgggtcggcgcgccgaagcgccgcgagatcgggcacggggcgctcgccgaacgcgctctcgtcccggtgctgccgtcgcgggaagagttcccctacgcgatccggcaggtgtcggaggcgatcggctccaacggctccacgtcgatggggtcggtgtgcgcctccaccatgtcgctgatggcggcgggtgtgccgctcaaggacatggtggccggtatcgccatgggcttgatctacgaggacggcaagtacgtcacccttaccgacatcctcggtgcggaagacgcctacggtgacatggacttcaaggtcgcgggcacgcgcgacctcatcaccgcgctgcagttggacaccaagctcgacgggatccccgccgaggtgctggcgtccgcgctgcagcaggcccgcggggcgcggctggccatcctcgacgtcatgtcggaggccatcaaccggcccgctgagatcagtccgcacgcgccgcgtatccttacggtcaaggtgccgatcgacaagatcggcgaggtcatcggccccaagggcaagatgatcaactcgatccaggacgagaccggcgccgaaatcaccatcgaggacgacggcaccatctacatcggcgccaccgacgggccgtccgcggaggccgcccgcgacgccatcaacagcatcgccaacccgaccatgcccgaggtcggggaacgctacctcggcacggtcgtgaagaccaccgcgttcggggccttcgtgtcgctgctgcccggcaaggacgggctgctgcacatctcgcagatccgcaagatgcacggcggccagcggattgagaacgtcgaagatgtcatcagcatcggggagaaaatccacgtcgaagtccgggacatcgacgaacggggcaagctctccctggtgcccgtcgaagtcatcgaagctgaagctgttgccgcccccaacggcggggagagcccgaacggggcgaagaagaccgacgccagcggcaacggcgccaagcagccgcgccgccgtcgccgcacccggtcgtccagccgttccagtgagaacacctga

SEQ ID NO: 1978 - protein, 767 aa, Thermobifida fusca YX
MEGVYSAEAVIDNGRFGTRTIRFETGRLARQATGSATAYLDDETMVLSATTVSKRPKEALDFFPLTVDVEERMYAAGRIPGSFFRREGRPSEDAILTCRLIDRPLRPSFQKGLRNEIQIVATVLALHPDHLYDVIAINAASMSTQLAGLPFSGPIGGVRVALVEGQWVAFPTHSELANATFDMVVAGRVLDNGDVAIMMVEAESTPHTLRLVAEGAIGPNEQTVAEGLEAAKPFIKVLCRAQQTVAEAAGKPPGEYPIFIDYQDDAYAAVEEAIHDELAAALTIADKQEREAELDRVKALVAEKLAEDFEGREKELAAAFRALTRKLVRERIVKDGVRIDGRGVKDIRSLTAEVNVIPRVHGSALFERGETQILGITTLNMLRMEQTIDTLNPERTKRYMHNYNFPPYSTGETGRVGAPKRREIGHGALAERALVPVLPSREEFPYAIRQVSEAIGSNGSTSMGSVCASTMSLMAAGVPLKDMVAGIAMGLIYEDGKYVTLTDILGAEDAYGDMDFKVAGTRDLITALQLDTKLDGIPAEVLASALQQARGARLAILDVMSEAINRPAEISPHAPRILTVKVPIDKIGEVIGPKGKMINSIQDETGAEITIEDDGTIYIGATDGPSAEAARDAINSIANPTMPEVGERYLGTVVKTTAFGAFVSLLPGKDGLLHISQIRKMHGGQRIENVEDVISIGEKIHVEVRDIDERGKLSLVPVEVIEAEAVAAPNGGESPNGAKKTDASGNGAKQPRRRRRTRSSSRSSENT

SEQ ID NO: 1979 - DNA, 2169 bp, Prochlorococcus marinus str. NATL2A
  CDS (1)..(2169): transl_table=11
gtgcaaggtcagacaaaatccgtttctttcgatggtagagagataaagctcactacagggagatttgctccacaagctggtggttcagtaatgattgagtgtggggacacctctgtcctagtaacagcaacaaaatcatcaggaagagagggggttgatttcttacccttaatgtgtgattacgaagaaaggctatatgcggcaggaaggattccagggagtttcatgcgtcgtgaagggcgtcctcctgagagagcaactttaatttcacgacttattgatcgtccaatgagacctcttttcccaggttggatgagagacgatatccaaatagttgctacatgcctctccttagacgagagagttccagcggatgttttggctgttactggagcttcaatggcaacattaatggcaggtattcctttccaaggacctatggctgctgttcgcgttgggctcttgggtgatgactttgtcctgaatcctagttatcgagaaatagaaagaggtgatctagaccttgtagttgctggaactccagatggtgtagtaatggttgaagcaggagccaatcaactttcagaacaagacgttattgaagccattgattttggctacgaagccataactgaattaatcaatgctcaaaaagaagttttaaaagaatctggaatcaagcaagagatgcctaaagcccctgagattgatgacactatatcaacctatttagataaaaactgcacaaaatcaattagtgaagttctaaagaactttgatcaaacaaaggaagagagagacaataaaatcgaagaaataaagataagtatttctgcaaaaatagatggactaaaagatgataatgctgtaaaaaaatctctttctttaaataacaagctcctagaaaatagttataaagctttaactaaaaagttaatgagagagcagataatcaaagaaggtaaaagagtcgatggaagagaattaaatgaagtaagagctattgatgctgatgctgcagttttacctaatagagttcatggatcagcgttattccaaagaggtttaactcaagtcctctccactgcaacattgggcactccaagcgatgctcaggaaatggacgatttaaaccctaatactgataaaacctacatacatcattacaacttcccaccttactcagtgggagagactcgaccaatgcgaactcctggaagaagagaagttggtcatggagctttagcagaaagggcgttaatacctgtactaccagcaaaagatactttcccatatgttttaagagttgttagcgaagtcttgagttcaaacggctctacttctatggcttcagtatgtggaagtactcttgcacttatggatgcaggagtcccattaaaagcccctgtaggtggagcagctatgggtttaatcaaagaaggaaaagaagtacggatattgactgatattcaaggcattgaagactttcttggagacatggatttcaaagttgcagggacagaaaaaggaattacagccttgcaaatggatatgaaaataactggacttccaattgagacaattggggaagctattaatcaagcacttcctgcgaggacacacatattaggaaaaatgctagatgcaattgagacaccaaaagacaacttatctcctcatgccccaagattgttaagctttagaatcgatccagagctcataggaactgttattggccctggaggaagaacaataaaggggatcacagagagaactaacacaaaaatcgatatagaagatggagggattgtcactattgcatctcatgacggagcagctgcagaagaagcgcagaggattattgaaggtttaacgagaaaagtacatgagggagaaattttccctggctctatcacaagaatcattccaattggcgcctttgttgaaatccttcctggtaaagaaggaatgatacatatttctcaattatccgaagcaagagttgaaaaagttgaagatgttgtaaaagttggagaccaagtgactgtaagggtaagagaaatagataatcgtgggcgcattaatttaactttgagaggagtctctcaaaatggtggaatgagcaattaccctgagccaactcctactcctgttgcccctcttacttaa

SEQ ID NO: 1980 - protein, 722 aa, Prochlorococcus marinus str. NATL2A
MQGQTKSVSFDGREIKLTTGRFAPQAGGSVMIECGDTSVLVTATKSSGREGVDFLPLMCDYEERLYAAGRIPGSFMRREGRPPERATLISRLIDRPMRPLFPGWMRDDIQIVATCLSLDERVPADVLAVTGASMATLMAGIPFQGPMAAVRVGLLGDDFVLNPSYREIERGDLDLVVAGTPDGVVMVEAGANQLSEQDVIEAIDFGYEAITELINAQKEVLKESGIKQEMPKAPEIDDTISTYLDKNCTKSISEVLKNFDQTKEERDNKIEEIKISISAKIDGLKDDNAVKKSLSLNNKLLENSYKALTKKLMREQIIKEGKRVDGRELNEVRAIDADAAVLPNRVHGSALFQRGLTQVLSTATLGTPSDAQEMDDLNPNTDKTYIHHYNFPPYSVGETRPMRTPGRREVGHGALAERALIPVLPAKDTFPYVLRVVSEVLSSNGSTSMASVCGSTLALMDAGVPLKAPVGGAAMGLIKEGKEVRILTDIQGIEDFLGDMDFKVAGTEKGITALQMDMKITGLPIETIGEAINQALPARTHILGKMLDAIETPKDNLSPHAPRLLSFRIDPELIGTVIGPGGRTIKGITERTNTKIDIEDGGIVTIASHDGAAAEEAQRIIEGLTRKVHEGEIFPGSITRIIPIGAFVEILPGKEGMIHISQLSEARVEKVEDVVKVGDQVTVRVREIDNRGRINLTLRGVSQNGGMSNYPEPTPTPVAPLT

SEQ ID NO: 1981 - DNA, 2187 bp, Ralstonia eutropha JMP134
  CDS (1)..(2187): transl_table=11
atgtccatgttcaacaaggttgtgaagcagttccagtggggccagcatacggtccgcatggaaaccggcgaaatcgcccgccaggccggcggcgccgtgatcgtcgacgtggaagataccgtcgtgctggcgactgtcgtcgccgccaagagcccgaagcccggccaggacttcttcccgctgaccgtcgactacatcgaaaagacctacgctgccggcaagatccccggtggcttcttcaagcgcgaaggccgtccgtcggaaaacgagacgctgacttcgcgcctgatcgaccgtccgctgcgcccgctgttcccggaaggcttctacaacgacgtgcaggtggtcgtgcacgtggtgtcgctgaatccggaaatcccggctgacatccctgcgctgatcggcgcgtccgccgcgctggccgtgtcgggcatcccgttcaacggcccggtgggcgctgcacgtatcggctacaaggacggccagtacctgctgaacccgacccgttcgcaaatggccacgtcggacctcgacctcgtcgtcgctggtaccgagcgcgccgtgctgatggtggaatcggaagccaaccagctgtccgaagacgtgatgctgggcgccgtggtgtatggccacgagcagatgcagatcgccatcaacgcgatccatgatctcgtgcgcgaaggcggcaagcccgagtgggactgggcgcctgcgccgaagaacgaagcgctgatcgccaaggtcaccgaagtcgcgctgccgctgctgcaggaagcctatcagctgcgccagaagtcggcccgcagccagaagctgaaggaagtgtcggcgaacgtgacggccgccctggccgaggccggcgtcgacgctgacaaggtggaagtcggcaacatcatgttcgacctcgaagcgaagatcgtccgcggacagatcctcggcggcgagccgcgcatcgacggccgcgacacccgcacggtgcgtccgatcgagatccgttcgtcggtcctgccgcgcgcccacggctcggccctgttcacccgcggtgaaacccaggcgctggtcgtggccacgctgggcacgaagagcgacgagcagatcatcgacgcgctggccggtgaataccgcgaccgcttcatgctccactacaacatgcctccgttcgccaccggcgaaaccggccgcgtcggcagcccgaagcgccgcgaaatcggccatggccgcctggccaagcgcgcactgattccggtgctgccgaaggacgacgagttcgcctacaccatccgcctggtttcggaaatcaccgaatcgaacggttcgtcgtcgatggcttcggtctgcggcggctgcctggcgctgatggacgccggcgttccggtcaaggcgcacgtggccggcgtggccatgggtctgatcctggaaggcaacaagtttgccgtgctgaccgacatcctcggtgatgaagatcacctgggcgacatggacttcaaggtggcgggtaccgacaacggcatcaccgcgctgcagatggacatcaaggtgcagggcatcaccaaggaaatcatgcaggttgcgctggcgcaagccaaggaaggccgtctgcatatcctgggcgccatgcagggtgccatgggccacgcgcgcaccgagctgtcggcgcacgcaccgcgcatgatcaccatgaagatccatccggacaagatccgcgaagtgatcggcaagggtggctcgaccatccaggcgctgaccaaggaaaccggcacgaccatcgacatccaggaagacggcacgatcaccatcgcgtcgacctcgaccgatggcatggcagaagccaagcgccgtatcgagggcattaccgccgaagccgaagtgggcaagatctacaacggcacggtgctgaagctgctggacttcggcgcgatcgtgaacatcctgccgggcaaggatggtctgctgcatatctccgagatcgtcaacgagcgcgtgaaggacatcaaggactggctgaaggaaggccagcaactgcgcgtcaagctgatccaggctgacgagaagggccgtctgcgcctgtcgctgaaggctgcgctggcggaagagggtggcagcatcagcccggtgaacgctggtgaagcggctccggctccggctccggctgcggctccggcaactccgtcggaccagcagcaataa

SEQ ID NO: 1982 - protein, 728 aa, Ralstonia eutropha JMP134
MSMFNKVVKQFQWGQHTVRMETGEIARQAGGAVIVDVEDTVVLATVVAAKSPKPGQDFFPLTVDYIEKTYAAGKIPGGFFKREGRPSENETLTSRLIDRPLRPLFPEGFYNDVQVVVHVVSLNPEIPADIPALIGASAALAVSGIPFNGPVGAARIGYKDGQYLLNPTRSQMATSDLDLVVAGTERAVLMVESEANQLSEDVMLGAVVYGHEQMQIAINAIHDLVREGGKPEWDWAPAPKNEALIAKVTEVALPLLQEAYQLRQKSARSQKLKEVSANVTAALAEAGVDADKVEVGNIMFDLEAKIVRGQILGGEPRIDGRDTRTVRPIEIRSSVLPRAHGSALFTRGETQALVVATLGTKSDEQIIDALAGEYRDRFMLHYNMPPFATGETGRVGSPKRREIGHGRLAKRALIPVLPKDDEFAYTIRLVSEITESNGSSSMASVCGGCLALMDAGVPVKAHVAGVAMGLILEGNKFAVLTDILGDEDHLGDMDFKVAGTDNGITALQMDIKVQGITKEIMQVALAQAKEGRLHILGAMQGAMGHARTELSAHAPRMITMKIHPDKIREVIGKGGSTIQALTKETGTTIDIQEDGTITIASTSTDGMAEAKRRIEGITAEAEVGKIYNGTVLKLLDFGAIVNILPGKDGLLHISEIVNERVKDIKDWLKEGQQLRVKLIQADEKGRLRLSLKAALAEEGGSISPVNAGEAAPAPAPAAAPATPSDQQQ

SEQ ID NO: 1983 - DNA, 2094 bp, Staphylococcus saprophyticus subsp. saprophyticus ATCC 15305
  CDS (1)..(2094): transl_table=11
atgtctcaagagaaaaaagtttttaaaaccgaatgggcaaacagatcattaacgattgaaacaggtcaacttgctaaacaagctaatggtgccgtactcgttcgttatggtgatacagtagttttatctactgcagtagcttcaaaagaaccacgtgatggtgactttttcccattaatggttaactatgaagaaaaaatgtatgcagctggtaaaattccaggtggatttaagaaacgtgaaggtcgtccaagcgatgaagcaacgttaactgcacgattaattgatagaccaatccgcccattgttccctaaaggttataagtatgatgttcaaataatgaatactgtacttagtgctgatccagattgttcaccagaaatggcagctatgataggttcatctatggcattgagtgtttctgacattccattccaagggcctattgccggtgtgaaggtgggatatattgatggtgaatacgtaatcaatccaacggtagcacaaaaagaagtgtcgcgtttagacctagaagttgctggtcataaagatgcagtgaacatggttgaagcgggcgctagcgaaattactgagagtgaaatgctagaagctattttctttggacatagcgaaattcaacgattggttaatttccaacaagaaattgttgatcatatccaaccaaagaaaaaagcattcgttcctgtagaaaaagatgaagtattagttgaaaaagttaaacaactaacacaagagaacggtttaaaagatgctgttttaacatttgataaacaacaacgtgatatcaatttagatgcgctcaaagaaaaagtagcagctgaatttattgatgaagaagacgcagataacgaagtgttaattaaagaagtgaatagtatattaaatgacttagtcaaagaggaagttagacgtttaattgctgaagaaaaaatcagacctgatggccgtaaaacagatgaaattcgtccattagaatcagaagtaggtgtcttacctagagcgcatggttctggtttgtttacacgtggtcaaacacaagcactatctgtcctaactttaggttcaatgagtgaatatcaaatcctagacggtttaggggaagaagaacagaaacgtttcatgcatcattataacttcccaaactactcagtaggtgaaacgggtcctgttcgttctccaggtcgtcgtgaaattggtcatggtgcattaggtgaacgtgcattgagccatattataccggatttgaaagacttcccatatactgtaagaattgtaagtgaagtattagaatccaatggttcgtcttcacaggcatcaatttgtgggtctacattagcattaatggatgctggtgtgccgattaaagcacctgttgcaggtattgctatgggcttagtgacacgtgatgatagttatacaatcttaacagacattcaaggtatggaagatgcactcggcgatatggactttaaagttgcaggtacagctgaaggtatcactgcaattcaaatggatattaaaattgatggtttaacaaaagaaattattaaagaagcgttagatcaagcacgtgaaggtcgtctagctatattagatcacatgctacaaactatcgatacgtctcgtagcgaattaagtgcttttgcacctaaagtagttacgatgacaattaaaccagagaaaattagagatgtcattggacctggtggtaaaaaaattaatgaaatcattgatgaaactggcgtgaaacttgatatcgaacaagatggtacgatctttattggtgcagttgataaagatgccatagcacgtgcacgttcaatcattgaagatattacacgtgaagcagaagttggacaagtttatgaaggtaaagtcaaacgtattgagaaatatggtgcgtttgttgaattattcccaggtaaagatgcacttgttcacatttcgcaaattgcgaatgaacgtattgataaagtcgaagatgttttaaaagtcggcgatattttcaaaatcaaagtaactgaaattgacaaacaaggtcgtgtcaatgcatcacataaagcattactataa

SEQ ID NO: 1984 - protein, 697 aa, Staphylococcus saprophyticus subsp. saprophyticus ATCC 15305
MSQEKKVFKTEWANRSLTIETGQLAKQANGAVLVRYGDTVVLSTAVASKEPRDGDFFPLMVNYEEKMYAAGKIPGGFKKREGRPSDEATLTARLIDRPIRPLFPKGYKYDVQIMNTVLSADPDCSPEMAAMIGSSMALSVSDIPFQGPIAGVKVGYIDGEYVINPTVAQKEVSRLDLEVAGHKDAVNMVEAGASEITESEMLEAIFFGHSEIQRLVNFQQEIVDHIQPKKKAFVPVEKDEVLVEKVKQLTQENGLKDAVLTFDKQQRDINLDALKEKVAAEFIDEEDADNEVLIKEVNSILNDLVKEEVRRLIAEEKIRPDGRKTDEIRPLESEVGVLPRAHGSGLFTRGQTQALSVLTLGSMSEYQILDGLGEEEQKRFMHHYNFPNYSVGETGPVRSPGRREIGHGALGERALSHIIPDLKDFPYTVRIVSEVLESNGSSSQASICGSTLALMDAGVPIKAPVAGIAMGLVTRDDSYTILTDIQGMEDALGDMDFKVAGTAEGITAIQMDIKIDGLTKEIIKEALDQAREGRLAILDHMLQTIDTSRSELSAFAPKVVTMTIKPEKIRDVIGPGGKKINEIIDETGVKLDIEQDGTIFIGAVDKDAIARARSIIEDITREAEVGQVYEGKVKRIEKYGAFVELFPGKDALVHISQIANERIDKVEDVLKVGDIFKIKVTEIDKQGRVNASHKALL

SEQ ID NO: 1985 - DNA, 2391 bp, Ehrlichia canis str. Jake
  CDS (1)..(2391): transl_table=11
atgtttaatttgataagaaaatctacagagtgggggggtaagaccttaattttagagagcggtaagatagcaagacaagctaatggtgctgtgatggtaagttatgctggtactacagttttagcaactgtggtaacaggtaaaacaaaagagccagtagattttctgcctttaactgtacagtttgttgcaaaaagttatgctgtaggtaaaattcctggaggttttttaaagagagaaggtaaaccatctgatagagagacgttaatctctcgtttaattgatagaagtataagacctctattcccttctggattttatgatgaggttagtatagtatgtaatttactttcatatgatacagttactcctcctgaagttactgcactaattggtgcaactgcagctttatctatatctggtgtttcttttaatgggttagtagctggtgtaagaattggttatttaccgtctgaagataaatacttattgaatgcatctgctgatgatatgttatatagttctttggatttgtttttgtcagggaatgaagattctgttttaatggttgaatctgaagcttctgaattatctgaatctcagatgttaagagcagtcacatttggacatcaaaattgccaggaagttattaatttaattagagagtttagtgaagaaaaaggtgtacagcctattgaatttattcctcatgatattaacccaattgtgaattatatagaatcttcttacaaacaagattttagtttagcatattcaaatactgtaaagaaagaaagagtactgaagttagaagaattgagagataaagtgctttctgattttgcagaaaaatgtagtgttgataatgtggaatgtgataatcaagatgtaattagtgcattaaagtcctttgaaagatcgttagtaaggtctcaaattgtagaaacttcttctaggatagatggacgtgcgtttgatgaaatacgtaatatagaaattgaggtagatgtattacctaaagctcatggatctgctttatttactagaggtaatacccaggcattagttgttactgcattaggtacacctcaagatgaacaaatagttgatgatttagatggtgatagaagagagaattttttgttgcattataattttcctccctatgcagtaggtgaatctgcggctttacgtgctcctggtagaagagagataggtcatggtaagcttgcttggagagcaattcgttatgtattgcctgaaaaatcagattttccatatactattagagtagtttctgaaattactgaatcagatggttcttcttcaatggctactgtttgtggagcatctttggctttaatggatactggtgtaccaataaaatctcctgttgctggtattgcaatgggacttattaaggaaggtgataagtttataatactgtcagatatattaggggatgaggattaccttggtgatatggattttaaagtagctggtactgctgaaggtgttactgctttgcaaatggatatgaagatatcaggtattagtgttgatgtgattgaaaaagcattacttcaggcaaaagatggtaggatgcatattttaagcaagatgaatgcggtgatacaagaatctcgtaatagtataaaaaaccatgctcctagaatagagtctatttttataaataaagataagattcgtaatgtaataggtagtggaggaaaaaatatacgtgatatctgtgaaaaaacaggtgcaaagattgaaataatacaagatggcactgttatgatatatgctgttaataatgaagcagtagagtatgctaagagcatgatcatggatattgtaactgagccagaaataggtaaagtttttgaaggcacagttgttgaaattgtgaaatttggtgcttttgttaacttcttaggtggtaagagaggcttgatacatattagcgaaataaagaatgaacatattagtgcagtaggtagtgtaatttctgtaaatgataaagtgaaggtactagttattggtatagatcgtgagcatgttcaattatctatgcgtagggtagatcaagaaactggagaacctatagatggtgagctttataatgtaagaaaaagtagcttttctgatgattcatcctcctctggtacttctagtagtggcagtagctttaaagaaagctacagtggcaataggcatggtagtcatgaaaagaggcgtagtggaggtagtagatcatcacgtcgcaatagtagtggatctaattattatcgtgaagatttacattcgagtgactttggaaataataatcgttcatttagtaatagtagaaatggtcatgaagttcctaggaaacctaggtttttttaa

SEQ ID NO: 1986 - protein, 796 aa, Ehrlichia canis str. Jake
MFNLIRKSTEWGGKTLILESGKIARQANGAVMVSYAGTTVLATVVTGKTKEPVDFLPLTVQFVAKSYAVGKIPGGFLKREGKPSDRETLISRLIDRSIRPLFPSGFYDEVSIVCNLLSYDTVTPPEVTALIGATAALSISGVSFNGLVAGVRIGYLPSEDKYLLNASADDMLYSSLDLFLSGNEDSVLMVESEASELSESQMLRAVTFGHQNCQEVINLIREFSEEKGVQPIEFIPHDINPIVNYIESSYKQDFSLAYSNTVKKERVLKLEELRDKVLSDFAEKCSVDNVECDNQDVISALKSFERSLVRSQIVETSSRIDGRAFDEIRNIEIEVDVLPKAHGSALFTRGNTQALVVTALGTPQDEQIVDDLDGDRRENFLLHYNFPPYAVGESAALRAPGRREIGHGKLAWRAIRYVLPEKSDFPYTIRVVSEITESDGSSSMATVCGASLALMDTGVPIKSPVAGIAMGLIKEGDKFIILSDILGDEDYLGDMDFKVAGTAEGVTALQMDMKISGISVDVIEKALLQAKDGRMHILSKMNAVIQESRNSIKNHAPRIESIFINKDKIRNVIGSGGKNIRDICEKTGAKIEIIQDGTVMIYAVNNEAVEYAKSMIMDIVTEPEIGKVFEGTVVEIVKFGAFVNFLGGKRGLIHISEIKNEHISAVGSVISVNDKVKVLVIGIDREHVQLSMRRVDQETGEPIDGELYNVRKSSFSDDSSSSGTSSSGSSFKESYSGNRHGSHEKRRSGGSRSSRRNSSGSNYYREDLHSSDFGNNNRSFSNSRNGHEVPRKPRFF

SEQ ID NO: 1987 - DNA, 2163 bp, Dehalococcoides sp. CBDB1
  CDS (1)..(2163): transl_table=11
ttgataactgccaactcatttgaacgaactatcggcggcaggaaacttgttattgagagcgggaaacttgcccgtcttgcagatgccgcgattactatccgctatgcggatactgaattactggtaacactttgttctgccaagaaacctcgcgaaggggtagattttctccccctgactatagattacgaagagcggatgtatgccgccggcaaaatccccggcgggtttatccgccgtgaaggccgccccagtgaacaggctattttggctgggcgactgactgacagacctcttcgccctcttctccccaaagagtggcgcaatgatcttcagattattattaccgtaattgcttcagacaaggaaaatgacgctgatatctggggcgtagtgggtgcttccacagttctggccatgtctgaaataccatatgaaggtccggtcggagccagccgtattggatatataaacggtgaatttgtgcttaatcccacttttgcccagttggaatcaagccagctggatctggtggtagtcagcacccgcaaagcggtggtgatgattgaagccggttccaaagaaattcctgaagacattatgattaacgctattgagtttgcccataaggcaaatcaagagcttattgacctccaggatgaaatccgtgccaagctcggcaaagaaaagctacccgtgccggtgcttgaaatacccgaagaagtcaaaacggctgttgccgcttttgtaaaaggacgggtaaatgaagcccttagccaccaagataaaaccgcccgtgaaaatgcggttgaaggccttcaggctgaactggttgcggctttatcagaaacattcgccgaaggtgatatcctggccgcttatgacaaagaaatcaagaaagctatccgctctactatacttgagaaggatatccgggtaaacggacggggtatcaaacagcttcgccagctggatgctgaaacagggcttttgccccgcgtccatggctctgctttattcacccgcggtgatacccaggtcatggctataaccacccttggttctttacaggaatcccaacagctggatggcttaagtgccgaagataccaagcgttttatgcttcactacaactttgcccccttctctaccggtgaagtaaaacgttccggttctcccggacggcgtgaaatcggtcatggcgctttggccgaacgtgccttagtgcctgtcctgcccactccggaagaattcccctataccattcgtctggtagctgacgtggttggctcatcaggctctacctctatgggcagtgtctgttcgtccagcctgtcacttatggatgcaggcgtaccggtcaaaaaagctgttgcaggaatctccatcggccttattaccggtgaaaatgatacctactgcaccattactgatattgaaggcatcgaagataactacggcgatatggactttaaagttgccggtacccgtgacggcataaccgccatacaggtggatatgaaggtcaagggtatcagttttgatattatccgtgatgccatataccaggcaaaagaagcccgctataacatactggacgtaatggacaaagctcttgcccagcctaaaacagagcttagcccttatgcccccagaatgtacaagataaatattgacccctccaagattggcagtgttatcggcagcggcggcaaaactatccgctctattattgagcaaaccaatactaccgttgacattgaaaatgacggcacagtggttattggtgctactgacgaggcttcggctaaaaaggccatcaagataattgaagacctgactaaagacatcgaagccggcagtatttataccggtaaggtcacccgtataatgaccttcggtgcttttgttgaaatcctgcccggaaaagaaggcatggtacacataagcgaactggccgaccacagagttgaaaaagtagaagatatagtcaaggtgggtgatgatataacggttaaggttatagagattgataaccagggcagggtaaacctgtcacacagggttattctcaatccgaacgctgtacccatttcacgcaaccgtgattctcagccgcgtcgtcccggtcctttccgcccttctgaccggtctaactcataa

SEQ ID NO: 1988 - protein, 720 aa, Dehalococcoides sp. CBDB1
MITANSFERTIGGRKLVIESGKLARLADAAITIRYADTELLVTLCSAKKPREGVDFLPLTIDYEERMYAAGKIPGGFIRREGRPSEQAILAGRLTDRPLRPLLPKEWRNDLQIIITVIASDKENDADIWGVVGASTVLAMSEIPYEGPVGASRIGYINGEFVLNPTFAQLESSQLDLVVVSTRKAVVMIEAGSKEIPEDIMINAIEFAHKANQELIDLQDEIRAKLGKEKLPVPVLEIPEEVKTAVAAFVKGRVNEALSHQDKTARENAVEGLQAELVAALSETFAEGDILAAYDKEIKKAIRSTILEKDIRVNGRGIKQLRQLDAETGLLPRVHGSALFTRGDTQVMAITTLGSLQESQQLDGLSAEDTKRFMLHYNFAPFSTGEVKRSGSPGRREIGHGALAERALVPVLPTPEEFPYTIRLVADVVGSSGSTSMGSVCSSSLSLMDAGVPVKKAVAGISIGLITGENDTYCTITDIEGIEDNYGDMDFKVAGTRDGITAIQVDMKVKGISFDIIRDAIYQAKEARYNILDVMDKALAQPKTELSPYAPRMYKINIDPSKIGSVIGSGGKTIRSIIEQTNTTVDIENDGTVVIGATDEASAKKAIKIIEDLTKDIEAGSIYTGKVTRIMTFGAFVEILPGKEGMVHISELADHRVEKVEDIVKVGDDITVKVIEIDNQGRVNLSHRVILNPNAVPISRNRDSQPRRPGPFRPSDRSNS

SEQ ID NO: 1989 - DNA, 2121 bp, Thiobacillus denitrificans ATCC 25259
  CDS (1)..(2121): transl_table=11
gtgagcgctatcaagaaaacgtttacctacggtcgccaccaagtcacgctggaaaccggcgaaatcgcgcgtcaggcgtccggcgccgtcgtcgtcaacatggacgacacgatggtgctcgtgaccgtggtcgccaagaacgaagtcaagcccggccaggatttcttcccgctgaccgtcgactaccaggaaaagacctacgccgccggccgcatccccgggggatttctcaagcgcgaaagccggccgtcggaaggtgaaacgctgatctcccgcctgatcgaccgcccgatccgcccgctcttccccgaaggcttcttcaacgaagtgcagatcatcgcgacggtgatgtcgtcgaatcccgaagtcagcgccgacatccccgcgctgatcggcgcttcggccgcgctctcgctctccggcctgccgttcgacggcccggtcggcgcggcgcgcgtcggcttcatcaacggcgaatacgtgctcaacccgaccaacgccgaactcaaggattccgcgctcgacctcgtcgtcgccggcaccgaaagcgccgtgctgatggttgaatccgaggccatggaactgcccgaggacatcatgctcggcgctgtcgtcttcggccacacgcagatgcaggccgcgatcaacgcgatcaacgagctggccgacgaagccggcgccgacgcctgggactgggcgccgccggccgaagacacggcgatggtcgaccgcctcaaggcgctcgccgaagacggcctgcaacaggcctacaacatcaagcagaagcgggcacgcatggccgccgtcgacgaggtgcgcagcaaggccttcgccgaactcatcacggccgacatggacacggtggcggccaaccacgtcaaggacgcgttccaccgcctcgaagccggcgtcgtgcgcaaccgcatcctctcgggccagccgcgcatcgacggccgcgacacccgcaccgtgcgcccgatcacgatccgtaccggcgtgctgccgcgcgcccacggctcggcgctgttcacgcgcggtgaaacgcaggccctggtcgtgacgacgctcggcacgggccgcgacgagcagaccatcgacgcactcgagggcagctactccgaccgcttcatgctgcactacaacatgccgccctatgcgaccggcgaaaccggccgcgtcggctcgcccaagcgtcgcgagatcggccacggccggctcgccaagcgcgcgctgctggcggtgctgccgagcaaggaagaattcggctacaccatgcgcgtggtctccgaaatcaccgaatcgaacggctcgtcgtcgatggcctcggtgtgcggcggctgcctctcgctgatggacgccggcgcgccgctcaaggcgcacgtcgccggcatcgccatgggcctgatcaaggaaggcaaccgcttcgccgtgctgacggacattctcggcgacgaagaccacctcggcgacatggacttcaaggtcgcgggcaccgaaaacggcgtgaccgcgctgcagatggacatcaagatcacgggcatcaccaaggagatcatgcaggccgcgctcacccaggcgaaggaaggccgcatgcacatcctcggcatcatgaaggcgtcggtctccgagacccatgagatgtcggcctacgcgccgcgcatcatcgcgatgaagatcaatcccgagaagatccgcgacgtgatcggcaagggcggcgccgtgatccgcgcgctgaccgaggaaaccggcacccagatcgacatccaggaagacggcagcgtaaagatcgcctgtaccagcatggaggccggcgaactcgcgaagaagcgcatcgaggaaatcaccgccgaggtcgaagtcggcaaggtctacgagggcccggtcatcaagctgctcgacttcggcgcgatcgtcaacgtgctgccgggacgcgacggcctgctgcacatctcgcagatcgcccacgagcgcgtcaatacgatcggcgactacctcaaggaaggccaggtcgtgcgcgtgaagattctcgaggccgacgagaaaggccgcctgcgcctgtcgatgaaggccttgctcgaagcccccgcgccgacgagcggcggcgaagaacacgcgagctga

SEQ ID NO: 1990 - protein, 706 aa, Thiobacillus denitrificans ATCC 25259
MSAIKKTFTYGRHQVTLETGEIARQASGAVVVNMDDTMVLVTVVAKNEVKPGQDFFPLTVDYQEKTYAAGRIPGGFLKRESRPSEGETLISRLIDRPIRPLFPEGFFNEVQIIATVMSSNPEVSADIPALIGASAALSLSGLPFDGPVGAARVGFINGEYVLNPTNAELKDSALDLVVAGTESAVLMVESEAMELPEDIMLGAVVFGHTQMQAAINAINELADEAGADAWDWAPPAEDTAMVDRLKALAEDGLQQAYNIKQKRARMAAVDEVRSKAFAELITADMDTVAANHVKDAFHRLEAGVVRNRILSGQPRIDGRDTRTVRPITIRTGVLPRAHGSALFTRGETQALVVTTLGTGRDEQTIDALEGSYSDRFMLHYNMPPYATGETGRVGSPKRREIGHGRLAKRALLAVLPSKEEFGYTMRVVSEITESNGSSSMASVCGGCLSLMDAGAPLKAHVAGIAMGLIKEGNRFAVLTDILGDEDHLGDMDFKVAGTENGVTALQMDIKITGITKEIMQAALTQAKEGRMHILGIMKASVSETHEMSAYAPRIIAMKINPEKIRDVIGKGGAVIRALTEETGTQIDIQEDGSVKIACTSMEAGELAKKRIEEITAEVEVGKVYEGPVIKLLDFGAIVNVLPGRDGLLHISQIAHERVNTIGDYLKEGQVVRVKILEADEKGRLRLSMKALLEAPAPTSGGEEHAS

SEQ ID NO: 1991 - DNA, 2229 bp, Nocardioides sp. JS614
  CDS (1)..(2229): transl_table=11
ttgaccgaccccgagatctctgccgtcgagaccgttctggacaacggcaagttcggcacccgcaccgtcaagttcgagaccggcctactggcccggcaggctgccggcgccgtgaccgcctacctcgacgaggacaccatgctcctgtcggccaccacggccggcaagcacccgaaggaccacttcgacttcttcccgctcaccatcgacgtcgaggagcggatgtacgccgcgggcaagatccccggctcgttcttccgcagcgagggccgtccgggcgaggacgcgatcctcacctgccgcctcatcgaccggccgctgcgcccgaccttcaagaagggcctgcgcaacgaggtccaggtcgtcatcaccgtgatggcgctcaaccccgacacgccgtacgacgtgctcgcgatcaacgccgcctcgctctccacccagctctcgggcctgccgttctccggccccgtcggcggcgtccgcgtggcgctgatcgagggccagtgggtcgccttcccgacccacagccagctcgagaacgccgtgttcgacatggtggtcgccggacgcgtcaccgagaccggtgacgtcgcgatcatgatggtcgaggccgaggccaccgagcagacctgggacctggtccgctccggcacccaggcgccgaccgaggagatcgtggccggcggtctcgacgccgccaagccgttcatcaagcagctctgcgaggcgcaggtcgagctggcgaacgtcgcggcgaagccggtccaggacttccccgtcttcctcgactacgaggacgacgtgtacgacgcggtcgaagcggccgtgaaggccgagctggccgcggcgatgaagatcgccgacaagcaggagcgcaacgaccgcaccgacgagctcaaggacgaggtcctggccaagctcggcgagcagttcgagggccgtgagaaggagatcggcgcggcgttccgctcggtcaacaagcaggtcgtccgggagagcatcctgcgcgacaaggtccgcatcgacggccgcggcctggccgacatccggccgctgcacgccgaggtcggcgtgattccgcgggtgcacggctcggcgctgttcgagcgtggggagacccagatcctgggcgtcacgacgctggacatgctcaagatggagcagcagctcgacacgctctcgccggagaagcaccgccgttacatgcacaagtacgtcttcccgccgttctccaccggcgagaccggccgggtcggctcgccgaagcgccgcgaggtcggccacggcgcgctggcgcgccgggcgctgctgccggtgctgcccacgcgcgaggagttcccctacgcgatccgccagctctccgaggcgatgggctccaacggctcgacctcgatgggctcggtctgcgcgtccacgctcgcactgctccaggccggtgtgccgctgaaggccccggtcgccggcatcgcgatgggcctggtctccggcgagatcgacggccagctccagtacgtcgccctcaccgacatcctcggtgccgaggacgcgttcggcgacatggacttcaaggtcgccggcacccgcgagttcgtcaccgcgctgcagctggacaccaagctcgacggcatcccggccgaggtcctcgcccaggcgctgacccaggcgcgcgacgcccgcctgaccatcctcgacgtgatggccgaggccatcgacgagcccgaggagatgtcggcgtacgccccgcggatcatcacgatcacgatcccggtcgacaagatcggcgaggtgatcggccccaagggcaagatcatcaaccagatccaggacgacaccggcgcgtcgatctcgatcgaggacgacggcacgatctacatcggtgcgaccaacggcgaggcggccgaggcggccaagaacgccgtcaacgcgatcgccaacccgaccatgcccgaggtcggcgagcgctacctcggcacggtcgtcaagacgaccaacttcggcgcgttcgtctcgctgatgcccggcaaggacggcctgctgcacatcagcaagctccgctcgctggccggcggcaagcgggtcgacgcggtcgaggacgtcgtctcggtcggccagaagatccaggtccagatcgccgagatcgacgaccgcgggaagctgtcgctggtcccggtcgtcgagggcgaccaggccgactccgacaccgccgaggccggctccgaggaggagtga

SEQ ID NO: 1992 - protein, 742 aa, Nocardioides sp. JS614
MTDPEISAVETVLDNGKFGTRTVKFETGLLARQAAGAVTAYLDEDTMLLSATTAGKHPKDHFDFFPLTIDVEERMYAAGKIPGSFFRSEGRPGEDAILTCRLIDRPLRPTFKKGLRNEVQVVITVMALNPDTPYDVLAINAASLSTQLSGLPFSGPVGGVRVALIEGQWVAFPTHSQLENAVFDMVVAGRVTETGDVAIMMVEAEATEQTWDLVRSGTQAPTEEIVAGGLDAAKPFIKQLCEAQVELANVAAKPVQDFPVFLDYEDDVYDAVEAAVKAELAAAMKIADKQERNDRTDELKDEVLAKLGEQFEGREKEIGAAFRSVNKQVVRESILRDKVRIDGRGLADIRPLHAEVGVIPRVHGSALFERGETQILGVTTLDMLKMEQQLDTLSPEKHRRYMHKYVFPPFSTGETGRVGSPKRREVGHGALARRALLPVLPTREEFPYAIRQLSEAMGSNGSTSMGSVCASTLALLQAGVPLKAPVAGIAMGLVSGEIDGQLQYVALTDILGAEDAFGDMDFKVAGTREFVTALQLDTKLDGIPAEVLAQALTQARDARLTILDVMAEAIDEPEEMSAYAPRIITITIPVDKIGEVIGPKGKIINQIQDDTGASISIEDDGTIYIGATNGEAAEAAKNAVNAIANPTMPEVGERYLGTVVKTTNFGAFVSLMPGKDGLLHISKLRSLAGGKRVDAVEDVVSVGQKIQVQIAEIDDRGKLSLVPVVEGDQADSDTAEAGSEEE

SEQ ID NO: 1993 - DNA, 2694 bp, Pisum sativum
  CDS (1)..(2694)
atgctagcatgtactaacagcatcttccatggccctgccacattccaccgccaatcccacccttctaaattcctactctccaagcctcttctcttccctcgcctccctcgcgtagtcaatttcgggaaattaaagttcaattctcacttttccggtaaaaatagttgccgccgtttcaatgttaaatcttccgtcaattcatcatcagaagttttggagtccattgatgttggtgtcccgcacagttccctgcaaaagcattccttgaagattcccgttggtgatagacatactttggttgagactggtcacatgggaaggcaagcaagtggttctgttacagttacggatggggagaccattgtgtacaccactgtttgtttgaatgatactcctagtgagccatccgattttttccccctttctgtgaattatcaagagcgcttttcagctgctggtcgtactagtggaggtttcttcaaacgagaaggaaaaaccaaggatcacgaggttcttatttgtagattgattgataggcctctgcgtcctaccatgcctaagggcttctaccatgaaactcaaatattatcttgggttttaagctatgatggatcacatgcccccgatgccttggccatcactgctgctggtatagcacttgcactttcagaaattcctacgtcaaaagcagttgctggagttcgagttggcctcattggtgataagtatatagtaaatcctacagctgaggagatggaaaactctgagttggacctcatgctggcgggcacagatagcgcaatattgatgatagagggttatggcaattttcttcctgaagagaagctacttaaggctgtagaagttggtcaggatgcagtgcgagcaatctgtaatgaggtagaagccttggtcaagaaatgtgggaagccaaagatgattgatgccatcaagttgcctcctcctgagctttataaacatgttgaggaaatcgctggtgatgagttagtaaaagttcttcaaattagaaataaaataccaagaaggaaagccctttcatcattggaagaaagggttcttaagatactgacagaaaatgggtttgtcattgatgaatcaacacccaggagtaatgctgaaaccatcgcagagattcttgaggatgaagatgaggaagtaattgttgatggtgaagttgatgaaggcgatgttcatataaagccaactccacgcaaaccaacgcctttattttctgaggtagatgtgaagttggtatttaaagaagttacatccaagtttttgaggaaacgtatagtagagggtgggaaaaggagtgatgggagaacaccaaaagaaatccgcccaattaactcaagttgtagcatattgcctagagcacatggaagtgctctttttacgaggggcgaaacacaggcactggctgttgctacgcttggagataacaagatggcacaacgaataaacaatcttatagaagttgatgattataagaggttctatctgcagtattcatttcctccttcatgtgttggggaggcgggccgtattggtgcaccgagtagaagagaaattggtcacggaatgcttgctgagagatcccttgaaacaattttgccttctgataatgacttcccttacactattcgtgttgaaagtaccatcacagaaagcaatggctcttcgagcatggcgtctgtttgtggaggttgcttagcattgcaagatgctggggttcctattaagtgctcaattgctggaattgctatgggtttggttcttgataccaaggaatttggtggagatggaactccgcttattctgtctgacataactggatctgaagatgcatctggagatatggattttaaggttgctgggaatgaagatggcataactgcatttcagatggacattaaggttgctggaattactttgcccataatgagagaagcactgctacaggcaagagacggcaggaagcatatacttggagaaatgatgaaaagcttgccccctccagccaaaaggctttccaagtatgctcctttgattcacgttatgaaggtcagaccggataaaataaatcttataattggctccggtgggaaaaaagtgaagagcattattgagcaatctggaatagaggctattgataccgaagataatggcactgtgagaatatttgcgaaagatttggctagtttagagaagtctaaggctatcattagtagtttgacaatggttccaaatattggtgatatatataggaattgtgaaatcaaatcaatagttccatatggagtttttgtagagatagcacctggacgagagggactttgctatattagtgaactgagttcaggttggctagctaaggcagaagatgttttcaaggtgggagatcatattgatgtaaaacttacagagataaatgaaaagggacagctgcgtcttagtcaccgagcattgcttccggatgcagattcagacaattcaaactcaactgataagagttcattggaagaagtaagcagcccgacaaatgctggtttatttgaagagaaaactgaacagcctaatgatgaggttaacacacccaaggcacagcctcatctaaaagaagttcagaggacaattctgcacttccatcaaaaaaatttagcagatcggtaa

SEQ ID NO: 1994 - protein, 897 aa, Pisum sativum
MLACTNSIFHGPATFHRQSHPSKFLLSKPLLFPRLPRVVNFGKLKFNSHFSGKNSCRRFNVKSSVNSSSEVLESIDVGVPHSSLQKHSLKIPVGDRHTLVETGHMGRQASGSVTVTDGETIVYTTVCLNDTPSEPSDFFPLSVNYQERFSAAGRTSGGFFKREGKTKDHEVLICRLIDRPLRPTMPKGFYHETQILSWVLSYDGSHAPDALAITAAGIALALSEIPTSKAVAGVRVGLIGDKYIVNPTAEEMENSELDLMLAGTDSAILMIEGYGNFLPEEKLLKAVEVGQDAVRAICNEVEALVKKCGKPKMIDAIKLPPPELYKHVEEIAGDELVKVLQIRNKIPRRKALSSLEERVLKILTENGFVIDESTPRSNAETIAEILEDEDEEVIVDGEVDEGDVHIKPTPRKPTPLFSEVDVKLVFKEVTSKFLRKRIVEGGKRSDGRTPKEIRPINSSCSILPRAHGSALFTRGETQALAVATLGDNKMAQRINNLIEVDDYKRFYLQYSFPPSCVGEAGRIGAPSRREIGHGMLAERSLETILPSDNDFPYTIRVESTITESNGSSSMASVCGGCLALQDAGVPIKCSIAGIAMGLVLDTKEFGGDGTPLILSDITGSEDASGDMDFKVAGNEDGITAFQMDIKVAGITLPIMREALLQARDGRKHILGEMMKSLPPPAKRLSKYAPLIHVMKVRPDKINLIIGSGGKKVKSIIEQSGIEAIDTEDNGTVRIFAKDLASLEKSKAIISSLTMVPNIGDIYRNCEIKSIVPYGVFVEIAPGREGLCYISELSSGWLAKAEDVFKVGDHIDVKLTEINEKGQLRLSHRALLPDADSDNSNSTDKSSLEEVSSPTNAGLFEEKTEQPNDEVNTPKAQPHLKEVQRTILHFHQKNLADR

SEQ ID NO: 1995 - DNA, 2334 bp, Mycobacterium leprae
  CDS (1)..(2334): transl_table=11
gtgcggacggttatgtctgtagctgaaatcgaagagggcgtgttcgaggcaaccgttactatcgataacgggagtttcggcacccgcgccatccgttttgagaccgggcgcttagccttgcaagccgctggcgcagtggtggcctacctggacgccgacaatatgctcttgtcggcgaccaccgccagcaagaaccccaaggagcaattcgacttcttcccgcttacggtcgatgttgaggagcggatgtatgctgccggtaggatccctggttcgttcttccgccgtgagggtcggccgtccaccgacgcgatccttacctgccggctcatcgatcgccctttgcgcccgtcttttgtcgacggcctgcgcaacgagatccaggtcgtggtgacgattctgagcgtggatcccaacgatctctatgatgtgttggccatcaatgctgcctcggcctccactcagctgggcggtctaccgttctccgggcctatcggcggtgtgcgggtggcgctcatcgacggtacctgggttgctttccccactgtagagcagctcgagcgggccgtgttcgacatggtgattgccggccggattgttggcacggatgacgagggcaagcctgatgtcgctatcatgatggtcgaggctgaggctaccgaaaacgtcatcgagctggtcgagtgcggtgctcaggcgccgacggaaagcatcgtggcccaaggactcgaggtggccaagccgttcattgctgcgctgtgtaccgcgcagcaggaacttgctgacgttgtgtcttctcgccaagccaaaccgccagtcgagtacccgacgttccccgactacggcgacgacgtctactactcggtggcttcgatggctaccgatgagttggccgcggccttgaccatcggcgccaagcttgagcgcgatcaacgcaccaacgagatcaagacccaggttctcgagcggctcgccggcacctacgagggccgggaaaaggagttgggcgcagcattccgttcgttgaccaagaaactggtccgacagcggatcctcaccaaccatttccgtatcgacggccgcgggatcaccgacattcgcgcgttgtcggccgaagttgcggtggttccgcgggcgcacggtagcgcgctgttcgagcgcggcgaaacccagatccttggcgtgaccacgctcgacatggtcaagatggctcagcagatcgactcgctggggccagaaacatccaagcggtatatgcaccactacaacttcccgccgttctccactggtgagactggtcgagtcggctcgcccaagcggcgtgagatcgggcacggtgcgctggctgagcgggctctagtgccggtgctacccagcgtcgaggagttcccgtacgccatccgtcaggtgtccgaggcgctgggttctaacggctcgacctcgatggggtcggtttgcgcttccacgctggcgctgctcaacgccggcgtgccgctcaaggcgccggtggctggcattgctatggggctggtctccgacgatgttgagtttgacggagggactgagcgtcgttttgtcaccttgaccgacatcctgggcgccgaagacgccttcggcgacatggattttaaatgcgccggtaccaaggactttgtcaccgcgctgcagctcgataccaaacttgacggtattccctcccaggtgctcgcgggtgcgcttgcgcaggccaaagacgcccggctgaccatcctcgaggtcatggctgaggccattgacagacccgacgagatgagcccgtatgcgccgcgggtcatcactatcaaggttccagtggataagatcggtgaagtcatcggccccaagggcaaggtcatcaacgccattaccgaggagaccggtgcgcagatttctatcgaggatgacggtactgtgttcgtcggtgcgaccgatggcctgtcggcgcaggccgcgatcaataagattaatgccatcgcgaacccgcagctgccgacggtcggcgaacggttccttggaactgtcgtaaagataacggaattcggcgctttcgtgtcgctgctgcctgggcgtgacggtttggttcacatctccaagcttggcaagggtaagcgcatcgcaaaggtggaagacgtcgtgaacgtcggtgataagttgcgcgtcgagatcgcagatatcgaaaaacgcggcaagatctcattggtcttggtggctgacgacgattcggccaccgtccctgcagctccggccgatgctggggctgctcaggagttcggttcgggtactgcgccagccgatgctgcgacggccagtagctga

SEQ ID NO: 1996 - protein, 777 aa, Mycobacterium leprae
MRTVMSVAEIEEGVFEATVTIDNGSFGTRAIRFETGRLALQAAGAVVAYLDADNMLLSATTASKNPKEQFDFFPLTVDVEERMYAAGRIPGSFFRREGRPSTDAILTCRLIDRPLRPSFVDGLRNEIQVVVTILSVDPNDLYDVLAINAASASTQLGGLPFSGPIGGVRVALIDGTWVAFPTVEQLERAVFDMVIAGRIVGTDDEGKPDVAIMMVEAEATENVIELVECGAQAPTESIVAQGLEVAKPFIAALCTAQQELADVVSSRQAKPPVEYPTFPDYGDDVYYSVASMATDELAAALTIGAKLERDQRTNEIKTQVLERLAGTYEGREKELGAAFRSLTKKLVRQRILTNHFRIDGRGITDIRALSAEVAVVPRAHGSALFERGETQILGVTTLDMVKMAQQIDSLGPETSKRYMHHYNFPPFSTGETGRVGSPKRREIGHGALAERALVPVLPSVEEFPYAIRQVSEALGSNGSTSMGSVCASTLALLNAGVPLKAPVAGIAMGLVSDDVEFDGGTERRFVTLTDILGAEDAFGDMDFKCAGTKDFVTALQLDTKLDGIPSQVLAGALAQAKDARLTILEVMAEAIDRPDEMSPYAPRVITIKVPVDKIGEVIGPKGKVINAITEETGAQISIEDDGTVFVGATDGLSAQAAINKINAIANPQLPTVGERFLGTVVKITEFGAFVSLLPGRDGLVHISKLGKGKRIAKVEDVVNVGDKLRVEIADIEKRGKISLVLVADDDSATVPAAPADAGAAQEFGSGTAPADAATASS

SEQ ID NO: 1997 - DNA, 3361 bp, Mus musculus
  CDS (11)..(2362)
cgggggggtcatggcggcccgcaggctgtgctgcttgtgcccgtgcctccgaccgctgggctgcggccccctaggccggcccgggcggaatcgggcactcagctatttgcagatgcgagcgctgtggagcagcaccggatccagagcggtgactgtagacctgggacacagaaaattagaaatatcctctgggaaactggcaagatttgctgatggctgtgctgtgatacagtcaggtgatactgcagtaatggtcacagcagtcagcaaaacaaaaccttcaccttcccaattcatgccgttggtggtggactaccgacagaaggctgctgcagcaggcagaatccccacaaactaccttagaagggagattggctcctctgacagagaggttcttacaagtcgagtaatagatcgttcaattcgccctctctttccagccggctatttttatgatactcaggttctctgtaatctgctagcagtagatggcatcaatgaacctgatatcctagcagttaatggtgcttctgtagccctctccttatcagatatcccttggaatggacctgttggggcagtacgaataggaatgattgatggagaatgtgtcgttaacccaacaaggagagaaatgtcttctagcactttaaatttagtagttgccggagcgcctaaaagccaaattgttatgttggaagcctctgcagaaaatattctacagcaggacttttgccatgctatcaaagttggggtgaagtatacacagcagataattcagggcatccagcagttggtaaaagaaatcggtgttgccaagaggacaccgcagaagatatttactccttctgcagagattgtgaagtacacgaagataattgccatggagaaactctatgcggtttttacagattatgaacatgataaagtttccagggatgaagctgttaacaagataagattagatacagaggagcatctaaaggaaaaatttccagaggttgaccaatttgaaataatagaatccttcaacattgttgcaaaggaggttttccgaagtattattttgaatgaatacaaaaggtgtgatggaagagatctgacttcacttaggaatataagttgtgaggtcgatatgtttaaaacacttcatggatcagcattatttcagagaggacaaacacaggtactctgtactgttacatttgattcattagaatccagtattaagtcagatcaaattataacagctataaatggggtaaaagataaaaatttcatgctgcactatgagttccctccttatgcaaccaatgaaaccggcaaagttactggtgtgaatcgaagagaacttggacatggtgctcttgccgagaaagctttgtgtcctgttattcccaaagattttccttttaccataagagttacatctgaagtcctcgaatcaaatgggtcatcttctatggcatctgcatgtggtggaagtttggcattaatggatgcaggggtcccaatttcatctgctgttgcaggtgtagcagtgggattggttaccaaaaccaatccagagaaaggtgaaatagaagactaccgtttgctaacagatattctgggaattgaagattataatggtgacatggatttcaaaatagccggtacaaataaaggaataactgcattacaggctgatattaagttacctggagtaccaattaaaattataatggaagccatccaacaagcgtcagtggcaaagaaggagatactgcagataatgaacaaaacgatttcaaaacctcgagcatcaagaaaagaaaatggaccagttgtagaaacagtaaaggttccattatcaaaacgagcaaaattcgttgggcctggtggatatcacttaaaaaaactccaggctgagacaggtgtaacaattagtcaggttgatgaagaaaccttctccatatttgcaccaacacctactgcaatgcatgaagcaagagatttcattacagaaatttgcagagatgatcaagagcaacaattagaatttggagcagtttataccgcgacaataactgaaatcagagacactggagtgatggtaaaactgtatccaaacatgactgcagtgctgcttcataattcacaacttgaccaacgaaagattaaacatcccactgccctaggactagaggttggccaagaaattcaggtcaaatactttggccgtgatccagctgatggaagaatgaggctttctcgtaaagtacttcagtctccagctacaactgctctcaaaactctaaatgatagaagcagcattgtaatgggagagcctgtctcacagtcatctaactctaacccttgactccttttgaaataatattcaatggcaatattctgtggagcaaattttaacagtcctgcttactgtgtagatttatatataatttgagtataattatttgtattaaaatgatcatgtgccttttttatttcaggagcaacctatatttgcttattcttatttggattaaatcaataaatatttattattaaaagtaagctatttttatatcttagggaagaatacctttctgttcctataattgtaaactattgaaaaataatagatcatgtataccttcctaaggatcttttttataccttccttctcttcatatatagtaatggccactctcattagttcaacaactgtgcttgcctattactatcttacacactagaagttggcattttgaaagccagaacctagttcttcaaagcaattacacatttaattgggaggagctgatttgattcagttgctaatgattcgtctttcaaattggtaataagatcataaatactgtgaaatgaatcctataaatggaattcttgctagagtaacttgttttttttaattacctaatataaaaattacacactcatggaacagaactaggtcattcttcatattatgtaattggcagtgtgtgaatatttttggtgtaagaatgagaggaatcagtcagtataaagattattgatataatgtctagaaataactgataactgtcaaatccatcgcctttttatttatttatttatttatttttctgagacagggtccctagaaccattggaccaggcaggcctggaactgaaatccacctgtctggcaccacatcactcaaaggagtgagccaccgtacccagctaattgctgtcatttaaaacatgctaatagtccacaagaagtaaatactacatcatttagactgtgttccttttataatcttataaaaaatatatgtgaatttttgatttgggatttatttatattaaatatgtacttgttcaagcc

SEQ ID NO: 1998 - protein, 783 aa, Mus musculus
MAARRLCCLCPCLRPLGCGPLGRPGRNRALSYLQMRALWSSTGSRAVTVDLGHRKLEISSGKLARFADGCAVIQSGDTAVMVTAVSKTKPSPSQFMPLVVDYRQKAAAAGRIPTNYLRREIGSSDREVLTSRVIDRSIRPLFPAGYFYDTQVLCNLLAVDGINEPDILAVNGASVALSLSDIPWNGPVGAVRIGMIDGECVVNPTRREMSSSTLNLVVAGAPKSQIVMLEASAENILQQDFCHAIKVGVKYTQQIIQGIQQLVKEIGVAKRTPQKIFTPSAEIVKYTKIIAMEKLYAVFTDYEHDKVSRDEAVNKIRLDTEEHLKEKFPEVDQFEIIESFNIVAKEVFRSIILNEYKRCDGRDLTSLRNISCEVDMFKTLHGSALFQRGQTQVLCTVTFDSLESSIKSDQIITAINGVKDKNFMLHYEFPPYATNETGKVTGVNRRELGHGALAEKALCPVIPKDFPFTIRVTSEVLESNGSSSMASACGGSLALMDAGVPISSAVAGVAVGLVTKTNPEKGEIEDYRLLTDILGIEDYNGDMDFKIAGTNKGITALQADIKLPGVPIKIIMEAIQQASVAKKEILQIMNKTISKPRASRKENGPVVETVKVPLSKRAKFVGPGGYHLKKLQAETGVTISQVDEETFSIFAPTPTAMHEARDFITEICRDDQEQQLEFGAVYTATITEIRDTGVMVKLYPNMTAVLLHNSQLDQRKIKHPTALGLEVGQEIQVKYFGRDPADGRMRLSRKVLQSPATTALKTLNDRSSIVMGEPVSQSSNSNP

SEQ ID NO: 1999 - DNA, 2574 bp, Mus musculus
  CDS (9)..(2360)
tgggtgtcatggcggcctgcaggctgtgctgcttgtgcccgtgcctccgaccgctgggctgcggccccctcggccggcccgggcggaatcgggcactcagctatttgcagatgcgagcgttgtggagcagcaccggatccagagcggtgactgtagacctgggacacagaaaattagaaatatcctctgggaaactggcaagatttgctgatggctgtgctgtgatacagtcaggcgatactgcagtaatggtcacggcagtcagcaaaacaaaagcttcgccttcccaattcatgccgttggtggtggactaccgacagaaggctgctgcagcaggcagaatccccacaaactaccttagaagggagattggctcctctgacagagaggttcttacaagtcgagtaatagatcgttcaattcgccctctctttccagccggctatttttatgatactcaggttctctgtaatctgctagcagtagatggcatcaatgaacctgatatcctagcagttaatggtgcttctgtagccctctccttatcagatatcccttggaatggacctgttggggcagtacgaataggaatgattgatggagaatgtgtcgttaacccaacaaggagagaaatgtcttctagcactttaaatttagtagttgccggagcacctaaaagccaaattgttatgttggaagcctctgcagaaaatattctacagcaggacttttgccatgctatcaaagttggggtgaagtatacacagcagataattcagggcatccagcagttggtaaaagaaatcggtgttgccaagaggacaccgcagaagatatttactccttctgcagagattgtgaagtacacgaagataattgccatggagaaactctatgcggtttttacagattatgaacatgataaagtttccagggatgaagctgttaacaagataagattagatacagaggagcatctaaaggaaaaatttccagaggttgaccaatttgaaataatagaatccttcaacattgttgcaaaggaggttttccgaagtattattttgaatgaatacaaaaggtgtgatggaagagatctgacttcacttaggaatataagttgtgaggtcgatatgtttaaaacacttcatggatcagcattatttcagagaggacaaacacaggtactctgtactgttacatttgattcattagaatccagtattaagtcagatcaaattataacagctataaatggggtaaaagataaaaatttcatgctgcactatgagttccctccttatgcaaccaatgaaaccggcaaagttactggtgtgaatcgaagagaacttggacatggtgctcttgccgagaaagctttgtgtcctgttattcccaaagattttccttttaccataagagttacatctgaagtcctcgaatcaaatgggtcatcttctatggcatctgcatgtggtggaagtttggcattaatggatgcaggggtcccaatttcatctgctgttgcaggtgtagcagtgggattggttaccaaaaccaatccagagaaaggtgaaatagaagactaccgtttgctaacagatattctgggaattgaagattataatggtgacatggatttcaagatagccggtacaaataaaggaataactgcattacaggctgatattaagttacctggagtaccaattaaaattataatggaagccatccaacaagcgtcagtggcaaagaaggagatactgcagataatgaacaaaacgatttcaaaacctcgagcatcaagaaaagaaaatggaccagttgtagaaacagtaaaggttccattatcaaaacgagcaaaattcgttgggcctggtggatatcacttaaaaaaactccaggctgagacaggtgtaacaattagtcaggttgatgaagaaaccttctccatatttgcaccaacacctactgcaatgcatgaagcaagagatttcaatacagaaatttgcagagatgatcaagagcaacaattagaatttggagcagtttataccgcgacaataactgaaatcagagacactggagtgatggtaaaactgtatccaaacatgactgcagtgctgcttcataattcacaacttgaccaacgaaagattaaacatcccactgccctaggactagaggttggccaagaaattcaggtcaaatactttggccgtgatccagctgatggaagaatgaggctttctcgtaaagtacttcagtctccagctacaactgctctcaaaactctaaatgatagaagcagcattgtaatgggagagcctgtctcacagtcatctaactctaacccttgactccttttgaaataatattcaatggcgatattctgtggagcaaattttaacagtcctgcttactgtgtagatttatatataatttgagtataattatttgtattaaaatgatcatgtgccttttttatttcaggagcaacctatatttgcttattcttatttggattaaatcaataaatatttattattaaaaataagctatttttatatcttg

SEQ ID NO: 2000 - protein, 783 aa, Mus musculus
MAACRLCCLCPCLRPLGCGPLGRPGRNRALSYLQMRALWSSTGSRAVTVDLGHRKLEISSGKLARFADGCAVIQSGDTAVMVTAVSKTKASPSQFMPLVVDYRQKAAAAGRIPTNYLRREIGSSDREVLTSRVIDRSIRPLFPAGYFYDTQVLCNLLAVDGINEPDILAVNGASVALSLSDIPWNGPVGAVRIGMIDGECVVNPTRREMSSSTLNLVVAGAPKSQIVMLEASAENILQQDFCHAIKVGVKYTQQIIQGIQQLVKEIGVAKRTPQKIFTPSAEIVKYTKIIAMEKLYAVFTDYEHDKVSRDEAVNKIRLDTEEHLKEKFPEVDQFEIIESFNIVAKEVFRSIILNEYKRCDGRDLTSLRNISCEVDMFKTLHGSALFQRGQTQVLCTVTFDSLESSIKSDQIITAINGVKDKNFMLHYEFPPYATNETGKVTGVNRRELGHGALAEKALCPVIPKDFPFTIRVTSEVLESNGSSSMASACGGSLALMDAGVPISSAVAGVAVGLVTKTNPEKGEIEDYRLLTDILGIEDYNGDMDFKIAGTNKGITALQADIKLPGVPIKIIMEAIQQASVAKKEILQIMNKTISKPRASRKENGPVVETVKVPLSKRAKFVGPGGYHLKKLQAETGVTISQVDEETFSIFAPTPTAMHEARDFNTEICRDDQEQQLEFGAVYTATITEIRDTGVMVKLYPNMTAVLLHNSQLDQRKIKHPTALGLEVGQEIQVKYFGRDPADGRMRLSRKVLQSPATTALKTLNDRSSIVMGEPVSQSSNSNP

SEQ ID NO: 2001 - DNA, 3420 bp, Mus musculus
  CDS (11)..(2362)
cgggggtgtcatggcggcctgcaggctgtgctgcttgtgcccgtgcctccgaccgctgggctgcggccccctaggccggcccgggcggaatcgggcactcagctatttgcagatgcgagcgctgtggagcagcaccggatccagagcggtgactgtagacctgggacacagaaaattagaaatatcctctgggaaactggcaagatttgctgatggctgtgctgtgatacagtcaggtgatactgcagtaatggtcacagcagtcagcaaaacaaaaccttcaccttcccaattcatgccgttggtggtggactaccgacagaaggctgctgcagcaggcagaatccccacaaactaccttagaagggagattggctcctctgacagagaggttcttacaagtcgagtaatagatcgttcaattcgccctctctttccagccggctatttttatgatactcaggttctctgtaatctgctagcagtagatggcatcaatgaacctgatatcctagcagttaatggtgcttctgtagccctctccttatcagatatcccttggaatggacctgttggggcagtacgaataggaatgattgatggagaatgtgtcgttaacccaacaaggagagaaatgtcttctagcactttaaatttagtagttgccggagcacctaaaagccaaattgttatgttggaagcctctgcagaaaatattctacagcaggacttttgccatgctatcaaagttggggtgaagtatacacagcagataattcagggcatccagcagttggtaaaagaaatcggtgttgccaagaggacaccgcagaagatatttactccttctgcagagattgtgaagtacacgaagataattgccatggagaaactctatgcggtttttacagattatgaacatgataaagtttccagggatgaagctgttaacaagataagattagatacagaggagcatctaaaggaaaaatttccagaggttgaccaatttgaaataatagaatccttcaacattgttgcaaaggaggttttccgaagtattattttgaatgaatacaaaaggtgtgatggaagagatctgacttcacttaggaatataagttgtgaggtcgatatgtttaaaacacttcatggatcagcattatttcagagaggacaaacacaggtactctgtactgttacatttgattcattagaatccagtattaagtcagatcaaattataacagctataaatggggtaaaagataaaaatttcatgctgcactatgagttccctccttatgcaaccaatgaaaccggcaaagttactggtgtgaatcgaagagaacttggacatggtgctcttgccgagaaagctttgtgtcctgttattcccaaagattttccttttaccataagagttacatctgaagtcctcgaatcaaatgggtcatcttctatggcatctgcatgtggtggaagtttggcattaatggatgcaggggtcccaatttcatctgctgttgcaggtgtagcagtgggattggttaccaaaaccaatccagagaaaggtgaaatagaagactaccgtttgctaacagatattctgggaattgaagattataatggtgacatggatttcaaaatagccggtacaaataaaggaataactgcattacaggctgatattaagttacctggagtaccaattaaaattataatggaagccatccaacaagcgtcagtggcaaagaaggagatactgcagataatgaacaaaacgatttcaaaacctcgagcatcaagaaaagaaaatggaccagttgtagaaacagtaaaggttccattatcaaaacgagcaaaattcgttgggcctggtggatatcacttaaaaaaactccaggctgagacaggtgtaacaattagtcaggttgatgaagaaaccttctccatatttgcaccaacacctactgcaatgcatgaagcaagagatttcattacagaaatttgcagagatgatcaagagcaacaattagaatttggagcagtttataccgcgacaataactgaaatcagagacactggagtgatggtaaaactgtatccaaacatgactgcagtgctgcttcataattcacaacttgaccaacgaaagattaaacatcccactgccctaggactagaggttggccaagaaattcaggtcaaatactttggccgtgatccagctgatggaagaatgaggctttctcgtaaagtacttcagtctccagctacaactgctctcaaaactctaaatgatagaagcagcattgtaatgggagagcctgtctcacagtcatctaactctaacccttgactccttttgaaataatattcaatggcaatattctgtggagcaaattttaacagtcctgcttactgtgtagatttatatataatttgagtataattatttgtattaaaatgatcatgtgccttttttatttcaggagcaacctatatttgcttattcttatttggattaaatcaataaatatttattattaaaagtaagctatttttatatcttagggaagaatacctttctgttcctataattgtaaactattgaaaaataatagatcatgtataccttcctaaggatcttttttataccttccttctcttcatatatagtaatggccactctcattagttcaacaactgtgcttgcctattactatcttacacactagaagttggcattttgaaagccagaacctagttcttcaaagcaattacacatttaattgggaggagctgatttgattcagttgctaatgattcgtctttcaaattggtaataagatcataaatactgtgaaatgaatcctataaatggaattcttgctagagtaacttgttttttttaattacctaatataaaaattacacactcatggaacagaactaggtcattcttcatattatgtaattggcagtgtgtgaatatttttggtgtaagaatgagaggaatcagtcagtataaagattattgatataatgtctagaaataactgataactgtcaaatccatcgcctttttatttatttatttatttatttttctgagacagggtccctagaaccattggaccaggcaggcctggaactgaaatccacctgtctggcaccacatcactcaaaggagtgagccaccgtacccagctaattgctgtcatttaaaacatgctaatagtccacaaaaagtaaatactacatcatttagactgtgttccttttataatcttataaaaaatatatgtgaatttttgatttgggatttatttatattaaatatgtacttgttcaagccaaagatttttaaggtatgtttatacttaagtcagtaaacattattctgtgtaaaacacc

SEQ ID NO: 2002 - protein, 783 aa, Mus musculus
MAACRLCCLCPCLRPLGCGPLGRPGRNRALSYLQMRALWSSTGSRAVTVDLGHRKLEISSGKLARFADGCAVIQSGDTAVMVTAVSKTKPSPSQFMPLVVDYRQKAAAAGRIPTNYLRREIGSSDREVLTSRVIDRSIRPLFPAGYFYDTQVLCNLLAVDGINEPDILAVNGASVALSLSDIPWNGPVGAVRIGMIDGECVVNPTRREMSSSTLNLVVAGAPKSQIVMLEASAENILQQDFCHAIKVGVKYTQQIIQGIQQLVKEIGVAKRTPQKIFTPSAEIVKYTKIIAMEKLYAVFTDYEHDKVSRDEAVNKIRLDTEEHLKEKFPEVDQFEIIESFNIVAKEVFRSIILNEYKRCDGRDLTSLRNISCEVDMFKTLHGSALFQRGQTQVLCTVTFDSLESSIKSDQIITAINGVKDKNFMLHYEFPPYATNETGKVTGVNRRELGHGALAEKALCPVIPKDFPFTIRVTSEVLESNGSSSMASACGGSLALMDAGVPISSAVAGVAVGLVTKTNPEKGEIEDYRLLTDILGIEDYNGDMDFKIAGTNKGITALQADIKLPGVPIKIIMEAIQQASVAKKEILQIMNKTISKPRASRKENGPVVETVKVPLSKRAKFVGPGGYHLKKLQAETGVTISQVDEETFSIFAPTPTAMHEARDFITEICRDDQEQQLEFGAVYTATITEIRDTGVMVKLYPNMTAVLLHNSQLDQRKIKHPTALGLEVGQEIQVKYFGRDPADGRMRLSRKVLQSPATTALKTLNDRSSIVMGEPVSQSSNSNP

SEQ ID NO: 2003 - DNA, 2472 bp, Spinacia oleracea
  CDS (1)..(2472)
atgatatcttccttaactcattcttgcccacattcttctacacttccatcttcacattctaaaaactgcaagattcttctatctgcttctgctttgtctcgctatagaacttttaagactctcgcttctcttcaccgtcttcttccaacaaattcccatggaaaaaagttcaatgttagagctatggctcaaacccatgtttctcagaagcatgcccatgattcccttcaaccttactctgtcaaaatcccatttggagacagacatatcttggtcgagacaggtcatattggtagacaagctagtggtgctgttacagtgacagatggtgaaacgattgtctatactactgtttgtatgtctgatataccgagtgagccatcggattttttccctctttctgtaaattatcaagaacggttttcagcggctggtcgtacaagtggcggatttttcaaacgtgaagggaggccgaaggataacgaggttctagtttgtagacttattgataggccgttgcgtactactatgcttaagggcttctaccatgaaactcagatcttatcttgggttttgagttatgatggactgcaccctcctgatgctttggcggtcacagctgctggaatagcagtggcgctgtccgaattaccgcatacaaagccagttgctggagtccgtgttggtcttgttgggggaaagtatattgtaaaccctacaactaatgagatggaaaattctgagttggatttagtagtagcaggcacagatagcgctatcctgatgatagagggctattgcaattttctcccagaagaaaagctgctggaagctgtagaagttggacaggatgcagtgcgggcaatttgcaaagaagtggaggctttggttgaaaagtgcgggaaacctaaaatgattgatgcgataaaattgcctcctccagagctgtacaagcatgttgaggaaattgctggagatgaattggtacatgcactgcaaataaagaaaaagttaccgagaaggaaggctcttgtgtcattggaagagaaagttgtagatattcttactcagaggggctatgttggaaagagtgtggctactgtaattcccgagactctgccagatttgtatgtggatgaggaggaagatgaggaagtggtagttgatggcgaagttgatgaaggtgatgttcacataaagccatctccaaaaaattgcactcccttgttgttctctgaggtagatgtgaagctggttttcaaagagactacctcaaagtacctgcgaaaacgtatagttgagggaggacgaagaagtgatgggagaacttctgaaggggtacgtcctatcaattctagatgcggattgcttcctagagcacatggaagtgctctattcacacgaggagagacacaggctttggcagttgtgacccttggtgacaaacaaatggcacaaagaatagataccctagagggtgacgatgagtcaaagagattttaccttcagtactctttccccccatcatgtgttggagaggctggacgagttggagcacctagtaggagagaaattggtcatggaacacttgcagagagagctcttgaacctatccttccctcagaagacgaatttccatatacagtacgtgttgagagtaacatcactgaaagcaatggttcttcaagcatggcgtctgtttgtggaggatctttggcactactagatgctggggttccagtgaagtgtccaattgcagggattgctatgggtatggtcttagatacaaaagaatttggaggtgatggaactcccctcattttatcagacataacaggttctgaagatgcctctggggatatggacttcaaggtcgcaggaaatgctgattgtgttacagcattccaaatggacataaaggttggaggtatcacattgtctgttatgaagcaagcacttctgcaggctaaagatgggcggaagattattctagctgagatgtcgaaatgcttacctcctccgtcaaaaacgctttctatatatgctccattaattcatgtcatgaaagtcagaccagagaaggttaaccttataattggtagtggaggaaagacagtgaggagcattattgaagcaactggagttgaagcaattgacacacaagatgatggaacagtcaaaattactgcaagagatttggagagccttgagaaatcgaaggccatgattgctaatctgacaatggttcccaccatcggggatatttacaggaattgtgaaatcaaatcaattgctccttatggtgcttttgttgagatagctccaggacgtgaggggctttgccacataagtgaattgagtcccagttatctcgctaaagctgaagatgcatttaaagttggagaccgggtcgatgtcaaacttattgaggtgaatgagaagggccagcttgccttagtcggcgtgctttga

SEQ ID NO: 2004 - protein, 823 aa, Spinacia oleracea
MISSLTHSCPHSSTLPSSHSKNCKILLSASALSRYRTFKTLASLHRLLPTNSHGKKFNVRAMAQTHVSQKHAHDSLQPYSVKIPFGDRHILVETGHIGRQASGAVTVTDGETIVYTTVCMSDIPSEPSDFFPLSVNYQERFSAAGRTSGGFFKREGRPKDNEVLVCRLIDRPLRTTMLKGFYHETQILSWVLSYDGLHPPDALAVTAAGIAVALSELPHTKPVAGVRVGLVGGKYIVNPTTNEMENSELDLVVAGTDSAILMIEGYCNFLPEEKLLEAVEVGQDAVRAICKEVEALVEKCGKPKMIDAIKLPPPELYKHVEEIAGDELVHALQIKKKLPRRKALVSLEEKVVDILTQRGYVGKSVATVIPETLPDLYVDEEEDEEVVVDGEVDEGDVHIKPSPKNCTPLLFSEVDVKLVFKETTSKYLRKRIVEGGRRSDGRTSEGVRPINSRCGLLPRAHGSALFTRGETQALAVVTLGDKQMAQRIDTLEGDDESKRFYLQYSFPPSCVGEAGRVGAPSRREIGHGTLAERALEPILPSEDEFPYTVRVESNITESNGSSSMASVCGGSLALLDAGVPVKCPIAGIAMGMVLDTKEFGGDGTPLILSDITGSEDASGDMDFKVAGNADCVTAFQMDIKVGGITLSVMKQALLQAKDGRKIILAEMSKCLPPPSKTLSIYAPLIHVMKVRPEKVNLIIGSGGKTVRSIIEATGVEAIDTQDDGTVKITARDLESLEKSKAMIANLTMVPTIGDIYRNCEIKSIAPYGAFVEIAPGREGLCHISELSPSYLAKAEDAFKVGDRVDVKLIEVNEKGQLALVGVL

SEQ ID NO: 2005 - DNA, 2223 bp, Streptomyces antibioticus
  CDS (1)..(2223): transl_table=11
gtggagaacgagacccactacgccgaggccgtcatcgacaacggcgccttcggcacccgcaccatccgcttcgagacgggccgcctggccaagcaggccgccggctccgccgtggcgtacctggacgacgacaccatggtgctgtcggccaccaccgcctccaagaaccccaaggaccagctcgacttcttccccctcacggtggacgtcgaggagcggatgtacgccgccggcaagatccccggcagcttcttccgccgtgagggccgtccctccgaggacgccatcctcacctgccgcctgatcgaccgcccgctgcgcccgtccttcaagaagggcctgcgcaacgagatccaggtcgtcgccacgatcatggcgctcaaccccgaccacctgtacgacgtcgtggcgatcaacgccgcctccgcgtccacgcagctcgccggtctgcccttctccggcccgtacggcggcgtccgcgtcgcgctgatccgcggccagtgggtggccttcccgacgcacaccgagctcgaggacgccgtcttcgacatggtcgtcgcgggccgcgtcctggaggacggcgacgtcgcgatcatgatggtcgaggccgaggccaccgagaagaccgtccagctcgtcaaggacggcgccgaggccccgaccgaagaggtcgtcgccgccggtctggacgccgcgaagcccttcatcaaggtgctctgcaaggcgcaggccgacctcgccgccaaggccgccaagccgaccggtgagttccccgttccttcctcgactaccaggacgacgtctgaggcgctgtccgccgccgtccgcccggagctgtccgccgcgctgaccatcgccggcaagcaggaccgcgaggccgagctggaccgcgtcaaggcgctcgccgccgagaagctcctgccggagttcgagggccgcgagaaggagatctccgccgcgtaccgtccctggccaagcagctcgtccgctgagcgcgtgatcaaggagaagaagcgcatcgacggccgcggtgtcacggacatccgtacgctcgccgccgaggtcgaggccatcccgcgcgtgcacggctcggcgctgttcgagcgtggcgagacccagatcctgggcgtcaccaccctcaacatgctccgcatggagcagcagctcgacaccctctccccggtgacgcgcaagccctacatgcacaactacaacttcccgccgatctccgtcggcgagaccggccgcgtgggctcccccaagcgccgcgagatcggccacggcgccctcgccgagcgcgccatcgtgccggtcctgccgacccgcgaggagttcccctacgcgatccgccaggtgtccgaggccctcggctccaacggctcgacgtccatgggctcggtctgcgcctccaccatgtcgctgctgaacgccggtgtgccgctcaaggcccccgtcgccggtatcgccatgggcctgatctcccaggagatcaacggcgagacgcactacgtcgccctcaccgacatcctcggtgcggaggacgccttcggcgacatggacttcaaggtcgccggcaccaaggagttcgtcaccgccctccagctcgacaccaagctggacggcatccccgcctccgtcctggccgccgccctcaagcaggcccgtgacgcccgcctccacatcctcgacgtgatgatggaagcgatcgacacgccggacgagatgtcccccaacgccccgcggatcatcaccgtcaagatccccgtggacaagatcggcgaggtcatcggcccgaagcgacagatgatcaaccagatccaggaggacaccggcgccgagatcacgatcgaggacgacggcaccatctacatcggtgccgccgacggcccggccgccgaggccgcccgcgccacgatcaacggcatcgccaacccgaccagtccggaggtcggcgagcgcatcctgggatcggtcgtcaagaccaccaccttcggcgcgttcgtctcgctgctcccgggcaaggacggtctgctgcacatctcgcagatccgcaagctcgccggcggcaagcgcgtggagaacgtcgaggacgtcctcggtgtgggccagaaggtccaggtcgagatcgccgagatcgactcccgcggcaagctctccctcatccccgtgatcgagggcgaggaagccgcctcggacgagaagaaggacgacgccgagcagtga

SEQ ID NO: 2006 - protein, 740 aa, Streptomyces antibioticus
MENETHYAEAVIDNGAFGTRTIRFETGRLAKQAAGSAVAYLDDDTMVLSATTASKNPKDQLDFFPLTVDVEERMYAAGKIPGSFFRREGRPSEDAILTCRLIDRPLRPSFKKGLRNEIQVVATIMALNPDHLYDVVAINAASASTQLAGLPFSGPYGGVRVALIRGQWVAFPTHTELEDAVFDMVVAGRVLEDGDVAIMMVEAEATEKTVQLVKDGAEAPTEEVVAAGLDAAKPFIKVLCKAQADLAAKAAKPTGEFPVPSSTTRTTSEALSAAVRPELSAALTIAGKQDREAELDRVKALAAEKLLPEFEGREKEISAAYRPWPSSSSAERVIKEKKRIDGRGVTDIRTLAAEVEAIPRVHGSALFERGETQILGVTTLNMLRMEQQLDTLSPVTRKPYMHNYNFPPISVGETGRVGSPKRREIGHGALAERAIVPVLPTREEFPYAIRQVSEALGSNGSTSMGSVCASTMSLLNAGVPLKAPVAGIAMGLISQEINGETHYVALTDILGAEDAFGDMDFKVAGTKEFVTALQLDTKLDGIPASVLAAALKQARDARLHILDVMMEAIDTPDEMSPNAPRIITVKIPVDKIGEVIGPKRQMINQIQEDTGAEITIEDDGTIYIGAADGPAAEAARATINGIANPTSPEVGERILGSVVKTTTFGAFVSLLPGKDGLLHISQIRKLAGGKRVENVEDVLGVGQKVQVEIAEIDSRGKLSLIPVIEGEEAASDEKKDDAEQ

SEQ ID NO: 2007 - DNA, 2352 bp, Homo sapiens
  CDS (1)..(2352)
atggcggcctgcaggtactgctgctcgtgcctccggctccggcccctgagcgatggtcctttccttctgccacggcgggatcgggcactcacccagttgcaagtgcgagcactatggagtagcgcagggtctcgagctgtggccgtggacttaggcaacaggaaattagaaatatcttctggaaagctggccagatttgcagatggctctgctgtagtacagtcaggtgacactgcagtaatggtcacagcggtcagtaaaacaaaaccttccccttcccagtttatgcctttggtggttgactacagacaaaaagctgctgcagcaggtagaattcccacaaactatctgagaagagagattggtacttctgataaagaaattctaacaagtcgaataatagatcgttcaattagaccgctctttccagctggctacttctatgatacacaggttctgtgtaatctgttagcagtagatggtgtaaatgagcctgatgtcctagcaattaatggcgcttccgtagccctctcattatcagatattccttggaatggacctgttggggcagtacgaataggaataattgatggagaatatgttgttaacccaacaagaaaagaaatgtcttctagtactttaaatttagtggttgctggagcacctaaaagtcagattgtcatgttggaagcctctgcagagaacattttacagcaggacttttgccatgctatcaaagtgggagtgaaatatacccaacaaataattcagggcattcagcagttggtaaaagaaactggtgttaccaagaggacacctcagaagttatttaccccttcgccagagattgtgaaatatactcataaacttgctatggagagactctatgcagtttttacagattacgagcatgacaaagtttccagagatgaagctgttaacaaaataagattagatacggaggaacaactaaaagaaaaatttccagaagccgatccatatgaaataatagaatccttcaatgttgttgcaaaggaagtttttagaagtattgttttgaatgaatacaaaaggtgcgatggtcgggatttgacttcacttaggaatgtaagttgtgaggtagatatgtttaaaacccttcatggatcagcattatttcaaagaggacaaacacaggtgctttgtaccgttacatttgattcattagaatctggtattaagtcagatcaagttataacagctataaatgggataaaagataaaaatttcatgctgcactacgagtttcctccttatgcaactaatgaaattggcaaagtcactggtttaaatagaagagaacttgggcatggtgctcttgctgagaaagctttgtatcctgttattccccgagattttcctttcaccataagagttacatctgaagtcctagagtcaaatgggtcatcttctatggcatctgcatgtggcggaagtttagcattaatggattcaggggttccaatttcatctgctgttgcaggcgtagcaataggattggtcaccaaaaccgatcctgagaagggtgaaatagaagattatcgtttgctgacagatattttgggaattgaagattacaatggtgacatggacttcaaaatagctggcactaataaaggaataactgcattacaggctgatattaaattacctggaataccaataaaaattgtgatggaggctattcaacaagcttcagtggcaaaaaaggagatattacagatcatgaacaaaactatttcaaaacctcgagcatctagaaaagaaaatggacctgttgtagaaactgttcaggttccattatcaaaacgagcaaaatttgttggacctggtggctataacttaaaaaaacttcaggctgaaacaggtgtaactattagtcaggtggatgaagaaacgttttctgtatttgcaccaacacccagtgctatgcatgaggcaagagacttcattactgaaatctgcaaggatgatcaggagcagcaattagaatttggagcagtatataccgccacaataactgaaatcagagatactggtgtaatggtaaaattatatccaaatatgactgcggtactgcttcataacacacaacttgatcaacgaaagattaaacatcctactgccctaggattagaagttggccaagaaattcaggtgaaatactttggacgtgacccagccgatggaagaatgaggctttctcgaaaagtgcttcagtcgccagctacaaccgtggtcagaactttgaatgacagaagtagtattgtaatgggagaacctatttcacagtcatcatctaattctcagtga

SEQ ID NO: 2008 - protein, 783 aa, Homo sapiens
MAACRYCCSCLRLRPLSDGPFLLPRRDRALTQLQVRALWSSAGSRAVAVDLGNRKLEISSGKLARFADGSAVVQSGDTAVMVTAVSKTKPSPSQFMPLVVDYRQKAAAAGRIPTNYLRREIGTSDKEILTSRIIDRSIRPLFPAGYFYDTQVLCNLLAVDGVNEPDVLAINGASVALSLSDIPWNGPVGAVRIGIIDGEYVVNPTRKEMSSSTLNLVVAGAPKSQIVMLEASAENILQQDFCHAIKVGVKYTQQIIQGIQQLVKETGVTKRTPQKLFTPSPEIVKYTHKLAMERLYAVFTDYEHDKVSRDEAVNKIRLDTEEQLKEKFPEADPYEIIESFNVVAKEVFRSIVLNEYKRCDGRDLTSLRNVSCEVDMFKTLHGSALFQRGQTQVLCTVTFDSLESGIKSDQVITAINGIKDKNFMLHYEFPPYATNEIGKVTGLNRRELGHGALAEKALYPVIPRDFPFTIRVTSEVLESNGSSSMASACGGSLALMDSGVPISSAVAGVAIGLVTKTDPEKGEIEDYRLLTDILGIEDYNGDMDFKIAGTNKGITALQADIKLPGIPIKIVMEAIQQASVAKKEILQIMNKTISKPRASRKENGPVVETVQVPLSKRAKFVGPGGYNLKKLQAETGVTISQVDEETFSVFAPTPSAMHEARDFITEICKDDQEQQLEFGAVYTATITEIRDTGVMVKLYPNMTAVLLHNTQLDQRKIKHPTALGLEVGQEIQVKYFGRDPADGRMRLSRKVLQSPATTVVRTLNDRSSIVMGEPISQSSSNSQ

SEQ ID NO: 2009 - DNA, 2316 bp, Drosophila melanogaster
  CDS (1)..(2316)
atggccatgattttcacacggaaatcgctgaagctgctcaactatcgcctcaaatgcctaagtttgtcctgcccaggaggaaggagaggaatccaaagcagttccaacggagaagcgccctccgtggaagtcaacttcagcaatggacgtaacatgaccttcagttccggccgcctggcgagatttgcgaatggaacagctgtgtgccaaatgggcgataccgccgtcatggtcaccgcggtggccaaggcgaagccaaatcccggccagggattcatgcctctggtggttgactaccgactgaaaaacgccgcctctggcagaatacccatgaactttatgcgccgcgaactgggcccctcggaaaaagagatcctgtccgcccgccttatcgaccgttcgctacgcccgctcttccacaaagattatcgcacggagacacagctggtgtgcaacatgttggctatggacgcggtgcacagtccggatgtgcttgcaatcaatgccgcttccatggcgctatctctaagtgacattccctggaatggacccattggagctgtgcgcgttggcctctgcgacggcgaggtgctgatcaaccccacgcgccgggagctgcagacttcgcaactggatttggtagtctccgccaccaaacaaaacctcgtcgttatgttggagggcaaggggaatgtggttcttcagcaggaccttctaaaggctatcaaacaagggactcgtgaggcccaattcattatccacgagatcgagcgactgcagaaggcctatggtcgacagaagcgcgaagtggaagtggctgccgaagtagatcccgaactggggaaagccgttcgtagcatgtgcgaaatgcggctgagagagatcttccaggattcgacgcacgacaagatgtctcgtgacaatgcggttaacgaggtgcgctccaacgttattgacaaggtgtggagttcgtttccggataccgaaccgtcgcttattaccgagcagttcaaccagaccagtagaaccatttttcgcgaactgatctttgagcggggtctgcgttgcgatggacgagattacgaccagctgaggaacatctcctgccaggtggacatgtacaagcctctccacggatccgccctattccagcgcggtcagacgcaggtcttctgcacggttagcttggactcgcaggaaagcgcaatgaaacttgactcgttggctgctttagatagcggtggcctgaaggccaagaactttatgctgcactatgagttcccgccctatgccacgggtgaagtgggtcggattggtccagtgggtcgccgggaaatgggccacggagccttggcggagagatcgttgcttcccaccctgccgaatgattatccctttaccgtaagactcacctctgaagtcctggaatccaatgggagcagtagcatggccagcgtttgcggtggctccttggcccttatggacgccggcgttccagtgagcgcacctgcggcaggtgtggccattggcctggtcacaaagttcgagaacgacgacactaagcacctgcaggactaccgcattctcaccgacatcctgggcatcgaagattacatgggcgacatggacatgaaggtggctggcacgagaaaaggcttcaccgccatccaggcggacctcaagatcccgggaattcctcttaaggttgtgatggaatcgctacaaaaggccaccgatgccaaatctaatattctggacatcatgagtgaggctattagggaacctcgaaaataccccaaggagagctggccagtgagtgaaaccctaactgtagagccgcaacagagggcgcagttaattggtcccagcggccttcacatgaagcggatttacttggaaacgggcacctccctaacagcagtcgatgagacccatttcaatgtttttgctccttcgcaagcagccatggatgaggccaaggagctgatcgagggctacatggtgaaggaacgagtgccggacctggagttcggcggaatctacactgccaaaatcaccgaattgcgagacaccggagtaatggtcatcctctatcccagtatgccacccgctttgctgcacaactcgcagctggatcagcgcaagatagcccatccctctaccctaaacctggaagtgggtcaggagatccaggtcaagtactttggccgcgatcccgtctccggctttatgcgtctttcgcgaaaggttctccaagggcccgccctgggaatcccccgttcgctcaacaaatctgccggagagagcggaacgtga

SEQ ID NO: 2010 - protein, 771 aa, Drosophila melanogaster
MAMIFTRKSLKLLNYRLKCLSLSCPGGRRGIQSSSNGEAPSVEVNFSNGRNMTFSSGRLARFANGTAVCQMGDTAVMVTAVAKAKPNPGQGFMPLVVDYRLKNAASGRIPMNFMRRELGPSEKEILSARLIDRSLRPLFHKDYRTETQLVCNMLAMDAVHSPDVLAINAASMALSLSDIPWNGPIGAVRVGLCDGEVLINPTRRELQTSQLDLVVSATKQNLVVMLEGKGNVVLQQDLLKAIKQGTREAQFIIHEIERLQKAYGRQKREVEVAAEVDPELGKAVRSMCEMRLREIFQDSTHDKMSRDNAVNEVRSNVIDKVWSSFPDTEPSLITEQFNQTSRTIFRELIFERGLRCDGRDYDQLRNISCQVDMYKPLHGSALFQRGQTQVFCTVSLDSQESAMKLDSLAALDSGGLKAKNFMLHYEFPPYATGEVGRIGPVGRREMGHGALAERSLLPTLPNDYPFTVRLTSEVLESNGSSSMASVCGGSLALMDAGVPVSAPAAGVAIGLVTKFENDDTKHLQDYRILTDILGIEDYMGDMDMKVAGTRKGFTAIQADLKIPGIPLKVVMESLQKATDAKSNILDIMSEAIREPRKYPKESWPVSETLTVEPQQRAQLIGPSGLHMKRIYLETGTSLTAVDETHFNVFAPSQAAMDEAKELIEGYMVKERVPDLEFGGIYTAKITELRDTGVMVILYPSMPPALLHNSQLDQRKIAHPSTLNLEVGQEIQVKYFGRDPVSGFMRLSRKVLQGPALGIPRSLNKSAGESGT

SEQ ID NO: 2011 - DNA, 2151 bp, Aster yellows witches
  CDS (1)..(2151): transl_table=11
gtgttaaaaaaagtttttgaaactactaatttaaaagattcttttcaagttgaaataggaacttacgccagaaacgttgattcttctattttagtgcgctaccaagatacagtggttcttacaactatggtttttagtcgtaaacccaataatcttgattttttacctcttactgttatttatcaagaaaaattatacgctgctggaaaaattcctggcagttttttaacgccgcgaaggggcggttccaacgaccacgaaatcctcacttcacgcctcattgaccgttcattacgcccattattccctgattattttcaacaagaagttcaagtaattaatacagttttaagcttagaccctgattttaaaagcgaacttgcctctatgcttggaagctctctttctttattgatttctgaaatacccttttttgaagccatttctggagtttatgtaggaaaaatcaacaatgaatttatcatcaatcccactttgcaacaacttgccaattctactctacatttgattgttgcaggcaccaaacacaacgttactatgatagaagcacacgccaatgaagttagcgaacaagactttttagaagccattaattttgcacaccaatacattaaaaaactgtgcttatttcaagaaaatatcaagcaacaatttgcacctgtcaaaatgacaaaaaccttgcatcaaactgaacaaattcaacaacaatccttttttgctaaaaaccattcccaagttaaacaagctattttaagttgcaatagcaaaaatgatttacaacaattaaaagaacaaatcctagaccaagccaaacaaactccttttttcaaaactattgacgctattactgtttttgattacgaagcccacaaaaaacatttacaaataacagaaaacttatttcaaaaattatccaaacaagaaatgcgttctttaattttacaagaaaaaatacgaccagataaaagagaattagaagaaataagaaccctcgaatcccaaattgatttgttgccccgcgctcatggttctgctttgtttaccagaggaaaaactcaaagccttgctgcagtgaccttgggctgtttatcagaaagcaaaattattgacggtctaagtgacgaacaaaataaacgttttatgcttcattataactttcctcctttttcagttggtgcagttggtcgttatactgctcctagcagacgagaaatcggacacggcactcttgccgaaaaagccatatctcaagttttgcccgaagaaaaagattttccctacactattagagtagtttctgaaattctagaatctaacggttcttcttctcaagccactgtttgctcttcttctttggcattaatggcatcaggggttcctttaaaaaaagccgttgcaggaatttcagtaggattagtttttgaccaagaaaccaataaatacgttattttaagtgatatccaaggtttagaagaccacgttggagacatggatttaaaaatagcaggtaccaacaaaggaattactgctttacaaatggatcttaaaatccaagggatcccttttaaaattttgcaagaagcttttttacaagccaaaaaaggacgccttcatattttagaacaaatgaaccaaacaatttctcaacctcgtttagaagtttcaaagtacgcccctaaagtttgtatgatgcaaataaaaccagaaaaaattcgtgatattatcggaagtggtggcaaaatcatcaatcaaattattgaatctcatgatggtgtaaaaattgatattgaacaagacggacgcgtttttgtaatgcattccaacttagaaacagttaaaaaaacagtcgcttttattgaaagtttaatccaagaaattcaagtaggcacttgctatcaagcctctattttacgttttttaagtgataaacaaggaaaaatgattggagctgtggcacaagtttgtccaggaatcgaagggcttatccacgttaataaaatgaaatttcaaaaaatcaccgatgttttaaaaataggtgaaacagttttggttaaatgcaccaaaatcaacgaacgcggaagaattgattttttgcttttgcccaaaaaaacacaagaaaaaaactcttag

SEQ ID NO: 2012 - protein, 716 aa, Aster yellows witches
MLKKVFETTNLKDSFQVEIGTYARNVDSSILVRYQDTVVLTTMVFSRKPNNLDFLPLTVIYQEKLYAAGKIPGSFLTPRRGGSNDHEILTSRLIDRSLRPLFPDYFQQEVQVINTVLSLDPDFKSELASMLGSSLSLLISEIPFFEAISGVYVGKINNEFIINPTLQQLANSTLHLIVAGTKHNVTMIEAHANEVSEQDFLEAINFAHQYIKKLCLFQENIKQQFAPVKMTKTLHQTEQIQQQSFFAKNHSQVKQAILSCNSKNDLQQLKEQILDQAKQTPFFKTIDAITVFDYEAHKKHLQITENLFQKLSKQEMRSLILQEKIRPDKRELEEIRTLESQIDLLPRAHGSALFTRGKTQSLAAVTLGCLSESKIIDGLSDEQNKRFMLHYNFPPFSVGAVGRYTAPSRREIGHGTLAEKAISQVLPEEKDFPYTIRVVSEILESNGSSSQATVCSSSLALMASGVPLKKAVAGISVGLVFDQETNKYVILSDIQGLEDHVGDMDLKIAGTNKGITALQMDLKIQGIPFKILQEAFLQAKKGRLHILEQMNQTISQPRLEVSKYAPKVCMMQIKPEKIRDIIGSGGKIINQIIESHDGVKIDIEQDGRVFVMHSNLETVKKTVAFIESLIQEIQVGTCYQASILRFLSDKQGKMIGAVAQVCPGIEGLIHVNKMKFQKITDVLKIGETVLVKCTKINERGRIDFLLLPKKTQEKNS

SEQ ID NO: 2013 - DNA, 2163 bp, Drosophila melanogaster
  CDS (1)..(2163)
atgaccttcagttccggccgcctggcgagatttgcgaatggaacagctgtgtgccaaatgggcgataccgccgtcatggtcaccgcggtggccaaggcgaagccaaatcccggccagggattcatgcctctggtggttgactaccgactgaaaaacgccgcctctggcagaatacccatgaactttatgcgccgcgaactgggcccctcggaaaaagagatcctgtccgcccgccttatcgaccgttcgctacgcccgctcttccacaaagattatcgcacggagacacagctggtgtgcaacatgttggctatggacgcggtgcacagtccggatgtgcttgcaatcaatgccgcttccatggcgctatctctaagtgacattccctggaatggacccattggagctgtgcgcgttggcctctgcgacggcgaggtgctgatcaaccccacgcgccgggagctgcagacttcgcaactggatttggtagtctccgccaccaaacaaaacctcgtcgttatgttggagggcaaggggaatgtggttcttcagcaggaccttctaaaggctatcaaacaagggactcgtgaggcccaattcattatccacgagatcgagcgactgcagaaggcctatggtcgacagaagcgcgaagtggaagtggctgccgaagtagatcccgaactggggaaagccgttcgtagcatgtgcgaaatgcggctgagagagatcttccaggattcgacgcacgacaagatgtctcgtgacaatgcggttaacgaggtgcgctccaacgttattgacaaggtgtggagttcgtttccggataccgaaccgtcgcttattaccgagcagttcaaccagaccagtagaaccatttttcgcgaactgatctttgagcggggtctgcgttgcgatggacgagattacgaccagctgaggaacatctcctgccaggtggacatgtacaagcctctccacggatccgccctattccagcgcggtcagacgcaggtcttctgcacggttagcttggactcgcaggaaagcgcaatgaaacttgactcgttggctgctttagatagcggtggcctgaaggccaagaactttatgctgcactatgagttcccgccctatgccacgggtgaagtgggtcggattggtccagtgggtcgccgggaaatgggccacggagccttggcggagagatcgttgcttcccaccctgccgaatgattatccctttaccgtaagactcacctctgaagtcctggaatccaatgggagcagtagcatggccagcgtttgcggtggctccttggcccttatggacgccggcgttccagtgagcgcacctgcggcaggtgtggccattggcctggtcacaaagttcgagaacgacgacactaagcacctgcaggactaccgcattctcaccgacatcctgggcatcgaagattacatgggcgacatggacatgaaggtggctggcacgagaaaaggcttcaccgccatccaggcggacctcaagatcccgggaattcctcttaaggttgtgatggaatcgctacaaaaggccaccgatgccaaatctaatattctggacatcatgagtgaggctattagggaacctcgaaaataccccaaggagagctggccagtgagtgaaaccctaactgtagagccgcaacagagggcgcagttaattggtcccagcggccttcacatgaagcggatttacttggaaacgggcacctccctaacagcagtcgatgagacccatttcaatgtttttgctccttcgcaagcagccatggatgaggccaaggagctgatcgagggctacatggtgaaggaacgagtgccggacctggagttcggcggaatctacactgccaaaatcaccgaattgcgagacaccggagtaatggtcatcctctatcccagtatgccacccgctttgctgcacaactcgcagctggatcagcgcaagatagcccatccctctgccctaaacctggaagtgggtcaggagatccaggtcaagtactttggccgcgatcccgtctccggctttatgcgtctttcgcgaaaggttctccaagggcccgccctgggaatcccccgttcgctcaacaaatctgccggagagagcggaacgtga

SEQ ID NO: 2014 - protein, 720 aa, Drosophila melanogaster
MTFSSGRLARFANGTAVCQMGDTAVMVTAVAKAKPNPGQGFMPLVVDYRLKNAASGRIPMNFMRRELGPSEKEILSARLIDRSLRPLFHKDYRTETQLVCNMLAMDAVHSPDVLAINAASMALSLSDIPWNGPIGAVRVGLCDGEVLINPTRRELQTSQLDLVVSATKQNLVVMLEGKGNVVLQQDLLKAIKQGTREAQFIIHEIERLQKAYGRQKREVEVAAEVDPELGKAVRSMCEMRLREIFQDSTHDKMSRDNAVNEVRSNVIDKVWSSFPDTEPSLITEQFNQTSRTIFRELIFERGLRCDGRDYDQLRNISCQVDMYKPLHGSALFQRGQTQVFCTVSLDSQESAMKLDSLAALDSGGLKAKNFMLHYEFPPYATGEVGRIGPVGRREMGHGALAERSLLPTLPNDYPFTVRLTSEVLESNGSSSMASVCGGSLALMDAGVPVSAPAAGVAIGLVTKFENDDTKHLQDYRILTDILGIEDYMGDMDMKVAGTRKGFTAIQADLKIPGIPLKVVMESLQKATDAKSNILDIMSEAIREPRKYPKESWPVSETLTVEPQQRAQLIGPSGLHMKRIYLETGTSLTAVDETHFNVFAPSQAAMDEAKELIEGYMVKERVPDLEFGGIYTAKITELRDTGVMVILYPSMPPALLHNSQLDQRKIAHPSALNLEVGQEIQVKYFGRDPVSGFMRLSRKVLQGPALGIPRSLNKSAGESGT

SEQ ID NO: 2015 - DNA, 2055 bp, Pasteurella multocida
  CDS (1)..(2055): transl_table=11
atggcaagtatggatgatactactgtgtttgtcacagtggttgccaaaaaagatgtgaaagaaggtcaagacttcttcccattaactgttaactatcaagagcgtacttatgctgcaggccgtattcctggtggctttttcaaacgtgaaggtcgtccttctgaaggcgaaactttaattgctcgtttaattgaccgtccaattcgtcctcttttcccagaaggtttttataacgaaatccaaatcgtggcgacagtggtgtctgttaatccgcaaatttgtccagatttagtggcaatgatcggtgcatctgcggcactttctttatcaggtgtgccatttaatggccctatcggtgcggcacgtgttggttttattgatgatcaatttgtgttaaacccaaccatgaacgagcaaaaacaaagccgtttagacttggttgtcgcgggaacagataaagcggtgttaatggtggaatctgaagccgatgtattaaccgaagaacaaatgttagctgcggtggtgtttggtcatcagcaacaacaagtggtgattgacgcgatcaaagaatttaccgcagaagccggtaaaccgcgttgggattgggtggcacctgaaccaaataccgcgttaattgaaaaagtgaaagcgattgcagaagcgcgtttaggcgaagcataccgtatcactgaaaaacaagcacgttatgaacaaattgatgcgattaaagctgatgtgattgcacaaatcacagctgaagtagcagaaggcgaagacatcagtgaagggaaaattgtcgatattttcaccgcacttgaaagccaaatcgtacgtagccgtatcattgctggtgaaccacgtattgatggtcgtacagtggatactgttcgtgcattagatatttgtactggtgttttaccacgtacacacggttctgcgattttcacccgtggtgaaacacaggcgttagctgtcgcgacattaggtacagaacgtgatgcacaaattattgatgaattaacaggtgagcgttcagatcacttcttattccactacaacttcccgccatattctgtgggtgaaaccggtatgattggttcaccaaaacgtcgtgaaattggtcatggtcgtttagcgaaacgcggtgtagctgcagtgatgccaacacttgccgagttcccgtatgtggtacgtgttgtctctgaaatcacagaatcaaatggttcttcttctatggcatcggtttgtggtgcgtctttagcattaatggatgcgggtgtaccaattaaagcggcggttgcaggtattgcaatgggcttagtcaaagaagacgaaaaatttgtggtgctttcagacatcttaggtgatgaagatcacttaggtgacatggacttcaaagtcgcgggtacacgtacgggtgtgacggcattacaaatggatatcaaaatcgaaggtatcacagcagaaatcatgcaaattgcgttaaaccaagcgaaaagcgcacgtttacacattttaggtgtgatggagcaagcgatcccagcgccacgtgcggatatttctgattttgcaccgcgtatttacactatgaaaattgatccgaagaaaatcaaagatgtgatcggtaaaggtggtgcaaccattcgtgccttaacagaagaaacaggtacctcaattgatatcgatgatgatggtacggtgaagattgctgcggttgatggcaattcagcaaaagaggtgatggcgcgtattgaagatattactgcagaagttgaagcgggtgcagtgtataaaggtaaagttactcgtttagctgattttggtgccttcgtttctatcgtaggtaacaaagaaggcttagtgcatatttctcaaatcgcggaagagcgtgttgagaaagtgagtgattatcttgcagtggggcaagaagtgactgttaaagtggttgagattgatcgtcaaggtcgtattcgtttaaccatgaaagaagttgcaccaaagcaagaacacgttgattctgttgtcgcagacgttgccgcagaagaaaacgcataa

SEQ ID NO: 2016 - protein, 684 aa, Pasteurella multocida
MASMDDTTVFVTVVAKKDVKEGQDFFPLTVNYQERTYAAGRIPGGFFKREGRPSEGETLIARLIDRPIRPLFPEGFYNEIQIVATVVSVNPQICPDLVAMIGASAALSLSGVPFNGPIGAARVGFIDDQFVLNPTMNEQKQSRLDLVVAGTDKAVLMVESEADVLTEEQMLAAVVFGHQQQQVVIDAIKEFTAEAGKPRWDWVAPEPNTALIEKVKAIAEARLGEAYRITEKQARYEQIDAIKADVIAQITAEVAEGEDISEGKIVDIFTALESQIVRSRIIAGEPRIDGRTVDTVRALDICTGVLPRTHGSAIFTRGETQALAVATLGTERDAQIIDELTGERSDHFLFHYNFPPYSVGETGMIGSPKRREIGHGRLAKRGVAAVMPTLAEFPYVVRVVSEITESNGSSSMASVCGASLALMDAGVPIKAAVAGIAMGLVKEDEKFVVLSDILGDEDHLGDMDFKVAGTRTGVTALQMDIKIEGITAEIMQIALNQAKSARLHILGVMEQAIPAPRADISDFAPRIYTMKIDPKKIKDVIGKGGATIRALTEETGTSIDIDDDGTVKIAAVDGNSAKEVMARIEDITAEVEAGAVYKGKVTRLADFGAFVSIVGNKEGLVHISQIAEERVEKVSDYLAVGQEVTVKVVEIDRQGRIRLTMKEVAPKQEHVDSVVADVAAEENA

SEQ ID NO: 2017 - DNA, 2769 bp, Arabidopsis thaliana
  CDS (1)..(2769)
atgttgacgagtcccagtaacgcacttcacagtagtactccacaattctggccacttcgccggagcaagctttgccgttcccggaatttccctcgttttcactccggcgaacgcagcagcggcggaggaggaaaattgtgctcgctctctcttctctccggaagtggcgccggtaaattcagtgtcagagctctagttaggcctgatgataccgacgacgctgactccgtcggcgatgggtctctggcttttcctaaccacgtttctgtcaaaattccattcggaaatagagagattttagttgagactggtctcatggggagacaagcaagttctgcagtcacggtcacagatggagaaactattgtctacacatccgtttgtctagctgatgttccgagtgagccatcagattttcttcccctttatgttcactatcaggagcgattctcagctgtaggtcgaactagtggtggattttttaagcgagaagggagaaccaaagatcacgaggttctgatttgtaggttgatcgatagacctctacgccccactatgcccaaaggtttctacaatgaaactcagattttatcctgggttttgagctacgatggattacacgcacctgatgctttagctgttacatctgctggaattgctgtagctctttcagaagtaccaaatgcgaaagcgattgcaggagttcgggttggtcttattgggggtgaattcattgtcaatccaaccgtgaaggagatggaagaatcacagctagatttgtttctagctggaacagatactgcaattctaacgatagagggatacagtaattttcttcctgaggaaatgcttctccaagctgttaaagttggacaggatgctgtacaggctacatgcattgctattgaagttttagcaaagaaatatggaaagcctaaaatgcttgacgctatcagattaccacctccagagctatacaagcatgtgaaagaacttgctggtgaggaattgacaaaagcgttacaaattaagagtaaaatatcgagaaggaaagccatatcgcccctggaagaaaaggtcttgacaatactgacagagaagggatacgttattgatgaggtagcttttggaaccatagaagcacaaccggatctgttggaggatgaagacgaggatgaggaagttgttcctgaaggtgaggtggaccaaggcgatgttcacattagacccatccctcggaaacctattcctttactattttctgaagtagatgtcaagctagtcttcaaagaagtatcgtcgaagcttctacgtaggcgaattgttgagggaggtaaaagaagtgatggtcggactctggatgagatccgtccaattaattcaagatgtggactgcttcccagggcacatggaagtactctgttcacacgtggggaaacacaggcactggcagttgttacgcttggtgataaacaaatggcgcagagaattgacaaccttgagggttctgatgaatacaagaggttctatcttcagtacacctttcctccatcgtctgttggtgaagttggacgaattggtgcacccagtagaagagaaataggtcatgggacactagcagagcgagcattggagaccattctacctagtgatgatgactttccttacacaatacgtgttgaaagtacagtaattgaaagcaatggttcttcaagtatggcatctgtttgtggcggttgcttggctttgcaagatgctggagttccagtcaaatgttctgttgctgggatagcaatgggaatggtttgggatactgaagaatttggaggtgatggatctccccttatcctttctgacatcactggagctgaagatgcatctggtgatatggactttaaggttgctgggaatgaagatggcgttaccgcctttcagatggacatcaaggtaggaggaattactttagagataatggaaaaggctctaatacaggcaaaagctgggcgtcgccatattcttgctgaaatggcaaagtgctcaccgcctcccacgctaagcctctcaaaatatgctccattgatacttattatgaaggttcatccaagcaaagtatactctcttattggttctggtggtaagaaagtaaagagcatcattgaagaatctggagttgaggccattgacatgcaagatgatggaactgtcaaaattatggcaatcgatgtagcgagtctagaaagggcgaaagcgattattagtggattgacaatggttccctctgttggtgatatctacaggaattgtgaaatcaagtcaatggctccttatggtgcatttgtagagatagcgcctgggcgggaaggtctttgccatatcagtgagctgagtgctgaatggcttgcaaaaccagaggatgcctataaagtaggagaccgcattgacgtcaaattaatagaggtaaatgaagagggtcagcttcgacttagtgtacgggctttacttcccgaatcagagacagacaaagacagtcagaaacaacagccggcaggtgattccaccaaagacaagagttcgcaaaggaaatatgtaaatacttcgtcaaaggaccgtgcagctgcaggagcatcaaaggtttcatctggggatgaacttgtcctgaagaagaaagatgtaaggagagcaactggtggtagtagtgacaagacaatgaatagcaatagcagtaccaacgaagaaagtttagtcaacggtgaagctacaatcagctag

SEQ ID NO: 2018 - protein, 922 aa, Arabidopsis thaliana
MLTSPSNALHSSTPQFWPLRRSKLCRSRNFPRFHSGERSSGGGGKLCSLSLLSGSGAGKFSVRALVRPDDTDDADSVGDGSLAFPNHVSVKIPFGNREILVETGLMGRQASSAVTVTDGETIVYTSVCLADVPSEPSDFLPLYVHYQERFSAVGRTSGGFFKREGRTKDHEVLICRLIDRPLRPTMPKGFYNETQILSWVLSYDGLHAPDALAVTSAGIAVALSEVPNAKAIAGVRVGLIGGEFIVNPTVKEMEESQLDLFLAGTDTAILTIEGYSNFLPEEMLLQAVKVGQDAVQATCIAIEVLAKKYGKPKMLDAIRLPPPELYKHVKELAGEELTKALQIKSKISRRKAISPLEEKVLTILTEKGYVIDEVAFGTIEAQPDLLEDEDEDEEVVPEGEVDQGDVHIRPIPRKPIPLLFSEVDVKLVFKEVSSKLLRRRIVEGGKRSDGRTLDEIRPINSRCGLLPRAHGSTLFTRGETQALAVVTLGDKQMAQRIDNLEGSDEYKRFYLQYTFPPSSVGEVGRIGAPSRREIGHGTLAERALETILPSDDDFPYTIRVESTVIESNGSSSMASVCGGCLALQDAGVPVKCSVAGIAMGMVWDTEEFGGDGSPLILSDITGAEDASGDMDFKVAGNEDGVTAFQMDIKVGGITLEIMEKALIQAKAGRRHILAEMAKCSPPPTLSLSKYAPLILIMKVHPSKVYSLIGSGGKKVKSIIEESGVEAIDMQDDGTVKIMAIDVASLERAKAIISGLTMVPSVGDIYRNCEIKSMAPYGAFVEIAPGREGLCHISELSAEWLAKPEDAYKVGDRIDVKLIEVNEEGQLRLSVRALLPESETDKDSQKQQPAGDSTKDKSSQRKYVNTSSKDRAAAGASKVSSGDELVLKKKDVRRATGGSSDKTMNSNSSTNEESLVNGEATIS

SEQ ID NO: 2019 - DNA, 2847 bp, Arabidopsis thaliana
  CDS (1)..(2847)
atgattggttctgaaaatatcagttgggaaattaaaacccggttcaatttgaaaccggaaacaagactagctacgcctcacacagagtcacaggagaagctcccgcgtctgcaaggaacggataaagtctctctctttctcactctctctctctctctctctctcaaagaagaagaagatgttgacgagtcccacagcggcggaggaggaaaattgtgctcgctctctcttctctccggaagtggcgccggtaaattcagtgtcagagctctagttaggcctgatgataccgacgacgctgactccgtcggcgatgggtctctggcttttcctaaccacgtttctgtcaaaattccattcggaaatagagagattttagttgagactggtctcatggggagacaagcaagttctgcagtcacggtcacagatggagaaactattgtctacacatccgtttgtctagctgatgttccgagtgagccatcagattttcttcccctttatgttcactatcaggagcgattctcagctgtaggtcgaactagtggtggattttttaagcgagaagggagaaccaaagatcacgaggttctgatttgtaggttgatcgatagacctctacgccccactatgcccaaaggtttctacaatgaaactcagattttatcctgggttttgagctacgatggattacacgcacctgatgctttagctgttacatctgctggaattgctgtagctctttcagaagtaccaaatgcgaaagcgattgcaggagttcgggttggtcttattgggggtgaattcattgtcaatccaaccgtgaaggagatggaagaatcacagctagatttgtttctagctggaacagatactgcaattctaacgatagagggatacagtaattttcttcctgaggaaatgcttctccaagctgttaaagttggacaggatgctgtacaggctacatgcattgctattgaagttttagcaaagaaatatggaaagcctaaaatgcttgacgctatcagattaccacctccagagctatacaagcatgtgaaagaacttgctggtgaggaattgacaaaagcgttacaaattaagagtaaaatatcgagaaggaaagccatatcgtccctggaagaaaaggtcttgacaatactgacagagaagggatatgttattgatgaggtagcttttggaaccatagaagcacaaccggatctgttggaggatgaagacgaggatgaggaagttgttcctgaaggtgaggtggaccaaggcgatgttcacattagacccatccctcggaaacctattcctttactattttctgaagtagatgtcaagctagtcttcaaagaagtatcgtcgaagcttctacgtaggcgaattgttgagggaggtaaaagaagtgatggtcggactctggatgagattcgtccaattaattcaagatgtggactgcttcccagggcacatggaagtactctgttcacacgtggggaaacacaggcactggcagttgttacgcttggtgataaacaaatggcgcagagaattgacaaccttgagggttctgatgaatacaagaggttctatcttcagtacacttttcctccatcgtctgttggtgaagttggacgaattggtgcacccagtagaagagaaataggtcatgggacactagcagagcgagcattggagaccattctacctagtgatgatgactttccttacacaatacgtgttgaaagtacagtaattgaaagcaatggttcttcaagtatggcatctgtttgtggcggttgcttggctttgcaagatgctggagttccagtcaaatgttctgttgctgggatagcaatgggaatggtttgggatactgaagaatttggaggtgatggatctccccttatcctttctgacatcactggagctgaagatgcatctggtgatatggactttaaggttgctgggaatgaagatggcgttaccgcctttcagatggacatcaaggtaggaggaattactttagagataatggaaaaggctctaatacaggcaaaagctgggcgtcgccatattcttgctgaaatggcaaagtgctcaccgcctcccacgctaagcctctcaaaatatgctccattgatacttattatgaaggttcatccaagcaaagtatactctcttattggttctggaggtaagaaagtaaagagcatcattgaagaatctggagttgaggccattgacatgcaagatgatggaactgtcaaaattatggcaattgatgtagcgagtctagaaagggcgaaagcgattattagtggattgacaatggttccctctgttggtgatatctacaggaattgtgaaatcaagtcaatggctccttatggtgcatttgtagagatagcgcctgggcgggaaggtctttgccatatcagtgagctgagtgctgaatggcttgcaaaaccagaggatgcctataaagtaggagaccgcattgacgtcaaattaatagaggtaaatgaaaagggtcagcttcgacttagtgtacgggctttacttcccgaatcagagacagacaaagacagtcagaaacaacagccggcaggtgattctaccaaagacaagagttcgcaaaggaaatatgtaaatacttcgtcaaaggaccgtgcagctgcaggagcatcaaaggtttcatctggggatgaacttgtcctgaagaagaaagatgtaaggagagcaactggtggtagtagtgacaagacaatgaatagcaatagcagtaccaacgaagaaagtttagtcaacggtgaagctacaatcagctag

SEQ ID NO: 2020 - protein, 948 aa, Arabidopsis thaliana
MIGSENISWEIKTRFNLKPETRLATPHTESQEKLPRLQGTDKVSLFLTLSLSLSLKEEEDVDESHSGGGGKLCSLSLLSGSGAGKFSVRALVRPDDTDDADSVGDGSLAFPNHVSVKIPFGNREILVETGLMGRQASSAVTVTDGETIVYTSVCLADVPSEPSDFLPLYVHYQERFSAVGRTSGGFFKREGRTKDHEVLICRLIDRPLRPTMPKGFYNETQILSWVLSYDGLHAPDALAVTSAGIAVALSEVPNAKAIAGVRVGLIGGEFIVNPTVKEMEESQLDLFLAGTDTAILTIEGYSNFLPEEMLLQAVKVGQDAVQATCIAIEVLAKKYGKPKMLDAIRLPPPELYKHVKELAGEELTKALQIKSKISRRKAISSLEEKVLTILTEKGYVIDEVAFGTIEAQPDLLEDEDEDEEVVPEGEVDQGDVHIRPIPRKPIPLLFSEVDVKLVFKEVSSKLLRRRIVEGGKRSDGRTLDEIRPINSRCGLLPRAHGSTLFTRGETQALAVVTLGDKQMAQRIDNLEGSDEYKRFYLQYTFPPSSVGEVGRIGAPSRREIGHGTLAERALETILPSDDDFPYTIRVESTVIESNGSSSMASVCGGCLALQDAGVPVKCSVAGIAMGMVWDTEEFGGDGSPLILSDITGAEDASGDMDFKVAGNEDGVTAFQMDIKVGGITLEIMEKALIQAKAGRRHILAEMAKCSPPPTLSLSKYAPLILIMKVHPSKVYSLIGSGGKKVKSIIEESGVEAIDMQDDGTVKIMAIDVASLERAKAIISGLTMVPSVGDIYRNCEIKSMAPYGAFVEIAPGREGLCHISELSAEWLAKPEDAYKVGDRIDVKLIEVNEKGQLRLSVRALLPESETDKDSQKQQPAGDSTKDKSSQRKYVNTSSKDRAAAGASKVSSGDELVLKKKDVRRATGGSSDKTMNSNSSTNEESLVNGEATIS

SEQ ID NO: 2021 - DNA, 2352 bp, Homo sapiens
  CDS (1)..(2352)
atggcggcctgcaggtactgctgctcgtgcctccggctccggcccctgagcgatggtcctttccttctgccacggcgggatcgggcactcacccagttgcaagtgcgagcactatggagtagcgcagggtctcgagctgtggccgtggacttaggcaacaggaaattagaaatatcttctggaaagctggccagatttgcagatggctctgctgtagtacagtcaggtgacactgcagtaatggtcacagcggtcagtaaaacaaaaccttccccttcccagtttatgcctttggtggttgactacagacaaaaagctgctgcagcaggtagaattcccacaaactatctgagaagagaggttggtacttctgataaagaaattctaacaagtcgaataatagatcgttcaattagaccgctctttccagctggctacttctatgatacacaggttctgtgtaatctgttagcagtagatggtgtaaatgagcctgatgtcctagcaattaatggcgcttccgtagccctctcattatcagatattccttggaatggacctgttggggcagtacgaataggaataattgatggagaatatgttgttaacccaacaagaaaagaaatgtcttctagtactttaaatttagtggttgctggagcacctaaaagtcagattgtcatgttggaagcctctgcagagaacattttacagcaggacttttgccatgctatcaaagtgggagtgaaatatacccaacaaataattcagggcattcagcagttggtaaaagaaactggtgttaccaagaggacacctcagaagttatttaccccttcgccagagattgtgaaatatactcataaacttgctatggagagactctatgcagtttttacagattacgagcatgacaaagtttccagagatgaagctgttaacaaaataagattagatacggaggaacaactaaaagaaaaatttccagaagccgatccatatgaaataatagaatccttcaatgttgttgcaaaggaagtttttagaagtattgttttgaatgaatacaaaaggtgcgatggtcgggatttgacttcacttaggaatgtaagttgtgaggtagatatgtttaaaacccttcatggatcagcattatttcaaagaggacaaacacaggtgctttgtaccgttacatttgattcattagaatctggtattaagtcagatcaagttataacagctataaatgggataaaagataaaaatttcatgctgcactacgagtttcctccttatgcaactaatgaaattggcaaagtcactggtttaaatagaagagaacttgggcatggtgctcttgctgagaaagctttgtatcctgttattccccgagattttcctttcaccataagagttacatctgaagtcctagagtcaaatgggtcatcttctatggcatctgcatgtggcggaagtttagcattaatggattcaggggttccaatttcatctgctgttgcaggcgtagcaataggattggtcaccaaaaccgatcctgagaagggtgaaatagaagattatcgtttgctgacagatattttgggaattgaagattacaatggtgacatggacttcaaaatagctggcactaataaaggaataactgcattacaggctgatattaaattacctggaataccaataaaaattgtgatggaggctattcaacaagcttcagtggcaaaaaaggagatattacagatcatgaacaaaactatttcaaaacctcgagcatctagaaaagaaaatggacctgttgtagaaactgttcaggttccattatcaaaacgagcaaaatttgttggacctggtggctataacttaaaaaaacttcaggctgaaacaggtgtaactattagtcaggtggatgaagaaacgttttctgtatttgcaccaacacccagtgctatgcatgaggcaagagacttcattactgaaatctgcaaggatgatcaggagcagcaattagaatttggagcagtatataccgccacaataactgaaatcagagatactggtgtaatggtaaaattatatccaaatatgactgcggtactgcttcataacacacaacttgatcaacgaaagattaaacatcctactgccctaggattagaagttggccaagaaattcaggtgaaatactttggacgtgacccagccgatggaagaatgaggctttctcgaaaagtgcttcagtcgccagctacaaccgtggtcagaactttgaatgacagaagtagtattgtaatgggagaacctatttcacagtcatcatctaattctcagtga

SEQ ID NO: 2022 - protein, 783 aa, Homo sapiens
MAACRYCCSCLRLRPLSDGPFLLPRRDRALTQLQVRALWSSAGSRAVAVDLGNRKLEISSGKLARFADGSAVVQSGDTAVMVTAVSKTKPSPSQFMPLVVDYRQKAAAAGRIPTNYLRREVGTSDKEILTSRIIDRSIRPLFPAGYFYDTQVLCNLLAVDGVNEPDVLAINGASVALSLSDIPWNGPVGAVRIGIIDGEYVVNPTRKEMSSSTLNLVVAGAPKSQIVMLEASAENILQQDFCHAIKVGVKYTQQIIQGIQQLVKETGVTKRTPQKLFTPSPEIVKYTHKLAMERLYAVFTDYEHDKVSRDEAVNKIRLDTEEQLKEKFPEADPYEIIESFNVVAKEVFRSIVLNEYKRCDGRDLTSLRNVSCEVDMFKTLHGSALFQRGQTQVLCTVTFDSLESGIKSDQVITAINGIKDKNFMLHYEFPPYATNEIGKVTGLNRRELGHGALAEKALYPVIPRDFPFTIRVTSEVLESNGSSSMASACGGSLALMDSGVPISSAVAGVAIGLVTKTDPEKGEIEDYRLLTDILGIEDYNGDMDFKIAGTNKGITALQADIKLPGIPIKIVMEAIQQASVAKKEILQIMNKTISKPRASRKENGPVVETVQVPLSKRAKFVGPGGYNLKKLQAETGVTISQVDEETFSVFAPTPSAMHEARDFITEICKDDQEQQLEFGAVYTATITEIRDTGVMVKLYPNMTAVLLHNTQLDQRKIKHPTALGLEVGQEIQVKYFGRDPADGRMRLSRKVLQSPATTVVRTLNDRSSIVMGEPISQSSSNSQ

SEQ ID NO: 2023 - DNA, 2352 bp, Mus musculus
  CDS (1)..(2352)
atggcggcctgcaggctgtgctgcttgtgcccgtgcctccgaccgctgggctgcggccccctcggccggcccgggcggaatcgggcactcagctatttgcagatgcgagcgttgtggagcagcaccggatccagagcggtgactgtagacctgggacacagaaaattagaaatatcctctgggaaactggcaagatttgctgatggctgtgctgtgatacagtcaggcgatactgcagtaatggtcacggcagtcagcaaaacaaaagcttcgccttcccaattcatgccgttggtggtggactaccgacagaaggctgctgcagcaggcagaatccccacaaactaccttagaagggagattggctcctctgacagagaggttcttacaagtcgagtaatagatcgttcaattcgccctctctttccagccggctatttttatgatactcaggttctctgtaatctgctagcagtagatggcatcaatgaacctgatatcctagcagttaatggtgcttctgtagccctctccttatcagatatcccttggaatggacctgttggggcagtacgaataggaatgattgatggagaatgtgtcgttaacccaacaaggagagaaatgtcttctagcactttaaatttagtagttgccggagcacctaaaagccaaattgttatgttggaagcctctgcagaaaatattctacagcaggacttttgccatgctatcaaagttggggtgaagtatacacagcagataattcagggcatccagcagttggtaaaagaaatcggtgttgccaagaggacaccgcagaagatatttactccttctgcagagattgtgaagtacacgaagataattgccatggagaaactctatgcggtttttacagattatgaacatgataaagtttccagggatgaagctgttaacaagataagattagatacagaggagcatctaaaggaaaaatttccagaggttgaccaatttgaaataatagaatccttcaacattgttgcaaaggaggttttccgaagtattattttgaatgaatacaaaaggtgtgatggaagagatctgacttcacttaggaatataagttgtgaggtcgatatgtttaaaacacttcatggatcagcattatttcagagaggacaaacacaggtactctgtactgttacatttgattcattagaatccagtattaagtcagatcaaattataacagctataaatggggtaaaagataaaaatttcatgctgcactatgagttccctccttatgcaaccaatgaaaccggcaaagttactggtgtgaatcgaagagaacttggacatggtgctcttgccgagaaagctttgtgtcctgttattcccaaagattttccttttaccataagagttacatctgaagtcctcgaatcaaatgggtcatcttctatggcatctgcatgtggtggaagtttggcattaatggatgcaggggtcccaatttcatctgctgttgcaggtgtagcagtgggattggttaccaaaaccaatccagagaaaggtgaaatagaagactaccgtttgctaacagatattctgggaattgaagattataatggtgacatggatttcaaaatagccggtacaaataaaggaataactgcattacaggctgatattaagttacctggagtaccaattaaaattataatggaagccatccaacaagcgtcagtggcaaagaaggagatactgcagataatgaacaaaacgatttcaaaacctcgagcatcaagaaaagaaaatggaccagttgtagaaacagtaaaggttccattatcaaaacgagcaaaattcgttgggcctggtggatatcacttaaaaaaactccaggctgagacaggtgtaacaattagtcaggttgatgaagaaaccttctccatatttgcaccaacacctactgcaatgcatgaagcaagagatttcattacagaaatttgcagagatgatcaagagcaacaattagaatttggagcagtttataccgcgacaataactgaaatcagagacactggagtgatggtaaaactgtatccaaacatgactgcagtgctgcttcataattcacaacttgaccaacgaaagattaaacatcccactgccctaggactagaggttggccaagaaattcaggtcaaatactttggccgtgatccagctgatggaagaatgaggctttctcgtaaagtacttcagtctccagctacaactgctctcaaaactctaaatgatagaagcagcattgtaatgggagagcctgtctcacagtcatctaactctaacccttga

SEQ ID NO: 2024 - protein, 783 aa, Mus musculus
MAACRLCCLCPCLRPLGCGPLGRPGRNRALSYLQMRALWSSTGSRAVTVDLGHRKLEISSGKLARFADGCAVIQSGDTAVMVTAVSKTKASPSQFMPLVVDYRQKAAAAGRIPTNYLRREIGSSDREVLTSRVIDRSIRPLFPAGYFYDTQVLCNLLAVDGINEPDILAVNGASVALSLSDIPWNGPVGAVRIGMIDGECVVNPTRREMSSSTLNLVVAGAPKSQIVMLEASAENILQQDFCHAIKVGVKYTQQIIQGIQQLVKEIGVAKRTPQKIFTPSAEIVKYTKIIAMEKLYAVFTDYEHDKVSRDEAVNKIRLDTEEHLKEKFPEVDQFEIIESFNIVAKEVFRSIILNEYKRCDGRDLTSLRNISCEVDMFKTLHGSALFQRGQTQVLCTVTFDSLESSIKSDQIITAINGVKDKNFMLHYEFPPYATNETGKVTGVNRRELGHGALAEKALCPVIPKDFPFTIRVTSEVLESNGSSSMASACGGSLALMDAGVPISSAVAGVAVGLVTKTNPEKGEIEDYRLLTDILGIEDYNGDMDFKIAGTNKGITALQADIKLPGVPIKIIMEAIQQASVAKKEILQIMNKTISKPRASRKENGPVVETVKVPLSKRAKFVGPGGYHLKKLQAETGVTISQVDEETFSIFAPTPTAMHEARDFITEICRDDQEQQLEFGAVYTATITEIRDTGVMVKLYPNMTAVLLHNSQLDQRKIKHPTALGLEVGQEIQVKYFGRDPADGRMRLSRKVLQSPATTALKTLNDRSSIVMGEPVSQSSNSNP

SEQ ID NO: 2025 - DNA, 2124 bp, Buchnera aphidicola subsp
  CDS (1)..(2124): transl_table=11
ttgctaaatccaattgtacgcaaatttcaatacggtcaacatacaatcactttagaaacgggtgtaatagctcgacaggctaacgctgctgttatggctagtatggatgaaactgcagtttttgtaactgttgttggacaaaaaaaaatacacacaggacagaaattttttccacttactgttaattatcaagaacgtacatatgctgcgggtcggatacctggcggtttttttagaagggaaggacgccctagtgaaaatgaaatattaactgctcgattaatagatcgaccccttcgaccgttattcccgaaaaaatttcttaatgaaattcaaataattgctacagtagtatcagttaacccccagattaatcctgatataatttccatcataggcgcatctgcggctcttagtttatcggggattccattttatggaccagtaggtgcagctagagtaggttatatcaataatcaatatattttaaatcctattagtgatgatatgaaaaatagttcgttagatttagtcgtatcgggcactcaaaatgcaattcttatggttgaagctgaatctaaaatacttagcgaggaaaaaattctcggagctattatattcggacatcagcaacaacaagtggtaattaataatattcgttctctatcaaatgaagcgagcaagcttccttgggttatatcttacccagaaacaaacaaaacattagaattaaaaattatcaattcatttgaaaaaaatataagtgatgcttacgtcatttttaacaaacaagatagaattgaaaaattaaatagtattaaggaaaatataattaaattatttttagatgaaaattcaaacatagatacgctagaaatagaagatatttttcaaaaaattgagaaaaaagttgtgcgtaaacgtatattaagcaaccaaacacgtattgatggacgagaaaaagatatgattcgtgcattagatgttcgtactggtattttacctagaacacatggttccgctttgtttactagaggagaaacacaatccttagtttctgtaactttaggtacatctcgagatgcacaaaatttagatgaattattaggagacagaatagataattttttatttcattacaattttcctccttattctgttggggaaataggaatggttggatcccctaaaagacgagagattggtcatggtcgtcttgctaagagaagtcttttagccgtcatgccgacattagagaattttccttatactatcagagtagtatctgaaattactgaatctaacggctcttcttctatggcttctgtttgtggtgcttctttagctttaatggatgctggggtaccgattaaatctgctgttgctggaatttcgatgggtttagttaaagaaggaaatcaacacgtattgctttcagatattttaggagatgaagatcatttaggagacatggattttaaagttgctggtacagaagaagggattacagcattacagatggatatgaagatagagggtattactaatgaaattatacattcagctttaaatgaggcaagattagctagacttcatattttaaacgtaatgaaccaagcattaaatgagtctagaagtgaaatctctgaatttgcaccccgtattcacatcataaaaataaatcctgaaaaaattaaggatgttataggcaaaggtggttctgttattcgcatgttaactgaagaaactggaacaattattgaaattgaagatgacggtacagtaaaaatatcatctacagttaaagaaaaagcaaaaaatgctattcgtagaattaaagaaataacagctgaaattgaagtaggtcgtatttattctggaaaagtcactcgtattgttgattttggtgcttttgtttcgattggtttgggaaaagaaggtttagtacatatttcacaaatttctgataaaagagtagataaagtatctaatcatttaaaaattgatcaaataatatctgtaaaagtactggaaatagaccgtcaaggtcgtttaagattaagtattaaagaaatagacagttctattctttctaataaatcaataaataattctattatctga

SEQ ID NO: 2026 - protein, 707 aa, Buchnera aphidicola subsp
MLNPIVRKFQYGQHTITLETGVIARQANAAVMASMDETAVFVTVVGQKKIHTGQKFFPLTVNYQERTYAAGRIPGGFFRREGRPSENEILTARLIDRPLRPLFPKKFLNEIQIIATVVSVNPQINPDIISIIGASAALSLSGIPFYGPVGAARVGYINNQYILNPISDDMKNSSLDLVVSGTQNAILMVEAESKILSEEKILGAIIFGHQQQQVVINNIRSLSNEASKLPWVISYPETNKTLELKIINSFEKNISDAYVIFNKQDRIEKLNSIKENIIKLFLDENSNIDTLEIEDIFQKIEKKVVRKRILSNQTRIDGREKDMIRALDVRTGILPRTHGSALFTRGETQSLVSVTLGTSRDAQNLDELLGDRIDNFLFHYNFPPYSVGEIGMVGSPKRREIGHGRLAKRSLLAVMPTLENFPYTIRVVSEITESNGSSSMASVCGASLALMDAGVPIKSAVAGISMGLVKEGNQHVLLSDILGDEDHLGDMDFKVAGTEEGITALQMDMKIEGITNEIIHSALNEARLARLHILNVMNQALNESRSEISEFAPRIHIIKINPEKIKDVIGKGGSVIRMLTEETGTIIEIEDDGTVKISSTVKEKAKNAIRRIKEITAEIEVGRIYSGKVTRIVDFGAFVSIGLGKEGLVHISQISDKRVDKVSNHLKIDQIISVKVLEIDRQGRLRLSIKEIDSSILSNKSINNSII

SEQ ID NO: 2027 - DNA, 2124 bp, Buchnera aphidicola subsp
  CDS (1)..(2124): transl_table=11
ttgctaaatcccattgttcgtaaatttcaatatggccaacatacaattaccttagaaacaggtataatggctcgccaagcaacagcagctgtcatggctagcatggatgatacagctgtttttgttactgttgttggagaaaaaacaacaaattctagtcaaaaattttttcctcttacagtaaattaccaggaaagaacatatgctgtaggtcgaatacctggaggtttttttagaagagaaggacgtccaagtgaaaatgaaatattaactgctcgactaattgatagaccaattcgacccttatttccaaaaggtttttgtaatgaaattcaaataattgctacggtagtatcagttaatcctcaaataaatcctgacataatttctattataggtgcttcagcagcattaagtctatcaggaataccattttatggaccaattggagctgctagagttggttttgttaataatcaatatgttttaaatcctacaattgacgatatgaaatctagttttttagatttagttgtctcgggtactcaaaatgctgttttaatggtagaagcagagtcaaaagtgttaagtgaagataaaattcttggtgctattatgtttggtcatcaacaacaacaagttgttattaacaatattcgttctttatctaatgaagccagcaaattaccttggataatatcttatcctgaaataaatacagaattagaattaaaaataaccaaattggctgaaaaagacataagtaatgcttatttaatatttaataagcaagaaagatatgaaaaactaaattttcttaaggaagaaataataaaattattttttagtgaaaactcaaatatagatatatcagagattgaagatatttttgaaaaaattgaaaaaaatattgtaagaaaacgtatactaaataatgaaaatcgtattgatggacgagagaaagatatgattcgtgcattagatatcagaacaggtgtattaccgcgtacacatggttcttctttattcactagaggtgaaacgcaatctttagtctctgttaccttaggaacatctcgagatgcacaaaatttagatgaattactaggggataaaacagataattttttatttcactataatttccctccttattctgttggagaaattggaatagtaggatcacctaaaagacgagaaattggacatggtcgtttagctaaaagaagtcttttagcagttatgcctaaattagatgattttccttatactataagaatagtatctgaaattactgaatcgaatggttcttcttctatggcttctgtttgcggtgcatctttggctttaatggatgctggagtacctataaaatctgctgttgcaggaatatctatgggtctagttaaggagggagataaatatgttttactttcagatattttaggtgatgaagatcatttaggagatatggactttaaagtttctggaacagaagaaggtattaccgctttacaaatggatataaaaatagaagggattactaatgaaattatgcgtattgcactaaataaagcgaaatctgctcgattgcatattttaaatgttatgaaacaagcattaagtaaacctagaaacgaaatttctgaatttgcacctcgtattcataaaattaaaataaaccctgaaaaaattaaagatgtaataggtaaggggggttctgtaattcgcatgttaactgaagaaacaggtacaataattgaaatagaagatgatggtacaattaagatatctgcaacaattggagaaaaagcaaaaaatgctattcgtagaattgaagaaattacagcagaaattgaagttggacgtatttattctggaaaagttactcgtattgttgattttggtgcttttatttcaataggtattggaaaagaaggattagtacatatttcacaaatttctaataaacgcgttgaaaaagtttctgatcatttgacagttgatcagataatttcagtaaaagtattggaaatagatcgtcagggtcgtttaagattaagtattaaagaagtagaaaattctattatttctaataaatctataaataatatttatatctga

SEQ ID NO: 2028 - protein, 707 aa, Buchnera aphidicola subsp
MLNPIVRKFQYGQHTITLETGIMARQATAAVMASMDDTAVFVTVVGEKTTNSSQKFFPLTVNYQERTYAVGRIPGGFFRREGRPSENEILTARLIDRPIRPLFPKGFCNEIQIIATVVSVNPQINPDIISIIGASAALSLSGIPFYGPIGAARVGFVNNQYVLNPTIDDMKSSFLDLVVSGTQNAVLMVEAESKVLSEDKILGAIMFGHQQQQVVINNIRSLSNEASKLPWIISYPEINTELELKITKLAEKDISNAYLIFNKQERYEKLNFLKEEIIKLFFSENSNIDISEIEDIFEKIEKNIVRKRILNNENRIDGREKDMIRALDIRTGVLPRTHGSSLFTRGETQSLVSVTLGTSRDAQNLDELLGDKTDNFLFHYNFPPYSVGEIGIVGSPKRREIGHGRLAKRSLLAVMPKLDDFPYTIRIVSEITESNGSSSMASVCGASLALMDAGVPIKSAVAGISMGLVKEGDKYVLLSDILGDEDHLGDMDFKVSGTEEGITALQMDIKIEGITNEIMRIALNKAKSARLHILNVMKQALSKPRNEISEFAPRIHKIKINPEKIKDVIGKGGSVIRMLTEETGTIIEIEDDGTIKISATIGEKAKNAIRRIEEITAEIEVGRIYSGKVTRIVDFGAFISIGIGKEGLVHISQISNKRVEKVSDHLTVDQIISVKVLEIDRQGRLRLSIKEVENSIISNKSINNIYI

SEQ ID NO: 2029 - DNA, 2082 bp, Buchnera aphidicola subsp
  CDS (1)..(2082): transl_table=11
ttgctaaaccctattgtacgtaaatttcaatatggtcaacatattgttacattagaaactggtataatggcaaggcaggcaactgctgctgtattaactagtatggacgatactacagtatttgtaactgtcgttggtcaaaaaaaactacaaacagaacaaaaatttttcccaatgactgtaaattatcaagaaagaacatatgcagcaggtcgtatacctggaggattttttcgacgtgagggtaggcccagcgaaaacgaaatattaattgcccgcttaatagatcgtcctattcgtccgttatttcctaaaaggttttttaatgaagttcaaattattgcaactgtagtatctttaaatcctcaagtaaacccggatatagtagcaattattggagcgtctgcagcgttaagcatatctggtatgccttttttaggtcctattggtgcagctagaatagggtatattaacaatcaatatatattaaatcctaatgtgaatgaaataaaatctagttctttagatttaattatatcaggaacagaagaatctgtattaatggttgaagcagaagcaaatatgttaaccgaagaacaaattattaatgctattaattatggacatgaacaacaaaaaatagtaattaaaaatattgaacattttgcaaaaaaagttaaaattcctgtatgggaacagtgtttatatcctgttaatgacgacttagaaaaaagaattattgaaatttctgaacaagaaatagtaaaagcatataatatttttgacaaggtgataagattagatgtattagataaaataaaatctaaagcaatagaaattataattagtgaatattctggaatagatgaatttgaaattacgtcaattatcagcaatattgaaagaaaaatagttagaaatagagttttgaaaaatagaattcgtattgacggtcgaaataaagatgaaattagaactttagatgttcgcacaggagttcttcctagagtgcatggatcagcattatttactcgtggagaaacgcaatctttagtttcagtgactttaggaacgtcacgagatgcacagaatttagatgaattgttaggtgataaaactgataattttttatttcattataattttcctccgtatgctgtaggtgaaattggaatggtaggatcacctaaacgtcgtgaaattggtcatggaaaattagctaaaagaagtatattagctgtcatgcctaaattagatttatttccgtatacaatacggattgtatcagaaattactgaatctaatggttcttcatctatggcttcggtttgtggagcttcattagcactcatggatgcaggagttcctatatcaaacgctatagctgggatagctatggggttaattaaggaaggagatgattttgtagttttaaccgatattttaggtgatgaagatcatttaggtgatatggattttaaaatttctggtagtaaaaagggaattacagcattgcaaatggacataaaagtaaaaggtattactaatgaaattatgaaattagctttatatcaagcaaaaaacgctagaatacatattcttaatattatgaaaaaatcattaaatgttcctagaaaagatatttctattttcgcgcctagaattcatactattaaaatcaatccggaaaaaataaaagatgttattggaaaaggcggttccgtaataagaatgttaactgaagaaactggtacaacaattgaaattgaagatgatggaacagtaaaaatttcagctgttatgcaagaaaaagcaaaatgtgctattcaaagaattaaagaaataactgcagaggttgaagtaggatctgtttatactggaaaggttactcgaatagtagattttggtgcgtttgtatctattgggataggaaaagaaggattagtccatatttcacaaattgctcacaaacgtgtagataaggtttcagatcatcttcgtttacatcaggaaatttttgtaaaagtattagaagtagaccgacaaggtcgtttgcgactcagtattaagggagcgaaataa

SEQ ID NO: 2030 - protein, 693 aa, Buchnera aphidicola subsp
MLNPIVRKFQYGQHIVTLETGIMARQATAAVLTSMDDTTVFVTVVGQKKLQTEQKFFPMTVNYQERTYAAGRIPGGFFRREGRPSENEILIARLIDRPIRPLFPKRFFNEVQIIATVVSLNPQVNPDIVAIIGASAALSISGMPFLGPIGAARIGYINNQYILNPNVNEIKSSSLDLIISGTEESVLMVEAEANMLTEEQIINAINYGHEQQKIVIKNIEHFAKKVKIPVWEQCLYPVNDDLEKRIIEISEQEIVKAYNIFDKVIRLDVLDKIKSKAIEIIISEYSGIDEFEITSIISNIERKIVRNRVLKNRIRIDGRNKDEIRTLDVRTGVLPRVHGSALFTRGETQSLVSVTLGTSRDAQNLDELLGDKTDNFLFHYNFPPYAVGEIGMVGSPKRREIGHGKLAKRSILAVMPKLDLFPYTIRIVSEITESNGSSSMASVCGASLALMDAGVPISNAIAGIAMGLIKEGDDFVVLTDILGDEDHLGDMDFKISGSKKGITALQMDIKVKGITNEIMKLALYQAKNARIHILNIMKKSLNVPRKDISIFAPRIHTIKINPEKIKDVIGKGGSVIRMLTEETGTTIEIEDDGTVKISAVMQEKAKCAIQRIKEITAEVEVGSVYTGKVTRIVDFGAFVSIGIGKEGLVHISQIAHKRVDKVSDHLRLHQEIFVKVLEVDRQGRLRLSIKGAK

SEQ ID NO: 2031 - DNA, 2130 bp, Photorhabdus luminescens
  CDS (1)..(2130): transl_table=11
ttgctgaatccgattgttcgtaaatttcaatatggtcaacataccgttactatcgaaactggtatgatggctcgccaggccacggctgctgtcatggtcaatatggatgacactgctgtattcgtcactgttgttggtcagaaaaaagtaaaagctggtcaggattttttcccgctgacggttaactatcaggagcgtacttacgccgcaggccgtatccctggcagcttcttccgtcgtgaaggtcgcccaggagaaggcgaaacgttggtagcccgtttgattgatcgccctttgcgtcctctgtttccggaaggttttctgaacgaagttcgaattgtagcgactgtggtttctgtcaatccacaaattaacccggatatcgttgcaatgattggcgcttctgctgcgctggcattgtctggtattccattcaatggcccgattggcgcggcccgcgttggttatattaatgatcaatatgtactgaacccaaccagtgatgagctgaaaaacagccgtctggatctggtggtttcaggtactgccggtgctgttttgatggtggagtctgaagcagatctgctgactgaagagcaaatgctgggtgcggtagtgttcggtcatgatcaacaacaagtggttattgataacattaatgcgttggctgcggaagcgggcaaagagaaatgggattgggtgccagaacctgttaaccaggcgctgcatgatcgtgtagctgaattggcagaaagccgtctgggtgatgcttatcgtatcactgagaaacaggagcgttatgctcaggttgatgctatcaaagatgaagttacagctgcgttgttggaacaggatgaaactttggaagaagcggaaatccatgaaattctgggcagcttagagaaaaatgttgttcgtagccgtgtcctgagcggtgaaccacgtattgatggccgcgaaaaagatatggttcgtgcgttggacgtacgtactggtgttctgccccgtactcacggttctgcattgtttacccgcggtgaaactcaggctctggttactgcgacgctggggacagaacgtgatgcacagatcattgatgagctgatgggcgaacgtacagatcgcttcttgctgcactataatttccctccctattctgttggtgaaacaggtatgatggggtcaccaaagcgtcgtgaaattgggcatggccgtttggctaaacgtggtgtattggcagtcatgccaaaagctaacgagttcccatacacagttcgtgtagtttctgaaattacagaatctaatggttcatcttcaatggcatctgtctgtggagcatctcttgcgttgatggatgcaggtgtgccgattaaagccgctgttgctggtattgcaatgggcttggtgaaagaaggtgataactttgttgtgctgtctgatattctgggtgacgaagatcatctgggtgacatggactttaaagtagcgggtagctgtgaaggtatcagcgcgctgcaaatggatatcaaaattgaaggtatcacccgtgaaattatgcaagttgcgttgaatcaggcaaaaggtgcgcgtttgcatatcttgagcgtgatggagcaggcaattaccactccacgtgatgatatttctcaatttgcaccacgcattcatactatcaagatcaaccctgacaagatcaaagatgttatcggtaaaggtggttcggttatccgtgcactgactgaagaaaccgggactaccattgagatcgaagatgatggcacagtgaaaattgctgcaactgatggcgaaaaagcaaaacatgcaatcagtcgtattgaagaaattactgcggagatcgaagttggccgtatttacgccggtaaggtaacccgtatcgttgatttcggcgcatttgttgctatcggtggtggtaaagaaggtctggtgcatatttcgcagattgctgataagcgtgttgagaaagtggctgactatttgcaggttggtcaggaaacatcagttaaagtactggaaattgatcgccagggccgtgttcgcctgagcatcaaagaagcaacagccggcacagctgttgaggaagcaccaccagcaccacaatcagcagaataa

SEQ ID NO: 2032 - protein, 709 aa, Photorhabdus luminescens
MLNPIVRKFQYGQHTVTIETGMMARQATAAVMVNMDDTAVFVTVVGQKKVKAGQDFFPLTVNYQERTYAAGRIPGSFFRREGRPGEGETLVARLIDRPLRPLFPEGFLNEVRIVATVVSVNPQINPDIVAMIGASAALALSGIPFNGPIGAARVGYINDQYVLNPTSDELKNSRLDLVVSGTAGAVLMVESEADLLTEEQMLGAVVFGHDQQQVVIDNINALAAEAGKEKWDWVPEPVNQALHDRVAELAESRLGDAYRITEKQERYAQVDAIKDEVTAALLEQDETLEEAEIHEILGSLEKNVVRSRVLSGEPRIDGREKDMVRALDVRTGVLPRTHGSALFTRGETQALVTATLGTERDAQIIDELMGERTDRFLLHYNFPPYSVGETGMMGSPKRREIGHGRLAKRGVLAVMPKANEFPYTVRVVSEITESNGSSSMASVCGASLALMDAGVPIKAAVAGIAMGLVKEGDNFVVLSDILGDEDHLGDMDFKVAGSCEGISALQMDIKIEGITREIMQVALNQAKGARLHILSVMEQAITTPRDDISQFAPRIHTIKINPDKIKDVIGKGGSVIRALTEETGTTIEIEDDGTVKIAATDGEKAKHAISRIEEITAEIEVGRIYAGKVTRIVDFGAFVAIGGGKEGLVHISQIADKRVEKVADYLQVGQETSVKVLEIDRQGRVRLSIKEATAGTAVEEAPPAPQSAE

SEQ ID NO: 2033 - DNA, 2106 bp, Pseudomonas putida
  CDS (1)..(2106): transl_table=11
gtgaacccggtaatcaagactttccagttcggtcaatcgaccgtcactctcgaaacgggccgtattgcccgtcaggcaaccggcgccgtgctggttaccgtcgacaacgacgtcaccgtgctggtgactgtggtaggcgccaaacaggctgatccaggcaagggtttcttcccgctgtcggttcactaccaggaaaagacctacgccgctggcaagatcccaggtggcttcttcaagcgtgaaggccgtccttccgagaaagagacgctgacctcgcgcctgatcgaccgtccgatccgtccgctgttcccggaaggcttcatgaacgaagtgcaggtcgtctgcaccgtggtttccaccagcaagaagaccgacccggacatcgctgcgatgatcggtacctcggctgccctggccatttccggtattccgttcgaaggcccgatcggcgctgcccgcgttgccttccacgaaagcactggctacctgctgaacccgacctatgagcaactggctgcctcgagcctggacatggtcgttgccggtacctccgacgctgtactgatggttgaatcggaagctcaagagctgaccgaagaccagatgctgggtgccgtactgttcgcccacgacgaattccaggctgttatccaggctgtcaaagagctggctgccgaagctggcaagccgacttgggactggaaacctgccgttgccaacaccgagctgttcaatgctatccgcgccgagttcggcgaagcggtttcgcagggttacaccatcaccgtcaaagccgaccgctacgcgcgtctgggtgagctgcgtgaccaggcggttgccaagttctccggtgaagaaggccagccttcggcttccgaagtaaaagagatcttcggcgaaatcgaataccgcaccgttcgcgaaaacatcgtcaacggcaagccacgtatcgacggccgcgacaacaagactgtacgcccgctgaacatcgaagtcggtgtgctgccgaaaactcacggttcggcactgttcacccgtggcgaaacccaggccctggtcgttgcgaccctgggtactgcccgtgatgcccaactgctggacaccctcgaaggcgagaagaaagaccccttcatgctgcactacaacttcccaccgttctcggtaggtgagtgtggccgcatgggcggtgctggccgtcgcgaaatcggccacggccgtctggcccgccgttcggttcaggccatgctgcctgctgctgacgtgttcccgtacaccatccgcgtggtttcggaaatcaccgaatccaacggttccagctccatggcttcggtctgcggtgcatccctggccctgatggacgccggtgtgccgatgaaggcgccggttgccggtatcgccatgggcctggtcaaggaaggcgacaagttcgcagtcctgactgacatcctgggtgacgaagaccacctgggcgacatggacttcaaggtagccggtaccgccaagggcgtcaccgcgctgcagatggacatcaagatcaacggcatcaccgaagagatcatggaaatcgccctgggccaagccctggaagcgcgcctgaacatcctcggccagatgaaccaggtcattggccagtcgcgtaccgaactgtcggccaacgccccgaccatgatcgcgatgaagatcgacaccgacaagatccgcgacgtcatcggtaaaggcggcgccaccattcgcgccatctgcgaagagaccaaggcttcgatcgacatcgaagacgacggctcgatcaagatcttcggcgaaaccaaggaagcggcagatgctgccaagcagcgcatcctgggcatcaccgctgaggccgagatcggcaagatctacgtcggcaaggttgagcgcattgtcgacttcggcgccttcgtcaacatcctgcctggcaaggacggtttggtgcacatctccatgctgagcgatgctcgtgtcgagaaagtcaccgacatcctcaaggaaggccaggaagttgaagtgctggtactggacgtggacaaccgcggccgtatcaagctgtcgatcaaggacgtcgctgcggccaaggcctcgggcgtctaa

SEQ ID NO: 2034 - protein, 701 aa, Pseudomonas putida
MNPVIKTFQFGQSTVTLETGRIARQATGAVLVTVDNDVTVLVTVVGAKQADPGKGFFPLSVHYQEKTYAAGKIPGGFFKREGRPSEKETLTSRLIDRPIRPLFPEGFMNEVQVVCTVVSTSKKTDPDIAAMIGTSAALAISGIPFEGPIGAARVAFHESTGYLLNPTYEQLAASSLDMVVAGTSDAVLMVESEAQELTEDQMLGAVLFAHDEFQAVIQAVKELAAEAGKPTWDWKPAVANTELFNAIRAEFGEAVSQGYTITVKADRYARLGELRDQAVAKFSGEEGQPSASEVKEIFGEIEYRTVRENIVNGKPRIDGRDNKTVRPLNIEVGVLPKTHGSALFTRGETQALVVATLGTARDAQLLDTLEGEKKDPFMLHYNFPPFSVGECGRMGGAGRREIGHGRLARRSVQAMLPAADVFPYTIRVVSEITESNGSSSMASVCGASLALMDAGVPMKAPVAGIAMGLVKEGDKFAVLTDILGDEDHLGDMDFKVAGTAKGVTALQMDIKINGITEEIMEIALGQALEARLNILGQMNQVIGQSRTELSANAPTMIAMKIDTDKIRDVIGKGGATIRAICEETKASIDIEDDGSIKIFGETKEAADAAKQRILGITAEAEIGKIYVGKVERIVDFGAFVNILPGKDGLVHISMLSDARVEKVTDILKEGQEVEVLVLDVDNRGRIKLSIKDVAAAKASGV

SEQ ID NO: 2035 - DNA, 2238 bp, Rickettsia prowazekii
  CDS (1)..(2238): transl_table=11
atgtttaatgaaataactaagagtgtcatgtggaatgggcaagtgcttgagattagtacaggtaaaatagcaaggcaagctaatgcagcagttacagtaaaaatgggtaattcaattttattatgtacgtgtgtagtagctaacaaagtgaaagatggtataggatttttccctttaacaattaattatagagaaatggcatattctgctggtaagataccaggtgggttttttaaacgtgaagggaaagcatcagatagagaaattttagtatctcgtttaatagatcgaccaattaggccattatttcatcaagcttttatgcatgaaacgcatgtaacttgcagtgttctttcatatgatcctgcaacccctgtagatatacttgcaattataggtgcatctgctgcccttagcatatcccctgccccttatctagaaatagttgctgccagtaaagtaggtttaatcaatggtgaatttgttttaaatcctacacttgaattattaaaaacaagtcagcttgatttagtagtcgcaggaacagaagattcagttatgatggttgaatcagaagcacatttactctctgaagacaaaatgttagaagccgtaaaatttggatttgaaagtttccagacagtaatcaagctaattaaagaactcgcaaaagaggctaaaaagccaaagtttgaaatgcaagatttatatccttcttcattaaagaaagaaatcgagaaattatttacaaaagaagttgaacaagcttttgagataaaatctaagcaagaacgtagcactgatttagctttaatatatgaaaaagttcttacacattttgtacgtgatatagaaaataaaaaatataataattatcaaattgaatcagctttaaaagctatttcagcagatatattacgtaataaaattttagaaaaaaatatacgtattgatggaagaagcacaacagatataagacaaattgcttgtgaagtaggtttattaccgtcagcacacggatcagctttatttactagaggtgaaacgcaaagtttagttagtactacatttggtactagtttagatgaacagatagttgacagtttagagggtgaatataaagaacgttttatgcttaattatatctttcctccctattctgttaatgaagcaatgccaatgaaagcacctagtcgtcgcgaagtcggacacggtaaacttgcatggcgtgctattaatccaatattacctaataaagtacaatttccttattctattagagtagttgctgaaactactgagtctaacggttcttcttcaatggctactgtttgcggtagttctcttgctttaatgcatgctggcgtgccgataaaagcaccggttgctggtattgctatgggacttgttaaggaaagtaataaatttgctgtattatcggatattatcggtgatgaagattatttcggtgatatggattttaaagttgcaggtactagttcagggattactgcattacaaatggatattaaaatatcaggaatagattttaaaataatccaaatagctttagagcaagcacgactcggtcgtttgcatatactggagcaaatgaataaagtgatcagtaaaccaaatagcgaactaagtaaaaatgccccttcttctactactgtaaaaatagacaaagataaaattaaagatattataggaccaggcggtaaaataataaaggaaatttgtgaaactagcaatgctaaaatagatataagcgatgacggaacagtttctatttatgcttcagatagggataagataaaaattgcattagataaaattaaagcgattgctgttgagcctgaaatcggtgaaatatttaacggtacggtaatgaaagttttagattctggtgcttttattaattatttaggtaataaagacggctttgtgcatattagtgaaatttcagacgcaagaatagataaggttagcagtgttttaaaacaaggtgatatagtaaaagttaagctaataggctttgataataaaggtaaagcaaaactaactattaaaaatgcttacaaagatcactcttcaaataatacaaagcaaaaaaataatgttaaagacgattcagaatctgagcaacgacgtgatactagtaaaaaacgtacttggaatgaagataataatactgaaatgtctgaagtaattacagaacgtaaatattttacatag

SEQ ID NO: 2036 - protein, 745 aa, Rickettsia prowazekii
MFNEITKSVMWNGQVLEISTGKIARQANAAVTVKMGNSILLCTCVVANKVKDGIGFFPLTINYREMAYSAGKIPGGFFKREGKASDREILVSRLIDRPIRPLFHQAFMHETHVTCSVLSYDPATPVDILAIIGASAALSISPAPYLEIVAASKVGLINGEFVLNPTLELLKTSQLDLVVAGTEDSVMMVESEAHLLSEDKMLEAVKFGFESFQTVIKLIKELAKEAKKPKFEMQDLYPSSLKKEIEKLFTKEVEQAFEIKSKQERSTDLALIYEKVLTHFVRDIENKKYNNYQIESALKAISADILRNKILEKNIRIDGRSTTDIRQIACEVGLLPSAHGSALFTRGETQSLVSTTFGTSLDEQIVDSLEGEYKERFMLNYIFPPYSVNEAMPMKAPSRREVGHGKLAWRAINPILPNKVQFPYSIRVVAETTESNGSSSMATVCGSSLALMHAGVPIKAPVAGIAMGLVKESNKFAVLSDIIGDEDYFGDMDFKVAGTSSGITALQMDIKISGIDFKIIQIALEQARLGRLHILEQMNKVISKPNSELSKNAPSSTTVKIDKDKIKDIIGPGGKIIKEICETSNAKIDISDDGTVSIYASDRDKIKIALDKIKAIAVEPEIGEIFNGTVMKVLDSGAFINYLGNKDGFVHISEISDARIDKVSSVLKQGDIVKVKLIGFDNKGKAKLTIKNAYKDHSSNNTKQKNNVKDDSESEQRRDTSKKRTWNEDNNTEMSEVITERKYFT

SEQ ID NO: 2037 - DNA, 2121 bp, Yersinia enterocolitica
  CDS (1)..(2121)
atgctgactccgattattcgtaaattccagtacggccaacataccgttaccattgaaactggcatgatggctcgccaggcgactgctgccgttatggtcagcatggatgacaccgcagtattcgttactgttgttggccaaaagaaagctaaaccaggccagagtttcttccctttgactgttaactatcaggagcgtacctacgctgctggtcgtatcccaggcagcttcttccgtcgtgaaggccgcccaagtgaaggcgaaacactgacttcacgtctgattgaccgcccgattcgtccactgttcccagacagcttcctgaatgaagttcaggttattgcgactgttgtttctgttaacccacaaattaacccagacatcgtggcactgattggtgcatcagctgcgctgagcctgtcaggtattccattcaacggcccaatcggagctgctcgtgttggttttatcaatgaccagtatgtgctgaacccaaccaccgatgagctgaaagaaagccgtctggacttggttgttgccggtactgcgggtgcagtattgatggttgaatcagaagcagacatcttgtctgaagatcaaatgttaggtgcggttgtcttcggccacgaacaacagcaagttgtgattgaaaatatcaacgctctggttgctgaagcgggcaaaccaaagtgggattggcatgctgagccagtaaacgaagcgctgcatgcgcgcgttgctgagctggctgctgcacgtctgggcgatgcttatcgcattaccgagaaacaagagcgttatactcaagttgatgctatcaaagctgatgtgactgaagcactgttagcgcaagacgatacattagatgctgcggaaattcaggacatcctgggtagcgttgagaaagacgtcgttcgtagccgtgtactgcgtggcgaaccgcgtatcgatggtcgcgaaaaagacatgatccgtggtctggatgtgcgtactggcgtgttgccacgtacccacggttctgcgttattcacccgtggtgaaactcaggcgctggttacagcaacactgggtactgcacgtgacgcacaaaatattgatgagctgatgggtgagcgtactgactcattcctgctacactataatttccctccatattctgttggtgaaacaggtatggttggttcaccgaaacgtcgtgagattggtcatggtcgtctggcgaaacgtggtgtgttggcagtgatgccaagcccgagcgagttcccttacactgtgcgtgtggtttctgaaatcaccgagtctaacggttcttcctcaatggcttctgtctgtggtgcttctctggccctgatggacgcaggtgtgccgattaaagccgctgttgctggtatcgcaatgggtctggttaaagaagatgaaaactttgttgttctgtctgacattctgggtgacgaagatcacttgggcgacatggactttaaagtagccggtagccgtgacggtatcaccgcactgcagatggacattaaaattgaaggtattacccgcgaaatcatgcaggtagctctgaaccaggctaagggtgcgcgtttgcacattctgggtgttatggaacaggctatcagcacaccgcgcggtgatatctctgagtttgctccacgtatctacaccatgaaaatcaatcctgagaaaatcaaggatgtgatcggtaaaggcggttctgtgattcgcgcgctgactgatgaaactggcaccaccattgacatcgaagctgatggcaccattaagattgcagcaactgacggcgacaaagcgaaacatgctatccgtcgtatcgaagagattactgctgaaattgaagtgaaccgtatctatgcgggtaaagttactcgtatcgttgatttcggtgcatttgttgccatcggcggcggtaaagaaggcttggtacatatttctcaaatcgctgacaagcgtgttgataaagtgactgattacctgcagatgggtcaggaagtaccggttaaagttatcgaagttgatcgccaaggtcgtatccgcctgagcatgaaagaagcgactactcctgatgcagaagcaccggcaccagaagcagcagagtaa

SEQ ID NO: 2038 - protein, 706 aa, Yersinia enterocolitica
MLTPIIRKFQYGQHTVTIETGMMARQATAAVMVSMDDTAVFVTVVGQKKAKPGQSFFPLTVNYQERTYAAGRIPGSFFRREGRPSEGETLTSRLIDRPIRPLFPDSFLNEVQVIATVVSVNPQINPDIVALIGASAALSLSGIPFNGPIGAARVGFINDQYVLNPTTDELKESRLDLVVAGTAGAVLMVESEADILSEDQMLGAVVFGHEQQQVVIENINALVAEAGKPKWDWHAEPVNEALHARVAELAAARLGDAYRITEKQERYTQVDAIKADVTEALLAQDDTLDAAEIQDILGSVEKDVVRSRVLRGEPRIDGREKDMIRGLDVRTGVLPRTHGSALFTRGETQALVTATLGTARDAQNIDELMGERTDSFLLHYNFPPYSVGETGMVGSPKRREIGHGRLAKRGVLAVMPSPSEFPYTVRVVSEITESNGSSSMASVCGASLALMDAGVPIKAAVAGIAMGLVKEDENFVVLSDILGDEDHLGDMDFKVAGSRDGITALQMDIKIEGITREIMQVALNQAKGARLHILGVMEQAISTPRGDISEFAPRIYTMKINPEKIKDVIGKGGSVIRALTDETGTTIDIEADGTIKIAATDGDKAKHAIRRIEEITAEIEVNRIYAGKVTRIVDFGAFVAIGGGKEGLVHISQIADKRVDKVTDYLQMGQEVPVKVIEVDRQGRIRLSMKEATTPDAEAPAPEAAE

SEQ ID NO: 2039 - DNA, 24 bp, Artificial sequence
  primer
atgcgcagaagatcgggtattaac

SEQ ID NO: 2040 - DNA, 22 bp, Artificial sequence
  primer
ttactcgccctgttcagcagcc

SEQ ID NO: 2041 - protein, 889 aa, Artificial sequence
  consensus sequence
  Variant (2)..(2): Xaa in position 2 is any amino acid
  Variant (4)..(4): Xaa in position 4 is any amino acid
  Variant (5)..(5): Xaa in position 5 is any or no amino acid
  Variant (7)..(7): Xaa in position 7 is any amino acid
  Variant (10)..(32): Xaa in position 10 to 32 is any amino acid
  Variant (33)..(37): Xaa in position 33 to 37 is any or no amino acid
  Variant (40)..(40): Xaa in position 40 is any amino acid
  Variant (43)..(43): Xaa in position 43 is any amino acid
  Variant (45)..(45): Xaa in position 45 is any amino acid
  Variant (47)..(47): Xaa in position 47 is any amino acid
  Variant (49)..(50): Xaa in position 49 to 50 is any amino acid
  Variant (53)..(53): Xaa in position 53 is any amino acid
  Variant (55)..(56): Xaa in position 55 to 56 is any amino acid
  Variant (59)..(59): Xaa in position 59 is any amino acid
  Variant (61)..(62): Xaa in position 61 to 62 is any amino acid
  Variant (65)..(65): Xaa in position 65 is any amino acid
  Variant (67)..(67): Xaa in position 67 is any amino acid
  Variant (69)..(73): Xaa in position 69 to 73 is any amino acid
  Variant (75)..(76): Xaa in position 75 to 76 is any amino acid
  Variant (83)..(83): Xaa in position 83 is any amino acid
  Variant (86)..(86): Xaa in position 86 is any amino acid
  Variant (88)..(94): Xaa in position 88 to 94 is any amino acid
  Variant (95)..(95): Xaa in position 95 is any or no amino acid
  Variant (97)..(102): Xaa in position 97 to 102 is any amino acid
  Variant (104)..(113): Xaa in position 104 to 113 is any amino acid
  Variant (115)..(118): Xaa in position 115 to 118 is any amino acid
  Variant (120)..(120): Xaa in position 120 is any amino acid
  Variant (123)..(124): Xaa in position 123 to 124 is any amino acid
  Variant (126)..(127): Xaa in position 126 to 127 is any amino acid
  Variant (129)..(130): Xaa in position 129 to 130 is any amino acid
  Variant (131)..(134): Xaa in position 131 to 134 is any or no amino acid
  Variant (137)..(141): Xaa in position 137 to 141 is any amino acid
  Variant (143)..(151): Xaa in position 143 to 151 is any amino acid
  Variant (152)..(160): Xaa in position 152 to 160 is any or no amino acid
  Variant (163)..(169): Xaa in position 163 to 169 is any amino acid
  Variant (170)..(175): Xaa in position 170 to 175 is any or no amino acid
  Variant (177)..(179): Xaa in position 177 to 179 is any amino acid
  Variant (181)..(181): Xaa in position 181 is any amino acid
  Variant (185)..(190): Xaa in position 185 to 190 is any amino acid
  Variant (191)..(214): Xaa in position 191 to 214 is any or no amino acid
  Variant (216)..(216): Xaa in position 216 is any amino acid
  Variant (218)..(224): Xaa in position 218 to 224 is any amino acid
  Variant (225)..(255): Xaa in position 225 to 255 is any or no amino acid
  Variant (257)..(261): Xaa in position 257 to 261 is any amino acid
  Variant (263)..(318): Xaa in position 263 to 318 is any amino acid
  Variant (319)..(336): Xaa in position 319 to 336 is any or no amino acid
  Variant (338)..(339): Xaa in position 338 to 339 is any amino acid
  Variant (341)..(375): Xaa in position 341 to 375 is any amino acid
  Variant (376)..(428): Xaa in position 376 to 428 is any or no amino acid
  Variant (430)..(431): Xaa in position 430 to 431 is any amino acid
  Variant (433)..(436): Xaa in position 433 to 436 is any amino acid
  Variant (437)..(437): Xaa in position 437 is any or no amino acid
  Variant (439)..(439): Xaa in position 439 is any amino acid
  Variant (443)..(447): Xaa in position 443 to 447 is any amino acid
  Variant (449)..(456): Xaa in position 449 to 456 is any amino acid
  Variant (459)..(460): Xaa in position 459 to 460 is any amino acid
  Variant (461)..(462): Xaa in position 461 to 462 is any or no amino acid
  Variant (466)..(466): Xaa in position 466 is any amino acid
  Variant (469)..(469): Xaa in position 469 is any amino acid
  Variant (472)..(472): Xaa in position 472 is any amino acid
  Variant (475)..(475): Xaa in position 475 is any amino acid
  Variant (477)..(479): Xaa in position 477 to 479 is any amino acid
  Variant (482)..(487): Xaa in position 482 to 487 is any amino acid
  Variant (488)..(490): Xaa in position 488 to 490 is any or no amino acid
  Variant (492)..(503): Xaa in position 492 to 503 is any amino acid
  Variant (504)..(505): Xaa in position 504 to 505 is any or no amino acid
  Variant (507)..(508): Xaa in position 507 to 508 is any amino acid
  Variant (514)..(517): Xaa in position 514 to 517 is any amino acid
  Variant (520)..(526): Xaa in position 520 to 526 is any amino acid
  Variant (527)..(528): Xaa in position 527 to 528 is any or no amino acid
  Variant (536)..(536): Xaa in position 536 is any amino acid
  Variant (539)..(539): Xaa in position 539 is any amino acid
  Variant (541)..(546): Xaa in position 541 to 546 is any amino acid
  Variant (548)..(549): Xaa in position 548 to 549 is any amino acid
  Variant (550)..(551): Xaa in position 550 to 551 is any or no amino acid
  Variant (555)..(556): Xaa in position 555 to 556 is any amino acid
  Variant (558)..(558): Xaa in position 558 is any amino acid
  Variant (562)..(563): Xaa in position 562 to 563 is any amino acid
  Variant (569)..(569): Xaa in position 569 is any amino acid
  Variant (573)..(573): Xaa in position 573 is any amino acid
  Variant (576)..(578): Xaa in position 576 to 578 is any amino acid
  Variant (582)..(583): Xaa in position 582 to 583 is any amino acid
  Variant (588)..(591): Xaa in position 588 to 591 is any amino acid
  Variant (592)..(593): Xaa in position 592 to 593 is any or no amino acid
  Variant (597)..(597): Xaa in position 597 is any amino acid
  Variant (602)..(610): Xaa in position 602 to 610 is any amino acid
  Variant (611)..(623): Xaa in position 611 to 623 is any or no amino acid
  Variant (625)..(625): Xaa in position 625 is any amino acid
  Variant (628)..(628): Xaa in position 628 is any amino acid
  Variant (630)..(630): Xaa in position 630 is any amino acid
  Variant (633)..(634): Xaa in position 633 to 634 is any amino acid
  Variant (645)..(646): Xaa in position 645 to 646 is any amino acid
  Variant (648)..(648): Xaa in position 648 is any amino acid
  Variant (651)..(651): Xaa in position 651 is any amino acid
  Variant (655)..(655): Xaa in position 655 is any amino acid
  Variant (657)..(658): Xaa in position 657 to 658 is any amino acid
  Variant (660)..(667): Xaa in position 660 to 667 is any amino acid
  Variant (670)..(670): Xaa in position 670 is any amino acid
  Variant (673)..(675): Xaa in position 673 to 675 is any amino acid
  Variant (677)..(678): Xaa in position 677 to 678 is any amino acid
  Variant (681)..(682): Xaa in position 681 to 682 is any amino acid
  Variant (684)..(696): Xaa in position 684 to 696 is any amino acid
  Variant (697)..(697): Xaa in position 697 is any or no amino acid
  Variant (700)..(709): Xaa in position 700 to 709 is any amino acid
  Variant (712)..(714): Xaa in position 712 to 714 is any amino acid
  Variant (717)..(718): Xaa in position 717 to 718 is any amino acid
  Variant (720)..(721): Xaa in position 720 to 721 is any amino acid
  Variant (723)..(727): Xaa in position 723 to 727 is any amino acid
  Variant (728)..(728): Xaa in position 728 is any or no amino acid
  Variant (730)..(738): Xaa in position 730 to 738 is any amino acid
  Variant (739)..(743): Xaa in position 739 to 743 is any or no amino acid
  Variant (745)..(757): Xaa in position 745 to 757 is any amino acid
  Variant (758)..(759): Xaa in position 758 to 759 is any or no amino acid
  Variant (761)..(763): Xaa in position 761 to 763 is any amino acid
  Variant (765)..(773): Xaa in position 765 to 773 is any amino acid
  Variant (774)..(788): Xaa in position 774 to 788 is any or no amino acid
  Variant (790)..(791): Xaa in position 790 to 791 is any amino acid
  Variant (793)..(795): Xaa in position 793 to 795 is any amino acid
  Variant (796)..(796): Xaa in position 796 is any or no amino acid
  Variant (798)..(803): Xaa in position 798 to 803 is any amino acid
  Variant (804)..(805): Xaa in position 804 to 805 is any or no amino acid
  Variant (810)..(813): Xaa in position 810 to 813 is any amino acid
  Variant (814)..(816): Xaa in position 814 to 816 is any or no amino acid
  Variant (819)..(819): Xaa in position 819 is any amino acid
  Variant (823)..(831): Xaa in position 823 to 831 is any amino acid
  Variant (832)..(865): Xaa in position 832 to 865 is any or no amino acid
  Variant (867)..(870): Xaa in position 867 to 870 is any amino acid
  Variant (872)..(876): Xaa in position 872 to 876 is any amino acid
  Variant (878)..(878): Xaa in position 878 is any amino acid
  Variant (879)..(879): Xaa in position 879 is any or no amino acid
  Variant (881)..(883): Xaa in position 881 to 883 is any amino acid
  Variant (884)..(888): Xaa in position 884 to 888 is any or no amino acid
EXGXXAXQAXXXXXXXXXXXXXXXXXXXXXXXXXXXXDFXPLXVXYXEXXYAXGXXPGXFXXREXGXPXXXXXLXXRLIDRPXRPXFXXXXXXXXQXXXXXXSXXXXXXXXXXAXXXXSXALXXSXXPXXXXXXGPXXXXXVXXXXXXXXXXXXXXXXXXNPXXXXXXXXXXXXXSXXXLXVAGXXXXXXXXXXXXXXXXXXXXXXXXXXXXXXMXEXXXXXXXXXXXXXXXXXXXXXXXXXXXXXXXXXXXXXXEXXXXXAXXXXXXXXXXXXXXXXXXXXXXXXXXXXXXXXXXXXXXXXXXXXXXXXXXXXXXXXXXXXXXXXXXXXXXXXXXKXXRXXXXXXXXXXXXXXXXXXXXXXXXXXXXXXXXXXXXXXXXXXXXXXXXXXXXXXXXXXXXXXXXXXXXXXXXXXXXXXXXXXXXXXXXRXXIXXXXXRXDGRXXXXXRXXXXXXXXLPXXXXHGSXLFXRGXTQXLXXXTLXXXXXXXXXQXXXXXXXXXXXXXXFXXHYNFPXXXXGEXXXXXXXXXRREIGHGXLAXRXXXXXXPXXXXFPYXXRXVSEXXESNGSXSMAXVCXXXLALXXAGVPXXXXXXVAGXAMGLXXXXXXXXXXXXXXXXXXXXXXLXDIXGXEDXXGDMDFKVAGTXXGXTAXQMDXKXXGXXXXXXXXALXQAXXXRXXILXXMXXXXXXXXXXXXXXAPXXXXXXXXXXKIXXXIGXXGXXIXXXXXXTXXXXXXXXXXXXXXGXXXXXXXXXXXXXXXAXXXIXXXXXXXXXXXXXXXXXXXXXXXXGXXYXXXXVXXXXXXXXGAFVXXXXXXXGLXHISXXXXXXXXXXXXXXXXXXXXXXXXXXXXXXXXXXXXXXXXXXXGXXXXVXXXXXDXXGXXXXXXXXL

SEQ ID NO: 2042 - DNA, 396 bp, Saccharomyces cerevisiae
  CDS (1)..(396)
atgtcctctgccgccgaaaagaaaccagcttccaaagctccagctgaaaagaagccagctgccaagaaaacatcaacctccgtcgatggtaagaagagatctaaggttagaaaggagacctattcctcttatatttacaaagttttgaagcaaactcacccagacactggtatttcccagaagtctatgtctattttgaactctttcgttaacgatatctttgaaagaattgctactgaagcttctaaattggccgcttataacaagaaatccactatttctgctagagaaatccaaacagccgttagattgatcttacctggtgaattggctaaacatgccgtctccgaaggtactagggctgttaccaaatactcctcctctactcaagcctaa

SEQ ID NO: 2043 - protein, 131 aa, Saccharomyces cerevisiae
MSSAAEKKPASKAPAEKKPAAKKTSTSVDGKKRSKVRKETYSSYIYKVLKQTHPDTGISQKSMSILNSFVNDIFERIATEASKLAAYNKKSTISAREIQTAVRLILPGELAKHAVSEGTRAVTKYSSSTQA

SEQ ID NO: 2044 - DNA, 381 bp, Xenopus tropicalis
  CDS (1)..(381)
atgcctgatccagccaagtccgctccagccccgaagaaaggctccaagaaagcggtgaccaagacccagaagaaagatgggaagaagcgcaggaagacaaggaaggagagttacgccatttacgtgtacaaggtgctgaagcaggtgcaccccgataccggcatctcctccaaggccatgagcatcatgaactcctttgtcaacgatgtgtttgagcgcatcgcaggggaagcctcccgcctggctcattacaacaagcgctccaccatcacctcccgggagatccagaccgcggtccgcctgctgctgcctggggagctggccaagcacgccgtgtccgagggcaccaaggctgttaccaagtacaccagcgccaagtaa

SEQ ID NO: 2045 - protein, 126 aa, Xenopus tropicalis
MPDPAKSAPAPKKGSKKAVTKTQKKDGKKRRKTRKESYAIYVYKVLKQVHPDTGISSKAMSIMNSFVNDVFERIAGEASRLAHYNKRSTITSREIQTAVRLLLPGELAKHAVSEGTKAVTKYTSAK

SEQ ID NO: 2046 - DNA, 381 bp, Xenopus tropicalis
  CDS (1)..(381)
atgcccgaacccgccaaatccgccccagcaccaaagaaaggctctaagaaagcggtgagtaaaacgcagaagaaagatgggaagaagcgcaggaagagcaggaaggagagttacgccatctacgtgtacaaagtgctgaagcaggtgcaccctgataccggcatctcttccaaggccatgagcatcatgaactcctttgttaacgatgtgtttgagcgcatcgcaggggaagcctcccgcctggctcattacaacaagcgctccaccatcacctcccgggagatccagaccgcggtccgcctgctgctgcctggggagctggccaagcacgctgtgtccgaggggacaaaggctgtgactaaatacaccagcgccaagtaa

SEQ ID NO: 2047 - protein, 126 aa, Xenopus tropicalis
MPEPAKSAPAPKKGSKKAVSKTQKKDGKKRRKSRKESYAIYVYKVLKQVHPDTGISSKAMSIMNSFVNDVFERIAGEASRLAHYNKRSTITSREIQTAVRLLLPGELAKHAVSEGTKAVTKYTSAK

SEQ ID NO: 2048 - DNA, 381 bp, Homo sapiens
  CDS (1)..(381)
atgccggatccagcgaaatccgctcctgctcccaagaagggctccaaaaaggctgttacgaaagtgcagaagaaggacggcaagaagcgcaagcgcagccgcaaggagagctactccgtttacgtgtacaaggtgctgaagcaggtccaccccgacaccggcatctcgtccaaggccatgggcatcatgaactccttcgtcaacgacatcttcgagcgcatcgcgggagaggcgtcccgcctggcgcactacaacaagcgctccaccatcacatcccgcgagatccagacggccgtgcgcctgctgctgcccggcgagctggccaagcacgccgtgtccgagggcaccaaggcggtcaccaagtacaccagctcgaagtaa

SEQ ID NO: 2049 - protein, 126 aa, Homo sapiens
MPDPAKSAPAPKKGSKKAVTKVQKKDGKKRKRSRKESYSVYVYKVLKQVHPDTGISSKAMGIMNSFVNDIFERIAGEASRLAHYNKRSTITSREIQTAVRLLLPGELAKHAVSEGTKAVTKYTSSK

SEQ ID NO: 2050 - DNA, 381 bp, Gallus gallus
  CDS (1)..(381)
atgccagaaccagcgaagtcggctcctgcccctaagaagggctccaagaaggcggtcaccaagacccaaaagaagggcgacaagaaacgtagaaagacgaggaaagagagctactcgatctacgtgtacaaggtgctgaagcaggtgcaccccgacacgggcatctcgtccaaggccatgggcatcatgaactcgttcgtcaacgacatcttcgagcgcatcgccggcgaggcgtcgcgcctggcgcactacaacaagcgctcgaccatcacgtcgcgggagatccagacggccgtgcggctgctgctgcccggcgagctggccaagcacgcggtctctgagggcaccaaggcggtcaccaagtacaccagctccaagtag

SEQ ID NO: 2051 - protein, 126 aa, Gallus gallus
MPEPAKSAPAPKKGSKKAVTKTQKKGDKKRRKTRKESYSIYVYKVLKQVHPDTGISSKAMGIMNSFVNDIFERIAGEASRLAHYNKRSTITSREIQTAVRLLLPGELAKHAVSEGTKAVTKYTSSK

SEQ ID NO: 2052 - DNA, 381 bp, Homo sapiens
  CDS (1)..(381)
atgcctgaaccagtcaaatctgctccagtccctaaaaaaggctccaagaaggccattaacaaggctcagaagaaggatggaaagaagcgcaaacgcagccgcaaggagagctactctgtgtatgtgtacaaggtgctgaagcaggtccaccccgacaccggcatctcttccaaggctatgggaatcatgaactccttcgtcaacgacatctttgagcgtatcgccggagaagcgtcacgcctggcgcattacaacaagcgctcgaccatcacttcgagggagatccagacggccgtgcgcctactgctacccggggaattggccaagcacgccgtgtccgagggcaccaaggccgtcaccaagtataccagctccaagtga

SEQ ID NO: 2053 - protein, 126 aa, Homo sapiens
MPEPVKSAPVPKKGSKKAINKAQKKDGKKRKRSRKESYSVYVYKVLKQVHPDTGISSKAMGIMNSFVNDIFERIAGEASRLAHYNKRSTITSREIQTAVRLLLPGELAKHAVSEGTKAVTKYTSSK

SEQ ID NO: 2054 - DNA, 381 bp, Homo sapiens
  CDS (1)..(381)
atgcctgatccagctaagtccgctcccgccccgaagaagggctccaagaaggcggtgaccaaggcgcagaagaaggatggcaagaagcgtaaacgcagccgcaaggagagctactccgtatacgtttacaaggtgctgaagcaagtccaccccgacaccggcatctcctccaaagccatggggatcatgaattcctttgtcaacgatatcttcgagcgcatcgccggcgaggcttcccgcctggctcattacaacaagcgttcgaccatcacctccagggagatccagacagccgtgcgcctgctgctgcctggggaactggccaagcacgccgtgtccgagggcactaaggccgtcaccaagtacaccagctccaaataa

SEQ ID NO: 2055 - protein, 126 aa, Homo sapiens
MPDPAKSAPAPKKGSKKAVTKAQKKDGKKRKRSRKESYSVYVYKVLKQVHPDTGISSKAMGIMNSFVNDIFERIAGEASRLAHYNKRSTITSREIQTAVRLLLPGELAKHAVSEGTKAVTKYTSSK

SEQ ID NO: 2056 - DNA, 381 bp, Homo sapiens
  CDS (1)..(381)
atgcctgaaccggcaaaatccgctccggcccctaaaaagggctccaagaaagccgtcaccaaagcccagaagaaagacggcaagaagcgcaagcgcagccgcaaagagagctactccatctacgtgtacaaggtgctgaagcaggtccaccccgacaccggcatctcgtccaaggccatgggcatcatgaactccttcgtcaacgacatcttcgagcgcatcgcgggagaggcttcccgcctggcgcactacaacaagcgctccaccatcacatcccgcgagatccagacggccgtgcgcctgctgctgcccggcgagctggccaagcacgccgtgtccgagggcaccaaggcggtcaccaagtacaccagctccaagtga

SEQ ID NO: 2057 - protein, 126 aa, Homo sapiens
MPEPAKSAPAPKKGSKKAVTKAQKKDGKKRKRSRKESYSIYVYKVLKQVHPDTGISSKAMGIMNSFVNDIFERIAGEASRLAHYNKRSTITSREIQTAVRLLLPGELAKHAVSEGTKAVTKYTSSK

SEQ ID NO: 2058 - DNA, 381 bp, Homo sapiens
  CDS (1)..(381)
atgcctgaaccctctaagtctgctccagcccctaaaaagggttctaagaaggctatcactaaggcgcagaagaaggatggtaagaagcgtaagcgcagccgcaaggagagctattctatctatgtgtacaaggttctgaagcaggtccaccccgacaccggcatctcatccaaggccatggggatcatgaattccttcgtcaacgacatcttcgagcgcatcgcgggcgaggcttctcgcctggctcactacaataagcgctcgaccatcacctccagggagattcagacggctgtgcgcctgctgctgcctggggagctggctaagcatgctgtgtccgagggcactaaggcagttaccaagtacactagctctaaataa

SEQ ID NO: 2059 - protein, 126 aa, Homo sapiens
MPEPSKSAPAPKKGSKKAITKAQKKDGKKRKRSRKESYSIYVYKVLKQVHPDTGISSKAMGIMNSFVNDIFERIAGEASRLAHYNKRSTITSREIQTAVRLLLPGELAKHAVSEGTKAVTKYTSSK

SEQ ID NO: 2060 - DNA, 381 bp, Mus musculus
  CDS (1)..(381)
atgccggagccttcccgctccactcccgccccgaagaaaggctccaagaaagccatcaccaaggctcagaaaaaggatggcaagaaacgcaaacggggccgcaaggagagctactccatctacgtgtacaaggtgctgaagcaggtgcatccggacaccggcatctcgtccaaggccatgggcatcatgaactcgttcgtcaatgacatcttcgagcgcatcgccagcgaggcctcccgcctggcgcattacaacaagcgctcgaccatcacgtcccgcgaggtgcagacggccgtgcgcctgctgctgcccggggagctggccaagcatgccgtgtccgagggcaccaaggcagtcaccaaatacaccagctccaagtga

SEQ ID NO: 2061 - protein, 126 aa, Mus musculus
MPEPSRSTPAPKKGSKKAITKAQKKDGKKRKRGRKESYSIYVYKVLKQVHPDTGISSKAMGIMNSFVNDIFERIASEASRLAHYNKRSTITSREVQTAVRLLLPGELAKHAVSEGTKAVTKYTSSK

SEQ ID NO: 2062 - DNA, 447 bp, Arabidopsis thaliana
  CDS (1)..(447)
atggcaccaagagccgagaagaagcccgccgagaaaaaaaccgccgctgagagaccggtggaagagaacaaggctgctgaaaaggctccggcggagaagaaacccaaggcggggaagaaattgccaccaaaggaagccggtgacaagaagaagaagcgatctaagaaaaacgtcgaaacctacaagatctacatcttcaaggtgctgaagcaggttcatccagatatcggaatttcaagcaaagccatggggattatgaacagtttcatcaacgacatattcgagaagctagctcaggaatcttcgaaactcgctaggtacaacaagaagccgaccattacatctcgcgagatccagacggctgtgagactcgtcctccccggtgaactcgctaaacacgccgtctctgaaggtaccaaggcggttaccaagtttactagctcttga

SEQ ID NO: 2063 - protein, 148 aa, Arabidopsis thaliana
MAPRAEKKPAEKKTAAERPVEENKAAEKAPAEKKPKAGKKLPPKEAGDKKKKRSKKNVETYKIYIFKVLKQVHPDIGISSKAMGIMNSFINDIFEKLAQESSKLARYNKKPTITSREIQTAVRLVLPGELAKHAVSEGTKAVTKFTSS

SEQ ID NO: 2064 - DNA, 456 bp, Arabidopsis thaliana
  CDS (1)..(456)
atggcaccaaaagccggaaagaaaccagcagagaaaaagcccgcagagaaagctccagcagaagaagagaaagtagccgaaaaagcaccagcagagaagaaaccaaaagccggaaaaaaactaccaaaagaagcagtcaccggaggagtcgagaagaagaagaaacgagtcaagaaaagcacagagacatacaagatctacatcttcaaggtgttgaaacaagttcatccagatattggaatctcaagtaaagctatggggattatgaacagttttatcaatgatatattcgagaaacttgcgcaagaagcttcaaaattagctaggtataataagaaacctacgattacttctagggagattcagacagctgttagactagtgttacctggtgaacttgctaagcatgctgtttctgaaggaactaaggctgttactaagtttactagctcttag

SEQ ID NO: 2065 - protein, 151 aa, Arabidopsis thaliana
MAPKAGKKPAEKKPAEKAPAEEEKVAEKAPAEKKPKAGKKLPKEAVTGGVEKKKKRVKKSTETYKIYIFKVLKQVHPDIGISSKAMGIMNSFINDIFEKLAQEASKLARYNKKPTITSREIQTAVRLVLPGELAKHAVSEGTKAVTKFTSS

SEQ ID NO: 2066 - DNA, 417 bp, Arabidopsis thaliana
  CDS (1)..(417)
atggcgccgaaagcagcggagaagaaaccggcagagaagaaaccagccgggaaagctccggcggagaaactcccaaaggcggagaagaaaatcagcaaagacgccggaggaagcgagaagaagaagaagaaatcgaagaagagcgtcgagacttacaagatctacatcttcaaggttctgaaacaagttcatccagatgttggaatctctgggaaagctatggggattatgaacagtttcatcaatgacatcttcgagaaacttgctcaggaatcgtcaaagctcgctaggtacaataagaagccgacgattacatcgagggagattcaaaccgctgtgagacttgtgttgcctggagaactcgctaaacatgcggtttctgaaggcacgaaggcggttaccaaattcaccagttag

SEQ ID NO: 2067 - protein, 138 aa, Arabidopsis thaliana
MAPKAAEKKPAEKKPAGKAPAEKLPKAEKKISKDAGGSEKKKKKSKKSVETYKIYIFKVLKQVHPDVGISGKAMGIMNSFINDIFEKLAQESSKLARYNKKPTITSREIQTAVRLVLPGELAKHAVSEGTKAVTKFTS

SEQ ID NO: 2068 - DNA, 381 bp, Arabidopsis thaliana
  CDS (1)..(381)
atggcaccgaaggcagagaagaaaccgtcggagaaagcaccaaaggcagataagaagatcacgaaagaaggaggaagcgagaggaagaagaagactaagaagagcacagagacgtacaagatctacctattcaaggtgttgaaacaagttcatcctgatatcgggatctctggaaaagccatgggaatcatgaacagtttcatcaacgacaccttcgagaaaattgctctggaatcgtcgcgattggctaggtataacaagaaaccgacgatcacgtcccgggaaatccaaaccgccgtaaggctcgtgttgcctggtgaattagcgaagcacgctgtttctgagggtaccaaagccgtcaccaaattcaccagttcttag

SEQ ID NO: 2069 - protein, 126 aa, Arabidopsis thaliana
MAPKAEKKPSEKAPKADKKITKEGGSERKKKTKKSTETYKIYLFKVLKQVHPDIGISGKAMGIMNSFINDTFEKIALESSRLARYNKKPTITSREIQTAVRLVLPGELAKHAVSEGTKAVTKFTSS

SEQ ID NO: 2070 - DNA, 453 bp, Arabidopsis thaliana
  CDS (1)..(453)
atggcgccgagagcagagaagaagcccgcggagaagaaaccagccgccgagaaaccagtagaggagaaatcaaaagccgagaaagctccggcggagaagaaaccaaaagccggcaagaaactcccgaaggaagccggggccggcggcgataagaagaagaagatgaagaagaagagtgtggaaacttacaagatctacatcttcaaggttctgaaacaagttcatccagatattggtatttcaagcaaggctatgggtattatgaacagtttcatcaacgacatcttcgagaaattggcatcggaatcttcaaagctcgctaggtataacaagaagccgacgattacttctcgggagattcagactgctgttagactcgttcttcctggtgagctcgctaaacacgctgtttctgaaggaaccaaggctgttaccaaattcacaagctcttga

SEQ ID NO: 2071 - protein, 150 aa, Arabidopsis thaliana
MAPRAEKKPAEKKPAAEKPVEEKSKAEKAPAEKKPKAGKKLPKEAGAGGDKKKKMKKKSVETYKIYIFKVLKQVHPDIGISSKAMGIMNSFINDIFEKLASESSKLARYNKKPTITSREIQTAVRLVLPGELAKHAVSEGTKAVTKFTSS

SEQ ID NO: 2072 - DNA, 438 bp, Arabidopsis thaliana
  CDS (1)..(438)
atggcaccaaaggcagagaagaagccggcagagaagaaaccagtagaggagaaatcaaaagccgagaaagctcctgcagagaagaaaccaaaagccggcaagaaactcccgaaggaagccggtgccggcggcgataagaagaagaagatgaagaagaagagtgttgagacgtacaagatctacatcttcaaggttctgaaacaagttcatccagatattggtatttcaagcaaagctatggggattatgaacagtttcatcaacgacatctttgagaaattggcatcggaatcgtcgaagctcgcgaggtataataagaagccgacgattacttctcgggagattcagactgctgttagacttgttcttcctggtgagcttgcgaaacatgctgtttctgaaggaactaaggcggtgactaagtttactagctcttga

SEQ ID NO: 2073 - protein, 145 aa, Arabidopsis thaliana
MAPKAEKKPAEKKPVEEKSKAEKAPAEKKPKAGKKLPKEAGAGGDKKKKMKKKSVETYKIYIFKVLKQVHPDIGISSKAMGIMNSFINDIFEKLASESSKLARYNKKPTITSREIQTAVRLVLPGELAKHAVSEGTKAVTKFTSS

SEQ ID NO: 2074 - DNA, 417 bp, Arabidopsis thaliana
  CDS (1)..(417)
atggctccgaaagcggcagagaagaaaccggctgggaagaagccagcagaaaaagctccggcagagaaattaccaaaggcggagaagaagatcaccaaggaaggtggaagcgaaaagaagaagaagaaatcgaagaagaacatcgagacgtacaagatctacatcttcaaggttctgaaacaagttcatcctgatatcggaatctccgggaaagcgatggggatcatgaacagtttcatcaacgacatcttcgagaaactagctcaggaatcatcgcgattggctaggtacaacaagaaaccgacgatcacttctcgggaaattcagacggcggtgagacttgtgttgcctggagagctctcgaaacacgctgtttctgaaggcactaaggcggttactaaattcactagctcgtag

SEQ ID NO: 2075 - protein, 138 aa, Arabidopsis thaliana
MAPKAAEKKPAGKKPAEKAPAEKLPKAEKKITKEGGSEKKKKKSKKNIETYKIYIFKVLKQVHPDIGISGKAMGIMNSFINDIFEKLAQESSRLARYNKKPTITSREIQTAVRLVLPGELSKHAVSEGTKAVTKFTSS

SEQ ID NO: 2076 - DNA, 399 bp, Arabidopsis thaliana
  CDS (1)..(399)
atggcgccgaaggcagagaagaaaccggcggagaaagcaccagcaccaaaggcggagaagaagatcgcgaaagaaggaggaacgagcgagattgtcaagaagaagaagaagacgaagaagagcacagagacgtacaagatctacattttcaaggtattgaaacaggttcatccagatattggaatctctggtaaagcgatgggaatcatgaacagtttcatcaacgacattttcgagaaactcgctcaggaatcgtctcgtctcgctcgttacaataagaaaccgacgatcacgtctcgtgaaatccaaaccgccgtgagacttgttctgcctggtgaattggctaagcatgccgtctctgaaggaaccaaagctgtcaccaaattcacaagctcttaa

SEQ ID NO: 2077 - protein, 132 aa, Arabidopsis thaliana
MAPKAEKKPAEKAPAPKAEKKIAKEGGTSEIVKKKKKTKKSTETYKIYIFKVLKQVHPDIGISGKAMGIMNSFINDIFEKLAQESSRLARYNKKPTITSREIQTAVRLVLPGELAKHAVSEGTKAVTKFTSS

SEQ ID NO: 2078 - DNA, 438 bp, Arabidopsis thaliana
  CDS (1)..(438)
atggcgaaggcagataagaaaccagcggagaagaaaccggcagagaaaactccggcagccgaaccagcagcagcggcagagaagaaaccaaaagccggaaagaaactcccgaaggaaccagccggcgccggagacaagaagaagaagagatcaaagaagaacgttgagacatacaagatctacatcttcaaggtgttgaagcaagttcatccagatatcggaatctccagcaaagccatgggaatcatgaacagtttcatcaatgatatctttgagaaacttgctggtgagtcttcgaagcttgcgaggtacaacaagaagccgacgattacttctagggagattcagactgcggtgagacttgtgttgcctggagagttggcgaaacatgctgtttctgaagggactaaggcggttacgaagtttacgagttcttag

SEQ ID NO: 2079 - protein, 145 aa, Arabidopsis thaliana
MAKADKKPAEKKPAEKTPAAEPAAAAEKKPKAGKKLPKEPAGAGDKKKKRSKKNVETYKIYIFKVLKQVHPDIGISSKAMGIMNSFINDIFEKLAGESSKLARYNKKPTITSREIQTAVRLVLPGELAKHAVSEGTKAVTKFTSS

SEQ ID NO: 2080 - DNA, 372 bp, Caenorhabditis elegans
  CDS (1)..(372)
atgccaccaaagccatccgccaagggagccaagaaggccgctaagaccgtcgttgccaagccaaaggacggaaagaagagacgccatgcccgcaaggaatcgtactccgtctacatctaccgtgttctcaagcaagttcacccagacaccggagtctcctcaaaggccatgtctatcatgaactccttcgtcaatgatgtcttcgaacgcatcgcctcggaagcttctcgtctcgctcactacaacaagcgttctaccatctcttctcgcgaaattcaaaccgctgttcgtttgattcttccaggagagcttgccaagcacgccgtgtctgagggaaccaaggccgtcaccaagtacacctccagcaagtaa

SEQ ID NO: 2081 - protein, 123 aa, Caenorhabditis elegans
MPPKPSAKGAKKAAKTVVAKPKDGKKRRHARKESYSVYIYRVLKQVHPDTGVSSKAMSIMNSFVNDVFERIASEASRLAHYNKRSTISSREIQTAVRLILPGELAKHAVSEGTKAVTKYTSSK

SEQ ID NO: 2082 - DNA, 369 bp, Caenorhabditis elegans
  CDS (1)..(369)
atgccaccaaagccatctgcaaagggagccaagaaggccgccaagaccgtcaccaagccaaaggacggaaagaagagacgtcatgcccgtaaggagtcatactctgtctacatctaccgtgtcctcaagcaggttcacccagatactggagtctcctcaaaggctatgtccatcatgaactctttcgtcaatgacgtcttcgagcgtatcgccgctgaagcatctcgtcttgctcactacaacaagcgttctaccatctcatcccgcgaaattcaaaccgctgttcgtttgattcttccaggagagcttgccaagcacgccgtgtctgagggaaccaaggccgttaccaagtacacttccagcaagtaa

SEQ ID NO: 2083 - protein, 122 aa, Caenorhabditis elegans
MPPKPSAKGAKKAAKTVTKPKDGKKRRHARKESYSVYIYRVLKQVHPDTGVSSKAMSIMNSFVNDVFERIAAEASRLAHYNKRSTISSREIQTAVRLILPGELAKHAVSEGTKAVTKYTSSK

SEQ ID NO: 2084 - DNA, 372 bp, Caenorhabditis elegans
  CDS (1)..(372)
atggccccaccaaaaccatcagctaaaggagccaaaaaggctgctaagaccgtcagcaagccaaaagacggaaagaaaagaaagcatgctcgtaaggaatcctactcggtctacatctaccgtgttttaaagcaggttcacccagacaccggtgtgtcatccaaggctatgtcgatcatgaattcgtttgtcaacgatgtcttcgagagaattgcttcggaagcatctcgtctggcccactacaacaagagatccaccatctcttctcgcgaaatccaaaccgctgtccgtctcattcttcctggagaacttgcaaagcatgctgtttcagaaggaaccaaggctgtcaccaagtacacttccagtaaataa

SEQ ID NO: 2085 - protein, 123 aa, Caenorhabditis elegans
MAPPKPSAKGAKKAAKTVSKPKDGKKRKHARKESYSVYIYRVLKQVHPDTGVSSKAMSIMNSFVNDVFERIASEASRLAHYNKRSTISSREIQTAVRLILPGELAKHAVSEGTKAVTKYTSSK

SEQ ID NO: 2086 - DNA, 426 bp, Caenorhabditis elegans
  CDS (1)..(426)
atggccatcaacccattctttacacttgtccaacgaccagtccaatcaatcgaaatggccccaccaaagccgtctgctaaaggagcaaagaaagccgccaagaccgtcaccaagccaaaggacggaaagaagagacgtcatgcccgtaaagaatcctactctgtgtacatctaccgtgtactcaagcaggttcatccagacactggagtctcttccaaggctatgtctatcatgaactctttcgtcaacgacgtcttcgagcgtatcgctgctgaggcatctcgtcttgctcactacaacaagagatccaccatctcttctcgcgaaattcaaactgccgtccgtttgattctgccaggagagcttgccaagcacgccgtctctgagggaaccaaggctgtcaccaagtacacctccagcaagtaa

SEQ ID NO: 2087 - protein, 141 aa, Caenorhabditis elegans
MAINPFFTLVQRPVQSIEMAPPKPSAKGAKKAAKTVTKPKDGKKRRHARKESYSVYIYRVLKQVHPDTGVSSKAMSIMNSFVNDVFERIAAEASRLAHYNKRSTISSREIQTAVRLILPGELAKHAVSEGTKAVTKYTSSK

SEQ ID NO: 2088 - DNA, 381 bp, Homo sapiens
  CDS (1)..(381)
atgccggaaccagcgaagtccgctcccgcgcccaagaagggctcgaagaaagccgtgactaaggcgcagaagaaggacggcaagaagcgcaagcgcagccgcaaggagagctactccgtatacgtgtacaaggtgctgaagcaggtccaccccgacaccggcatctcctctaaggccatgggaatcatgaactccttcgtcaacgacatcttcgaacgcatcgcgggtgaggcttcccgcctggcgcattacaacaagcgctcgaccatcacctccagggagatccagacggccgtgcgcctgctgctgcccggggagttggccaagcacgccgtgtccgagggcaccaaggccgtcaccaagtacaccagcgctaagtaa

SEQ ID NO: 2089 - protein, 126 aa, Homo sapiens
MPEPAKSAPAPKKGSKKAVTKAQKKDGKKRKRSRKESYSVYVYKVLKQVHPDTGISSKAMGIMNSFVNDIFERIAGEASRLAHYNKRSTITSREIQTAVRLLLPGELAKHAVSEGTKAVTKYTSAK

SEQ ID NO: 2090 - DNA, 381 bp, Schizosaccharomyces pombe 972h-
  CDS (1)..(381)
atgtctgctgctgaaaagaaacccgcttccaaggctcccgccggtaaggctcctagggataccatgaagtctgctgataagaagcgtggtaaaaacagaaaggaaacttattcatcctatatttacaaggtgttgaagcaagttcaccctgatactggtatttccaaccaagccatgcgtatcttgaactctttcgtcaacgatatttttgagcgtattgccactgaggcttccaagcttgctgcttacaacaagaagtccactatttcttcccgtgaaatccagactgctgttcgtttgattcttcccggtgagttagccaagcacgccgttaccgaaggtaccaaatccgtcaccaagtattcttcttctgctcagtaa

SEQ ID NO: 2091 - protein, 126 aa, Schizosaccharomyces pombe 972h-
MSAAEKKPASKAPAGKAPRDTMKSADKKRGKNRKETYSSYIYKVLKQVHPDTGISNQAMRILNSFVNDIFERIATEASKLAAYNKKSTISSREIQTAVRLILPGELAKHAVTEGTKSVTKYSSSAQ

SEQ ID NO: 2092 - DNA, 372 bp, Drosophila melanogaster
  CDS (1)..(372)
atgcctccgaaaactagtggaaaggcagccaagaaggctggcaaggctcagaagaacatcaccaagaccgacaagaaaaagaagcgcaaaaggaaggagagctatgccatctacatttacaaggttctcaagcaggtccatcctgacaccggaatttcgtcgaaggcgatgagcataatgaacagctttgtaaatgatattttcgagcgaattgctgccgaagcgtctcgtctagctcactacaacaagcgctcgaccatcaccagtcgggagatccaaacggctgttcgcctgcttttgcctggagagttggccaagcatgctgtcagtgagggaaccaaggctgtcaccaagtacaccagctctaaataa

SEQ ID NO: 2093 - protein, 123 aa, Drosophila melanogaster
MPPKTSGKAAKKAGKAQKNITKTDKKKKRKRKESYAIYIYKVLKQVHPDTGISSKAMSIMNSFVNDIFERIAAEASRLAHYNKRSTITSREIQTAVRLLLPGELAKHAVSEGTKAVTKYTSSK

SEQ ID NO: 2094 - DNA, 381 bp, Homo sapiens
  CDS (1)..(381)
atgccagacccgtccaaatcggctcctgcgcccaagaagggttctaaaaaggctgtcaccaaggcacagaagaaggacggcaagaagcgcaagcgcggccgcaaggagagctattctatctacgtgtacaaggtgctgaagcaggtgcaccccgacaccggcatctcgtccaaggccatgggcatcatgaactccttcgtcaatgacatcttcgagcgcatcgccagcgaggcctcccgcctggcacactacaacaagcgctccaccatcacgtcccgcgaagtgcagacggccgttcgcctgctgctgcccggcgagctggccaagcacgccgtgtccgagggcaccaaggctgtcaccaagtacaccagctccaagtga

SEQ ID NO: 2095 - protein, 126 aa, Homo sapiens
MPDPSKSAPAPKKGSKKAVTKAQKKDGKKRKRGRKESYSIYVYKVLKQVHPDTGISSKAMGIMNSFVNDIFERIASEASRLAHYNKRSTITSREVQTAVRLLLPGELAKHAVSEGTKAVTKYTSSK

SEQ ID NO: 2096 - DNA, 381 bp, Mus musculus
  CDS (1)..(381)
atgcctgagcctgcgaagtccgctcccgccccgaagaagggctccaagaaggccgtcaccaaggcccagaagaaggacggcaagaagcgcaagcgcagccgcaaggagagctactcggtgtacgtgtacaaggtgctgaagcaagtgcaccccgacaccggcatctcctccaaggccatgggcatcatgaactcgttcgtgaacgacatcttcgagcgcatcgcgagcgaggcgtcccgcctggcgcattacaacaagcgctcgaccatcacgtcccgggagatccagacggccgtgcgcctgctgctgcccggggagctggccaagcacgccgtgtcggagggcaccaaggctgtcaccaagtatactagcgccaagtaa

SEQ ID NO: 2097 - protein, 126 aa, Mus musculus
MPEPAKSAPAPKKGSKKAVTKAQKKDGKKRKRSRKESYSVYVYKVLKQVHPDTGISSKAMGIMNSFVNDIFERIASEASRLAHYNKRSTITSREIQTAVRLLLPGELAKHAVSEGTKAVTKYTSAK

SEQ ID NO: 2098 - DNA, 381 bp, Mus musculus
  CDS (1)..(381)
atgcctgagcccgccaagtccgctcctgccccgaagaagggctccaagaaggccctgaccaaggcccagaagaaggacggcaagaagcgcaagcgcagccgcaaggagagctactcggtgtacgtgtacaaggtgctgaagcaagtgcaccccgacaccggcatctcctccaaagccatgggcatcatgaactcgttcgtgaacgacatcttcgagcgcatcgcgggcgaggcgtcccgcctggcgcattacaacaagcgctcgaccatcacgtcccgggagatccagacggccgtgcgcctgctgctgcccggggagctggccaagcacgccgtgtcggagggcaccaaggctgtcaccaagtacaccagctccaagtga

SEQ ID NO: 2099 - protein, 126 aa, Mus musculus
MPEPAKSAPAPKKGSKKALTKAQKKDGKKRKRSRKESYSVYVYKVLKQVHPDTGISSKAMGIMNSFVNDIFERIAGEASRLAHYNKRSTITSREIQTAVRLLLPGELAKHAVSEGTKAVTKYTSSK

SEQ ID NO: 2100 - DNA, 462 bp, Oryza sativa (japonica cultivar-group)
  CDS (1)..(462)
atggcgcccaaggcggagaagaagccggccgcgaagaagcccgcggaggaggagcccgcagcggagaaggccgagaaggcccccgcggggaagaagcccaaggcggagaagcgtctccccgccggcaaggccgagaagggcagcggcgaggggaagaaggcggggaggaagaaggcgaagaagagcgtcgagacctacaagatctacatcttcaaggtgctcaagcaggttcaccccgacatcggcatctcctccaaggccatgtccatcatgaactccttcatcaatgacatcttcgagaagctcgccggagagtccgccaagctcgcccgctacaacaagaagcccaccatcacctcccgggagatccagacctccgtccgcctcgtcctccccggcgagctcgccaagcacgccgtctctgagggcaccaaggccgtcactaaattcacctccgcttag

SEQ ID NO: 2101 - protein, 153 aa, Oryza sativa (japonica cultivar-group)
MAPKAEKKPAAKKPAEEEPAAEKAEKAPAGKKPKAEKRLPAGKAEKGSGEGKKAGRKKAKKSVETYKIYIFKVLKQVHPDIGISSKAMSIMNSFINDIFEKLAGESAKLARYNKKPTITSREIQTSVRLVLPGELAKHAVSEGTKAVTKFTSA

SEQ ID NO: 2102 - DNA, 462 bp, Oryza sativa (japonica cultivar-group)
  CDS (1)..(462)
atggcgcccaaggcggagaagaagccggcggcgaagaagcccgcggaggaggagcccgcggcggagaaggccgagaaggccctggcggggaagaagcccaaggcggagaagcgtctccccgccggcaaggccgagaagagcagcggcgaggggaagaaggcggggcggaagaaggcgaagaagagcgtcgagacctacaagatctacatcttcaaggtgctcaagcaggtccaccccgacatcggcatctcctccaaggccatgtccatcatgaactccttcatcaacgacatcttcgagaagctcgccggggagtccgccaagctcgcgcgctacaacaagaagcccaccatcacctcacgggagatccagacctccgtccgcctcgtcctccccggcgagctcgccaagcacgccgtctccgagggcaccaaggctgtgaccaagttcacctccgcttag

SEQ ID NO: 2103 - protein, 153 aa, Oryza sativa (japonica cultivar-group)
MAPKAEKKPAAKKPAEEEPAAEKAEKALAGKKPKAEKRLPAGKAEKSSGEGKKAGRKKAKKSVETYKIYIFKVLKQVHPDIGISSKAMSIMNSFINDIFEKLAGESAKLARYNKKPTITSREIQTSVRLVLPGELAKHAVSEGTKAVTKFTSA

SEQ ID NO: 2104 - DNA, 462 bp, Oryza sativa (japonica cultivar-group)
  CDS (1)..(462)
atggcgcccaaggcggagaagaagccggcggcgaagaagcccgcggaggaggagcccgcggcggagaaggccgagaaggccccggcggggaagaagcccaaggcggagaagcgcctccccgccggcaagggcgagaagggcagcggcgaggggaagaaggcggggcggaagaaggcgaagaagagcgtcgagacctacaagatctacatcttcaaggtgctcaagcaggtccaccccgacatcggcatctcctccaaggccatgtccatcatgaactccttcatcaatgatatcttcgagaagctcgccggagagtccgccaagctcgcgcgctacaacaagaagcccaccatcacctcccgggagatccagaccgccgtccgcctcgtcctccccggcgagctcgccaagcacgccgtctccgagggcaccaaggccgttaccaagttcacttcctcctag

SEQ ID NO: 2105 - protein, 153 aa, Oryza sativa (japonica cultivar-group)
MAPKAEKKPAAKKPAEEEPAAEKAEKAPAGKKPKAEKRLPAGKGEKGSGEGKKAGRKKAKKSVETYKIYIFKVLKQVHPDIGISSKAMSIMNSFINDIFEKLAGESAKLARYNKKPTITSREIQTAVRLVLPGELAKHAVSEGTKAVTKFTSS

SEQ ID NO: 2106 - DNA, 462 bp, Oryza sativa (japonica cultivar-group)
  CDS (1)..(462)
atggcgcccaaggcggagaagaagccggccgcgaagaagcccgcggaggaggagcccgcggcggagaaggccgagaaggccccggcggggaagaagcccaaggcggagaagcgtctccccgccggcaagggcgagaagggcagcggcgaggggaagaaggcggggcggaagaaggggaagaagagcgtcgagacctacaagatctacatcttcaaggtgctcaagcaggtccaccccgacatcggcatctcctccaaggccatgtccatcatgaactccttcatcaacgacatcttcgagaagctcgccgccgaggccgccaagctcgcccgctacaacaagaagcccaccatcacctcccgggagatccagaccgccgtccgcctcgtcctccccggcgagcttgccaagcacgccgtctccgagggcaccaaggccgtcaccaagttcacttcctcttag

SEQ ID NO: 2107 - protein, 153 aa, Oryza sativa (japonica cultivar-group)
MAPKAEKKPAAKKPAEEEPAAEKAEKAPAGKKPKAEKRLPAGKGEKGSGEGKKAGRKKGKKSVETYKIYIFKVLKQVHPDIGISSKAMSIMNSFINDIFEKLAAEAAKLARYNKKPTITSREIQTAVRLVLPGELAKHAVSEGTKAVTKFTSS

SEQ ID NO: 2108 - DNA, 468 bp, Oryza sativa (japonica cultivar-group)
  CDS (1)..(468)
atggcgcccaaggcggagaagaagccggccgcgaagaagcccgcggaggaggagcccgcggcggagaaggccgagaaggccccggccgggaagaagcccaaggcggagaagcggctccccgccggcaagggcgagaagggctccggcgaggggaagaaggaccgcgctgggaggaagaaggcgaagaagagcgtcgagacctacaagatctacatcttcaaggtgctcaagcaggtccaccccgacatcggcatctcctccaaggccatgtccatcatgaactccttcatcaacgacatcttcgagaagctcgccgccgaggccgccaagctcgcccgctacaacaagaagcccaccatcacctcccgcgagatccagacctccgtccgcctcgtcctccccggcgagcttgccaagcacgccgtctccgagggcaccaaggctgtgaccaagttcacctccgcttag

SEQ ID NO: 2109 - protein, 155 aa, Oryza sativa (japonica cultivar-group)
MAPKAEKKPAAKKPAEEEPAAEKAEKAPAGKKPKAEKRLPAGKGEKGSGEGKKDRAGRKKAKKSVETYKIYIFKVLKQVHPDIGISSKAMSIMNSFINDIFEKLAAEAAKLARYNKKPTITSREIQTSVRLVLPGELAKHAVSEGTKAVTKFTSA

SEQ ID NO: 2110 - DNA, 420 bp, Oryza sativa (japonica cultivar-group)
  CDS (1)..(420)
atggcgcccaaggcggagaagaagcccgcggagaagaagccggtggaggagaaggcggagaagaagcccaaggccgagaagcgggtgccgggcgccaaggagggcggcggcgagaagaaggggaagaagaaggccaagaagagcgtcgaaacttataagatctacattttcaaggtcctcaagcaggtgcatcccgatatcgggatatcgtccaaggccatgtcgatcatgaactcgttcatcaacgatatcttcgagaagctcgcccaggaggccgcccgtctcgcccgctacaacaagaagccgaccatcacctcccgcgagatccagacctcggtgcgcctcgtcctccccggcgagctcgccaagcacgccgtctctgagggcaccaaggccgtcaccaagttcacgtcgtcttaa

SEQ ID NO: 2111 - protein, 139 aa, Oryza sativa (japonica cultivar-group)
MAPKAEKKPAEKKPVEEKAEKKPKAEKRVPGAKEGGGEKKGKKKAKKSVETYKIYIFKVLKQVHPDIGISSKAMSIMNSFINDIFEKLAQEAARLARYNKKPTITSREIQTSVRLVLPGELAKHAVSEGTKAVTKFTSS

SEQ ID NO: 2112 - DNA, 381 bp, Danio rerio
  CDS (1)..(381)
atgcccgaacctgcgaagtcagcgcccgctcccaaaaaaggctctaaaaaagctgtcaccaagacccagaagaagggggataagaaaaggcgtaagaccaggaaagagagttacgccatttacgtgtacaaagtactaaaacaagtccacccggacactggcatctcctcaaaggcgatgggcattatgaactcatttgtaaacgacatcttcgagcgcatcgccggagaagcgtcgcgcctggcgcattacaacaagcgctccactatcacatcccgggagatccagacggccgtgcgcctgctcctgcccggggaactggccaaacacgcagtgtctgagggcacaaaggccgtgaccaaatacaccagctccaagtga

SEQ ID NO: 2113 - protein, 126 aa, Danio rerio
MPEPAKSAPAPKKGSKKAVTKTQKKGDKKRRKTRKESYAIYVYKVLKQVHPDTGISSKAMGIMNSFVNDIFERIAGEASRLAHYNKRSTITSREIQTAVRLLLPGELAKHAVSEGTKAVTKYTSSK

SEQ ID NO: 2114 - DNA, 465 bp, Mus musculus
  CDS (1)..(465)
atgcctgatccttcatttgaatgcaaggcatacaaatattcttgctacaggggcgtccgcgtttccgtagtacaactagacattatgcctgatccatccaaatcagctccagcccccaagaaaggctccaaaaaggcggtcaccaaggcgcagaaaaaggatggcaagaaacgcaaacggggccgcaaggagagctactccatctacgtgtacaaggtgctgaagcaggtgcatccggacaccggcatctcgtctaaggccatgggcatcatgaactcgttcgtcaatgacatcttcgagcgcatcgccagcgaggcctcccgcctggcgcattacaacaagcgctcgaccatcacgtcccgcgaggtgcagacagccgtgcgcctgctgctgcccggggagctggccaagcatgctgtgtccgagggcaccaaggcagtcaccaaatacaccagctccaagtga

SEQ ID NO: 2115 - protein, 154 aa, Mus musculus
MPDPSFECKAYKYSCYRGVRVSVVQLDIMPDPSKSAPAPKKGSKKAVTKAQKKDGKKRKRGRKESYSIYVYKVLKQVHPDTGISSKAMGIMNSFVNDIFERIASEASRLAHYNKRSTITSREVQTAVRLLLPGELAKHAVSEGTKAVTKYTSSK

SEQ ID NO: 2116 - DNA, 372 bp, Strongylocentrotus purpuratus
  CDS (1)..(372)
atgcctgcgaaagcacaaccagctggaaagaagggatccaagaaggctaaggcccccagacctagcgggggcaagaagaggcgaagacgccgaaaggaaagctacggaatctacatctacaaggtgctgaagcaggttcaccctgacactggcatctccagccgtgccatgtccatcatgaacagtttcgtcaacgatgtcttcgagcgcatcgccgccgaggcttcccgtcttgcccactacaacaagaagtccaccatcaccagtcgtgaggtccagaccgtcgtcagactcctcctccccggagagctggccaagcacgccgtctctgagggcaccaaggctgtcaccaagtacaccacctccaagtaa

SEQ ID NO: 2117 - protein, 123 aa, Strongylocentrotus purpuratus
MPAKAQPAGKKGSKKAKAPRPSGGKKRRRRRKESYGIYIYKVLKQVHPDTGISSRAMSIMNSFVNDVFERIAAEASRLAHYNKKSTITSREVQTVVRLLLPGELAKHAVSEGTKAVTKYTTSK

SEQ ID NO: 2118 - DNA, 372 bp, Strongylocentrotus purpuratus
  CDS (1)..(372)
  misc_feature (301)..(301): n is a, g, c or t
atgcctgccaaagcacaagccgctggaaagaagggatcgaagaaggctaaggcccccaagcctagcggagacaagaagaggagacgaaagaggaaggaaagctacggaatctacatctacaaggttctgaagcaggttcaccccgacactggtatctccagccgtgccatgtccatcatgaacagcttcgtcaacgatgtcttcgagcgcatcgccgccgaggcttcccgccttgcccactacaacaagaagtccaccatcaccagtcgtgaggtccagaccgctgtcagactcctcctcnccggagagctggccaagcatgccgtctctgagggcaccaaggctgtcaccaagtacaccacctccaagtaa

SEQ ID NO: 2119 - protein, 123 aa, Strongylocentrotus purpuratus
  misc_feature (101)..(101): The Xaa at location 101 stands for Ala, Pro, Ser, or Thr.
MPAKAQAAGKKGSKKAKAPKPSGDKKRRRKRKESYGIYIYKVLKQVHPDTGISSRAMSIMNSFVNDVFERIAAEASRLAHYNKKSTITSREVQTAVRLLLXGELAKHAVSEGTKAVTKYTTSK

SEQ ID NO: 2120 - DNA, 375 bp, Anopheles gambiae str. PEST
  CDS (1)..(375)
atggcacccaaaaccagtggaaaagctgcgaagaagtctggcaaggcccagaaaaatatttccaagtccgacaagaaaaagaagcgcaagacccgcaaggaaagctacgctatttacatctacaaagtgttgaagcaagtccacccggatactggcatctcttcgaaggccatgagcatcatgaacagtttcgtcaacgatatcttcgaacgcattgctgctgaggcatcccgcttggcgcactacaacaagcgttcgacgatcacgtcccgcgaaatccaaaccgctgttcgtctgctgctgcctggtgagcttgccaagcacgccgtctccgaaggaacgaaggctgtcacaaagtacaccagctcgaagtaa

SEQ ID NO: 2121 - protein, 124 aa, Anopheles gambiae str. PEST
MAPKTSGKAAKKSGKAQKNISKSDKKKKRKTRKESYAIYIYKVLKQVHPDTGISSKAMSIMNSFVNDIFERIAAEASRLAHYNKRSTITSREIQTAVRLLLPGELAKHAVSEGTKAVTKYTSSK

SEQ ID NO: 2122 - DNA, 588 bp, Gallus gallus
  CDS (1)..(588)
atgggagagcggatcggcgggcacccaatggtgggcgcgcgttgtgatgacgccacaaacacggacttccagccaatgccagtgcggcgctgcggagctgctgctttgcatagcgccgctataaaggcggctcctgcggtcggctgcgttactgcgctccgagcgagtgcgccggttgtgttttgcgagctcgttcggtgttcagttatgcccgagccggctaagtccgcacccgccccgaagaagggctctaagaaggcggtcaccaagacccagaagaagggtgataagaaaagacgaaagagccgcaaggagagctactcgatctacgtgtacaaggtgctgaagcaggtgcaccccgacacgggcatctcgtccaaggccatgggcatcatgaactcgttcgtcaacgacatcttcgagcgcatcgccggcgaggcgtcgcgcctggcgcactacaacaagcgctcgaccatcacgtcgcgggagatccagacggccgtgcggctgctgctgcccggcgagctggccaagcacgcggtctcggagggcaccaaggcggtcaccaagtacaccagctccaagtag

SEQ ID NO: 2123 - protein, 195 aa, Gallus gallus
MGERIGGHPMVGARCDDATNTDFQPMPVRRCGAAALHSAAIKAAPAVGCVTALRASAPVVFCELVRCSVMPEPAKSAPAPKKGSKKAVTKTQKKGDKKRRKSRKESYSIYVYKVLKQVHPDTGISSKAMGIMNSFVNDIFERIAGEASRLAHYNKRSTITSREIQTAVRLLLPGELAKHAVSEGTKAVTKYTSSK

SEQ ID NO: 2124 - DNA, 336 bp, Gallus gallus
  CDS (1)..(336)
atgcgtggtcatccttcctcctctggtgacaagaagtccaagagaaagcctaagagaaaggaaacttattcagtctatatctacaaagtactgaagcaggtgcaccctgacacaggtatctcctccaaggccatgagcatcatgaactcatttgtcaacgacatctttgagcggctggcagtggaggcgtcgcgcctggcgcagtacaaccaccgctcgaccatcaccagccgggaggtgcagacggccgtgcggctcctgctgcccggagagctggccaagcatgctgtgtctgaaggcaccaaggctgtcaccaagtacaccagcagcaagtga

SEQ ID NO: 2125 - protein, 111 aa, Gallus gallus
MRGHPSSSGDKKSKRKPKRKETYSVYIYKVLKQVHPDTGISSKAMSIMNSFVNDIFERLAVEASRLAQYNHRSTITSREVQTAVRLLLPGELAKHAVSEGTKAVTKYTSSK

SEQ ID NO: 2126 - DNA, 459 bp, Oryza sativa (japonica cultivar-group)
  CDS (1)..(459)
atggcgcccaaggcggagaagaagccggcggcgaagaagcccgcggaggaggagcccgcggcggagaaggccccggcggcggggaagaagcccaaggcggagaagcggctccccgcggggaagggcgagaagggcggcgccggcgaggggaagaaggccgggaggaagaaggggaagaagagcgtggagacctacaagatctacatcttcaaggttctcaagcaggtccaccccgacatcggcatctcctccaaggccatgtccatcatgaactccttcatcaacgacatcttcgagaagctcgccgccgaggccgccaagctcgcccgctacaacaagaagcccaccatcacctcccgcgagatccagacctccgtccgcctcgtcctccccggcgagctcgccaagcacgccgtctccgagggcaccaaggccgtcaccaagttcacctccgcttag

SEQ ID NO: 2127 - protein, 152 aa, Oryza sativa (japonica cultivar-group)
MAPKAEKKPAAKKPAEEEPAAEKAPAAGKKPKAEKRLPAGKGEKGGAGEGKKAGRKKGKKSVETYKIYIFKVLKQVHPDIGISSKAMSIMNSFINDIFEKLAAEAAKLARYNKKPTITSREIQTSVRLVLPGELAKHAVSEGTKAVTKFTSA

SEQ ID NO: 2128 - DNA, 453 bp, Oryza sativa (japonica cultivar-group)
  CDS (1)..(453)
atggcgcccaaggccgagaagaagcccgcggagaagaagccggcggaggagaaggccggcgagaaggcgcccgcggccgggaagaagcccaaggccgagaagcggctgccggcgtccaagggggagaagggcggcgagggcaagaaggagcgcggcaggaagaaggccaagaagagcgtcgagacctacaagatatacatcttcaaggtgctcaagcaggtgcacccggacatcgggatctcctccaaggccatgtcaatcatgaactcgttcatcaacgacatcttcgagaagctcgccggcgaggccgccaagctcgccaggtacaacaagaagcccaccatcacctccagggagatccagacctccgtccgcctcgtcctccccggcgagctcgccaagcacgccgtctccgagggcaccaaggccgtcaccaagttcaccagctcttag

SEQ ID NO: 2129 - protein, 150 aa, Oryza sativa (japonica cultivar-group)
MAPKAEKKPAEKKPAEEKAGEKAPAAGKKPKAEKRLPASKGEKGGEGKKERGRKKAKKSVETYKIYIFKVLKQVHPDIGISSKAMSIMNSFINDIFEKLAGEAAKLARYNKKPTITSREIQTSVRLVLPGELAKHAVSEGTKAVTKFTSS

SEQ ID NO: 2130 - DNA, 381 bp, Pan troglodytes
  CDS (1)..(381)
atgcctgatccagctaagtccgctcccgccccaaagaagggctccaagaaggcggtgaccaaggcgcagaagaaggatggcaagaagcgtaaacgcagccgcaaggagagctactctgtatacgtttacaaggtgctgaagcaggtcctccccgacactggcatctcctccaaagccatggggatcatgaattcctttgtcaacgatatcttcgagcgcatcgctggcgaggcttcccgcctggctcattacaacaagcgttcaaccatcacctccagggagatccagacagccgtgcgcctgctgctgcctggggaactggccaagcacgccgtgtccgagggcactaaggccgtcaccaagtacaccagctccaagtaa

SEQ ID NO: 2131 - protein, 126 aa, Pan troglodytes
MPDPAKSAPAPKKGSKKAVTKAQKKDGKKRKRSRKESYSVYVYKVLKQVLPDTGISSKAMGIMNSFVNDIFERIAGEASRLAHYNKRSTITSREIQTAVRLLLPGELAKHAVSEGTKAVTKYTSSK

SEQ ID NO: 2132 - DNA, 381 bp, Pan troglodytes
  CDS (1)..(381)
atgccggagccatcgcgggcggctccggcttctaaaaagggctccaagaaggccattaccaaggcgcagaagaaggacggcaagaagcgcaagcgcggccgcaaggagagctattctatctacgtgtacaaggtgctgaagcaggtgcaccccgacaccggcatctcgtccaaggccatgggcatcatgaactccttcgtcaatgacatcttcgagcgcatcgccagcgaggcctcccgcctggcgcactacaacaagcgctccaccatcacgtcccgcgaaatgcagacggccgtgcgcctgctgctgcccggcgagctggccaagcacgccgtgtccgagcgcactaaggctgtcaccaagtacaccagctccaagtga

SEQ ID NO: 2133 - protein, 126 aa, Pan troglodytes
MPEPSRAAPASKKGSKKAITKAQKKDGKKRKRGRKESYSIYVYKVLKQVHPDTGISSKAMGIMNSFVNDIFERIASEASRLAHYNKRSTITSREMQTAVRLLLPGELAKHAVSERTKAVTKYTSSK

SEQ ID NO: 2134 - DNA, 384 bp, Pan troglodytes
  CDS (1)..(384)
atgccggaggtgtcgtctaaaggtgctaccatttccaagaagggctttaagaaagctgtcgttaagacccagaagaaggagggcaaaaagcgcaagaggacccgtaaggagagttattctatttacatctacaaggtgctaaagcaggtccatccggacactgggatctcttcgaaagccatgagcattatgaattccttcgtcactgatatctttgagcgtatagcgagcgaggcatcacgtttggctcactacagcaagcgctccaccatctcttccagagagattcagacagcagtgcgcttgctactgccgggagagctggctaaacatgctgtgtctgagggcaccaaggctgtcactaagtacaccagctccaaataa

SEQ ID NO: 2135 - protein, 127 aa, Pan troglodytes
MPEVSSKGATISKKGFKKAVVKTQKKEGKKRKRTRKESYSIYIYKVLKQVHPDTGISSKAMSIMNSFVTDIFERIASEASRLAHYSKRSTISSREIQTAVRLLLPGELAKHAVSEGTKAVTKYTSSK

SEQ ID NO: 2136 - DNA, 780 bp, Canis familiaris
  CDS (1)..(780)
atggctcgcacgaagcagacggcgcgcaagtcgacgggcggcaaggccccgcgcaagcagctggccaccaaggcggcccgcaagagcgcgccggccaccggcggcgtcaagaagccgcaccgctaccggcccggcacggtggccctgcgcgagatccggcgctaccagaagtccacggagctgctgatccgcaagctgccgttccagcgcctggtgcgcgagatcgcgcaggacttcaagaccgacctgcgcttccagagctcggccgtcatggcgctgcaggaggcgtgcgaggcctacctggtggggctcttcgaggacaccaacctctgcgccatccacgccaagcgcgtcaccatcatgcccaaggacatccagctggcgcgccgcatccgcggggagagggccgaagtgaaatccgcgccggccccgaagaagggctccaagaaggcggtgaccaaggcgcagaagaaggacggcaagaagcgcaagcgcagccgcaaggagagctactcggtgtacgtgtacaaggtgctgaagcaggtgcaccccgacacgggcatctcgtccaaggccatgggcatcatgaactcgttcgtcaacgacatcttcgagcgcatcgcgggcgaggcgtcgcgcctggcgcattacaacaagcgctcgaccatcacgtccagggagatccagacggccgtgcgcctgctgctgcccggggagctggccaagcacgccgtgtccgagggcaccaaggccgtcaccaagtacaccagctccaagtaa

SEQ ID NO: 2137 - protein, 259 aa, Canis familiaris
MARTKQTARKSTGGKAPRKQLATKAARKSAPATGGVKKPHRYRPGTVALREIRRYQKSTELLIRKLPFQRLVREIAQDFKTDLRFQSSAVMALQEACEAYLVGLFEDTNLCAIHAKRVTIMPKDIQLARRIRGERAEVKSAPAPKKGSKKAVTKAQKKDGKKRKRSRKESYSVYVYKVLKQVHPDTGISSKAMGIMNSFVNDIFERIAGEASRLAHYNKRSTITSREIQTAVRLLLPGELAKHAVSEGTKAVTKYTSSK

SEQ ID NO: 2138 - DNA, 381 bp, Bos taurus
  CDS (1)..(381)
atgcctgaaccggctaagtctgctccggccccgaaaaagggctccaagaaggcggtgactaaggcgcagaagaaggacggcaagaagcgcaagcgcggccgcaaggaaagctactctatctacgtgtacaaggtgctgaagcaagtccacccggacaccggcatctcgtccaaggccatgggcatcatgaactcctttgtaaacgacattttcgagcgcatcgcgggcgaggcatcgcgcctggcgcattacaacaagcgctcgaccatcacttccagggagatccagacggccgtgcgcctgttgctgcccggggagctggccaagcatgcggtgtccgagggcaccaaggctgtcaccaagtacactagtgccaagtaa

SEQ ID NO: 2139 - protein, 126 aa, Bos taurus
MPEPAKSAPAPKKGSKKAVTKAQKKDGKKRKRGRKESYSIYVYKVLKQVHPDTGISSKAMGIMNSFVNDIFERIAGEASRLAHYNKRSTITSREIQTAVRLLLPGELAKHAVSEGTKAVTKYTSAK

SEQ ID NO: 2140 - DNA, 423 bp, Aspergillus nidulans FGSC A4
  CDS (1)..(423)
atgcctcccaaagctgccgagaagaagcctagcactggcggcaaagcccctgctggcaaggccccagctgagaagaaggaagctggaaagaagaccgccgctgctgcctctggcgagaagaagaagcgcggaaagaccaggaaggagacctactcttcttacatctacaaggtcctcaagcaagtgcacccggacactggtatctccacccgtgctatgtctattctgaactctttcgtcaatgatatctttgagcgcgttgcgacggaggcgtccaagctcgctgcttataacaagaagtccaccatatcatctcgagaaatccagacctctgtgaggctgattctgcccggagaactcgccaagcacgctgtgtctgagggcaccaaggccgttacgaagtattcctcatctgccaaatag

SEQ ID NO: 2141 - protein, 140 aa, Aspergillus nidulans FGSC A4
MPPKAAEKKPSTGGKAPAGKAPAEKKEAGKKTAAAASGEKKKRGKTRKETYSSYIYKVLKQVHPDTGISTRAMSILNSFVNDIFERVATEASKLAAYNKKSTISSREIQTSVRLILPGELAKHAVSEGTKAVTKYSSSAK

SEQ ID NO: 2142 - DNA, 375 bp, Danio rerio
  CDS (1)..(375)
atgcctgaaccagcgaagactgcacccaagaagggctccaaaaaggcggtaaccaaatctgccggtaaaggaggaaagaagcgaaagaggaccaggaaggagagctatgctatctacgtgtacaaagtgctgaagcaggtccatcctgacactggaatctcctcgaaggcgatgggcatcatgaactcgtttgtcaacgacatctttgagcgcatcgccggtgaggcgtctcgtctcgctcactacaacaagcgctccaccatcacatcgagagagatccagaccgccgtgcgtctgctgctgcccggggagctggccaaacacgctgtatctgagggcaccaaggccgtcaccaagtacaccagctccaagtaa

SEQ ID NO: 2143 - protein, 124 aa, Danio rerio
MPEPAKTAPKKGSKKAVTKSAGKGGKKRKRTRKESYAIYVYKVLKQVHPDTGISSKAMGIMNSFVNDIFERIAGEASRLAHYNKRSTITSREIQTAVRLLLPGELAKHAVSEGTKAVTKYTSSK

SEQ ID NO: 2144 - DNA, 672 bp, Danio rerio
  CDS (1)..(672)
atgtcaggaagaggcaaaggaggcaaagggcttggaaaaggtggcgctaagcgtcatcgcaaagttttgcgtgataacatccagggtatcaccaaacctgccatccgtcgtcttgctcgccgcggtggggtcaaacgcatctccggtctgatctatgaggagactcgcggtgttctcaaggtgttcctggagaatgtgatccgtgatgccgttacctacacagagcacgccaagagaaagaccgtgacagccatggatgttgtgtatgcactgaaacgtcagggccgcactctcatcatgcctgaaccagcgaagactgcacccaagaagggctccaagaaagccgtcaccaagaccgccagcaaaagcggcaagaaacgcagaaggaccaggaaggaaagctatgctatctacgtctacaaagtcttgaagcaggttcatcccgacactggaatctcttccaaggcgatgggcatcatgaactcgttcgtcaacgacatctttgagcgcatcgctggtgaggcatctcgtcttgctcattacaacaagcgctccaccatcacttccagagagatccagactgccgtgcgtctgctgctgcctggtgaactggctaaacacgcagtgtctgagggcacaaaggccgtcaccaagtacaccagctccaagtaa

SEQ ID NO: 2145 - protein, 223 aa, Danio rerio
MSGRGKGGKGLGKGGAKRHRKVLRDNIQGITKPAIRRLARRGGVKRISGLIYEETRGVLKVFLENVIRDAVTYTEHAKRKTVTAMDVVYALKRQGRTLIMPEPAKTAPKKGSKKAVTKTASKSGKKRRRTRKESYAIYVYKVLKQVHPDTGISSKAMGIMNSFVNDIFERIAGEASRLAHYNKRSTITSREIQTAVRLLLPGELAKHAVSEGTKAVTKYTSSK

SEQ ID NO: 2146 - DNA, 372 bp, Theileria parva
  CDS (1)..(372)
atgtctggaaaagtaccctcatcaaaatcccacgcggctaagaaaaccgctggaaaaacccttggagtaagataccgcaggaagaagcgtgttgagtctttttcactttacatatacaaggtgttgaagcaggtgcacccggaaactggtgtgagtaagaagagcatgagcatcatgaactccttcatcaacgacgtcttcgaccgtctcgctctcgaggccaccaggctcatcaggtacaacaagaagagcactctcagctctcgcgaagtccaaactgccgtcagactcctcctacccggcgaactctcaaaacacgccgtctccgaaggcaccaaagccgtcactaaatacaccacctccggagtctaa

SEQ ID NO: 2147 - protein, 123 aa, Theileria parva
MSGKVPSSKSHAAKKTAGKTLGVRYRRKKRVESFSLYIYKVLKQVHPETGVSKKSMSIMNSFINDVFDRLALEATRLIRYNKKSTLSSREVQTAVRLLLPGELSKHAVSEGTKAVTKYTTSGV

SEQ ID NO: 2148 - DNA, 471 bp, Strongylocentrotus purpuratus
  CDS (1)..(471)
atgcctgccaaagcagttagcggaaaaggagcgaagaaggccggtaaggcaaaggccagccgtgcaactgacggaaagaagaggaggaagcgccgaaaggaaagctacggaatctacatctacaaagttctgaagcaggttcatcccgatactggtatctccagccgtgccatgtccatcatgaacagcttcgtcaacgatgtcttcgagcgcattgccggtgaggcttcccgtcttgcccaatacaacaagaagtccaccatcagcagccgtgaggtccagaccgctgtcagactcctcctccccggagaactcgccaagcacgccgtctctgagggcaccaaggctgtcaccaagtacaccacctccaagtgttcctcttcctgtacaaatttggagttcccaatgcaaaagagaactgtttctaaaggagcaaaatcagatccgatctccaaaggccaaacagattga

SEQ ID NO: 2149 - protein, 156 aa, Strongylocentrotus purpuratus
MPAKAVSGKGAKKAGKAKASRATDGKKRRKRRKESYGIYIYKVLKQVHPDTGISSRAMSIMNSFVNDVFERIAGEASRLAQYNKKSTISSREVQTAVRLLLPGELAKHAVSEGTKAVTKYTTSKCSSSCTNLEFPMQKRTVSKGAKSDPISKGQTD

SEQ ID NO: 2150 - DNA, 372 bp, Strongylocentrotus purpuratus
  CDS (1)..(372)
atgcctgccaagactagtggaaagggagcgaagaaggccggtaaggcaaaggccagccgtgcagcaggagataagaagaggaagaggcgccgaaaggagagctacggaatctacatctacaaagttctgaagcaagttcaccccgacactggtatctccagcaaggccatgtccatcatgaacagcttcgtcaacgatgtcttcgagcgtatcgccggtgaggcttcccgccttgcaggctacaacaagaaggccaccatcagcagccgagagatccagaccgctgtccgtctcctcctccccggagagctggccaagcacgccgtctctgagggcaccaaggctgtcaccaagtacaccacctccaagtaa

SEQ ID NO: 2151 - protein, 123 aa, Strongylocentrotus purpuratus
MPAKTSGKGAKKAGKAKASRAAGDKKRKRRRKESYGIYIYKVLKQVHPDTGISSKAMSIMNSFVNDVFERIAGEASRLAGYNKKATISSREIQTAVRLLLPGELAKHAVSEGTKAVTKYTTSK

SEQ ID NO: 2152 - DNA, 372 bp, Chaetopterus variopedatus
  CDS (1)..(372)
atgccacccaaagtaagctccaagggcgccaagaaggccgtttccaagtctaaagccccacgatctggggacaagaagaaacgcagaaagaggagagaaagctacagcatctacgtgtacaaagtcatgaagcaagtgcaccctgacactggtatctccagcaaggccatgagcatcatgaacagcttcgtcaacgatctgttcgagcgtatcgccagcgaagcatctcgcctggctcactacaacaaacgctcaaccatcaccagccgggagatccagaccgctgtgcgccttctcctgcccggtgaattggccaagcacgctgtcagcgagggtactaaagccgtgactaagtacactagctccaagtaa

SEQ ID NO: 2153 - protein, 123 aa, Chaetopterus variopedatus
MPPKVSSKGAKKAVSKSKAPRSGDKKKRRKRRESYSIYVYKVMKQVHPDTGISSKAMSIMNSFVNDLFERIASEASRLAHYNKRSTITSREIQTAVRLLLPGELAKHAVSEGTKAVTKYTSSK

SEQ ID NO: 2154 - DNA, 417 bp, Lycopersicon esculentum
  CDS (1)..(417)
atgaagcccgcagagaagaagccagctgagaaaacccctgtagccgagaaagctccggcggagaagaagccaaaggctgggaagaagctcccaaaggatgctgccgccggtgacaagaagaagaagaggtcgaagaaggctgttgagacttacaagatctatatcttcaaagttctgaaacaggtccatcctgatatcggtatttcaagcaaagctatgggtatcatgaacagtttcatcaatgatatctttgagaaacttgctcaggaagcttcccgacttgcccgctacaacaagaagcctactataacttctcgggaaattcagacggctgttcgattggtccttcctggtgaattggctaagcatgccgtctctgaaggcacaaaggctgttaccaaattcactagctcttaa

SEQ ID NO: 2155 - protein, 138 aa, Lycopersicon esculentum
MKPAEKKPAEKTPVAEKAPAEKKPKAGKKLPKDAAAGDKKKKRSKKAVETYKIYIFKVLKQVHPDIGISSKAMGIMNSFINDIFEKLAQEASRLARYNKKPTITSREIQTAVRLVLPGELAKHAVSEGTKAVTKFTSS

SEQ ID NO: 2156 - DNA, 384 bp, Psammechinus miliaris
  CDS (1)..(384)
atgccagccaaaggagcagctacaaaaggagagaagaagcaggccgtcaagtccaaggcaatggcttctagtcgtactggtgacaagaagagacgacgaaggcgtctagaatcatataacatctacatctacaaagttctgaaacaggtccatccagacactggtatttcgagcaaagcgatgtccatcatgaacagcttcgtgaatgatatctttgaacggatcgccgcagaggcgtcacgtctagcccagtacaacaagaagagtactatcagcagtcgagaagtccaaaccgctgtccggctcctcctgcctggagaactggccaaacacgcagtatcagaaggcacaaaggctgtaaccaaatacacaacgtcgcggtag

SEQ ID NO: 2157 - protein, 127 aa, Psammechinus miliaris
MPAKGAATKGEKKQAVKSKAMASSRTGDKKRRRRRLESYNIYIYKVLKQVHPDTGISSKAMSIMNSFVNDIFERIAAEASRLAQYNKKSTISSREVQTAVRLLLPGELAKHAVSEGTKAVTKYTTSR

SEQ ID NO: 2158 - DNA, 381 bp, Mus musculus
  CDS (1)..(381)
atgcctgagcccgccaagtccgctcctgccccgaagaagggctccaagaaggccctgaccaaggcccagaagaaggacggcaagaagcgcaagcgcagccgcaaggagagctactcggtgtacgtgtacaaggtgctgaagcaagtgcaccccgacaccggcatctcctccagagccatgggcatcatgaactcgttcgtgaacgacatcttcgagcgcatcgcgggcgaggcgtcccgcctggcgcattacaacaagcgctcgactatcacgtcccgggagatccagacggccgtgcgcctgctgctgcccggggagctggccaagcacgccgtgtcggagggcaccaaggctgtcaccaagtacaccagctccaagtaa

SEQ ID NO: 2159 - protein, 126 aa, Mus musculus
MPEPAKSAPAPKKGSKKALTKAQKKDGKKRKRSRKESYSVYVYKVLKQVHPDTGISSRAMGIMNSFVNDIFERIAGEASRLAHYNKRSTITSREIQTAVRLLLPGELAKHAVSEGTKAVTKYTSSK

SEQ ID NO: 2160 - DNA, 411 bp, Triticum aestivum
  CDS (1)..(411)
atggcgcccaaggccgagaagaagcccgccgcggagaagaagccggtggagacggagaagaagcccaaggccgagaagcgcgtgcccggcaaggacggcggcgccgacaagaagaagaagaaggccaagaagagcgtcgagacgtacaagatctacatcttcaaggtgctcaagcaggtgcaccccgacatcggcatctcctccaaggccatgtccatcatgaactccttcatcaacgacatcttcgagaagctcgccggcgagtcggccaagctggcgcgctacaacaagaagcccaccatcacctcccgggagatccagaccgccgtgcgcctcgtcctccccggcgagctcgccaagcacgccgtctccgagggcaccaaggccgtcaccaagttcacctcctcctag

SEQ ID NO: 2161 - protein, 136 aa, Triticum aestivum
MAPKAEKKPAAEKKPVETEKKPKAEKRVPGKDGGADKKKKKAKKSVETYKIYIFKVLKQVHPDIGISSKAMSIMNSFINDIFEKLAGESAKLARYNKKPTITSREIQTAVRLVLPGELAKHAVSEGTKAVTKFTSS

SEQ ID NO: 2162 - DNA, 417 bp, Triticum aestivum
  CDS (1)..(417)
atggcccccaaggcggagaagaagccggtggcggagaaggccgagaagacgacggcggcgaagaagaccaaggccgagaagcggccgccggcgtccaaggagggcggcgacaagaaggggaagaagaagtcgaagaagagcgtggagacgtacaagatctacatcttcaaggtgctgaagcaggtgcaccccgacatcggcatctcctccaaggccatgtccatcatgaactccttcatcaacgacatcttcgagaagctcgccggcgagtccgccaagctcgcccgctacaacaagaagcccaccatcacctcccgggagatccagacctccgtccgcctcgtcctccccggcgagctcgccaagcacgccgtctccgagggcaccaaggccgtcaccaagttcacctccgcttag

SEQ ID NO: 2163 - protein, 138 aa, Triticum aestivum
MAPKAEKKPVAEKAEKTTAAKKTKAEKRPPASKEGGDKKGKKKSKKSVETYKIYIFKVLKQVHPDIGISSKAMSIMNSFINDIFEKLAGESAKLARYNKKPTITSREIQTSVRLVLPGELAKHAVSEGTKAVTKFTSA

SEQ ID NO: 2164 - DNA, 381 bp, Homo sapiens
  CDS (1)..(381)
atgcctgaaccctctaagtctgctccggcccctaaaaagggctccaagaaagccgtcaccaaagcccagaagaaagacggcaagaagcgcaagcgcagccgcaaagagagctactccatctacgtgtacaaggtgctgaagcaggtccaccccgacaccggcatctcgtccaaggccatgggcatcatgaactccttcgtcaacgacatcttcgagcgcatcgcgggagaggcttcccgcctggcgcactacaacaagcgctccaccatcacatcccgcgagatccagacggccgtgcgcctgctgctgcccggcgagctggccaagcacgccgtgtccgagggcaccaaggcggtcaccaagtacaccagctccaagtga

SEQ ID NO: 2165 - protein, 126 aa, Homo sapiens [sequence omitted]

SEQ ID NO: 2166 - DNA, 670 bp, Schistosoma japonicum
  CDS (24)..(392)
ggtacgcgttcgtctactaagcgatgcctcctaaagttgtgtctggtaaagctgccaagaaggcctcgaaggttaagctgccgaaggttgataagaagaagaagaggaggaggaaggagagttatgctatctacatctacaaagtccttcgtcaagtccatcctgacactggtatctcgtcgaaggcgatgtcgatcatgaactcgtttgtgaacgatatctttgagcgcattgccgcagaggccagccgactatcacactacaacaagaagtcgacaatttcaagccgagaggtgcagacagcggttcggttgttgttgccaggtgaattggcgaaacacgcggtatctgaaggcacgaaggcagtgacgaagtacagtgggtctaagtaatttgtttggagtttttgagtagagaacgcttccacggccctgtttagggccactaatttctgattttgtttcctcttttcctttaaatattgtaatttgggctcctaatcgccttataaattgcctggcaatggcatgttagttattgtcatgatactttgtatggtagtggcagagagtttgtggtctgttttattgtgacagtgcaggttgttagcgctgcttgacaattgctgggactaggatattcgcgagcgagccagtggctcttctgagca

SEQ ID NO: 2167 - protein, 122 aa, Schistosoma japonicum
MPPKVVSGKAAKKASKVKLPKVDKKKKRRRKESYAIYIYKVLRQVHPDTGISSKAMSIMNSFVNDIFERIAAEASRLSHYNKKSTISSREVQTAVRLLLPGELAKHAVSEGTKAVTKYSGSK

SEQ ID NO: 2168 - DNA, 502 bp, Schistosoma japonicum
  CDS (30)..(398)
cctttttgtcatcgtcgtcatttggcgcgatgcctcccaaagttgtttctgggaaagcagctaaaaagtcatctaaagtcaaagcccctaagtctgaaaaaaagaaaaaacgaaggaggaaagagagttatgccatatacatatataaggtcttacgacaagtccatcctgacacggggatttcgtcgaaggcaatgtctattatgaattcatttgtgaatgatatcttcgaaaggattgcagcagaagctagtcgtctggcacattataataaaaaatccactataaccagtcgtgaggttcaaactgcagtccggttgctattacctggtgaacttgctaaacatgctgtttctgagggcacaaaagctgttactaaatacagtggatcaaagtaaaatgattccatctcctctgtaatgttttcaagcagccaataaacctacttccatcaccccaaacaaacaaaagaaacaacttccgcaacgcggtggtggtgggt

SEQ ID NO: 2169 - protein, 122 aa, Schistosoma japonicum
MPPKVVSGKAAKKSSKVKAPKSEKKKKRRRKESYAIYIYKVLRQVHPDTGISSKAMSIMNSFVNDIFERIAAEASRLAHYNKKSTITSREVQTAVRLLLPGELAKHAVSEGTKAVTKYSGSK

SEQ ID NO: 2170 - DNA, 369 bp, Caenorhabditis briggsae
  CDS (1)..(369)
atgccaccaaagccatccgccaagggagccaaaaaggccgccaagaccgtcacgaagccaaaggacggaaagaagagaagagcccaccgcaaggaatcctactctgtgtacatctaccgtgtgctcaagcaggtccatccagacaccggagtctcttccaaggccatgtcgatcatgaactcgttcgtcaacgacgtcttcgagcgcatcgccgccgaggcatctcgtcttgctcactacaacaagagatcgaccatttcatcccgtgaaattcaaacggccgtccgtttgatccttccaggagagctcgccaagcacgccgtgtctgagggaaccaaggctgttaccaagtacacctccagcaagtaa

SEQ ID NO: 2171 - protein, 122 aa, Caenorhabditis briggsae
MPPKPSAKGAKKAAKTVTKPKDGKKRRAHRKESYSVYIYRVLKQVHPDTGVSSKAMSIMNSFVNDVFERIAAEASRLAHYNKRSTISSREIQTAVRLILPGELAKHAVSEGTKAVTKYTSSK

SEQ ID NO: 2172 - DNA, 381 bp, Xenopus laevis
  CDS (1)..(381)
atgcctgagcccgccaaatccgctccagccccaaagaagggctccaaaaaagccgtcactaaaacccagaagaaggatggcaagaagcgtaggaagagcaggaaagagagctacgccatctacgtgtacaaagtgctcaagcaggtgcaccccgataccggcatctcttccaaggccatgagcatcatgaactcctttgttaacgatgtcttcgagcgcatcgcaggggaagcctcccgcctggctcactacaacaagcgctccaccatcacctcccgggagatccagaccgcggtccgcctgctcttgcctggggagctggccaagcacgccgtgtccgagggcaccaaggccgtcaccaagtacaccagcgccaagtaa

SEQ ID NO: 2173 - protein, 126 aa, Xenopus laevis [sequence omitted]

SEQ ID NO: 2174 - DNA, 381 bp, Homo sapiens
  CDS (1)..(381)
atgcctgaaccagtcaaatctgctccagtccctaaaaaaggctccaaaaaggccattaacaaggctcagaagaaggatggaaagaagcgcaaacgcagccgcaaggagagctactctgtgtatgtgtacaaggtgctgaagcaggtccaccccgacaccggcatctcttccaaggctatgggaatcatgaactccttcgtcaacgacatctttgagcgtatcgccagagaagcgtcacgcctggcgcattacaacaagcgctcgaccatcacttcgagggagatccagacggccgtgcgcctactgctacccggggaattggccaagcacgccgtgtccgagggcaccaaggccgtcaccaagtataccagctccaagtga

SEQ ID NO: 2175 - protein, 126 aa, Homo sapiens [sequence omitted]

SEQ ID NO: 2176 - DNA, 375 bp, Mytilus trossulus
  CDS (1)..(375)
  misc_feature (312)..(312): r is g or a
atgccaccaaaagttggaaccaaaggagccaaaaaggccgtaacaaaggcaaagactgccagacccggcggtgacaagaaaaggaggaggaagaggagagaatcctatgccatctacatctacaaagtcttgagacaggttcacccagacactggagtatcctcaaaggctatgtctatcatgaacagttttgtcaacgatatctttgagagaatcgctgcagaagcttcccgtctcgctcactacaacaagagatctaccatcacatctcgggagatccagactgcagttcgtctgctcttacccggtgarttggccaagcacgctgtcagtgaaggtaccaaagccgtcacaaagtacaccagcagcaagtaa

SEQ ID NO: 2177 - protein, 124 aa, Mytilus trossulus
MPPKVGTKGAKKAVTKAKTARPGGDKKRRRKRRESYAIYIYKVLRQVHPDTGVSSKAMSIMNSFVNDIFERIAAEASRLAHYNKRSTITSREIQTAVRLLLPGELAKHAVSEGTKAVTKYTSSK

SEQ ID NO: 2178 - DNA, 375 bp, Mytilus californianus
  CDS (1)..(375)
atgccacaaaaagttggaaccaaaggagccaaaaaggccgtaacaaaggcaaagactgcccgacccggcggtgacaagaaaaggaggaggaagaggagagaatcctatgccatctacatctacaaagtcctgagacaggttcacccagacactggagtatcctcaaaggctatgtctatcatgaacagttttgtcaacgatatctttgagagaatcactgcaggagcttcccgtctcgctcactacaacaagagatctaccatcacatctcgggaggtccagactgcagttcgtctgctcttacccggtgaattggccaagcacgctgtcagtgaaggtaccaaagccgtcacaaagtacaccagcagcaagtaa

SEQ ID NO: 2179 - protein, 124 aa, Mytilus californianus
MPQKVGTKGAKKAVTKAKTARPGGDKKRRRKRRESYAIYIYKVLRQVHPDTGVSSKAMSIMNSFVNDIFERITAGASRLAHYNKRSTITSREVQTAVRLLLPGELAKHAVSEGTKAVTKYTSSK

SEQ ID NO: 2180 - DNA, 375 bp, Mytilus galloprovincialis
  CDS (1)..(375)
atgccaccaaaagttggaaccaaaggagccaaaaaggccgtaacaaaggcaaagactgcccgacccggcggtgacaagaaaaggaggaggaagaggagagaatcctatgccatctacatctacaaagtcttgagacaggttcacccagacactggagtatcctcaaaggctatgtctatcatgaacagttttgtcaacgatatctttgagagaatcgctgcagaagcttcccgtctcgctcactacaacaagagatctaccatcacatctcgggagatccagactgcagttcgtctgctcttacccggtgaattggccaagcacgctgtcagtgaaggtaccgaagccgtcacaaagtacaccagcagcaagtaa

SEQ ID NO: 2181 - protein, 124 aa, Mytilus galloprovincialis
MPPKVGTKGAKKAVTKAKTARPGGDKKRRRKRRESYAIYIYKVLRQVHPDTGVSSKAMSIMNSFVNDIFERIAAEASRLAHYNKRSTITSREIQTAVRLLLPGELAKHAVSEGTEAVTKYTSSK

SEQ ID NO: 2182 - DNA, 372 bp, Drosophila sechellia
  CDS (1)..(372)
atgcctccgaaaactagtggaaaggcagccaagaaggctggcaaggctcagaagaacatcaccaagaacgacaagaaaaagaaacgcaagaggaaggagagctatgccatctacatttacaaggttctcaagcaggtccatcctgacaccggaatttcgttgaaggcgatgagcataatgaacagctttgtaaatgatattttcgagcgaattgctgccgaagcgtctcgtctagctcactacaacaagcgctcgaccatcaccagtcgggaaatccaaacggctgttcgcctgcttctgcctggagagttggccaagcatgctgtcagtgagggaaccaaggctgttaccaagtacaccagctccaaataa

SEQ ID NO: 2183 - protein, 123 aa, Drosophila sechellia
MPPKTSGKAAKKAGKAQKNITKNDKKKKRKRKESYAIYIYKVLKQVHPDTGISLKAMSIMNSFVNDIFERIAAEASRLAHYNKRSTITSREIQTAVRLLLPGELAKHAVSEGTKAVTKYTSSK

SEQ ID NO: 2184 - DNA, 375 bp, Drosophila yakuba
  CDS (1)..(375)
atgataccgccgaaaactagtggaaaggcagccaagaaggctggcaaggctcagaagaatatcaccaagaccgacaagaaaatgaagcgcaagaggaaggagagctatgccatctacatttacaaggttctcaagcaggtccatcctgacaccggcatttcatctaaggcgatgagcatcatgaacagctttgtaaatgatattttcgagcgcattgctgccgaggcgtctcgtctggctcactacaacaagcgctcgaccatcaccagtcgagaaatccaaacggctgttcgcctgcttctgccgggagagttggccaagcatgctgtcagtgagggaaccaaggctgtcaccaagtacaccagctccaaataa

SEQ ID NO: 2185 - protein, 124 aa, Drosophila yakuba
MIPPKTSGKAAKKAGKAQKNITKTDKKMKRKRKESYAIYIYKVLKQVHPDTGISSKAMSIMNSFVNDIFERIAAEASRLAHYNKRSTITSREIQTAVRLLLPGELAKHAVSEGTKAVTKYTSSK

SEQ ID NO: 2186 - DNA, 372 bp, Expression vector pET3
  CDS (1)..(372): transl_table=11
atggccaagtccgctccagccccgaagaaaggctccaagaaagcggtgaccaagactcagaagaaagacgggaaaaagcgcaggaagacaaggaaggagagttatgccatttacgtgtacaaggtgctgaagcaggtgcaccccgataccggcatctcgtccaaggccatgagcatcatgaactcctttgtcaacgatgtgtttgagcgcatcgcaggggaagcctcccgcctggctcattacaacaagcgctccaccatcacctcccgggagatccagaccgcggtccgactgctgctgcctggggagttggccaaacacgccgtgtccgagggcaccaaggctgtcaccaagtacaccagcgccaagtaa

SEQ ID NO: 2187 - protein, 123 aa, Expression vector pET3
MAKSAPAPKKGSKKAVTKTQKKDGKKRRKTRKESYAIYVYKVLKQVHPDTGISSKAMSIMNSFVNDVFERIAGEASRLAHYNKRSTITSREIQTAVRLLLPGELAKHAVSEGTKAVTKYTSAK

SEQ ID NO: 2188 - DNA, 414 bp, Podospora anserina
  CDS (1)..(414)
atgccccccaaggccgctgacaagaagcccgccaacaaggcccccgccactgcctccaaggctcccgagaagaaggatgctggcaagaagaccgctgcctctggcgagaagaagaagcgcaccaaggcgcgcaaggagacctactcctcctacatttacaaggtcctcaagcaggtccaccccgacactggtatctccaaccgtgccatgtccatcctcaactctttcgtgaacgacatcttcgagcgcgtcgcgaccgaggcttccaagcttgccgcctacaacaagaagtccaccatctcatcccgtgagatccagacctccgtgcgcctcatccttcccggcgagcttgccaagcacgccgtgtctgaaggcaccaaggccgtcaccaagtactcgtcgagcacgaaatag

SEQ ID NO: 2189 - protein, 137 aa, Podospora anserina
MPPKAADKKPANKAPATASKAPEKKDAGKKTAASGEKKKRTKARKETYSSYIYKVLKQVHPDTGISNRAMSILNSFVNDIFERVATEASKLAAYNKKSTISSREIQTSVRLILPGELAKHAVSEGTKAVTKYSSSTK

SEQ ID NO: 2190 - DNA, 405 bp, Mus musculus
  CDS (1)..(405)
atgcctgagcctgcgaagtccgctcccgccccgaagaagggctccaagaaggccgtcaccaaggcccagaagaaggacggcaagaagcgcaagcgcagccgcaaggagagctactcggtgtacgtgtacaaggtgctgaagcaagtgcaccccgacaccggcatctcctccaaggccatgggcatcatgaactcgttcgtgaacgacatcttcgagcgcatcgcgagcgaggcgtcccgcctggcgcattacaacaagcgctcgaccatcacgtcccgggagatccagacggccgtgcgcctgctgctgcccggggagctggccaagcacgcggtgtcggagggcaccaaggccgtcaccaagtacaccagctccaatttttcaagacaaaatttctctgtgtag

SEQ ID NO: 2191 - protein, 134 aa, Mus musculus
MPEPAKSAPAPKKGSKKAVTKAQKKDGKKRKRSRKESYSVYVYKVLKQVHPDTGISSKAMGIMNSFVNDIFERIASEASRLAHYNKRSTITSREIQTAVRLLLPGELAKHAVSEGTKAVTKYTSSNFSRQNFSV

SEQ ID NO: 2192 - DNA, 453 bp, Arabidopsis thaliana
  CDS (1)..(453)
  misc_feature (335)..(335): d is a, g or t
atggcgccgaaagcagagaagaagcccgctgagaagaaaccagcttccgagaagccggtggaggagaaatcaaaagccgagaaagctccggcggagaagaaaccaaaggccggaaagaagctcccgaaggaagctggtgccggaggcgacaagaagaaaaagatgaagaagaagagtgtcgagacttacaagatctacatcttcaaggtgcttaagcaagttcatcccgatatcggaatctccagcaaagcgatggggatcatgaacagtttcattaacgatatcttcgagaagcttgctcaagaggcgtcgaagcttgcgaggtacaataagadacctacgatcacttctcgggagattcagactgctgtgagattggtgcttcctggagagttggcgaagcatgccgtttctgaggggactaaagccgtcacgaaattcaccagctcttga

SEQ ID NO: 2193 - protein, 150 aa, Arabidopsis thaliana
  misc_feature (112)..(112): The Xaa at location 112 stands for Arg, Ile, or Lys.
MAPKAEKKPAEKKPASEKPVEEKSKAEKAPAEKKPKAGKKLPKEAGAGGDKKKKMKKKSVETYKIYIFKVLKQVHPDIGISSKAMGIMNSFINDIFEKLAQEASKLARYNKXPTITSREIQTAVRLVLPGELAKHAVSEGTKAVTKFTSS

SEQ ID NO: 2194 - DNA, 363 bp, Gallus gallus
  CDS (1)..(363)
atgcccgagccggctaagtccgcgcccgccccgaagaagggctctaagaaggcggtcaccaagacccagaagaagggcgacaagaagcgcaagaagagccgcaaggagagctactcgatctacgtgtacaaggtgctgaagcaggtgcaccccgacacgggcatctcgtccaaggccatgggcatcatgaactcgttcgtcaacgacatcttcgagcgcatcgccggcgaggcgtcgcgcctggcgcactacaacaagcgctcgaccatcacgtcgcgggagatccagacggccgtgcggctgctgctgcccggcgagctggccaagcacgcggtctcggagggcaccaaggcggtcacctag

SEQ ID NO: 2195 - protein, 120 aa, Gallus gallus
MPEPAKSAPAPKKGSKKAVTKTQKKGDKKRKKSRKESYSIYVYKVLKQVHPDTGISSKAMGIMNSFVNDIFERIAGEASRLAHYNKRSTITSREIQTAVRLLLPGELAKHAVSEGTKAVT

SEQ ID NO: 2196 - DNA, 381 bp, Xenopus laevis
  CDS (1)..(381)
atgtctgatccagcaaagtcagcgccagccgcgaagaaaggctctaagaaagcggtgactaagacccagaagaaagatggaaagaagcgtaggaagagcaggaaggagagttacgccatttacgtgtacaaagtgctgaagcaggtgcacccggacaccggcatctcttccaaggcgatgagtatcatgaactcctttgtcaacgacgtgttcgagcgcatcgcaggggaagcctcccgcctggctcattacaacaaacgctccaccatcacctcccgggagatccagaccgcgggccgcctgctgctgcctggggagttggctaaacacgccgtgtccgagggcaccaaggctgtgaccaaatacaccagcgccaagtaa

SEQ ID NO: 2197 - protein, 126 aa, Xenopus laevis
MSDPAKSAPAAKKGSKKAVTKTQKKDGKKRRKSRKESYAIYVYKVLKQVHPDTGISSKAMSIMNSFVNDVFERIAGEASRLAHYNKRSTITSREIQTAGRLLLPGELAKHAVSEGTKAVTKYTSAK

SEQ ID NO: 2198 - DNA, 372 bp, Toxoplasma gondii
  CDS (1)..(372)
atgtcagggaaaggtccggcacagaaatctcaggcggcgaagaagaccgccgggaagtctctgggaccccgctaccgtcgacgaaagagaaccgagtcttttgctctgtacatttacaaggtcctcaagcaggtgcaccctgagactggtgtgtcgaagaagagcatgagtatcatgaactcgttcatcaatgacatctttgatcgcttggctgatgaagcagttcgtttgatccgttacaataaaaagaggacgttgtcttctcgggaaattcagacagctgtccgtctgctgttgcccggtgaactcagcaagcacgccgtctcggaaggcacgaaggcagtgaccaagtacacgacttctggtgcatag

SEQ ID NO: 2199 - protein, 123 aa, Toxoplasma gondii
MSGKGPAQKSQAAKKTAGKSLGPRYRRRKRTESFALYIYKVLKQVHPETGVSKKSMSIMNSFINDIFDRLADEAVRLIRYNKKRTLSSREIQTAVRLLLPGELSKHAVSEGTKAVTKYTTSGA

SEQ ID NO: 2200 - DNA, 372 bp, Rhynchosciara americana
  CDS (1)..(372)
atgccacctaagacaagcggaaaagctgcgaagaaggccggtaaggcacaaaagaacatttcgaaaggtgacaagaaaaagaaacgcaagcgtaaggaatcttatgctatctacatatacaaagtgttgaaacaagtgcatccagacactggtatttcgagcaaagccatgagcatcatgaacagttttgttaatgatattttcgagcgcattgctgccgaagcatcccgtttggctcactacaataaacgatcgaccatcaccagtcgggaaattcaaaccgctgttcgactattgttgcccggtgaattggccaagcacgctgtcagcgaaggcacaaaagccgtcaccaaatataccagctctaaataa

SEQ ID NO: 2201 - protein, 123 aa, Rhynchosciara americana
MPPKTSGKAAKKAGKAQKNISKGDKKKKRKRKESYAIYIYKVLKQVHPDTGISSKAMSIMNSFVNDIFERIAAEASRLAHYNKRSTITSREIQTAVRLLLPGELAKHAVSEGTKAVTKYTSSK

SEQ ID NO: 2202 - DNA, 438 bp, Arabidopsis thaliana
  CDS (1)..(438)
atggcgaaggcagataagaaaccagcggagaagaaaccggcagagaaaactccggcagccgaaccagcagcagcggcagagaagaaaccaaaagccggaaagaaacttcccgaagaaccagccggcgccggagacaagaagaagaagagatcaaagaagaacgttgagacatacaagatctacatcttcaaggtgttgaagcaagttcatccagatatcggaatctccagcaaagccatgggaatcatgaacagtttcatcaatgatatctttgagaaacttgctggtgagtcttcgaagcttgcgaggtacaacaagaagccgacgattacttctagggagattcagactgcggtgagacttgtgttgcctggagagttggcgaaacatgctgtttctgaagggactaaggcggttacgaagtttacgagttcttag

SEQ ID NO: 2203 - protein, 145 aa, Arabidopsis thaliana
MAKADKKPAEKKPAEKTPAAEPAAAAEKKPKAGKKLPEEPAGAGDKKKKRSKKNVETYKIYIFKVLKQVHPDIGISSKAMGIMNSFINDIFEKLAGESSKLARYNKKPTITSREIQTAVRLVLPGELAKHAVSEGTKAVTKFTSS

SEQ ID NO: 2204 - DNA, 420 bp, Cicer arietinum
  CDS (1)..(420)
atggctcccgcaaaggcagagaagaaaccggcagagaagaaaccagccgccgagaaagcaccagccgagaaaaaacctaaagccgaaaagaagatctcgaaggaaggaacaagcgataagaagaagaagcgcgttaagaagagcgttgaaacctacaagatttacatcttcaaggttttgaaacaggtccatcctgatattggtatttcaagcaaagctatggggattatgaacagttttattaacgatatttttgagaaactcgctcaggaagcttctagattggcgcgttataacaagaagccgactattacttcacgggagattcaaacagcggttcgtttggttcttcctggtgaattggcgaaacatgccgtgtctgaaggaactaaggcggttaccaaatttactagctcgtag

SEQ ID NO: 2205 - protein, 139 aa, Cicer arietinum
MAPAKAEKKPAEKKPAAEKAPAEKKPKAEKKISKEGTSDKKKKRVKKSVETYKIYIFKVLKQVHPDIGISSKAMGIMNSFINDIFEKLAQEASRLARYNKKPTITSREIQTAVRLVLPGELAKHAVSEGTKAVTKFTSS

SEQ ID NO: 2206 - DNA, 372 bp, Asellus aquaticus
  CDS (1)..(372)
  misc_feature (359)..(359): y is t or c
atggcaccaaagacttcgggtaaagccgccaagaaggccggaaaggctcaaaaatctatcaccaagggtgacaagaagaagaaaaggaggaggaaggaaagttacagcatctacatttacaaggttttgaagcaagtccaccccgacaccggaatttcttccaaagctatgtcaatcatgaactcgttcgtgaatgatatcttcgaaagaatcgccgctgaagcttctcgcctcgctcactacaacaagagatccaccatcacatctcgcgaaatccaaaccgccgtcaggctccttttgccaggagaactcgccaaacacgcagtctttgaaggaacaaaggcagttaccaaatataytttttcaaagtaa

SEQ ID NO: 2207 - protein, 123 aa, Asellus aquaticus
  misc_feature (120)..(120): The Xaa at location 120 stands for Ile, or Thr.
MAPKTSGKAAKKAGKAQKSITKGDKKKKRRRKESYSIYIYKVLKQVHPDTGISSKAMSIMNSFVNDIFERIAAEASRLAHYNKRSTITSREIQTAVRLLLPGELAKHAVFEGTKAVTKYXFSK

SEQ ID NO: 2208 - DNA, 399 bp, Ashbya gossypii
  CDS (1)..(399)
atgtcgtccaaagcatccaaggcccctgcctccaaggcccccgccgagaagaaacccgccgccaagaagacgtcgtcctccgtggacgcgtccaagaagcgcaccaagaccagaaaggagacctactcctcgtacatctacaaggtcctgaagcagacccaccccgacaccggtatctcccagaagtccatgtccattctgaactccttcgtcaacgacatctttgagcgcattgcctccgaggcctccaagctggccgcgtacaacaagaagtctaccatctccgcgcgtgagatccagactgccgtgcgtctgatcctaccgggtgagctggccaagcacgcggtctccgagggcacgcgcgccgtcaccaagtactcgtcttccacgcaggcttga

SEQ ID NO: 2209 - protein, 132 aa, Ashbya gossypii
MSSKASKAPASKAPAEKKPAAKKTSSSVDASKKRTKTRKETYSSYIYKVLKQTHPDTGISQKSMSILNSFVNDIFERIASEASKLAAYNKKSTISAREIQTAVRLILPGELAKHAVSEGTRAVTKYSSSTQA

SEQ ID NO: 2210 - DNA, 390 bp, Candida glabrata
  CDS (1)..(390)
atgtctgctgaaaagaagcctgcctccaaagccccagctgagaagaagccagctgccaagaagaccgctccatctgctgacggtaagaagagaaccaaggccagaaaggagacttactcctcatacatctacaaggtcttgaagcaaactcacccagacaccggtatttctcaaaagtccatgtctattctaaactctttcgtcaacgatatcttcgaaagaatcgcttctgaagcttccaagttggctgcttacaacaagaagtctaccatctccgctagagaaatccaaaccgccgtcagattgattttgccaggtgagttggctaagcacgccgtctctgaaggtactagagctgtcaccaagtactcttcttccactcaagcttag

SEQ ID NO: 2211 - protein, 129 aa, Candida glabrata
MSAEKKPASKAPAEKKPAAKKTAPSADGKKRTKARKETYSSYIYKVLKQTHPDTGISQKSMSILNSFVNDIFERIASEASKLAAYNKKSTISAREIQTAVRLILPGELAKHAVSEGTRAVTKYSSSTQA

SEQ ID NO: 2212 - DNA, 456 bp, Zea mays
  CDS (1)..(456)
atggcacccaaggcggagaagaagccggcggccaagaagcccgcggaggaggagcccgcgacagagaaggtggagaaggctccggcggggaagaagcccaaggccgagaagcgcctcccggcgggcaagtccaaggagggcggcgagggcaagaaggggaaaaagaaggcgaagaagtccgtggagacctacaagatctacatcttcaaggtgctgaagcaggtgcaccccgacatcggcatctcgtccaaggccatgtccatcatgaactccttcatcaacgacatcttcgagaagctcgcggccgagtccgccaagctggcgcgctacaacaagaagcccaccatcacctcccgcgagatccagacctcggtgcgcctcgtcctccccggggagctcgccaagcacgccgtctccgagggcactaaggccgttacgaagttcacctcgtcttag

SEQ ID NO: 2213 - protein, 151 aa, Zea mays
MAPKAEKKPAAKKPAEEEPATEKVEKAPAGKKPKAEKRLPAGKSKEGGEGKKGKKKAKKSVETYKIYIFKVLKQVHPDIGISSKAMSIMNSFINDIFEKLAAESAKLARYNKKPTITSREIQTSVRLVLPGELAKHAVSEGTKAVTKFTSS

SEQ ID NO: 2214 - DNA, 381 bp, Mus musculus
  CDS (1)..(381)
atgcctgaacccgctaagtccgctcccgccccgaagaaggggtccaagaaggccgtcaccaaggcccagaagaaggacggcaagaagcgcaagcgcagccgcaaggagagctactcggtgtacgtgtacaaggtgctgaagcaagtgcaccccgacaccggcatctcctccaaggccatgggcatcatgaactcgttcgtgaacgacatcttcgagcgcatcgcgagcgaggcgtcccgcctggcgcattacaacaagcgctcgaccatcacatcccgggagatccagacggccgtgcgcctgctgctgcccggggagctggccaagcacgccgtgtcggagggcaccaaggctgtcaccaagtacaccagctccaagtga

SEQ ID NO: 2215 - protein, 126 aa, Mus musculus [sequence omitted]

SEQ ID NO: 2216 - DNA, 381 bp, Schizosaccharomyces pombe; identical to SEQ ID NO: 2090
  CDS (1)..(381)

SEQ ID NO: 2217 - protein, 126 aa, Schizosaccharomyces pombe; identical to SEQ ID NO: 2091

SEQ ID NO: 2218 - DNA, 372 bp, Tigriopus californicus
  CDS (1)..(372)
atgcctcccaaagtctctggaaaagctgccaagaaggccggcaaagcccaaaagaacatcaccaagggcgacaagaagaagaaccgcaagcgcaaggagtcctacgctatctacatctacaaggtgttgaagcaggtccatcccgacaccggcatttcctccaaagccatgtcaatcatgaactcgtttgtgaatgacatctttgagcgtattgcctccgaggcttctcgcttggctcactacaacaagcggtctaccatcacctcccgggagatccaaaccgccgtgcgtctcctcctgcccggagagttggccaagcatgccgtctctgagggaaccaaagccgttaccaaatacacctcctccaagtaa

SEQ ID NO: 2219 - protein, 123 aa, Tigriopus californicus
MPPKVSGKAAKKAGKAQKNITKGDKKKNRKRKESYAIYIYKVLKQVHPDTGISSKAMSIMNSFVNDIFERIASEASRLAHYNKRSTITSREIQTAVRLLLPGELAKHAVSEGTKAVTKYTSSK

SEQ ID NO: 2220 - DNA, 459 bp, Triticum aestivum
  CDS (1)..(459)
atggcgcccaaggccgagaagaagccggcggcgaagaagcccgcggaggaggagcccgcggcggagaaggcggagaagacgcccgccgggaagaagcccaaggcggagaagcggctgccggcggggaagtccgccgccaaggagggcggcgacaagaagggcaagaagaaggccaagaagagcgtggagacgtacaagatctacatcttcaaggtgctgaagcaggttcaccccgacatcggcatctcctccaaggccatgtccatcatgaactccttcatcaacgacatcttcgagaagctcgccggcgaggccgccaagctggcgcggtacaacaagaagcccaccatcacgtcccgggagatccagacctccgtccgcctcgtcctccccggcgagctcgccaagcacgccgtctccgagggcaccaaggccgtcaccaagttcacctcctcgtag

SEQ ID NO: 2221 - protein, 152 aa, Triticum aestivum
MAPKAEKKPAAKKPAEEEPAAEKAEKTPAGKKPKAEKRLPAGKSAAKEGGDKKGKKKAKKSVETYKIYIFKVLKQVHPDIGISSKAMSIMNSFINDIFEKLAGEAAKLARYNKKPTITSREIQTSVRLVLPGELAKHAVSEGTKAVTKFTSS

SEQ ID NO: 2222 - DNA, 381 bp, Xenopus laevis; identical to SEQ ID NO: 2172
  CDS (1)..(381)

SEQ ID NO: 2223 - protein, 126 aa, Xenopus laevis [sequence omitted]

SEQ ID NO: 2224 - DNA, 384 bp, Ashbya gossypii
  CDS (1)..(384)
atggcaccaaaggctgagaagaaacctgcttccaaggccccagcggcaaagaagaccactgcttctaccgacgcttctaagaagcggacgaagactagaaaggagacctactcctcttacatttacaaggttcttaagcagactcacccagatactggtatctcgcagaagtctatgtccattttgaactcgtttgtgaacgatatctttgagagaatcgcgtctgaggcatccaagcttgcggcctacaacaagaagtctacgatctctgctagagaaatccagactgctgtcagattgatcttgcccggtgagctagccaagcacgccgtgtctgagggtaccagagctgttaccaagtactcgtcttctacccaagcctga

SEQ ID NO: 2225 - protein, 127 aa, Ashbya gossypii
MAPKAEKKPASKAPAAKKTTASTDASKKRTKTRKETYSSYIYKVLKQTHPDTGISQKSMSILNSFVNDIFERIASEASKLAAYNKKSTISAREIQTAVRLILPGELAKHAVSEGTRAVTKYSSSTQA

SEQ ID NO: 2226 - DNA, 372 bp, Caenorhabditis elegans
  CDS (1)..(372)
atggccccaccaaagccgtctgctaaaggagcaaagaaagccgccaagaccgtcaccaagccaaaggacggaaagaagagacgtcatgcccgtaaagaatcctactccgtgtacatctaccgtgtgctcaagcaggttcatccagacactggagtctcttccaaggctatgtccatcatgaactctttcgtcaacgacgtcttcgagcgtatcgctgctgaggcatctcgtcttgctcactacaacaagagatccaccatctcttctcgcgaaattcaaactgccgtccgtttgattcttccaggagagcttgccaagcacgccgtctctgagggaaccaaggctgtcaccaagtacacctctagcaagtaa

SEQ ID NO: 2227 - protein, 123 aa, Caenorhabditis elegans
MAPPKPSAKGAKKAAKTVTKPKDGKKRRHARKESYSVYIYRVLKQVHPDTGVSSKAMSIMNSFVNDVFERIAAEASRLAHYNKRSTISSREIQTAVRLILPGELAKHAVSEGTKAVTKYTSSK

SEQ ID NO: 2228 - DNA, 396 bp, Candida glabrata
  CDS (1)..(396)
atgtctgctaaagccgaaaagaagcctgcctccaaagccccagctgagaagaagccagctgccaagaagactgctccatcttccgatggtaagaagagaactaaggctagaaaggagacttactcctcttacatctacaaagttttgaagcaaactcacccagacaccggtatctctcaaaagtccatgtctattctaaactccttcgttaacgatatcttcgaaagaatcgcttccgaagcctccaagttggctgcttacaacaagaagtctaccatctccgctagagaaatccaaaccgccgttagattgatcttgccaggtgaattggctaagcacgccgtctctgaaggtactagagctgttaccaagtactcttcttccactcaagcttaa

SEQ ID NO: 2229 - protein, 131 aa, Candida glabrata
MSAKAEKKPASKAPAEKKPAAKKTAPSSDGKKRTKARKETYSSYIYKVLKQTHPDTGISQKSMSILNSFVNDIFERIASEASKLAAYNKKSTISAREIQTAVRLILPGELAKHAVSEGTRAVTKYSSSTQA

SEQ ID NO: 2230 - DNA, 453 bp, Zea mays
  CDS (1)..(453)
atggcgcccaaggccgagaagaagcccgcggcgaagaagccggcggaggaggagcccgctgccgagaaggcgccggccgggaagaagcccaaggcggagaagcgtgtcccagcaggcaagtccgccggcaaggagggcggcgagggaaagaggggccggaagaagggcaagaagagcgtggagacctacaagatctacatcttcaaggtgctgaagcaggtgcacccggacatcggcatctcctctaaggccatgtccatcatgaactccttcatcaacgacatcttcgagaagctcgccgccgaggccgccaagctcgcgcggtacaacaagaagcccaccatcacctcccgtgagatccagacctccgtgcgcctcgtcctccccggggagctcgccaagcacgccgtctccgagggcaccaaggccgtcaccaagttcacctcgtcctag

SEQ ID NO: 2231 - protein, 150 aa, Zea mays
MAPKAEKKPAAKKPAEEEPAAEKAPAGKKPKAEKRVPAGKSAGKEGGEGKRGRKKGKKSVETYKIYIFKVLKQVHPDIGISSKAMSIMNSFINDIFEKLAAEAAKLARYNKKPTITSREIQTSVRLVLPGELAKHAVSEGTKAVTKFTSS

SEQ ID NO: 2232 - DNA, 381 bp, Xenopus laevis
  CDS (1)..(381)
atgcctgaaccagcaaagtccgcgccagccccgaagaagggatccaagaaagcggtgactaaaaccccaaagaaagatgggaagaagcgtagaaagagcaggaaggaaagttacgccatttacgtgtacaaggtgatgaagcaagtgcaccccgacaccggtatttcctccaaggccatgggtattatgaattcctttgtcaacgatatatttgagcgcattgcaggggaagcctcccgcctggctcattataacaaacgctccaccatcacctcccgggagatccagaccgcggtccgcctgctgctgcctggggaactggccaaacacgccgtgtccgagggcaccaaggctgtcaccaaatacaccagcgccaagtaa

SEQ ID NO: 2233 - protein, 126 aa, Xenopus laevis
MPEPAKSAPAPKKGSKKAVTKTPKKDGKKRRKSRKESYAIYVYKVMKQVHPDTGISSKAMGIMNSFVNDIFERIAGEASRLAHYNKRSTITSREIQTAVRLLLPGELAKHAVSEGTKAVTKYTSAK

SEQ ID NO: 2234 - DNA, 462 bp, Chlamydomonas reinhardtii
  CDS (1)..(462)
atggcccccaagaaggacgagaagcccgcgaccgccgaggctggcgccgaggcccctgccaaggctgaggccaagcccaaggccgagaaggccggcaagaaggccaagaaggagcctgccaagaaggccgccaaggagcccaagggcgacggcgagaagaaggataagaagaagaagaagagcgccgtggagacctacaagctgtacatctacaaggtgctcaagcaggtgcaccccgacaccggcatcagcagcaaggccatgtccatcatgaacagcttcatcaacgacatctttgagaaggtggccactgaggcctccaagctgagccgctacaacaagaagcccaccgtgacctcccgcgagatccagaccgcggtgcgcctggtgctgcccggcgagctggccaagcacgcggtgtcggagggcaccaaggccgtgaccaagttcacctcgggctaa

SEQ ID NO: 2235 - protein, 153 aa, Chlamydomonas reinhardtii
MAPKKDEKPATAEAGAEAPAKAEAKPKAEKAGKKAKKEPAKKAAKEPKGDGEKKDKKKKKSAVETYKLYIYKVLKQVHPDTGISSKAMSIMNSFINDIFEKVATEASKLSRYNKKPTVTSREIQTAVRLVLPGELAKHAVSEGTKAVTKFTSG

SEQ ID NO: 2236 - DNA, 462 bp, Zea mays
  CDS (1)..(462)
atggcacccaaggcggacaagaagccggcggcgaagaagcctgcagaggaggagcccgcgacagagaaggcggagaaggctccggcggggaagaagcccaaggccgagaagcgcctcccggcgggcaagtccgccggtaaggagggcggcgagggcaagaaggggaaaaagaaagcgaagaagtccgtggagacctacaagatctacatcttcaaggtgctgaagcaggtgcaccccgacatcggcatctcgtccaaggccatgtccatcatgaactccttcatcaacgacatcttcgagaagctcgcggccgagtccgccaagctggcgcgctataacaagaagcccaccgtcacctcccgcgagatccagacctcggtgcgcctcgtcctccccggcgagcttgccaagcacgccgtctccgagggcaccaaggccgtcaccaagttcacctcttcttaa

SEQ ID NO: 2237 - protein, 153 aa, Zea mays
MAPKADKKPAAKKPAEEEPATEKAEKAPAGKKPKAEKRLPAGKSAGKEGGEGKKGKKKAKKSVETYKIYIFKVLKQVHPDIGISSKAMSIMNSFINDIFEKLAAESAKLARYNKKPTVTSREIQTSVRLVLPGELAKHAVSEGTKAVTKFTSS

SEQ ID NO: 2238 - DNA, 372 bp, Tigriopus californicus
  CDS (1)..(372)
atgcctcccaaagtgtctggaaaagcagccaaaaaggctggcaaagcccaaaagaacatctcgaagggcgacaagaagaagaatcgcaagcgcaaagaatcttatgctatctacatctacaaggtgttgaaacaggtccatcccgacactggtatctcttccaaggcaatgagcatcatgaattcatttgtgaatgatatctttgagcgcattgcttcagaggcttcccgtttggctcattacaacaagcgctccaccatcacgtcccgggagatccagaccgctgtgagactcctcctgcccggagagttggccaaacacgctgtgtctgaggggaccaaggctgtcaccaagtacacttcttccaagtaa

SEQ ID NO: 2239 - protein, 123 aa, Tigriopus californicus
MPPKVSGKAAKKAGKAQKNISKGDKKKNRKRKESYAIYIYKVLKQVHPDTGISSKAMSIMNSFVNDIFERIASEASRLAHYNKRSTITSREIQTAVRLLLPGELAKHAVSEGTKAVTKYTSSK

SEQ ID NO: 2240 - DNA, 474 bp, Volvox carteri
  CDS (1)..(474)
atggccccgaagaaggaggagaagcccgcatcccaggccgctgaggctcctgaggttaaggctgaggctaagcccaaggctgtgaaggctcccaagaagaaggagaagaaggcgccggctaagaaggtcgccaaggagccttccgctggtggggaggatggcgacaagaagtccaaaaagaaggccaaggttgccaagagtgagacctacaagctgtacatctataaggtgctgaagcaggtgcaccctgacaccggcatcagctccaaggcgatgagcatcatgaacagcttcatcaacgacatatttgagaaggtcgccaccgaggcttcaaagcttagccgttacaacaagaagccgaccgtcacgtctcgcgaaatccagactgccgtgcgccttgtcctgccaggcgagctggccaagcacgctgtgtccgagggaaccaaggctgtcaccaagttcacgtccgcttaa

SEQ ID NO: 2241 - protein, 157 aa, Volvox carteri
MAPKKEEKPASQAAEAPEVKAEAKPKAVKAPKKKEKKAPAKKVAKEPSAGGEDGDKKSKKKAKVAKSETYKLYIYKVLKQVHPDTGISSKAMSIMNSFINDIFEKVATEASKLSRYNKKPTVTSREIQTAVRLVLPGELAKHAVSEGTKAVTKFTSA

SEQ ID NO: 2242 - DNA, 372 bp, Caenorhabditis elegans
  CDS (1)..(372)
atgccaccaaagccatctgccaagggagccaagaaggccgccaagaccgtcgttgccaagccaaaggacggaaagaagagacgtcatgcccgcaaggaatcgtactccgtctacatctaccgtgttctcaagcaagttcacccagacaccggagtctcctccaaggccatgtctatcatgaactccttcgtcaatgatgtattcgaacgcatcgcttcggaagcttcccgtcttgctcattacaacaaacgctcaacgatctcatcccgcgaaattcaaaccgctgtccgtttgattctcccaggagaacttgccaagcacgccgtgtctgagggaaccaaggccgtcaccaagtacacttccagcaagtaa

SEQ ID NO: 2243 - protein, 123 aa, Caenorhabditis elegans; identical to SEQ ID NO: 2081

SEQ ID NO: 2244 - DNA, 414 bp, Zea mays
  CDS (1)..(414)
atggcgcccaaggccgagaagaagcccgcggagaagaagccgacggaggagaaggccgagaagaagcccagggcggagaagcgcgtgccgggcaaggagggcggcgagaagaaggggaagaagaaggccaagaagagcgtcgagacgtacaagatctacatcttcaaggtgctcaagcaggtgcacccggacattggtatctcgtccaaggccatgtccatcatgaactccttcatcaacgacatcttcgagaagctggctgccgaggccgccaagctcgcccgctacaacaagaagcccaccataacctcccgggagatccagacttcggtgcgcctcgtccttcctggcgagctcgccaagcacgccgtctccgagggcaccaaggccgttaccaagtttacttcctcttag

SEQ ID NO: 2245 - protein, 137 aa, Zea mays
MAPKAEKKPAEKKPTEEKAEKKPRAEKRVPGKEGGEKKGKKKAKKSVETYKIYIFKVLKQVHPDIGISSKAMSIMNSFINDIFEKLAAEAAKLARYNKKPTITSREIQTSVRLVLPGELAKHAVSEGTKAVTKFTSS

SEQ ID NO: 2246 - DNA, 375 bp, Psammechinus miliaris
  CDS (1)..(375)
atgcctgccaagcaaaccagtggaaagggagccaagaaggccggtaaggccaagggacgcccaagtggcgcctccaagacccgtcgccgtaagcgcaaggaaagctacggaatctacatctacaaggttctgaagcaggtccaccccgacactggcatctccagcaaagccatgtccatcatgaacagcttcgtcaacgatgtcttcgagcgcatcgccggtgaggcttcccgtcttagccagtacaacaagaagtccaccatcagcagccgtgaggtccagaccgctgtcagacttctcctcccaggagaactcgccaagcacgccgtctctgagggcaccaaggctgtcaccaagtacaccacctccaagtaa

SEQ ID NO: 2247 - protein, 124 aa, Psammechinus miliaris
MPAKQTSGKGAKKAGKAKGRPSGASKTRRRKRKESYGIYIYKVLKQVHPDTGISSKAMSIMNSFVNDVFERIAGEASRLSQYNKKSTISSREVQTAVRLLLPGELAKHAVSEGTKAVTKYTTSK

SEQ ID NO: 2248 - DNA, 468 bp, Volvox carteri
  CDS (1)..(468)
atggccccaaagaccaaggaggagaagcccgcatcggaggctgtcgagcccaaggccgaggctaagcccaaggctgagaaggctcccaagaagaaggagaagaaggcgccggctaagaagtccgccaaggagcccgctgccggcgatgccgctgagggggacaagaagaagaagaaggccaaggtcgccaagagcgagacctacaagctttacatttacaaggtgttgaagcaggtgcaccccgataccggcatcagctcgaaggccatgtcgattatgaacagcttcatcaacgacatctttgagaaggttgccaccgaggcctccaagctgagccgctacaacaagaagcccaccgtgacgtcgcgcgaaattcagactgctgtgcgcctggttcttccgggcgagctggccaagcacgccgtgtccgagggcaccaaggctgtcaccaagttcacgtcggcctaa

SEQ ID NO: 2249 - protein, 155 aa, Volvox carteri
MAPKTKEEKPASEAVEPKAEAKPKAEKAPKKKEKKAPAKKSAKEPAAGDAAEGDKKKKKAKVAKSETYKLYIYKVLKQVHPDTGISSKAMSIMNSFINDIFEKVATEASKLSRYNKKPTVTSREIQTAVRLVLPGELAKHAVSEGTKAVTKFTSA

SEQ ID NO: 2250 - DNA, 465 bp, Zea mays
  CDS (1)..(465)
atggcgcccaaggcggagaagaagccggcggcgaagaaggtggcggaggaggagccctcggagaaggcggctccggcggagaaggcccccgcggggaagaagcccaaggcggagaagcggctacctgcgggcaagtccgccggcaaggagggcggggacaagaagggtaggaagaaggcgaagaagagcgtggagacctacaagatctacatcttcaaggtcctgaagcaggttcaccccgacatcggcatctcctccaaggccatgtccatcatgaactccttcatcaacgacatcttcgagaagctcgccgcggaggccgccaagctcgcccggtacaacaagaagcccaccatcacctcccgcgagatccagacctccgtccgcctcgtcctccccggcgagctcgccaagcacgccgtctcggagggtaccaaggccgtcaccaagttcacctcgtcttag

SEQ ID NO: 2251 - protein, 154 aa, Zea mays
MAPKAEKKPAAKKVAEEEPSEKAAPAEKAPAGKKPKAEKRLPAGKSAGKEGGDKKGRKKAKKSVETYKIYIFKVLKQVHPDIGISSKAMSIMNSFINDIFEKLAAEAAKLARYNKKPTITSREIQTSVRLVLPGELAKHAVSEGTKAVTKFTSS

SEQ ID NO: 2252 - DNA, 381 bp, Homo sapiens; identical to SEQ ID NO: 2052
  CDS (1)..(381)

SEQ ID NO: 2253 - protein, 126 aa, Homo sapiens; identical to SEQ ID NO: 2053

SEQ ID NO: 2254 - DNA, 381 bp, Homo sapiens
  CDS (1)..(381)
atgccagaaccagcgaagtccgctccggccccgaaaaagggctccaagaaggcggtcaccaaggcgcaaaagaaagacggcaagaagcgcaagcgtagccgcaaggagagctactccgtgtacgtgtacaaggtgctgaagcaggtccacccggacaccggcatctcgtccaaggctatgggcatcatgaactccttcgtcaacgacatcttcgagcgcattgcgggcgaggcgtcgcgcctggcgcattacaacaagcgctcgaccatcacatccagggagatccagacggccgtgcgcctactgctgcccggggagctggccaagcatgcggtgtctgagggtaccaaggccgtcaccaagtacaccagcgccaagtaa

SEQ ID NO: 2255 - protein, 126 aa, Homo sapiens; identical to SEQ ID NO: 2089

SEQ ID NO: 2256 - DNA, 372 bp, Strongylocentrotus purpuratus; identical to SEQ ID NO: 2116
  CDS (1)..(372)

SEQ ID NO: 2257 - protein, 123 aa, Strongylocentrotus purpuratus; identical to SEQ ID NO: 2117

SEQ ID NO: 2258 - DNA, 381 bp, Homo sapiens; identical to SEQ ID NO: 2056
  CDS (1)..(381)

SEQ ID NO: 2259 - protein, 126 aa, Homo sapiens; identical to SEQ ID NO: 2057

SEQ ID NO: 2260 - DNA, 381 bp, Homo sapiens
  CDS (1)..(381)
atgccggagccagcgaagtccgctcccgcgcccaagaagggctcgaagaaagccgtgactaaggcgcagaagaaggacggcaggaagcgcaagcgcagccgcaaggagagctactccgtatacgtgtacaaggtgctgaagcaggtccaccccgacaccggcatctcctctaaggccatgggaatcatgaactccttcgtcaacgacatcttcgaacgcatcgcaggtgaggcttcccgcctgccgcattacaacaagcgctcgaccatcacctccagggagatccagacggccgtgcgcctgctgctgcccggggagttggccaagcacgccgtgtccgagggcaccaaggccgtcaccaagtacaccagcgctaagtaa

SEQ ID NO: 2261 - protein, 126 aa, Homo sapiens
MPEPAKSAPAPKKGSKKAVTKAQKKDGRKRKRSRKESYSVYVYKVLKQVHPDTGISSKAMGIMNSFVNDIFERIAGEASRLPHYNKRSTITSREIQTAVRLLLPGELAKHAVSEGTKAVTKYTSAK

SEQ ID NO: 2262 - DNA, 378 bp, Acropora formosa
  CDS (1)..(378)
atggcgcccaaggtacgtgccgctaagaaaggggaaaagagagttggcaaggccaagtccgggacggccgagactgccaagaggagacggggaaagagaaaggaaagctatgcgatctacatatataaagtgttgaagcaggttcatccggacacgggaatttccagcaaagccatgggtatcatgaattctttcgtgaacgatattttcgaacgcatagccgtggagtcttcacgtctttcgctttacaacaagaaggccaccattagttcaagagagatccaaacagcgataagacttttgcttcccggtgaacttgcaaaacacgctgtcagcgaggggacgaaggccgtgaccaagtataccagcagcaagtga

SEQ ID NO: 2263 - protein, 125 aa, Acropora formosa
MAPKVRAAKKGEKRVGKAKSGTAETAKRRRGKRKESYAIYIYKVLKQVHPDTGISSKAMGIMNSFVNDIFERIAVESSRLSLYNKKATISSREIQTAIRLLLPGELAKHAVSEGTKAVTKYTSSK

SEQ ID NO: 2264 - DNA, 432 bp, Agaricus bisporus
  CDS (1)..(432)
atggcacccaaacctgcttccactgctggaaaggctcctgcttccacagcctcgaaagcccctgtaaagtctgacgcagccaaaactgccagcaagagcaaggtatcgagtggtgctgatggtgaaaagaagaagcgtaagaagactcgcaaggagacttacagctcgtatatctacaaagtgcttaaacaagttcaccctgataccggtatctccaacaaggctatggctattctcaactctttcgtcaatgatatctttgaacgcattgctaccgaagcttccaagcttgcttcctactccaaaaagtcgaccatttcttctcgtgagatccaaacaagtgttcgtctcattctccctggtgaacttgccaagcatgctatctccgaaggtaccaaatctgtcaccaagttttcttcgggcggcaaatag

SEQ ID NO: 2265 - protein, 143 aa, Agaricus bisporus
MAPKPASTAGKAPASTASKAPVKSDAAKTASKSKVSSGADGEKKKRKKTRKETYSSYIYKVLKQVHPDTGISNKAMAILNSFVNDIFERIATEASKLASYSKKSTISSREIQTSVRLILPGELAKHAISEGTKSVTKFSSGGK

SEQ ID NO: 2266 - DNA, 438 bp, Capsicum annuum
  CDS (1)..(438)
atggcaccaaaggcagcagcagggaaaaagccagctgagaagaagccagtagaggagaagaaggccgaggaagttcctgctgagaagaagcccaaagccgggaagaagctcccaaaggacgctggcaggcccgacaagaagaagaagagggcaaagaagagcattgaaacctacaagatctacatcttcaaggtgctgaagcaggtgcatccagatatcggcatttccagcaaatcaatgggtataatgaacagtttcattaatgatatatttgagaagcttgctcaggaatcatctagattggctaggtacaacaagaagcctactatcacttcaagggaaatccagactgctgtgaggcttgtgttgcctggtgaattggctaagcacgctgtttctgaaggaaccaaggcagttaccaagtttactagctcttag

SEQ ID NO: 2267 - protein, 145 aa, Capsicum annuum
MAPKAAAGKKPAEKKPVEEKKAEEVPAEKKPKAGKKLPKDAGRPDKKKKRAKKSIETYKIYIFKVLKQVHPDIGISSKSMGIMNSFINDIFEKLAQESSRLARYNKKPTITSREIQTAVRLVLPGELAKHAVSEGTKAVTKFTSS

SEQ ID NO: 2268 - DNA, 381 bp, Gallus gallus
  CDS (1)..(381)
atgcctgagccggccaagtccgcacccgcccccaagaagggctccaagaaggcggtgaccaagacccagaagaagggcgacaagaagcgcaagaagagccgcaaggagagctactcgatctacgtgtacaaggtgctgaagcaggtgcaccccgacacgggcatctcgtccaaggccatgggcatcatgaactcgttcgtcaacgacatcttcgagcgcatcgccggcgaggcgtcgcgcctggcgcactacaacaagcgctcgaccatcacgtcgcgggagatccagacggccgtgcggctgctgctgcccggcgagctggccaagcacgcggtctccgagggcaccaaggcggtcaccaagtacaccagctccaagtag

SEQ ID NO: 2269 - protein, 126 aa, Gallus gallus
MPEPAKSAPAPKKGSKKAVTKTQKKGDKKRKKSRKESYSIYVYKVLKQVHPDTGISSKAMGIMNSFVNDIFERIAGEASRLAHYNKRSTITSREIQTAVRLLLPGELAKHAVSEGTKAVTKYTSSK

SEQ ID NO: 2270 - DNA, 378 bp, Chironomus thummi thummi
  CDS (1)..(378)
atggcaccaccaaaaaccagcggaaaagctgcaaagaaagccggaaaggcccaaaaagcaatctctaaggatgacaagaaaaagagacgtcataagcgtaaggaatcatacgcaatctacatcttcaaagtcttgaaacaagtccatccagacactggtgtttcctcaaaggcaatgagcatcatgaacagtttcgtcaatgatatcttcgaacgtattgcagctgaagcctcaagattggctcactacaacaaacgctcaacaatcacaagtcgcgagatccaaactgctgttcgtttactcttacctggtgaattggctaagcacgctgtctcagaaggaacaaaagccgtcacaaaatacacatcatccaagtaa

SEQ ID NO: 2271 - protein, 125 aa, Chironomus thummi thummi
MAPPKTSGKAAKKAGKAQKAISKDDKKKRRHKRKESYAIYIFKVLKQVHPDTGVSSKAMSIMNSFVNDIFERIAAEASRLAHYNKRSTITSREIQTAVRLLLPGELAKHAVSEGTKAVTKYTSSK

SEQ ID NO: 2272 - DNA, 372 bp, Drosophila erecta; identical to SEQ ID NO: 2092
  CDS (1)..(372)

SEQ ID NO: 2273 - protein, 123 aa, Drosophila erecta; identical to SEQ ID NO: 2093

SEQ ID NO: 2274 - DNA, 423 bp, Emericella nidulans; identical to SEQ ID NO: 2140
  CDS (1)..(423)

SEQ ID NO: 2275 - protein, 140 aa, Emericella nidulans; identical to SEQ ID NO: 2141

SEQ ID NO: 2276 - DNA, 444 bp, Gossypium hirsutum
  CDS (1)..(444)
atggcaccaaaagctgaaaaaaagccagccgagaagaagcctgcggaggagaagaaagccgtagctgagaaagccccggcagagaagaagcctaaggctgggaaaaagcttcccaaggaaggcggagcggctgccggagacaagaagaagaagagagttaagaagagcgtcgagacctacaagatctacatcttcaaggtcctgaagcaagttcaccctgacatcgggatctctagcaaagctatggggatcatgaacagtttcatcaatgatatcttcgagaagcttgctcaagaagcctctaggctcgcgaggtacaacaagaaacccaccatcacttccagggaaattcagaccgctgttaggcttgtacttcctggtgagcttgccaagcacgccgtttctgaaggtaccaaggccgtgaccaagtttacttcatcttga

SEQ ID NO: 2277 - protein, 147 aa, Gossypium hirsutum
MAPKAEKKPAEKKPAEEKKAVAEKAPAEKKPKAGKKLPKEGGAAAGDKKKKRVKKSVETYKIYIFKVLKQVHPDIGISSKAMGIMNSFINDIFEKLAQEASRLARYNKKPTITSREIQTAVRLVLPGELAKHAVSEGTKAVTKFTSS

SEQ ID NO: 2278 - DNA, 414 bp, Neurospora crassa
  CDS (1)..(414)
atgcctcccaagcccgccgacaagaagcctgcctccaaggcccccgctactgcctccaaggcccccgagaagaaggatgccggaaagaagactgccgcctctggcgacaagaagaagcgcaccaaggcccgcaaggagacctactcctcctacatctacaaggtcctcaagcaggtccaccctgataccggtatctccaaccgcgccatgtctatcctgaactcgtttgtcaacgatatcttcgagcgcgttgccaccgaggcttccaagcttgctgcctacaacaagaagtccaccatctcctctcgtgagatccagacctctgttcgcctcatcctccccggcgagcttgccaagcacgctgtatcggaaggcactaaggccgttaccaagtactcttccagcacgaaataa

SEQ ID NO: 2279 - protein, 137 aa, Neurospora crassa
MPPKPADKKPASKAPATASKAPEKKDAGKKTAASGDKKKRTKARKETYSSYIYKVLKQVHPDTGISNRAMSILNSFVNDIFERVATEASKLAAYNKKSTISSREIQTSVRLILPGELAKHAVSEGTKAVTKYSSSTK

SEQ ID NO: 2280 - DNA, 411 bp, Rosellinia necatrix
  CDS (1)..(411)
atgcctcccaaagctgccgacaagaagcccgccgctaaggctcctgttgcctccaaggcacccgagaagaaggacgctggaaagaagaccgcctccactggcgagaagaagaagcgtaccaaggcgcgtcgggagacatactcttcttacatttacaaggtcctcaagcaggtccaccccgatactggtatttccaaccgcgccatgagcatcctgaactctttcgtcaacgatattttcgagcgtgttgccacagaagcctccaagctggccgcatacaacaagaagagcaccatttcttcgcgtgaaatccagacctccgtccgcctcatcctccccggcgaacttgccaagcatgctgtctccgaaggtaccaaggccgtcaccaagtactcttcatcaacgaaataa

SEQ ID NO: 2281 - protein, 136 aa, Rosellinia necatrix
MPPKAADKKPAAKAPVASKAPEKKDAGKKTASTGEKKKRTKARRETYSSYIYKVLKQVHPDTGISNRAMSILNSFVNDIFERVATEASKLAAYNKKSTISSREIQTSVRLILPGELAKHAVSEGTKAVTKYSSSTK

SEQ ID NO: 2282 - DNA, 441 bp, Nicotiana tabacum
  CDS (1)..(441)
atggcaccaagggcggataagaaacccgccgagaagaagccgggcgctgagaaaaccccggtcgccgagaaagcaccagcagagaagaagcccagggccggaaagaagctcccaagggacgccggtgctgccggagacaagaagaagaagagggcggagatgtctgttgagacctacaagatctacatcttcagggttctgaagcatgttcatcctgatatcggtatttcgagcaaagctatgggtatcatgaacagtttcattaacgatatctttgagaagcttgctcgggaatcttctagacttgctgggtacaacaagaagcctactatctcttctcgggagattcagactgctgtgagacttgtacttcctggtgaactggctaagcatgctgtctctgaaggaactaaggctgttaccaaattcactagctcttga

SEQ ID NO: 2283 - protein, 146 aa, Nicotiana tabacum
MAPRADKKPAEKKPGAEKTPVAEKAPAEKKPRAGKKLPRDAGAAGDKKKKRAEMSVETYKIYIFRVLKHVHPDIGISSKAMGIMNSFINDIFEKLARESSRLAGYNKKPTISSREIQTAVRLVLPGELAKHAVSEGTKAVTKFTSS

SEQ ID NO: 2284 - DNA, 372 bp, Urechis caupo
  CDS (1)..(372)
atgccacctaaagccgcgtccaagggagctaagaaggccgccagcaaggcaaaggccgcccgttctaccgataagaagaagaggaggaggaggagggagtcttactccatctacatctacaaagtgctgaagcaggtccaccccgacactggcatcagcagcaaggccatgagcatcatgaactcgttcgtgaacgacatcttcgagcgcatcgccgccgaggcttctcgtctggcccactacaaccgccgttccacaatcaccagccgggaaatccagaccgctgtcaggcttctgctgcccggtgagctggccaagcacgccgtcagtgagggaaccaaggccgtcacgaaatacactcagtccaagtaa

SEQ ID NO: 2285 - protein, 123 aa, Urechis caupo
MPPKAASKGAKKAASKAKAARSTDKKKRRRRRESYSIYIYKVLKQVHPDTGISSKAMSIMNSFVNDIFERIAAEASRLAHYNRRSTITSREIQTAVRLLLPGELAKHAVSEGTKAVTKYTQSK

SEQ ID NO: 2286 - DNA, 712 bp, Brassica napus
  CDS (90)..(539)
cctcctcctcctcctcctcctctgtattctcctccatctgagagagaaaacaattaaaaagaacgaaaacaaaagaaacaatctcaacaatggcggatcagctcaccgacgatcagatctctgagttcaaggaagccttcagcttattcgacaaggatggtgacggttgcattactaccaaggagcttggaaccgtgatgcgttctctcggacagaacccaacagaagcagagctccaagacatgatcaacgaagttgacgctgacggtaacggaaccattgattttcctgagttcttgaacctcatggctcgtaagatgaaggacaccgactccgaggaagagctcaaggaagcgttcagggtcttcgacaaggatcagaacggtttcatctcagctgctgagctccgccatgtgatgacaaacttaggtgagaagctcacagatgaagaggttgacgagatgattaaggaagctgatgttgatggtgatggccagattaactatgaggagtttgtcaaggtcatgatggctaagtgataaggtttttgttactattaatactcttttatgtgattcttatatttactattatgttctaatgttttttttattcatgggacttggttctgttttatggctgtttaagacgccaatgttatctctgtagacatttgaagataagatagatttgtgctcaaaaaaaaaaaaaa

SEQ ID NO: 2287 - protein, 149 aa, Brassica napus
MADQLTDDQISEFKEAFSLFDKDGDGCITTKELGTVMRSLGQNPTEAELQDMINEVDADGNGTIDFPEFLNLMARKMKDTDSEEELKEAFRVFDKDQNGFISAAELRHVMTNLGEKLTDEEVDEMIKEADVDGDGQINYEEFVKVMMAK

SEQ ID NO: 2288 - DNA, 453 bp, Unknown
  Unidentified
  CDS (1)..(450)
atggccgatcagctgaccgacgatcagatctccgagttcaaggaagctttcagcctattcgacaaggacggagatggttgcatcacgacgaaagagcttggtacagtgatgaggtcgctaggccagaacccgacagaagcagagcttcaagacatgatcaacgaagttgacgctgacggcaacggaaccatagactttcccgagtttctcaacttgatggcgcgtaagatgaaggacacggattcggaggaagagctcaaagaagctttcagggtcttcgacaaggaccagaacggtttcatctccgccgcggagctgaggcatgtgatgaccaatttgggagagaagctgactgatgaagaggttgatgagatggtcagagaagctgatgttgatggagatggtcagatcaattacgatgagtttgtcaaagttatgatggcaaagtgagca

SEQ ID NO: 2289 - protein, 149 aa, Unknown
  Unidentified
MADQLTDDQISEFKEAFSLFDKDGDGCITTKELGTVMRSLGQNPTEAELQDMINEVDADGNGTIDFPEFLNLMARKMKDTDSEEELKEAFRVFDKDQNGFISAAELRHVMTNLGEKLTDEEVDEMVREADVDGDGQINYDEFVKVMMAK

SEQ ID NO: 2290 - DNA, 707 bp, Brassica napus
  CDS (12)..(422)
aataaacccaaatggctcgtaccaagcaaaccgctagaaaatccaccggaggaaaggctccgaggaagcagctggcgacgaaagcggcgaggaagtcggctccggccacgggaggagtgaagaagccgcacagattccgtcccggaaccgtcgcccttcgtgagatcaggaagtaccagaagagcaccgagcttctcatccgcaagcttcccttccagcgtctggtccgtgagatcgctcaggacttcaagatggatctgaggttccagagcagcgccgtcgcggctttgcaagaggctgctgaggcttaccttgttggtttgttcgaagacaccaatctctgcgcgattcacgccaaaagagtgacgatcatgcccaaggatatccagctcgctaggagaatccgtggtgaaagagcttgaagacttatctagctttgtctagttcgttaatgtgtactttgatccatggtgaattttctaaaggtttagtctttgttaagatagtctttaaggtgttcgacgaaatacctcaatgaatatgatctcttgtttaatattattgcctaattgtctttgatatttattttctattatgtgtttaaatcagtcactcgtttctccttgtttatcaaaatcgcaatgttacaaacattgaaacgttatgatatatataacacaacacagtcgttacaaaaaaaaaaaaaa

SEQ ID NO: 2291 - protein, 136 aa, Brassica napus
MARTKQTARKSTGGKAPRKQLATKAARKSAPATGGVKKPHRFRPGTVALREIRKYQKSTELLIRKLPFQRLVREIAQDFKMDLRFQSSAVAALQEAAEAYLVGLFEDTNLCAIHAKRVTIMPKDIQLARRIRGERA

SEQ ID NO: 2292 - DNA, 790 bp, Brassica napus
  CDS (31)..(501)
cctctctctaaaaaaagcagttttatttggatggacaagacacaactaaaacaacaagaactgactcaagaacagatcatggagtttaaagaggcgttttgtctgttcgacaaagatggagatggttgcatcactgctgatgagcttgccactgtgatccgctcgttggatcagaatccgaccgaacaagagcttcaagatatgatcaatgagatcgactccgatggtaacggcaccatcgaattctctgagttcctcaacctcatggccaacaaaatccaggaaactgatgcagatgaggagcttaaagaagcattcaaagtgtttgacaaagaccaaaatggctacatctcggccagcgagttgaggcatgtgatgatcaatcttggggagaagctaaccgatgaagatgtcgctcaaatgataaaggaggcagatttggatggtgatggtcaagtcaattatgatgaatttgtgaggatgatgatgacaagcggttaaattggaaaaacaatgttaccacctgataatttattatcttttataaatttatcaatctttttttttttctttttcttcttcagaataccatattttccttttccaaattaatttaatttaagcttttcatatctgatcgacgtagtaagtttctgtttatctgaattattatttgtgtatctggtgtatagtatatttatttagctttttgttgaaaaagtcaatcagattgagtgtatacatgtgttctctggcaataattactatttcagatcaaaaaaaaaaaaaa

SEQ ID NO: 2293 - protein, 156 aa, Brassica napus
MDKTQLKQQELTQEQIMEFKEAFCLFDKDGDGCITADELATVIRSLDQNPTEQELQDMINEIDSDGNGTIEFSEFLNLMANKIQETDADEELKEAFKVFDKDQNGYISASELRHVMINLGEKLTDEDVAQMIKEADLDGDGQVNYDEFVRMMMTSG

SEQ ID NO: 2294 - DNA, 695 bp, Brassica napus
  CDS (44)..(493)
cgaataccagcgaactaaattgaaaaagaaaagaagaaaaacaatggcggaccagctaaccgatgaccagatctccgagttcaaggaagccttcagcctattcgacaaggacggagatggctgcatcaccacaaaggagctcgggacggtgatgagatcacttgggcaaaaccctacagaagctgagctccaagacatgatcaacgaggttgacgcagacgggaatggaacgatagatttcccggagtttctgaacctaatggcccgcaagatgaaggacactgattcagaggaagagcttaaagaagccttcagggtttttgacaaggaccagaacggtttcatctccgcggctgagctccgccacgtgatgacaaatcttggggagaagctaactgacgaagaagtggatgagatgatccgagaggctgacgtggatggtgatggtcagatcaactatgatgagttcgttaaagttatgatggcaaagtgagattctccgaaatcccatatctgttttttcttttcttttcatctttaaactgaaaaagttcagatttgcttcctggctttgattattggtaactctgcatctctcttctgtcttttgttgaacccatcataatttgctgtagtttcttgacagtttgaaatcattcacttcaatatcattttcgtgctaaaaaaaaaaaaaa

SEQ ID NO: 2295 - protein, 149 aa, Brassica napus
MADQLTDDQISEFKEAFSLFDKDGDGCITTKELGTVMRSLGQNPTEAELQDMINEVDADGNGTIDFPEFLNLMARKMKDTDSEEELKEAFRVFDKDQNGFISAAELRHVMTNLGEKLTDEEVDEMIREADVDGDGQINYDEFVKVMMAK

SEQ ID NO: 2296 - DNA, 702 bp, Brassica napus
  CDS (74)..(520)
aaaaaaaccaaatcaaagagagaaaaatcccgacccggaatccgacccgaaaacccggacgttacgtttcacaatgggcaaggacggcttgagcgacgaccaggtctcctcaatgaaggaagccttcacgctcttcgacaccgacggcgacggcaaaatcgccccctccgagctcgggatcctgatgcgatccctcggcgggaacccgacccaagcccagctgaaatccataaccgcctccgagagcctcacctcccccttcgatttcagccgtttcctcgatctgatggcgaagcatttgaagacggagcccttcgatcgccagctcagggatgctttcaaggtgctcgacaaggaagggagcgggtttgttgccgtggcggatctgaggcatatattgacgagtatcggggagaagctggaggggagtgagtttgatgagtggatcaaggaggtggatgtgggatccgatgggaagattaggtatgaggattttattgcgaggatggttgctaagtagtgaggatcttgtttgtttgtttgttgcttttgtttttggaatgttactaacttttattgttgtttggtttgttatggagatgttttgtgtggtggtgattggttgaagttttaatctttatgcgtttgtagtttgttggtttttggatcaatgaatgtaattgagtccaaaaaaaaaaaaaa

SEQ ID NO: 2297 - protein, 148 aa, Brassica napus
MGKDGLSDDQVSSMKEAFTLFDTDGDGKIAPSELGILMRSLGGNPTQAQLKSITASESLTSPFDFSRFLDLMAKHLKTEPFDRQLRDAFKVLDKEGSGFVAVADLRHILTSIGEKLEGSEFDEWIKEVDVGSDGKIRYEDFIARMVAK

SEQ ID NO: 2298 - DNA, 252 bp, Unknown
  Unidentified
  CDS (1)..(249)
atgcagaacgaagagggtcaggtcacggaactctacattcctaggaaatgctctgctactaaccggatgatcacatcaaaggatcatgcctctgtgcaactcaacattggtcatttagatgctgatggcatctacaccggtcaattcactaccttggctctctgcggttttgttcgtgcccagggagacgctgacagtggggtggacaggctgtggcagaagaagaaggtcgaagccaaacaaatctaaaga

SEQ ID NO: 2299 - protein, 82 aa, Unknown
  Unidentified
MQNEEGQVTELYIPRKCSATNRMITSKDHASVQLNIGHLDADGIYTGQFTTLALCGFVRAQGDADSGVDRLWQKKKVEAKQI

SEQ ID NO: 2300 - DNA, 811 bp, Glycine max
  CDS (79)..(534)
cgattctctctttctctttcttcagaaaaattaaacccattcaaagaaagaaagaaagagcgatcatttccaatcacaatggcagatcaactcaccgatgaacagatctcggagttcaaggaagccttcagtttgttcgataaggatggcgatggttgcatcacaacaaaggagcttgggactgttatgcgttcgttgggtcagaatccaacagaggctgagctccaagacatgatcaatgaagtagatgctgatgggaatggcaccattgacttccctgagttcttgaacctcatggctagaaagatgaaggacactgattctgaggaggagctgaaagaggcgttccgagtgtttgacaaggaccagaatgggttcatttctgctgctgagctccgccatgtgatgaccaaccttggggagaagctcactgatgaagaggttgatgagatgattcgagaggctgatgtcgatggcgacggccaaataaactacgaggagtttgttaaggtcatgatggccaagtgatggtagtacaccatctccactaaattctgaactgatggaaaaaaatgacaaggttgaacttgtgatatagtacacctagtccttgcctaatgtcattactgtcttatttctagatttttatttgatgtttttgaattcaatctaaacgacatttagtggaaagctctgctgctaatagtaattgtggtggaatggtgtctttctagtttctgttgtgacttgtgtctcaagtgcttgatgtttattcaactcagctttcttctgctcccaaaaaaaaaaaaaa

SEQ ID NO: 2301 - protein, 150 aa, Glycine max
MADQLTDEQISEFKEAFSLFDKDGDGCITTKELGTVMRSLGQNPTEAELQDMINEVDADGNGTIDFPEFLNLMARKMKDTDSEEELKEAFRVFDKDQNGFISAAELRHVMTNLGEKLTDEEVDEMIREADVDGDGQINYEEFVKVMMAKW

SEQ ID NO: 2302 - DNA, 414 bp, Unknown
  Unidentified
  CDS (1)..(411)
atggctcgtactaagcaaactgctcgtaaaagtaccggaggaaaagctcctaggaaacaactcgccacgaaagctgctcgtaagtcggctccagctacgggaggcgtcaaaaaacctcaccgttacagacctggtactgtagctttgcgtgaaatcagacgttatcaaaagtctactgaacttttgatccgcaagttacctttccaacgccttgttcgtgaaattgcacaagattttaaaacggacttacgcttccaatctagcgctattggtgctcttcaagaagctgctgaagcatacctagtgagtctttttgaagatacaaatcttgcggctattcatgctaaacgcgttactattcaaccaaaagatatccaattggcccgtcgtcttcgtggtgaacgttcttaaatt

SEQ ID NO: 2303 - protein, 136 aa, Unknown
  Unidentified
MARTKQTARKSTGGKAPRKQLATKAARKSAPATGGVKKPHRYRPGTVALREIRRYQKSTELLIRKLPFQRLVREIAQDFKTDLRFQSSAIGALQEAAEAYLVSLFEDTNLAAIHAKRVTIQPKDIQLARRLRGERS

SEQ ID NO: 2304 - DNA, 249 bp, Unknown
  Unidentified
  CDS (1)..(246)
atgcagaacgaggtgggtgatatggtggacctctatgtcccaaggaagtgctctgccaccaacaggatcataactgccaaggaccatgcctctgtccagatcaacatcgggcatgtggatgcgaatggactgtataatggcagtttcaccacgtttgccctctctggattcgtccgcgcccagggtgatgctgatggttctttggacaggctctggcagcagaagagggctgagatcaagcagtagatg

SEQ ID NO: 2305 - protein, 81 aa, Unknown
  Unidentified
MQNEVGDMVDLYVPRKCSATNRIITAKDHASVQINIGHVDANGLYNGSFTTFALSGFVRAQGDADGSLDRLWQQKRAEIKQ

SEQ ID NO: 2306 - DNA, 615 bp, Triticum aestivum
  CDS (20)..(451)
gaattcccgggtcgacgacatggcccgcaccaagcagacggcgaggaagtccaccggcggcaaggcgccgaggaagcagctggccaccaaggccgcccgcaagtccgccccggccaccggcggcgtcaagaagccccaccgcttccgccccggcaccgtcgcgctccgcgagatccgcaagtaccagaagagcaccgagctgctcatccgcaagctccccttccagcgcctcgtccgcgagatcgcccaggacttcaagaccgacctccgcttccagtcctccgccgtctccgccctgcaggaggccgccgaagcgtacttggtggggctcttcgaggacaccaacctctgcgccatccacgccaagcgcgtcaccatcatgcccaaggacatccagctcgcccgccgcatccgtggcgagagggcctaggccgcaatctgtgcgccgtgagtgtttaggtccatcttagcctttgtccagccttggaaatgtatgcgtgctagtgtttgttcgttccatcgtggatgtagtgtgtctgatctgatgtcaccttcttgctgtcatcagtaactgaaatgacaatgttggctatctgttctaaaaaaaaaaaaaaa

SEQ ID NO: 2307 - protein, 142 aa, Triticum aestivum
MARTKQTARKSTGGKAPRKQLATKAARKSAPATGGVKKPHRFRPGTVALREIRKYQKSTELLIRKLPFQRLVREIAQDFKTDLRFQSSAVSALQEAAEAYLVGLFEDTNLCAIHAKRVTIMPKDIQLARRIRGERAAAICAP

SEQ ID NO: 2308 - DNA, 639 bp, Triticum aestivum
  CDS (50)..(460)
atccccaatctcccaaccaatccaccaagcaaaccctagcccagccccgatggcccgcacgaagcagacggcgaggaagtccaccggcggcaaggccccgcggaagcagctggccaccaaggcggcgcgcaagtcggcgccggccaccggcggcgtcaagaagccgcaccgcttccgcccgggcaccgtggcgctccgggagatccgcaagtaccagaagagcacggagctgctcatccgcaagctgcccttccagcgcctcgtcagggagatcgcgcaggacttcaagaccgacctgaggttccagtcctccgccgtgtcggcgctgcaggaggccgccgaggcctacctcgtgggcctcttcgaggacaccaacctctgcgccatccacgccaagcgcgtcaccatcatgcccaaggacatccagctcgcaaggcgcatcaggggcgagagggcctaagatgtgtccgtctcgtcttatctgcaggtgtagggagtagcatatgttgcgtggtggagtaatctggtattgtggtagtaagattctaactgaatgtagtgtttgatgttaccatcttgctgtcatcagcaatatgaatgaaagttggctatcagatctctcgcaaaaaaaaaaaaaaa

SEQ ID NO: 2309 - protein, 136 aa, Triticum aestivum
MARTKQTARKSTGGKAPRKQLATKAARKSAPATGGVKKPHRFRPGTVALREIRKYQKSTELLIRKLPFQRLVREIAQDFKTDLRFQSSAVSALQEAAEAYLVGLFEDTNLCAIHAKRVTIMPKDIQLARRIRGERA

SEQ ID NO: 2310 - DNA, 700 bp, Triticum aestivum
  CDS (105)..(515)
gaattcccgggtcgacttcgctgtcgacgatttcgtgccttccacccccacaacaacaaccatcatcaacaacttcatccacatcttcacaagaatcctcaacaatggctcgcactaagcagaccgcccgaaagtccactggtggcaaggcccctcgcaagcagctcgcttccaaggctgcccgcaagtccgccccctctaccggaggtgtcaagaagcctcaccgctacaagcccggtaccgtcgctctccgtgagatccgtcgctaccagaagtccactgagcttctcatccgaaagctccccttccagcgtctcgtccgtgagattgctcaggacttcaagtctgatctccgattccagtcctccgccatcggtgctctccaggagtctgtcgagtcttacctcgtctccctcttcgaggacaccaacctgtgcgccatccacgccaagcgtgttaccatccagtccaaggatatccagctcgcccgccgcctccgtggtgagcgcaactaagcgaatggctttgggaggataacgaattttttgctttgacacgagggatatcatggttaggggataatcaaggcgttcatgaggaacaatgttttatacactcaggcttgtacattaagtggcaagcaagttagctgcctttagcaatcgaccaacggtctttgatcatcaaaaaaaaaaaaaaa

SEQ ID NO: 2311 - protein, 136 aa, Triticum aestivum
MARTKQTARKSTGGKAPRKQLASKAARKSAPSTGGVKKPHRYKPGTVALREIRRYQKSTELLIRKLPFQRLVREIAQDFKSDLRFQSSAIGALQESVESYLVSLFEDTNLCAIHAKRVTIQSKDIQLARRLRGERN

SEQ ID NO: 2312 - DNA, 252 bp, Unknown
  Unidentified
  CDS (1)..(249)
atgcagaacgaggaaggacagatcaccgagctttacattcctaggaagtgctctgccacaaaccgattgattaccgctaaggaccatgcttcggttcaggttaacattgggcatgtggatgagaatggcgtctacaatggccatttctccacttttgctctctgcggcttcatacgtgctcagggtgatgctgacagtgccctagatcgcttgtggcagaagaagaaagttgaagttaagcaacagtagaca

SEQ ID NO: 2313 - protein, 82 aa, Unknown
  Unidentified
MQNEEGQITELYIPRKCSATNRLITAKDHASVQVNIGHVDENGVYNGHFSTFALCGFIRAQGDADSALDRLWQKKKVEVKQQ

SEQ ID NO: 2314 - DNA, 770 bp, Hordeum vulgare
  CDS (197)..(607)
ccaccaaccacctctcctctccccctcgtgccgccgcccaagattccggcgacagcagccggcaggggcacgccggaaggccgccacgcgcacgaggcctcccactttcatcttccagttcaccaccgcgaagtgaaatcccaatctccaatcgccacagcgaacagcagccgccagatccttccccccagctccgatggcctgcacgaagcagacggcccgcaagtccaccgatggcaaggcgccgaggaagcagctggcgaccaaggcggcgcgcaagtccgccccggccaccgacggcgtgaagaagctccaccgcttccgctctggaaccgttgccctccgggagatccgcaagtaccagaagagcacagagttgcttatccgcaagctacccttccagcgcctcgtccgggagatcgcgcaagacttcaagaccgacctccgcttccagtcctccgccgtctccgcgctccaggaggccaccgaggcgtacctcgtcgggatgttcgatgacaccaacatctgcgccatccacgtcaagcgcgtcaccatcatgcccaaggacatccagctcgtctgccgcatccgtggggagcgcgcctaggtttcgggtcaccggtaatactgagcagtagctgttcttgtcctgtgatccggatgtgtgtccgatgcttctgttgtttgtgttgatatgatctgtcgctatgtgtcgtggtgcttgaatgaaatgacaatggaaaagttcagttaccaaaaaaaaaaaaaaa

SEQ ID NO: 2315 - protein, 136 aa, Hordeum vulgare
MACTKQTARKSTDGKAPRKQLATKAARKSAPATDGVKKLHRFRSGTVALREIRKYQKSTELLIRKLPFQRLVREIAQDFKTDLRFQSSAVSALQEATEAYLVGMFDDTNICAIHVKRVTIMPKDIQLVCRIRGERA

SEQ ID NO: 2316 - DNA, 414 bp, Unknown
  Unidentified
  CDS (1)..(411)
atggctcgtactaagcagactgctcgtaagtccactggagggaaggctccaaggaagcagctagccaccaaggctgcccgcaagtctgctcccacaactggaggagtgaagaagcctcaccgttaccgccctggaactgttgctcttcgtgagatccgcaagtaccagaagagcacggagctgctcataaggaagcttccattccagaggcttgtcagggagattgcccaggacttcaagactgacctccgcttccagagccatgcggtgcttgcccttcaggaggctgcagaggcctacctggtgggtctcttcgaggacaccaacctgtgcgccatccatgccaagcgtgtgaccatcatgcccaaggacattcagctggctaggaggatccgtggcgagagggcttaagct

SEQ ID NO: 2317 - protein, 136 aa, Unknown
  Unidentified
MARTKQTARKSTGGKAPRKQLATKAARKSAPTTGGVKKPHRYRPGTVALREIRKYQKSTELLIRKLPFQRLVREIAQDFKTDLRFQSHAVLALQEAAEAYLVGLFEDTNLCAIHAKRVTIMPKDIQLARRIRGERA

SEQ ID NO: 2318 - DNA, 772 bp, Hordeum vulgare
  CDS (40)..(459)
gaattcccgggtcgacgtttcgtgctttccccacctgcgatggctcgcacgaagaaaacggtggcggcgaaggagaagcgccccccttgctccaagtcggagccgcagtcgcagccgaagaagaaggagaagcgggcgtaccggttccggccgggcacggtggcgctgcgggagatccggaagtaccgcaagtccaccaatatgctcatcccctttgcgcccttcgtccgcctggtcagggacatcgccgacaacttgacgccattgtcgaacaagaaggagagcaagccgacgccatggactcctctcgcgctcctctcgttgcaagagtctgcagagtatcacttggtcgatctatttggaaaggcaaatctgtgtgccattcattcgcaccgtgttaccatcatgctaaaggacatgcagcttgcgaggcgtatcgggacgagaagcctttggtgatactaatggaggatgttttaggcatcgtagggagcaaacactggtgatgctaatggtagatgttttttgtatgagtgcaatgcgaaggagctgatggtagtgatccaatatgtttgtgagtgtatcattaggaagtaatgtaggtgtgttttcatctaggtagcatgtcttcgaagttgatccggttggttgcatggctgggatcatctgacttgtcggcttttgctccatttgaattgatctaattcggacagagtttctgcaaatgatccaataatatgggttgtcaaatggcttgaaaaaaaaaaaaaaa

SEQ ID NO: 2319 - protein, 139 aa, Hordeum vulgare
MARTKKTVAAKEKRPPCSKSEPQSQPKKKEKRAYRFRPGTVALREIRKYRKSTNMLIPFAPFVRLVRDIADNLTPLSNKKESKPTPWTPLALLSLQESAEYHLVDLFGKANLCAIHSHRVTIMLKDMQLARRIGTRSLW

SEQ ID NO: 2320 - DNA, 740 bp, Hordeum vulgare
  CDS (52)..(549)
cccacatcgatcactccatcgtcatccaagaagagagagagagagggcaggatggcgggcgccggcgcaacagcagggatcagctcggagcagatgagcgagttccgggaggcgttcgccttcttcgacaaggacggggacggctgcatcacggcggaggagctgtccacggtcatccggtccctgggccagaccccgacgcccgaggagctgcgggacatggtgcgcgacgtggacgccgacggcaacggcaccatcgagttcgccgagttcctcgcgctcatgtcacgcaaggccgacgccgacgcggacgccgccgaccccgaggaggagctccgggaggccttcagggtcttcgacaaggaccacgacggccacatctccaaggccgagctgcgccacgtcatgatcagcctcggcgagaagctcaccgacgacgaggtggacgggatgatccaggaggccgacctcgacggcgacggcctcgtcaatttcgacgagttcgtcaggatgatgatgctctccgacgccgaccagcaccagcattgagagcttgtctgagatagatagtccgtccgtccgtccgtccgtcgtccatttcttcagtggacggacaccacttgtcgttgtcggccggccacgcccggggattattaagttagctaagctagccatgcatgtatggatgaaatgaatcttgaattcttgattgattggttactgttaaaaaaaaaaaaaaa

SEQ ID NO: 2321 - protein, 165 aa, Hordeum vulgare
MAGAGATAGISSEQMSEFREAFAFFDKDGDGCITAEELSTVIRSLGQTPTPEELRDMVRDVDADGNGTIEFAEFLALMSRKADADADAADPEEELREAFRVFDKDHDGHISKAELRHVMISLGEKLTDDEVDGMIQEADLDGDGLVNFDEFVRMMMLSDADQHQH

SEQ ID NO: 2322 - DNA, 423 bp, Unknown
  Unidentified
  CDS (1)..(420)
atggccagcacaaactacaaggaggctttcgccttatttgacaaacgtggaaaccagcgcgtacaggtggaaagcttaggagatttattaagagcttgtggccaaaatcctaccctggcagagataagggatttagaaaagaatgttggttcagactttgacttcgaaactttttcaaaggtactcaatagaccgggcggcttccgcgagccaggtgagccagaagaatattgccgtggttttcaagtcttcgacaaggagatgacaggctttattggtgttggacaactacgctacattctgacaaatctgggagagaaaatgagtgacgaggaagtcgatgagttgttgaaagcagtgaacgtttcaagtggagagatcaattacactgacctagtgcgcacaatcctcgcgaattagcca

SEQ ID NO: 2323 - protein, 139 aa, Unknown
  Unidentified
MASTNYKEAFALFDKRGNQRVQVESLGDLLRACGQNPTLAEIRDLEKNVGSDFDFETFSKVLNRPGGFREPGEPEEYCRGFQVFDKEMTGFIGVGQLRYILTNLGEKMSDEEVDELLKAVNVSSGEINYTDLVRTILAN

SEQ ID NO: 2324 - DNA, 477 bp, Unknown
  Unidentified
  CDS (1)..(474)
atggctcgaaccaagcaccaggccgtgaggaagacggcggagaagcccaagaagaagctccagttcgagcgctcaggtggtgcgagtacctcggcgacgcaggaaagggctgctgggaccgggggaagagcggcgtctggaggtgactcagttaagaagacgaaaccacgccaccgctggcggccagggactgtagcgctgcgggagatcaggaagtaccagaagtccactgaaccgctcatcccctttgcgcctttcgtccgtgtggtgagggagttaaccaatttcgtaacaaacgggaaagtagagcgctataccgcagaagccctccttgcgctgcaagaggcagcagaattccacttgatagaactgtttgaaatggcgaatctgtgtgccatccatgccaagcgtgtcacaatcatgcaaaaggacatacaacttgcaaggcgtatcggaggaaggcgttgggcatgatat

SEQ ID NO: 2325 - protein, 157 aa, Unknown
  Unidentified
MARTKHQAVRKTAEKPKKKLQFERSGGASTSATQERAAGTGGRAASGGDSVKKTKPRHRWRPGTVALREIRKYQKSTEPLIPFAPFVRVVRELTNFVTNGKVERYTAEALLALQEAAEFHLIELFEMANLCAIHAKRVTIMQKDIQLARRIGGRRWA

SEQ ID NO: 2326 - DNA, 414 bp, Unknown
  Unidentified
  CDS (1)..(411)
atggctcgtactaagcaaactgctcgcaagtccactggagggaaggctcctaggaagcaacttgccaccaaggctgcccgtaagtctgcacccacaactgggggagtaaagaagcctcatcgttaccgccctggaactgttgctcttcgtgaaatccgcaagtatcagaagagcactgacctgctcataaggaagcttccgttccaaaggcttgtcagggagattgcccaggatttcaagactgatcttcgtttccagagccatgcggtgcttgcgctgcaggaggctgcggaggcgtacctggtgggtctattcgaggacactaatctgtgcgccatccatgccaagcgcgtgaccatcatgcccaaggacattcagctggctaggaggatccgtggtgaaagggcctagatt

SEQ ID NO: 2327 - protein, 136 aa, Unknown
  Unidentified
MARTKQTARKSTGGKAPRKQLATKAARKSAPTTGGVKKPHRYRPGTVALREIRKYQKSTDLLIRKLPFQRLVREIAQDFKTDLRFQSHAVLALQEAAEAYLVGLFEDTNLCAIHAKRVTIMPKDIQLARRIRGERA

SEQ ID NO: 2328 - DNA, 860 bp, Brassica napus
  CDS (105)..(689)
ttccattaaccgagaaaggcgttgctgaagctatccaagccgggaagaggattagcaccatccccgttgatctgatcttcacttcctccctcatccgtgctcagatgaccgccatgctcgccatgactcagcaccgctgcaagaaggttccaatcatcttgcacgatgagagcgagaaggcgcagacttggagccatgtcttcagcgaagagaccaggaagcaatctatccctgttgtagctgcttggcaactgaatgagagaatgtatggagagttacaaggtttaaacaaggaagagacagctgaaagatatggaacgcagcaagttcatgaatggcgtaggagttaccacatccctccacctaaaggagagagcttggagatgtgtgctgagagagctgtggcttactttgaagacaatattcaaccagagcttgcgttagggaacaacgtgttgattgctgctcatgggaactcgttgcggtctatcattatgtatcttgacaagctaacttctcaggaggttacgagtttagagctgtctactggtttaccgttgctctacatcttcaaagataggaagttcatgagacgaggaagccctgttggtcctacagaagctggtgtctatgcttatactaagagattggcacaatacagacagaagcttgatgagagccttaactaatgtgttctgttcttttgttttgtctttcactttctgagttctctatgtagtgagaacagaacagtttttaagatatgtattagattacacaaatcacgtttcattacatgttattttaaatcacccaaaagccaatccaaaagggaagttttcttcaaaaaaaaaaaaaaa

SEQ ID NO: 2329 - protein, 194 aa, Brassica napus
MTAMLAMTQHRCKKVPIILHDESEKAQTWSHVFSEETRKQSIPVVAAWQLNERMYGELQGLNKEETAERYGTQQVHEWRRSYHIPPPKGESLEMCAERAVAYFEDNIQPELALGNNVLIAAHGNSLRSIIMYLDKLTSQEVTSLELSTGLPLLYIFKDRKFMRRGSPVGPTEAGVYAYTKRLAQYRQKLDESLN

SEQ ID NO: 2330 - DNA, 536 bp, Brassica napus
  CDS (8)..(418)
aaacctcatggctcgtaccaagcagacggcgagaaaatccaccggaggaaaggcaccaaggaagcagctcgcgaccaaggcggcgaggaaatcagctccggccaccggaggagtgaagaagccccacagattccgtcccggaacggtggcgctaagagagatcaggaagtaccagaagagcaccgagctcctgatccgcaagctcccgttccagcgtctggtccgcgagatcgcgcaggatttcaagacggatctgcgtttccagagcagcgccgtcgcggcgctccaggaggcggcggaagcttacctcgtcgggctcttcgaggacacgaatctttgcgcgattcacgcgaagagggtcacgatcatgcctaaggatatccagctcgcgaggaggatcagaggcgagagagcttaaggaagatcgaagcgttttcgttttgtctatttagtcaagtttgtggagtatgtttgcgtgtatgttgttcgatgaattgcctcaatgaatcaattatcgtaaaaaaaaaaaaaaaaaa

SEQ ID NO: 2331 - protein, 136 aa, Brassica napus
MARTKQTARKSTGGKAPRKQLATKAARKSAPATGGVKKPHRFRPGTVALREIRKYQKSTELLIRKLPFQRLVREIAQDFKTDLRFQSSAVAALQEAAEAYLVGLFEDTNLCAIHAKRVTIMPKDIQLARRIRGERA

SEQ ID NO: 2332 - DNA, 753 bp, Brassica napus
  CDS (57)..(566)
gaaatcgacgcggaaagagcttttcttcttccatctctccgattcgctaacaaggaatgtcgagtctatacagaggtgtttcgaggaaagagaaacccagacgtcatcatgggttgaatcagcagaagaggcaagagatcaaggaagcttttgatctctttgacactgatggctctggtaccattgatgctaaagagcttaatgttgctatgagggcgcttggtttcgagatgacggaagagcaaatcgagaaaatgatagcagatgtggacaaggatggaagtggagccatagattacgatgagttttattatatgatgactgctaagatcggtgaacgtgacaccaaagaagagctcaccaaggctttcaagatcattgatcttgacaataatgggaagatatctgctgatgatatcaaacgcatggcaaaggacttgggtgaaaacttcactgatgctgagattcgtgagatggttgaagaagctgaccgtgaccgtgatggtgaagttaatatggaagagttcatgaggatgatgaagagaactgctgcttatgagtactaaaatatagttgttgttgtattgatactgatgaggtctctgttatatatacttccttttagccgaggcattactatgtctttaccaaagataccatgtttcggtttttatctatcttagtgacagaagtttggtcttttgtgttggtttatgttgtataaaagaatctccttgcaaaaaaaaaaaaaaa

SEQ ID NO: 2333 - protein, 169 aa, Brassica napus
MSSLYRGVSRKEKPRRHHGLNQQKRQEIKEAFDLFDTDGSGTIDAKELNVAMRALGFEMTEEQIEKMIADVDKDGSGAIDYDEFYYMMTAKIGERDTKEELTKAFKIIDLDNNGKISADDIKRMAKDLGENFTDAEIREMVEEADRDRDGEVNMEEFMRMMKRTAAYEY

SEQ ID NO: 2334 - DNA, 648 bp, Brassica napus
  CDS (25)..(474)
ccaaaaaaaaccagatcaatcaagatggcaccaaaggcaggaaagaagccagcagagaagaaacccgccgccgccgccgagaagccagcggaggaggtagccgagaaagccccggcggagaagaaacccaaggccgggaagaagctgccgaaggaggccggggccatcgacaagaagaagaagcggaacaagaagagcatcgagacgtacaagatctacatcttcaaggtgctgaagcaggtccaccctgacatcgggatctcgagcaaggccatggggatcatgaacagcttcatcaacgacatcttcgagaagctcgcccaggaggcctcgaagctcgctaggtacaacaagaagcccacgattacttcgagggagatccagactgctgttaggcttgttctccccggtgagctcgcgaagcacgctgtgtctgaaggaaccaaggccgtgactaagtttactagctcttgaatggtgttttcgtgttttaggggttctagatctggtcgcttttggttttatctacttaaaaaaatcgtatgggttatgcttatctagttttaatgagttggtttgtaattgtggaagaacatatgttatggtttaatgaatcttatccctttgttcaataaaaaaaaaaaaaaa

SEQ ID NO: 2335 - protein, 149 aa, Brassica napus
MAPKAGKKPAEKKPAAAAEKPAEEVAEKAPAEKKPKAGKKLPKEAGAIDKKKKRNKKSIETYKIYIFKVLKQVHPDIGISSKAMGIMNSFINDIFEKLAQEASKLARYNKKPTITSREIQTAVRLVLPGELAKHAVSEGTKAVTKFTSS

SEQ ID NO: 2336 - DNA, 805 bp, Brassica napus
  CDS (69)..(623)
gtcatccatgggttcaaattgacggtgtggctccagataaacctctggactctgctgttttgagccgtatgaagcaattttccgccatgaacaagttcaagaaaatggctcttagagtcatagcagagagcttatctgaagaagaaatagccggtttgaaagaaatgttcaagatgattgacgcagacaatagtggtcagataactttcgaagaactgaaagcaggactaaaacgagtcggtgccaatctcaaagagtcagagattcttgacctgatgcaagctgctgatgtggacaacagcggaacgatagactacaaagagttcatagctgcaacattgcatctaaacaaaatagagaaagaggaccatttgtttgctgccttctcctactttgacaaggacgggagcggatttatcaccccggacgagcttcaacatgcttgtgaagagtttggtgttgaagatgcccgcattgaagaaatgatgcgtgatgttgatcaagacaaggatggaagaatagactacaacgagtttgtggcgatgatgcagaaagggagcatcatgggaggacctatgaagatgggtttagagaagagcattagcatatctctgaaacactagctttcagacacaaacccaaagaccaagaagtatttataaatgatgattatgatgattgtgtttctttttctcaatattgtgatgagattttgttattattagactggtttaggcagatcatttttctgtactgtgtaacttctatgcatatacacatagttctttgtaaaaaaaaaaaaaaa

SEQ ID NO: 2337 - protein, 184 aa, Brassica napus
MKQFSAMNKFKKMALRVIAESLSEEEIAGLKEMFKMIDADNSGQITFEELKAGLKRVGANLKESEILDLMQAADVDNSGTIDYKEFIAATLHLNKIEKEDHLFAAFSYFDKDGSGFITPDELQHACEEFGVEDARIEEMMRDVDQDKDGRIDYNEFVAMMQKGSIMGGPMKMGLEKSISISLKH

SEQ ID NO: 2338 - DNA, 615 bp, Brassica napus
  CDS (8)..(442)
cgtagcaatggccaaggcagacaagaaaccagcagagaagaaaccggcggcagaaaccaacaccgccgcagcagcagcggagaagaagccaaaggctggaaagaagcttccgaaagatccctccgccgtcgccggagacaagaagaagaagcggtccaagaagagcgtcgagacgtacaagatctacatcttcaaggtgctgaagcaggttcatcccgacgtcgggatctcgagcaaagccatggggatcatgaacagcttcatcaacgacatcttcgagaagcttgccggtgagtcttccaagctcgcgaggtacaacaaaaagccgacgattacttccagggagattcagacggcggtgagattagtcttgcctggagagttggcgaaacacgccgtctcggaagggaccaaggcggttaccaagttcacgagttcttagatttggaattgtttgtaatggctttttaagttttaactagttgttggtagttttaagcttttgggtatcgtaatcaggttatgtaatttggcgactttcttttgcttgaagaaacaaacatatatgaaagttcttaattttctaaaaaaaaaaaaaagaaaaaaaaaaaaaaa

SEQ ID NO: 2339 - protein, 144 aa, Brassica napus
MAKADKKPAEKKPAAETNTAAAAAEKKPKAGKKLPKDPSAVAGDKKKKRSKKSVETYKIYIFKVLKQVHPDVGISSKAMGIMNSFINDIFEKLAGESSKLARYNKKPTITSREIQTAVRLVLPGELAKHAVSEGTKAVTKFTSS

SEQ ID NO: 2340 - DNA, 1311 bp, Brassica napus
  CDS (30)..(1019)
gttattctcctccgagatctgaaccaacgatggcgacctccttcttccgacgactcgctaggtcagctccgatcgcggcattccccgccgcactccgatcgcaaatcaaatctggtcatggtactttccgattctccgccggcgcgatcgcggcactttccggcggattctcctgttactacctcacctccggcaacaatctggcgtatctggatcaagctaaggaagagactggacccaaaacagctctgaaccctgacaaatggctcgagttcaagcttcaggacactgctacagttagccacaacaccaagttgttcaggttctcatttgacccctcagccaatttgggtctgcatgttgcttcttgtctcctcacaagggctcctttaggctacaatgcggaagggaaaacgaaatatgtcgttagaccttacactcctatatcagacccagaggctaagggctatttcgatctactgattaaggtatacccagatgggaaaatgagtcagcattttgccagcttaaaaccgggggatgtgttggaagtgaaaggacccattgagaagttcaaatattcgcctaatatgaagaaacatattggcatgattgctggtggaagtgggattactccaatgcttcaggtgattgataccattgtgaagaatcctgaggacaacacaaagataacattactttatgccaatgtttctccggatgatatacttctcaagcaaaagctcgattcacttcaggcaaaccacccaaatctgaaggtattctatactgttgacaatcctactaaaaattggaaaggaggggtaggttacgtttcaaaggatatggctctgaaaggcttacctcttcctgctgacgatacacttatcctcgtatgtggtcctcctgggatgatggagcatgtatccggaggcaaagctccagactggtcacaaggagaggttaagggaatactcaaggaactcggattcacagagcaaatggttttcaaattctgagaggattatgaatcaaaattccgtagtttctgctttaagacaggtttcatttcatgtaataaagtgtccccaagcaaacattaattgatgcagtatgagcttgacacagtacctatcaagctttgaaaataaacaaagcaaaacagatcagttagtcatttgtctctggaggaagtagctagagggacctttgctatactttgattttgatgataaatttctatgtgatttagactgcaagaaaattggatacggtttgaaagataaaagtttgtccaaaaaaaaaaaaaaa

SEQ ID NO: 2341 - protein, 329 aa, Brassica napus
MATSFFRRLARSAPIAAFPAALRSQIKSGHGTFRFSAGAIAALSGGFSCYYLTSGNNLAYLDQAKEETGPKTALNPDKWLEFKLQDTATVSHNTKLFRFSFDPSANLGLHVASCLLTRAPLGYNAEGKTKYVVRPYTPISDPEAKGYFDLLIKVYPDGKMSQHFASLKPGDVLEVKGPIEKFKYSPNMKKHIGMIAGGSGITPMLQVIDTIVKNPEDNTKITLLYANVSPDDILLKQKLDSLQANHPNLKVFYTVDNPTKNWKGGVGYVSKDMALKGLPLPADDTLILVCGPPGMMEHVSGGKAPDWSQGEVKGILKELGFTEQMVFKF

SEQ ID NO: 2342 - DNA, 847 bp, Brassica napus
  CDS (67)..(636)
ttttctccgagtttgggagttagataaccgctaatagaaaatttatcaattcagtaaaaaaaaaagatgcggccgttagacgagaacgagacgacagtggtcttcgagaagatcttcaaattcgtcggaaacaacctcaagaacatcgtcgagaacccatcccacgaaggacccggacccaaacccgaagccgggcgctactgcttccgcctccagaagagcagagtctactacgtaagcgagtctctcgtgaagcgagccaccaacatctcccgcaaaaacctagtctccctcggaacctgcatcgggaagtacacccacgcggggagcttccaccttacgatcatgtcgctcaacctcttggccgcgaacgcgaagcacaaggtttggcttaaacccacttcggagatgtcgtttctttacgggaaccatgtcttgaaaggagggctagggaggattaccgatagtattgtgcctggagatggggttgtcgtgttctccatgtctgatgttccgttggggtttgggattgcggccaagagtacgcaggattgtcggaagttggatccgaatgggatcgttgtgcttcatcaggctgatattggtgagtatctgagggatgaagatgagctttgaattggttgaaaggttttgtttagctttcgttgtgtttcttgttttatgtttttttgaggtttaagatattatctacttgtggctacgaattgtgctgttggatctatgaaagtcttgatttttctgaatctgtgttgtgcctgaagtgtcttgagagagtatgttaaagcttaaaatttacatactatttaagctcaaaaaaaaaaaaaaa

SEQ ID NO: 2343 - protein, 189 aa, Brassica napus
MRPLDENETTVVFEKIFKFVGNNLKNIVENPSHEGPGPKPEAGRYCFRLQKSRVYYVSESLVKRATNISRKNLVSLGTCIGKYTHAGSFHLTIMSLNLLAANAKHKVWLKPTSEMSFLYGNHVLKGGLGRITDSIVPGDGVVVFSMSDVPLGFGIAAKSTQDCRKLDPNGIVVLHQADIGEYLRDEDEL

SEQ ID NO: 2344 - DNA, 1280 bp, Brassica napus
  CDS (3)..(1262)
agatggccatggaccccgcgagggacattatattggcgtacatgcagaacggcgagcttctcacgccggatcacgggtttccggttcgggtgattatacccggtttcatcggcgggcggatggttaagtggttgaagcgtatcatcgtcacgcctcgagagtctgacaattactaccactacaaagacaacagagtgctcccttcttacgtggatgctgagctggcaaatgaagaatcttggtggtacaggccggagtatataatcaacgagcttaatataaactcggtgataacgacacctggtcacgaggagattttgccgatcaatgcattcacgactcagaagccttacacgttaaaaggctatgcttactctggaggagggaaaaaggtaacgagagtggaggtgactctagacggaggagagacgtggagtgtgtgtgagcttgaccatcaagagaagccgaacaagtatggcaagttctggtgctggtgtttctggtcacttgacgttgaggttcttgatctgcttagtgctagagaggtagctgttcgagcctgggacgagtctttgaacacccagcctgaaaaactcatctggaacctcatgggtatgatgaacaactgctggttcaggatcaaaaccaacgtgtgcaagcctcacagaggagagataggtatcgttttcgaacacccgaccagacccggaaaccaatcgggcgggtggatggcaaaggaacgtcagatcgagaaatcctcagagtcacaccctactttgaaaaaatcagtttcaacacctttcatgaacactgcctcaaagatgtactcaatgtccgaagttaggaaacacaactcagctgaatctgcatggatcatcgtccacggtcacatctacgactgcacacgtttcttgaaagaccaccccggtggttcggactctatcctcatcaacgctggtactgattgcaccgaagagttcgaagccattcattcggacaaagccaagaagcttctagaagattaccgtatcggtgagctcatcacgacgggatacgactcttcacctaacgtctcggtccatggtggctcgagtgtaatgtctttgttagctcctatcagagagctagctcctgctaagaacatagctttggtcaacccacgtgagaaagtcccggtgaaactcatcgagaagacttcgatctcccacgacgtgcgtaggttccgtttcgcgttaccatctgaaacaaaaatctgtttttaaaataaaaaaaaaaaaaaa

SEQ ID NO: 2345 - protein, 419 aa, Brassica napus
MAMDPARDIILAYMQNGELLTPDHGFPVRVIIPGFIGGRMVKWLKRIIVTPRESDNYYHYKDNRVLPSYVDAELANEESWWYRPEYIINELNINSVITTPGHEEILPINAFTTQKPYTLKGYAYSGGGKKVTRVEVTLDGGETWSVCELDHQEKPNKYGKFWCWCFWSLDVEVLDLLSAREVAVRAWDESLNTQPEKLIWNLMGMMNNCWFRIKTNVCKPHRGEIGIVFEHPTRPGNQSGGWMAKERQIEKSSESHPTLKKSVSTPFMNTASKMYSMSEVRKHNSAESAWIIVHGHIYDCTRFLKDHPGGSDSILINAGTDCTEEFEAIHSDKAKKLLEDYRIGELITTGYDSSPNVSVHGGSSVMSLLAPIRELAPAKNIALVNPREKVPVKLIEKTSISHDVRRFRFALPSETKICF

SEQ ID NO: 2346 - DNA, 741 bp, Brassica napus
  CDS (24)..(587)
ccacctctctctccaaaaaaaaaatgaggcctttagacgagaacgagacgaccgtcgtcttcgagaagatcttcaaattcgtgggcaacaacctcaagaacatcgtcgagaacccctcccacgaaggacccgaatcagagcccggccgctactgcttccgcctccagaagaacagagtctactacgcgagcgagtccctcgtgaagcgagccacgaacatctcccgcaaaaacctggtctcgctcgggacctgcatcgggaagtacacccacgcggggagcttccacctgacgatcatgtcgctcaacctcttggcggcgaacgcgaagcacaaggtgtggctgaaacccacctcggagatgtcgtttctctacgggaaccacgtgttgaaaggagggctagggaggattactgatagcattgttcctggggatggagttgtcgtgttctccatgtctgatgttccgttggggtttgggattgcggcgaagagtacgcaggactgtcggaagttggatccgaatggtatcgttgtgcttcatcaggctgatattggagagtatttgagggatgaagacgagctttgagaaaagttgaaaggttttctttttgaggatcttagctttggatctgctttgttggtttaagttttttttttgaggttttgagatatgtaactgttacaaaacttgtggtggatttatgaaagtctcgattttcttatggaaaaaaaaaaaaaaa

SEQ ID NO: 2347 - protein, 187 aa, Brassica napus
MRPLDENETTVVFEKIFKFVGNNLKNIVENPSHEGPESEPGRYCFRLQKNRVYYASESLVKRATNISRKNLVSLGTCIGKYTHAGSFHLTIMSLNLLAANAKHKVWLKPTSEMSFLYGNHVLKGGLGRITDSIVPGDGVVVFSMSDVPLGFGIAAKSTQDCRKLDPNGIVVLHQADIGEYLRDEDEL

SEQ ID NO: 2348 - DNA, 1004 bp, Brassica napus
  CDS (123)..(914)
gaggattttggttgttgccgtcaacaactattcgctaagaaagagatttcatctgtttctgatcctaacatacctggcaggcagagtgcttcacttcataaatctcagctagtggagaagctatgggcggtgaagttaggcaacttctcgagcagatacacaggttttctaggagatgtttgttcagagtcctatctatgggtcctttgcccacccacctcgcctttatcatggatgggaaccgcaggtacgccaagaagcgcggtctagaagacgggtcaggccacaaagccgggttctccacccttatgtcgatgctgcagtactgctacgagctgggtatcaagtacgtgactatatacgcgttcagcatagataacttcaggaggaagcctgaggaggttcagtctctgatggatttgatgttggaaaagatcaagtctttgcttgataaagagagcatcgtgcacgagtacgggatacgggtttattttataggtaacttggggcttttaaacgaccaagtgagagctgctgcggaggaagtcatgaaggccacggctaagaatagtagagtggtgcttcttgtctgcgttgcttataactcgacggatgagatcgttcaagctgtcaagagatcttgtgtggacaaggcagatagggatacagagaggattcagctggtggatattgaggagaatatgcagatgagcgtggcgccggagcctgatatactgatcaggagttcgggagagacgaggctgagcaactttcttttgtggcaaacaggtaactctcagctcttctctctggatgctctgtggcctgagattggactgaggcatctggtgtgggctatattgaacttccagagaagccattcatacttggagaagaggaagaaacagttgtagttgtcttcatctttcttttggcttttgttttttttggtcatgtgatggtatactatcaaaacggaaactttgggtaaaaaaaaaaaaaaa

SEQ ID NO: 2349 - protein, 263 aa, Brassica napus
MGGEVRQLLEQIHRFSRRCLFRVLSMGPLPTHLAFIMDGNRRYAKKRGLEDGSGHKAGFSTLMSMLQYCYELGIKYVTIYAFSIDNFRRKPEEVQSLMDLMLEKIKSLLDKESIVHEYGIRVYFIGNLGLLNDQVRAAAEEVMKATAKNSRVVLLVCVAYNSTDEIVQAVKRSCVDKADRDTERIQLVDIEENMQMSVAPEPDILIRSSGETRLSNFLLWQTGNSQLFSLDALWPEIGLRHLVWAILNFQRSHSYLEKRKKQL

SEQ ID NO: 2350 - DNA, 948 bp, Brassica napus
  CDS (30)..(845)
cccatagccatataagcctagtttccgagatgagagaacacgtaggtaaatcctctaaactcttcaatggtttcacgagtataatgagaagattcatattcaaagttctatgcgtcggtccaatccctaaccacatctcattcatcatggatggtaaccgcagattcgccaagaaacataatcttcaaggcccagacgcaggacacagagccggtttcgtatccgtaacctatgttcttcagtactgccaagagattggtgtgccgtacgtcacactctacgcctttggtatcgataatttcaagagagaacctgaagaagtcaagtgtatgatggatctgatgcttgagaaaatcgagctcacaatcgatcaagctatctccgggaatctaaaggatttgaaagtgatctttgctggtgatttgaatttgctaaacgagcgtcttaaagtcgcagctcagagcctgatggaactcactgagcagaatagaggtttagtggctgtggttatcgttgcgtacagcacaagtcacgagattgttcaggctattagagaatcttgtgtaaggaagtgtgtggatggagatagccctctggttttggagatgagtgatgttgaagagtgtatgtatacatcaattgttcctgatccggatcttgtaataagatcaggaggaatagatcggctgagtaacttcatgacttggcagagttcaaggtctcttcttcataccacggcagctctttggccggagttaggtctttggcatttggtttgggccattcttaaattccagaggatgcacgattacttgcagaagaagaagaagcaaaaactcgactagataaagttaaaccatagtagaatgaacttgagattataggacacaataaacattttaaattaagtattaataaaaaattgtttttaccaaaaaaaaaaaaaaa

SEQ ID NO: 2351 - protein, 271 aa, Brassica napus
MREHVGKSSKLFNGFTSIMRRFIFKVLCVGPIPNHISFIMDGNRRFAKKHNLQGPDAGHRAGFVSVTYVLQYCQEIGVPYVTLYAFGIDNFKREPEEVKCMMDLMLEKIELTIDQAISGNLKDLKVIFAGDLNLLNERLKVAAQSLMELTEQNRGLVAVVIVAYSTSHEIVQAIRESCVRKCVDGDSPLVLEMSDVEECMYTSIVPDPDLVIRSGGIDRLSNFMTWQSSRSLLHTTAALWPELGLWHLVWAILKFQRMHDYLQKKKKQKLD

SEQ ID NO: 2352 - DNA, 991 bp, Brassica napus
  CDS (27)..(839)
cattcccataacccatataagccgagatgaatacccgagaagaagtaggtgaattctctaaactcttcaatggtttcatgactctaatgaggagattcatattcaaagttctatgcgtcggtccaatccctaaccacatctcattcatcatggatggaaaccgcagattcgccaagaaacacaatcttcaagacctagacgcaggacacagagctggttttgtatccgtaacacatgttcttcagtactgccaagagattggtgtaccgtacgtcacactctacgcctttggccacgataatttcaggagagaacctgaagaagtcaagtgtgtgatggatctgatgcttgagaaaatcgagctcacaatcgatcaagctatctccgggaatctaaacaatttgaaagtgatctttattggtgatttgaatatgttaaacgagcgtcttaaagccgcagcgcagagactgatggaagttaccgaggagaatagaggtttaatggttgtggtttgcgttgcttacagcacaagtcacgagattgttcacgctattagagaatcttgtgtaaagaagtgtggtgatggagatagtcaggttttggaggtgagtgacattgaagagtgtatgtatacatcaattgttcctgatcctgctcttgtaataagaacaggaggacgagatcggctgagtaacttcatgacttggcagacttcaaagtctctccttcataccacggtggctctttggccggagttaggtctttggcatttggtttgggctattcttaaattccagaggatgcaaaattacttgcagaagaagcaaaaactcgactaaataggtttaacttaaatactagcatggtcggacagatttatgaggacataaaacatagtaataattaatttacttacaaagtagagaacctatgtattagtttttaaaattttgggagccagcacgaatgtctcattaaaaaaaaaaaaaaa

SEQ ID NO: 2353 - protein, 270 aa, Brassica napus
MNTREEVGEFSKLFNGFMTLMRRFIFKVLCVGPIPNHISFIMDGNRRFAKKHNLQDLDAGHRAGFVSVTHVLQYCQEIGVPYVTLYAFGHDNFRREPEEVKCVMDLMLEKIELTIDQAISGNLNNLKVIFIGDLNMLNERLKAAAQRLMEVTEENRGLMVVVCVAYSTSHEIVHAIRESCVKKCGDGDSQVLEVSDIEECMYTSIVPDPALVIRTGGRDRLSNFMTWQTSKSLLHTTVALWPELGLWHLVWAILKFQRMQNYLQKKQKLD

SEQ ID NO: 2354 - DNA, 706 bp, Brassica napus
  CDS (47)..(478)
ggcgagcgaaaatcctgaaaccaccaacaaaccatcgtccacggacatggaccttaagaaggttttcaaccagttcgacgccaacggcgacggcaagatctctgtctctgagctcggcaacgttttcaaatccatgggaacgtcgtacacggaggctgagctcaaccaagtgttggacgacattgacatcgaccgcgacggtttcattaacatggaggagttcgccgccatatgccgctcatcctcctccgccacagaggtccgtgaagcattcgatctctacgaccagaacaagaacggtttgatctcgtcctccgagatccacaaggttctcaaccgtctaggtatgacgtgttccgtcgaagactgcgtgagaatgatcgggcgtgttgacactgacggcgacggaaacgttaacttcgaggagttcaagaagatgatgtcgtcacctgagctactcaacaagcaatccgcctagggttccgagttgcccttctttgtatgttggataatgagatccatggttacatataatatatactgtatggtacttgtttacatttctaggttaacaaacaaatagttctcttcctatatatggaatgatgaacgtcttgcctatgcaagtatgattacttgcgatataagcaatctatatacatattaaaacttcgggttttaaaaaaaaaaaaaaaaaagcggccgc

SEQ ID NO: 2355 - protein, 143 aa, Brassica napus
MDLKKVFNQFDANGDGKISVSELGNVFKSMGTSYTEAELNQVLDDIDIDRDGFINMEEFAAICRSSSSATEVREAFDLYDQNKNGLISSSEIHKVLNRLGMTCSVEDCVRMIGRVDTDGDGNVNFEEFKKMMSSPELLNKQSA

SEQ ID NO: 2356 - DNA, 701 bp, Brassica napus
  CDS (38)..(466)
ccaaaaccgatctcagattcgtaacttccaatcatcaatggcgcccaaggcagagaagaagcccgcggaggagaaatcgaaagccgagaaggctccggcggagaagaaaccaaaggccgggaagaagctcccgaaggaggccggagcaggcgcaggcggagacaagaagaagaagacgaagaagaagagcgtcgagacgtacaagatctacatcttcaaggtcctgaagcaggttcacccggacatcggaatctcgagcaaggccatggggatcatgaacagcttcatcaacgatatcttcgagaagctcgctggtgaggcctcgaagctcgcgaggtacaacaagaagccaaccatcacttctagggagattcagaccgcggttaggcttgtgcttcctggagagttggcgaaacacgccgtgtcggaagggaccaaggctgtcacgaagttcaccagttcctagactatggggttgaattagagttcctttcttgttttttttcagtattgcaaatttgcaatttcacggtttgtatgtagtgcctattgcttttgttaaatcagttttcatgtccttgtttgtctctaatgttgctgtctgcttttgtggcattcgatcctccctccatagttgatatttatttgtttgtttaagatgctctttttttttcaaaaaaaaaaagaaaaaaaaaaaaaaa

SEQ ID NO: 2357 - protein, 142 aa, Brassica napus
MAPKAEKKPAEEKSKAEKAPAEKKPKAGKKLPKEAGAGAGGDKKKKTKKKSVETYKIYIFKVLKQVHPDIGISSKAMGIMNSFINDIFEKLAGEASKLARYNKKPTITSREIQTAVRLVLPGELAKHAVSEGTKAVTKFTSS

SEQ ID NO: 2358 - DNA, 903 bp, Brassica napus
  CDS (38)..(682)
ctgttttcttcagatcttggagaaaggatctaaagttatgatgagaatattccttctctatcatctattaaactcttttcttctctctttagtaccaaagaaactgcgaactctcttctctctctcttggttcgacaaaactctccacaagaactcaccaccgtcaccgtccatgttaccctctccgtcaccatcctccacgccgacgacaaaaatagacccgtccgagctaaaaagggtttttcagacgttcgacaagaacggagacggtcgtatcactaaacaagagctcaaggactcactagagaatcttggaatctacataccagacaaagacctaactcaaatgatccacaacatcgacacgaaccacgatggatgcgttgacatagacgagttcgagtctctgtacaaatccattgtcgatgagcatcacaacgatggagaaaccgaagaagaggacatgaaagaagcctttaacgtgtttgaccaggacggagatgggtttatcactgtggaggagttgaaatctgtgatgggttccttgggactcaagcaaggtaaaacccaagaaggttgcaagaagatgattatgcaagtggatgttgatggtgatggtagagttaattacaaagagtttcttcaaatgatgaaaggtgatgggtttagcagtagtagttgatatttgtttaggatttaacagaagagtacgtgtgtgtgtgtgtgtgtttatttgattgatttgtttgtttctttttatgtgtgaataatttttctgatgatgtatcaaaacatgaccaaggtgtgttgtcctttattttttctagggtttctctgagattatgtaagattcaccttctcatttcatctggtttagagttctttagcaaaaaaaaaaaaaaa

SEQ ID NO: 2359 - protein, 214 aa, Brassica napus
MMRIFLLYHLLNSFLLSLVPKKLRTLFSLSWFDKTLHKNSPPSPSMLPSPSPSSTPTTKIDPSELKRVFQTFDKNGDGRITKQELKDSLENLGIYIPDKDLTQMIHNIDTNHDGCVDIDEFESLYKSIVDEHHNDGETEEEDMKEAFNVFDQDGDGFITVEELKSVMGSLGLKQGKTQEGCKKMIMQVDVDGDGRVNYKEFLQMMKGDGFSSSS

SEQ ID NO: 2360 - DNA, 756 bp, Brassica napus
  CDS (37)..(486)
cgtctctgaagcgagaacccaaaatcgatcgaagaaatggcggatcagctaacggacgaacagatctccgagttcaaggaagctttcagcctcttcgacaaggacggcgatggttgcatcaccaccaaggagctggggacagtgatgcggtccctaggacagaacccaacagaagctgagctccaggacatgatcaacgaggtggacgcggacggcaacggcaccattgacttccctgagttcctaaacctcatggctaaaaagatgaaagacacggactcggaggaagagctcaaagaagctttcagggtgttcgacaaagaccagaacggattcatatccgctgcagagctccgccatgtcatgacgaatctaggcgagaagcttactgatgaagaagttgaggagatggtccgtgaagctgatgttgatggagatggtcagattaactacgaggagtttgtcaagattatgatggctaagtgatttatatatatatggtaagctaagaaaaaaactaagaaaagtggtggtgatattaaccttttattatctagaaaaaaaatcgatctgttgttgattgagcttagtagtttgcaaggttttaacagacattattggttgacgaatatctttttattttgtgggtttttttcttaaaaaaaaaaaaaaaaaaaaaaaaaaaaaaaaaaaaaaaaaaaaaaaaaaaaaaaaaaaaaaaaaaaaaaagaaaaaaaaaaaaaaaaaagcggccgc

SEQ ID NO: 2361 - protein, 149 aa, Brassica napus
MADQLTDEQISEFKEAFSLFDKDGDGCITTKELGTVMRSLGQNPTEAELQDMINEVDADGNGTIDFPEFLNLMAKKMKDTDSEEELKEAFRVFDKDQNGFISAAELRHVMTNLGEKLTDEEVEEMVREADVDGDGQINYEEFVKIMMAK

SEQ ID NO: 2362 - DNA, 536 bp, Brassica napus
  CDS (12)..(425)
aaattaaagcaatggctccaaaagcagcagagaagaagccagtagaggagaaagctccggcggagaagaagccgaaggccgggaagaagctgcccaaggaagcaggtgcaggcgttgacatgaagaagaagaagaaatcgaagaagagcgtggagacgtataagatttacatcttcaaggttctgaagcaggttcatccagatgtcggaatctctagtaaagccatggggatcatgaacagtttcatcaatgacatcttcgagaagctcgcccaggaatcgtcaaagcttgcaaggtacaacaagaagccaacaatcacctcgagggagattcagactgctgttaggctcgttcttccaggagagctcgccaaacacgccgtctccgaaggcaccaaggccgtcactaaattcaccagctcttgaacatccaatctaaattaagtttcagttacctttcaatctcagttgtaattagttctatgaatctgtttggaatctaaaatatttgcgttttctcgcaaaaaaaaaaaaaaa

SEQ ID NO: 2363 - protein, 137 aa, Brassica napus
MAPKAAEKKPVEEKAPAEKKPKAGKKLPKEAGAGVDMKKKKKSKKSVETYKIYIFKVLKQVHPDVGISSKAMGIMNSFINDIFEKLAQESSKLARYNKKPTITSREIQTAVRLVLPGELAKHAVSEGTKAVTKFTSS

SEQ ID NO: 2364 - DNA, 753 bp, Brassica napus
  CDS (48)..(494)
aactccagacccggaatctaacccgaaaacccggaaaatcgagaaaaatgggcaaggacggcctgagcgacgaccaggtgtcatcgatgaaggaggccttcacgctcttcgacaccaacggcgacggcaaaatcgccccgaccgagctcgggatcctcatgcgatcgctcggcgggaacccgacccaagcccagctgaaatcaatcaccgcctccgaaaacctaaccgctccgttcgatttcgaccggtttttggatctcatggcgaagcacctgaagacggagcctttcgatcgccagctccgcgacgccttcaaggtgctcgacaaggaaggcactgggttcgtggcagtggcggatctgaggcatatcttgacaagtatcggggagaagctggagcctaacgagtttgatgagtggatcaaggaggtggatgtggggtccgatgggaagatcaagtatgaggatttcattgccaggatggttgctaagtgagatcaaaatttgcctaaagtttgaatttttttgaagtttgggtttgttgccttgggattagtactaactttgttgttccctttctaaaggaaatgttgtgtgttccggtgttgattcctactttttctttttttttttgaattctaagaatgtttaatctctctgtttaacgaaaagtttcactcttgtgcctttttgttcacttttagctcttttaatgtcaaaatgtgcctggtctggatccaaaaaaaaaaaaaaa

SEQ ID NO: 2365 - protein, 148 aa, Brassica napus
MGKDGLSDDQVSSMKEAFTLFDTNGDGKIAPTELGILMRSLGGNPTQAQLKSITASENLTAPFDFDRFLDLMAKHLKTEPFDRQLRDAFKVLDKEGTGFVAVADLRHILTSIGEKLEPNEFDEWIKEVDVGSDGKIKYEDFIARMVAK

SEQ ID NO: 2366 - DNA, 913 bp, Brassica napus
  CDS (155)..(796)
ttctctctctctctctctctccagctagctttcatagattccactgtcaccatcctctccaaaagctagaatgtggaaccctagattagctagttagaccttcttcccaaagatctctctaccaacgaaagcttgagcctctgagcttcaagtgatggggaactgttgcagatctcccgccgctgtagcgagagaagacgtcaaatcgaactactccggccgcgatcaccaccgcaaagacgcttccggcgggaaaaaagcgacgccgatgcgagtcctgagcgatgtccccaaggagaacatcgaggaccgttacttactcgaccgagagctcggacgcggcgagttcggcgtcacctacctgtgcatcgagaggtccacgcgcgacctcctcgcctgcaagtcgatctcgaagaggaagctgaggaccgccgtggatatcgaggatgtgaagagggaagtggcgattatgaagcatctgcctaagagctcgagtattgtgactctcaaggaggcgtgcgaggacgataacgctgtgcatttggtgatggagctttgcgaaggtggcgagcttttcgatcggattgttgcgagagggcattacaccgagcgcgccgccgcgggggttacgaagacgattgttgaggtggtgcagttatgccacaagcatggggttattcatagagatttgaagccggagaactttttgttcgctaacaagaaggagaactcgccgctcaaagctattgattttggattgtcgatcttcttcaagccaggtgtgtcactgctttgaggatgaggattcttctgtcatctagctttgaatgtttccatctatatatatatttggatcagttctgttaataatattttggggttcagatgaaaaaaaaaaaaaaccgacacgcag

SEQ ID NO: 2367 - protein, 213 aa, Brassica napus
MGNCCRSPAAVAREDVKSNYSGRDHHRKDASGGKKATPMRVLSDVPKENIEDRYLLDRELGRGEFGVTYLCIERSTRDLLACKSISKRKLRTAVDIEDVKREVAIMKHLPKSSSIVTLKEACEDDNAVHLVMELCEGGELFDRIVARGHYTERAAAGVTKTIVEVVQLCHKHGVIHRDLKPENFLFANKKENSPLKAIDFGLSIFFKPGVSLL

SEQ ID NO: 2368 - DNA, 578 bp, Brassica napus
  CDS (37)..(453)
atttaccctctcttcaccaaactcaatcaatcgataatggcacccaaggcggcagagaagaaaccggcggagaagaagccagccgagaaatcaccggcggagaagcgtccaaaggcggagaagaagatctcgaaggaaggaggaagcgacaagaagaagaagaaatcgaagaagagcgtggagacgtacaagatctacatcttcaaggtcctgaagcaggttcatcccgatatcggaatctcgggtaaagcgatggggatcatgaacagtttcatcaacgacatattcgagaaactggcgcaggaatcatcgaagctcgctaggtacaacaagaagccgacgattacgtcgagggagatccagacggcggttaggcttgtgttgcccggagagctcgcgaaacacgccgtctctgaggggactaaggcggttaccaaattcacaagcacttagggattgaaatgtttaggttttaattgttctttggttgatgaatcgattgtattcgattagtgagatcatttgaatgaacagctttctttttaatgaaaaaaaaaaaaaagaaaaaaaaaaaaaaa

SEQ ID NO: 2369 - protein, 138 aa, Brassica napus
MAPKAAEKKPAEKKPAEKSPAEKRPKAEKKISKEGGSDKKKKKSKKSVETYKIYIFKVLKQVHPDIGISGKAMGIMNSFINDIFEKLAQESSKLARYNKKPTITSREIQTAVRLVLPGELAKHAVSEGTKAVTKFTST

SEQ ID NO: 2370 - DNA, 1045 bp, Brassica napus
  CDS (3)..(872)
agatgttatctctgctctgttgctttatgtctctcctctcttttcttatacattcttgtctccgaccatggactcaagctaaaaaatctctgaaagatgaaaaggaaattgacgagggaacttatgtggctggagaggaggagacacctaaagggcttctgagagagcaaatgccgaggcacgtagcagtgataatggatggaaaccggagatgggccgaacgggctggattgctgacgtcacaaggccatgaagccggagccaaacggctgatagagttcgctgagctctgcttcaaactagggatagaaacagtgtcagcttttgctttctccactgagaattggggaagacacaagatcgaagttaactgcttgatgtctttgttccaacgatacctcaagtcaaagatccaatttttccaaagtgaggaaataagagtttctgttattgggaatcttgaaaagatcccggaatctctcctcggaacaatcaaagagacagaggaagctacgaagaggtacaagaagaagcatctcatcttggccatagattacagcgggagatttgatatcttgcacgcttgcaagagcattgtgaagaaatcacaacaaggtttgatccgagaggaagacgtggaccagacgttattcgagagagagcttctgacaaagtgtaccgagttcccaagtccagatctcttgattaggacaagtggggaacagaggattagtaacttcttattgtggcagctcgcttataccgagctcttcttctcaccggtcctttggcctgattttgacaaggatagggttatagaggccctggtttcgtatcaacgcagggaaagacggtttggctgtcggatttgatcacatgtgatgatgctacgttatgtccttctggtctgtttctctttgtgtactatgttatgttcatctgatttttcctatcaaattactctcttttagcatcagttgttattgaaaatgatatcttgtaaaacaagaaaccagtgacgttggttcacaaaaaaaaaaaaaaa

SEQ ID NO: 2371 - protein, 289 aa, Brassica napus
MLSLLCCFMSLLSFLIHSCLRPWTQAKKSLKDEKEIDEGTYVAGEEETPKGLLREQMPRHVAVIMDGNRRWAERAGLLTSQGHEAGAKRLIEFAELCFKLGIETVSAFAFSTENWGRHKIEVNCLMSLFQRYLKSKIQFFQSEEIRVSVIGNLEKIPESLLGTIKETEEATKRYKKKHLILAIDYSGRFDILHACKSIVKKSQQGLIREEDVDQTLFERELLTKCTEFPSPDLLIRTSGEQRISNFLLWQLAYTELFFSPVLWPDFDKDRVIEALVSYQRRERRFGCRI

SEQ ID NO: 2372 - DNA, 754 bp, Brassica napus
  CDS (21)..(584)
ccttgtcctaaaaccaaaagatgcggcctttagacgagaacgagacgaccgtcgtcttcgagaagatcttcaaattcgtgggcaacaacctcaagaacatggtcgagaacccatctcacgaaggacccgaaccagagcccggccgctactgcttccgcctccagaagagcagagtctactacgtcagcgagtctctagtgaagcgagccaccaacatctcccgcaaaagcctggtctccatcggaacctgcatcgggaagtacactcacgccgggagcttccacctgacgatcatgtcgctcaacctcttggcggcgaacgcgaagcacaaggtgtggctgaaacccacgtcggagatgtcctttctttacgggaaccatgtgttgaaaggagggctagggagggttactgatagtattgtgcctggagatggagttgtcgtgttctccatgtcggatgttccgttggggtttgggattgcggcgaagagtacgcaggattgtcggaagttggatccgaatgggatcgttgtgcttcatcaggctgatattggtgagtatctgagggatgaagacgagctttgaaaggcttttggttttgattgttgttttaagttttgttttgaggtttatgatatgtaacttggtgttggatctatgaaagtctcgatttttattaatctgtttgagatgttatgtctgttttgcgtgtatcatgtaagctggcaagtattcgaaacaaaaaaaaaaaaaaa

SEQ ID NO: 2373 - protein, 187 aa, Brassica napus
MRPLDENETTVVFEKIFKFVGNNLKNMVENPSHEGPEPEPGRYCFRLQKSRVYYVSESLVKRATNISRKSLVSIGTCIGKYTHAGSFHLTIMSLNLLAANAKHKVWLKPTSEMSFLYGNHVLKGGLGRVTDSIVPGDGVVVFSMSDVPLGFGIAAKSTQDCRKLDPNGIVVLHQADIGEYLRDEDEL

SEQ ID NO: 2374 - DNA, 641 bp, Brassica napus
  CDS (51)..(467)
tcctctttcaatctctaaaaagtctaatctctaaaaaaaagtcatcgataatggctcccaaggcggcagagaagaaaccggcggagaagaagccagcagagaaggccccggcggagaagcgaccaaaggcggagaagaagatctcgaaggaagggggaagcgacaagaagaagaagaaggcgaagaagagcgtggagacgtacaagatctacatcttcaaggtcctgaagcaggtccatcccgacatcggaatctcagggaaggcgatggggatcatgaacagtttcatcaacgacatattcgagaaactcgcccaggaatcgtcgaagctcgcgaggtacaacaagaagccgacgattacgtctcgggagatccagacggcggttaggcttgtgttgccaggagagctcgcgaagcacgccgtttctgaagggacgaaggcggttaccaaattcacaagcacttagggtttcttttttttttttatcttgaatctgattcgcatgtttagatataaatgggattctctgtcttgatctttggttctggattgtattcaattagtgatatggttgaatgaacagtttctcgtgttaatgaatttgatgcggtttctcttttgcttgaaaaaaaaaaaaaaa

SEQ ID NO: 2375 - protein, 138 aa, Brassica napus
MAPKAAEKKPAEKKPAEKAPAEKRPKAEKKISKEGGSDKKKKKAKKSVETYKIYIFKVLKQVHPDIGISGKAMGIMNSFINDIFEKLAQESSKLARYNKKPTITSREIQTAVRLVLPGELAKHAVSEGTKAVTKFTST

SEQ ID NO: 2376 - DNA, 894 bp, Glycine max
  CDS (1)..(894)
atgctcccctacgcttccatcccggaggccgtggcggcgctgggccgcaacctcaccttcgcggagaccctctggttcaactactccgcctccaagtccgattacttcctctactgccacaacattctgttcctcttcctcgtcttctccctcgtccccctccccctcgtcttcctcgaattcaagcgcttctccttcgtctcttcccacaagatccaaccaaaagtccgcttgtccctggccgaaaccttcaagtgctacaaagacgtcatgcgcatgttcttcctcgtcgtcggccccctccaactcatctcttacccttccatccagatgattgggatcaggacgggcttgccattaccttcgtggcgggagatcctctcgcagcttctggtgtactttctcgtagaggattacaccaattactggatccacaggtttctgcacaacgattgggggtacgagaagattcaccgcgtccaccacgagtaccatgcgcccattggattcgccgcgccctatgcccactgggccgagatcttgatcctcgggattccctcctttcttgggcctgccatggttcctggccacattatcaccttctggctctggatagccttgcgccagattgaagccattgacacgcacagcgggtatgactttcctaggagtatcacaaaatatattccattttatggtggtgctgagtatcatgattaccatcattacgttggaagacaaagccaaagcaattttgcttcagttttcacatactgtgattacatctatggaactgacaaggggtataggtatcagaaaaaaatacttcagaagttgaaggaagagttggcaaatggtgttgagcagaacggaggattatacaagactgactga

SEQ ID NO: 2377 - protein, 297 aa, Glycine max
MLPYASIPEAVAALGRNLTFAETLWFNYSASKSDYFLYCHNILFLFLVFSLVPLPLVFLEFKRFSFVSSHKIQPKVRLSLAETFKCYKDVMRMFFLVVGPLQLISYPSIQMIGIRTGLPLPSWREILSQLLVYFLVEDYTNYWIHRFLHNDWGYEKIHRVHHEYHAPIGFAAPYAHWAEILILGIPSFLGPAMVPGHIITFWLWIALRQIEAIDTHSGYDFPRSITKYIPFYGGAEYHDYHHYVGRQSQSNFASVFTYCDYIYGTDKGYRYQKKILQKLKEELANGVEQNGGLYKTD

SEQ ID NO: 2378 - DNA, 420 bp, Glycine max
  CDS (1)..(420)
atggctccggcaaaggcagagaagaagccggcggagaagaagccagcggcggagaaggcaccggcggagaagaagccgaaggcggagaagaagatctcgaaggaaggagggagcgagaagaagaagaagcgcacgaagaagagcgtggagacctacaagatctacatcttcaaggtcctcaagcaggttcaccccgacattggtatttccagcaaggccatgggcatcatgaacagcttcatcaacgacatcttcgagaagctcgcccaggaagcgtcgcgtttggctcgctacaacaagaagcccaccatcacctcgagggagatccagaccgccgtgcgtctcgtgctccctggtgaattggccaaacacgccgtttctgaagggaccaaggcggttaccaagtttaccagctcttga

SEQ ID NO: 2379 - protein, 139 aa, Glycine max
MAPAKAEKKPAEKKPAAEKAPAEKKPKAEKKISKEGGSEKKKKRTKKSVETYKIYIFKVLKQVHPDIGISSKAMGIMNSFINDIFEKLAQEASRLARYNKKPTITSREIQTAVRLVLPGELAKHAVSEGTKAVTKFTSS

SEQ ID NO: 2380 - DNA, 816 bp, Glycine max
  CDS (1)..(816)
atggcgtccctcatcgaatctggctggcagtacttgatcacacatttcagtgactttcaactggcgtgtttgggaagtttctttctacatgaaggtgttttcttcttgtctggacttccctttatatggcttgagagggcagggtggatgagcaagtacaaaattcaggccaaaaataacacccctgcagctcaggagaaatgtattgttcgtctgttgctttaccattttggtgtcaatctacctgttatgattttttcatatcctgtcttcacatacatgggcatgcggagtagtcttcccctaccgtcctggaaagtagttctaattcaaataatcttttacttcattttggaggactttatattctactggggacatagaatactgcacacaaagtggttatacaagcatgtgcacagtgttcatcatgagtatgctacaccgtttggattgacttctgaatatgctcatcctgctgagatacttttccttgggtttgctaccatttttggtcctgccattactgggccccacttgataactctctggttatggatggttctgagagtcctagagacagttgaggctcattgtggttaccatttcccatggagtctttccaacttccttccattgtatggaggagctgatttccatgactatcatcaccgtttattgtacaccaagtctgggaactattcatcaacttttacttacatggaccggatatttgggactgatataggctacagaaagttgaaagcattgaagagcataggagttgaagacagtagcgagcaaaagaaacaataa

SEQ ID NO: 2381 - protein, 271 aa, Glycine max
MASLIESGWQYLITHFSDFQLACLGSFFLHEGVFFLSGLPFIWLERAGWMSKYKIQAKNNTPAAQEKCIVRLLLYHFGVNLPVMIFSYPVFTYMGMRSSLPLPSWKVVLIQIIFYFILEDFIFYWGHRILHTKWLYKHVHSVHHEYATPFGLTSEYAHPAEILFLGFATIFGPAITGPHLITLWLWMVLRVLETVEAHCGYHFPWSLSNFLPLYGGADFHDYHHRLLYTKSGNYSSTFTYMDRIFGTDIGYRKLKALKSIGVEDSSEQKKQ

SEQ ID NO: 2382 - DNA, 570 bp, Glycine max
  CDS (1)..(570)
atgtcgaatttgagtttccttcaatttcatagtagcaactcgttggggcactcctcttttcaacccaatagtccaaacccgaacaacaacataaaatcatcaaaacagacatcaaatgtagggtgcaatattcagccaaagtcggaggaaatgaaatgggtgttcgacaagtttgacaccaacaaagatggcaagattaccctcgaagagtacaaagcagcagtgagaacaatggggtggggaatcgaaggcactgagactgatgagtcttttcaggtgatggactctgatggagatggcttcattgacttcaaagagttcatggacatgttcaacgtggaggagagggtgaaagagacggagatcaagagtgcttttcaagtgtttgatttgaatggcgatgggaaaatcagtgcagaggaattgtcacaagttctcaaaagcctaggggaaagttgcagccttagtgcttgtaagaaaatggtgatgggggtggatagaaatggggatggctttatagacttgaatgagtttatgaggatgatgatgagttgcaagaaactcgcttaa

SEQ ID NO: 2383 - protein, 189 aa, Glycine max
MSNLSFLQFHSSNSLGHSSFQPNSPNPNNNIKSSKQTSNVGCNIQPKSEEMKWVFDKFDTNKDGKITLEEYKAAVRTMGWGIEGTETDESFQVMDSDGDGFIDFKEFMDMFNVEERVKETEIKSAFQVFDLNGDGKISAEELSQVLKSLGESCSLSACKKMVMGVDRNGDGFIDLNEFMRMMMSCKKLA

SEQ ID NO: 2384 - DNA, 543 bp, Glycine max
  CDS (1)..(543)
atggccacgaatccaatcgaagcggggaacggcgacgctgctcccaaccctaacgcgactaccaaatcctccgtgtacctgcaagactcggaggagctgaagcgagtcttcagccgcttcgacgccaacggcgacggcaagatctccgtctcggagttggacaacgtcctccgctccctcggatccggcgtcccgccggaggagctccagcgtgtcatggaagaccttgacaccgatcacgacggcttcattaacctctcggagttcgccgccttctgccgctccgacaccgcggacggcggcgacaccgagctccacgatgccttcaacctgtacgatcaggacaagaacggcctcatatccgccacggagctctgccaggtgctgaaccgcctcggaatgaagtgctccgtggaggaatgccacaacatgatcaaatccgtggattccgacggcgacggcaacgtcaacttccccgagttcaagcggatgatgagcaacaatcgcgaaaatgctagcaatgctgaagaaaaaacagattag

SEQ ID NO: 2385 - protein, 180 aa, Glycine max
MATNPIEAGNGDAAPNPNATTKSSVYLQDSEELKRVFSRFDANGDGKISVSELDNVLRSLGSGVPPEELQRVMEDLDTDHDGFINLSEFAAFCRSDTADGGDTELHDAFNLYDQDKNGLISATELCQVLNRLGMKCSVEECHNMIKSVDSDGDGNVNFPEFKRMMSNNRENASNAEEKTD

SEQ ID NO: 2386 - DNA, 507 bp, Glycine max
  CDS (1)..(507)
atgtccatgctcgaaaccgaccaaatcaagcaactgaacgacatattcaagcgcttcgacatggaccaggacggcagcctgacccacctggagctggcggcgctcctccggtccctgggcatcaaacccaccggcgacgaaatctacgccctcctctctaacatggacgaaaacggcaacggctacatcgagttcgacgagctcgtgcatgccatcatgcctgacctcaccgagagcgtcctcatcaaccaggagcagctcctcgaggtcttccggtctttcgaccgtgatggcaacggctacatcacagccagcgagctcgcgggttccatggcgaagatgggccagccactcacctaccgcgagctcgcctccatgatggctgaggccgatagcaacggcgacggcgtcattagcttcaacgagttcgccgccctcatggccaaatccgccgctgaatttctcggcgtcaacgtcgcctacatggctagatcaatacggggctaa

SEQ ID NO: 2387 - protein, 168 aa, Glycine max
MSMLETDQIKQLNDIFKRFDMDQDGSLTHLELAALLRSLGIKPTGDEIYALLSNMDENGNGYIEFDELVHAIMPDLTESVLINQEQLLEVFRSFDRDGNGYITASELAGSMAKMGQPLTYRELASMMAEADSNGDGVISFNEFAALMAKSAAEFLGVNVAYMARSIRG

SEQ ID NO: 2388 - DNA, 513 bp, Glycine max
  CDS (1)..(513)
atgtcatctttatatagaggggaatccaggaggtacaacaataaaccaagaggacgtcataatttgacaacgcagaagaagcaagagattaaggaagcctttgagttatttgatactgatggctcaggtactattgatgccaaggagctgaatgttgccatgagggcccttggatttgagatgacagaagagcaaattaatcaaatgatagcagatgtggacaaggatggaagtggagcaattgattatgaagaatttgagtacatgatgacagccaaaataggagaaagggacactaaagaggagctcatgaaagctttccatattattgatcatgataaaaatggaaagatatccgcattagacatcaagcgcattgcaaaagagctaggtcaaaatttcactgacagagagattcaggagatggttgatgaagcagaccaagataatgatcgagaggttagtgcggaggagttcatcacgatgatgaacagaactcgcttccatcactag

SEQ ID NO: 2389 - protein, 170 aa, Glycine max
MSSLYRGESRRYNNKPRGRHNLTTQKKQEIKEAFELFDTDGSGTIDAKELNVAMRALGFEMTEEQINQMIADVDKDGSGAIDYEEFEYMMTAKIGERDTKEELMKAFHIIDHDKNGKISALDIKRIAKELGQNFTDREIQEMVDEADQDNDREVSAEEFITMMNRTRFHH

SEQ ID NO: 2390 - DNA, 453 bp, Zea mays
  CDS (1)..(453)
atggcgcccaaggccgagaagaagcccgcggcgaagaagccggcggaggaggagcccgcggccgagaaggcgcccgccgggaagaagccgaaggcggagaagcgggtccccgctggcaagtccgctgccaaggaaggcggcgagggcaagaggggcaagaagaagggcaagaagagcgtggagacctacaagatctacatcttcaaggtgctgaagcaggtgcacccggacattggcatctcctccaaggccatgtccatcatgaactccttcattaacgatatcttcgagaagctcgctgctgaggccgccaagctcgcgcgctataacaagaagcctaccatcacctcccgtgagatccagacctccgtgcgcctcgtccttcccggggagctcgccaagcacgccgtctccgagggcaccaaggccgtcaccaagttcacctcggcctag

SEQ ID NO: 2391 - protein, 150 aa, Zea mays
MAPKAEKKPAAKKPAEEEPAAEKAPAGKKPKAEKRVPAGKSAAKEGGEGKRGKKKGKKSVETYKIYIFKVLKQVHPDIGISSKAMSIMNSFINDIFEKLAAEAAKLARYNKKPTITSREIQTSVRLVLPGELAKHAVSEGTKAVTKFTSA

SEQ ID NO: 2392 - DNA, 807 bp, Zea mays
  CDS (1)..(807)
atggcggtgcccatgtccgccatcgagtccgcgtggcagctcctgatcgccaacttcaccgagttccagctcgccaccgtcatcaccttcctgctccacgagaccgtcttctttctctctggccttccctccctcctcttcgagcgcttcggactcttcgccaaatacaagatccagaagaggagcaacacctctgcttaccaaaacagatgtgtcttgcgtcttattctctaccatgtctctgtgaacctgcctgtcatgattttgtcgtaccctgccttcaaattcatgggtcttaggagctctcttcctttgccacattggtcggttgttgtatctcaagttcttttctactttgtccttgaggattttatattctattgggggcacagggcattgcatacgaaatggctatacaaacacgttcacagcgtccaccacgagtacgccacaccctttggtttaacatcggaatatgcccacccagctgaaattttgttcctgggattcgccacagttgttggtcctgctcttactggccctcatctcttcaccctgtggctgtggatggtgttgagggttttggagacagttgaagctcacagcggctatcacttcccatggagcccatcaaatttcctgccgctgtatggcggctcggacttccatgactaccatcaccgtgtgctgtacacaaagtcagggaactatgcctcaacatttgtttacatggactggttgttcggcacggacaaggattatcgcaaggcaaagaccattgaggagaaagaagggaaaaatctgtag

SEQ ID NO: 2393 - protein, 268 aa, Zea mays
MAVPMSAIESAWQLLIANFTEFQLATVITFLLHETVFFLSGLPSLLFERFGLFAKYKIQKRSNTSAYQNRCVLRLILYHVSVNLPVMILSYPAFKFMGLRSSLPLPHWSVVVSQVLFYFVLEDFIFYWGHRALHTKWLYKHVHSVHHEYATPFGLTSEYAHPAEILFLGFATVVGPALTGPHLFTLWLWMVLRVLETVEAHSGYHFPWSPSNFLPLYGGSDFHDYHHRVLYTKSGNYASTFVYMDWLFGTDKDYRKAKTIEEKEGKNL

SEQ ID NO: 2394 - DNA, 411 bp, Zea mays
  CDS (1)..(411)
atggcccgcacgaagcagacggcgaggaagtccactggcggcaaggcgccaaggaagcagctggccaccaaggcggcgcgcaagtctgccccggcgaccggcggagtgaagaagccccaccgtttccgccccggcaccgtcgcgctccgggagatccgcaagtaccagaagagcacggagctgctgatccgcaagctgccgttccagcgcctggtgcgtgagatcgcccaggacttcaagaccgacctccgcttccagagctccgccgtcgccgcgctgcaggaggcgtccgaggcctacctcgtcgggctcttcgaggacaccaacctctgcgccattcacgccaagcgcgtcaccatcatgcccaaggacatccagctcgcccgccgtatccgtggggagagggcctag

SEQ ID NO: 2395 - protein, 136 aa, Zea mays
MARTKQTARKSTGGKAPRKQLATKAARKSAPATGGVKKPHRFRPGTVALREIRKYQKSTELLIRKLPFQRLVREIAQDFKTDLRFQSSAVAALQEASEAYLVGLFEDTNLCAIHAKRVTIMPKDIQLARRIRGERA

SEQ ID NO: 2396 - DNA, 450 bp, Zea mays
  CDS (1)..(450)
atggcgcccaaggcggagaagaagccggctgcgaagaagccagcggaggaggagcccgctgccgcgaaggccccggcggggaagaagcccaaggccgagaagcgcctcccggcggccaagtcgtccggcaaagaaggcggcgacaagaagggtaagaagaaggcgaagaagtcggtggagacctacaagatctacatcttcaaggtgctgaagcaggtccaccccgacatcggcatctcttccaaggccatgtccatcatgaactccttcatcaacgacatcttcgagaagctcgccggcgaggctgccaagcttgcgcgctacaacaagaagcccaccatcacctctcgggagattcaaacctctgtccgccttgtccttcccggcgagctcgccaagcacgcggtctccgagggcaccaaggccgtcactaagttcacatcatcttag

SEQ ID NO: 2397 - protein, 149 aa, Zea mays
MAPKAEKKPAAKKPAEEEPAAAKAPAGKKPKAEKRLPAAKSSGKEGGDKKGKKKAKKSVETYKIYIFKVLKQVHPDIGISSKAMSIMNSFINDIFEKLAGEAAKLARYNKKPTITSREIQTSVRLVLPGELAKHAVSEGTKAVTKFTSS

SEQ ID NO: 2398 - DNA, 1518 bp, Glycine max
  CDS (1)..(1518)
atggggaactgtaacagcgaaccctcttcccaaacccagccacattccgatcaccaccatcatcacccccaaccctccaacggcatcactgtccttcctcccaattcgaagccctccgtaggccgggttctgggccggcccatggaggacgcccgctccacctacaccttcggccgcgagctgggccgcgcccaattcggcgtgacctaccaagtgacccacaaacacacgaaacagcaattcgcgtgcaaatccatcgccacgcgcaagctcgtccaccgcgatgacttggaggacgtccggcgagaggtgcagatcatgcaccacctcaccggccaccgcaacatcgtggagctcaagggcgcttacgaggaccgccactccgtcaacctcatcatggagctctgcggcggcggcgagctcttcgaccgcatcatcgccaagggccactactccgagcgcgccgccgcagatctctgccgccagatcgtgacggtggtccacgattgccacaccatgggagtcatgcatagggacttgaagcccgagaatttcttgttgctcaacaagaacgatgattcccccctcaaggccacagattttggcctctccgtcttttttaagccaggggatgtgtttagagaccttgttgggagtgcttactatgttgctcctgaggtgctgagaagaagttatggacctgaagctgatatttggagtgctggagttatattgtacattctactttctggtgttccacctttttgggcagaaaatgaacagggtatatttgatgctattcttcgtggacatattgattttgcatcagatccttggccttccatatcgagtagtgccaaagatctggtcaagaagatgttacgagctgaccccaaacaaagactttcagcagttgaagtacttaatcatccttggatgagagaagatggagcatctgataaacctctagatgttgctgttttatccagaatgaaacaatttagggcaatgaacaagctaaagaaagttgctctgaaggttattgctgaaaacctttctgaagaagaaatcattggcttgaaggaaatgtttaaatccatggacacagataacagtggaacaatcacttttgaagagttgaaagctggtctgccaaaactgggtactaaggtttctgagtctgaagtaaggcagttgatggaagcggctgatgtagacggaaatgggaccattgattacattgaatttataacagctaccatgcacatgaatagaatggaaagagaggaccacctatataaagcttttgaatattttgacaaggatagaagcgggtacatcacaatggaagagttggaatctacccttaaaaaatataatatgggtgatgagaaaacaataaaggaaatcattgtggaagtcgatacagacaatgatggaagaattaattatgatgagtttgtagccatgatgaggaaaggcaaaccagatttagtaaccaacagacgtcgcaaatga

SEQ ID NO: 2399 - protein, 505 aa, Glycine max
MGNCNSEPSSQTQPHSDHHHHHPQPSNGITVLPPNSKPSVGRVLGRPMEDARSTYTFGRELGRAQFGVTYQVTHKHTKQQFACKSIATRKLVHRDDLEDVRREVQIMHHLTGHRNIVELKGAYEDRHSVNLIMELCGGGELFDRIIAKGHYSERAAADLCRQIVTVVHDCHTMGVMHRDLKPENFLLLNKNDDSPLKATDFGLSVFFKPGDVFRDLVGSAYYVAPEVLRRSYGPEADIWSAGVILYILLSGVPPFWAENEQGIFDAILRGHIDFASDPWPSISSSAKDLVKKMLRADPKQRLSAVEVLNHPWMREDGASDKPLDVAVLSRMKQFRAMNKLKKVALKVIAENLSEEEIIGLKEMFKSMDTDNSGTITFEELKAGLPKLGTKVSESEVRQLMEAADVDGNGTIDYIEFITATMHMNRMEREDHLYKAFEYFDKDRSGYITMEELESTLKKYNMGDEKTIKEIIVEVDTDNDGRINYDEFVAMMRKGKPDLVTNRRRK

SEQ ID NO: 2400 - DNA, 453 bp, Glycine max
  CDS (1)..(453)
atggaggcccaggagctgaagcgcgtgttccagatgttcgaccgcaacggcgacgggagaataacgaagaaggagctgaacgactcgctggagaacctgggcatcttcatctctgacaaggacctgagccaaatgatccagaggatcgacgtcaacggcgacggttgcgtggacatggacgagtttggggagctgtatcagaccataatggacgagcgcgacaatgaggaggacatgagggaggccttcaacgtcttcgaccagaacgccgacggcttcatcaccgtcgacgagttgaggaccgtcttgtcctccctcggcttgaagcaaggaagaaccgtccaagactgcaaggccatgatctccaaggtcgatgttgatggagatggcatggtcgattacaaggagttcaagcaaatgatgaaagggggtggattcactgctctcacttaa

SEQ ID NO: 2401 - protein, 150 aa, Glycine max
MEAQELKRVFQMFDRNGDGRITKKELNDSLENLGIFISDKDLSQMIQRIDVNGDGCVDMDEFGELYQTIMDERDNEEDMREAFNVFDQNADGFITVDELRTVLSSLGLKQGRTVQDCKAMISKVDVDGDGMVDYKEFKQMMKGGGFTALT

SEQ ID NO: 2402 - DNA, 450 bp, Glycine max
  CDS (1)..(450)
atggcacctaaggcagagaagaagccagcggagaagaagcccgcggaggagaagaagtcgacggtgggagacaaggctccggcggagaagaagccgaaggccggaaagaagcttccgaaggagggaggagccggcggagaaggggggaagaagaaaaagaggaacaagaagagcgtggagacatacaagatatacatattcaaggtgctgaagcaggtccaccctgacattggtatctcaagcaaggccatgggaatcatgaacagcttcatcaacgacatcttcgagaagcttgctcaggaatcttccagacttgcccgctacaacaagaagcccaccatcacttcaagggaaatccagaccgcggtcaggcttgtgctgcccggtgaattggccaagcacgccgtttctgagggtaccaaggccgtcaccaagttcaccagctcttga

SEQ ID NO: 2403 - protein, 149 aa, Glycine max
MAPKAEKKPAEKKPAEEKKSTVGDKAPAEKKPKAGKKLPKEGGAGGEGGKKKKRNKKSVETYKIYIFKVLKQVHPDIGISSKAMGIMNSFINDIFEKLAQESSRLARYNKKPTITSREIQTAVRLVLPGELAKHAVSEGTKAVTKFTSS

SEQ ID NO: 2404 - DNA, 1650 bp, Glycine max
  CDS (1)..(1650)
atgggcaacacttgccgcggatctttgaaaggtaaatattctcagggcttgagccagcccgaagaccattcaaagcccaccaccacccattctgatccctcctccgaccacccctctaccaagcaatctgcagaaaactacaacaacaacaactatcttcccttcaacgccaagagagagtccatcatgcgccgcggcctcgacaaccaagcctattatgtcctaggccataagactcccaacattcgtgatctatacactcttggtcgtaaattgggacagggccaatttggcaccacttatttatgcaccgagaattctacctccattgaatatgcctgcaaatccatctccaaaaggaagttgatttccaaggaggacgtcgaggacgttaggagggaaattcagataatgcatcatttagctggtcacaagaacattgtcaccatcaagggtgcttatgaggatcctctctatgttcatattgtcatggagctttgttccgggggtgagttgtttgatcgcatcatccagaggggccactataccgagaggaaggccgcggagttgaccaaaattattgttggggttgttgaggctcgccattcccttggggtcatgcatagagatctcaagcctgaaaactttctcttggtcaacaaagatgatgatttctctcttaaagccattgactttggcctctccgttttcttcaaacccggtcaagttttcactgatgtagtcggcagcccatactatgttgctcctgaggttctcctcaaacattatgggcctgaagcagatgtgtggacagcgggtgtcatactgtacatattgcttagtggagtgccgccattttgggcagagacccagcagggtatatttgatgcagtattgaagggacttatagattttgactcagatccttggcctctaatatctgacagtgcaaaagatctgattagaaagatgctgtgttctcggccttcagaacggttgactgctcatcaagtgttatgtcatccttggatatgtgaaaatggagttgcccctgacaggtcactggaccctgctgttctttctcgtctcaaacagttttctgctatgaataagctaaagaagatggctctgcgagtgattgctgaaagtctatccgaagaggagattgccggtttgagagaaatgtttcaggctatggatactgataacagtggtgcaatcactttcgatgaactcaaagctggtctaagaagatatgggtctacccttaaggatatagaaatacgtgatcttatggaagcggctgatgtggacaaaagtggaaccatagattatggggagtttattgctgcaacatttcatctcaacaaactagagcgtgaagaacatcttattgcagcattccaatattttgacaaggatggtagtggctacattacagttgatgaacttcaacaagcttgtgcagaacataacatgactgatgcttttcttgaagatattattagagaagttgatcaagataatgatggaaggattgattatggtgaatttgctgccatgatgcaaaaaggcaacgctggaattggtaggaggactatgcgcaacagtctgaatttaagcatgagagatgcaccaagtgctcaatag

SEQ ID NO: 2405 - protein, 549 aa, Glycine max
MGNTCRGSLKGKYSQGLSQPEDHSKPTTTHSDPSSDHPSTKQSAENYNNNNYLPFNAKRESIMRRGLDNQAYYVLGHKTPNIRDLYTLGRKLGQGQFGTTYLCTENSTSIEYACKSISKRKLISKEDVEDVRREIQIMHHLAGHKNIVTIKGAYEDPLYVHIVMELCSGGELFDRIIQRGHYTERKAAELTKIIVGVVEARHSLGVMHRDLKPENFLLVNKDDDFSLKAIDFGLSVFFKPGQVFTDVVGSPYYVAPEVLLKHYGPEADVWTAGVILYILLSGVPPFWAETQQGIFDAVLKGLIDFDSDPWPLISDSAKDLIRKMLCSRPSERLTAHQVLCHPWICENGVAPDRSLDPAVLSRLKQFSAMNKLKKMALRVIAESLSEEEIAGLREMFQAMDTDNSGAITFDELKAGLRRYGSTLKDIEIRDLMEAADVDKSGTIDYGEFIAATFHLNKLEREEHLIAAFQYFDKDGSGYITVDELQQACAEHNMTDAFLEDIIREVDQDNDGRIDYGEFAAMMQKGNAGIGRRTMRNSLNLSMRDAPSAQ

SEQ ID NO: 2406 - DNA, 411 bp, Zea mays
  CDS (1)..(411)
atggcccgcacgaagcaaacagcaaggaagtcgaccggcggcaaggccccccggaagcagctggccactaaggctgcgcgcaagtcggccccggccaccggcggcgtgaagaagccccaccgcttccgccccggcaccgtcgcgctccgcgagatccgcaagtaccagaagagcactgagctgctcatccgcaagctccccttccagcgcctcgtccgcgagatcgcgcaggacttcaagactgatctgaggttccagtcctccgccgtcgcggcgctgcaggaggccgccgaggcgtacctggtggggctcttcgaggacaccaacctttgcgccatccacgccaagcgcgtcactatcatgcccaaggacatccagctcgcgcggcgcatcaggtgcgagagggcttga

SEQ ID NO: 2407 - protein, 136 aa, Zea mays
MARTKQTARKSTGGKAPRKQLATKAARKSAPATGGVKKPHRFRPGTVALREIRKYQKSTELLIRKLPFQRLVREIAQDFKTDLRFQSSAVAALQEAAEAYLVGLFEDTNLCAIHAKRVTIMPKDIQLARRIRCERA

SEQ ID NO: 2408 - DNA, 453 bp, Zea mays
  CDS (1)..(453)
atggcgcccaaggcggagaaaaagccggcggcgaagaagcccgcggaggaggagcccgcgaccgagaaggcggagaaggctccggcagggaagaagccgaaggcggagaaacgcctccccgcgggcaagtccggcgccggcgagggcaagaagggcaagaagaaagccaagaagagcgtggagacctacaagatctacatcttcaaggtgctcaagcaggtgcaccccgacatcggcatctcgtccaaggccatgtccatcatgaattccttcatcaacgacatcttcgagaagctcgccgcggaggccgccaagctcgcccgctacaacaagaagcccaccatcacctcccgcgagatccagacctccgtccgcctcgtcctacccggcgagctcgccaagcacgccgtctctgaaggcacaaaggcggtcaccaagttcacttcgtcttag

SEQ ID NO: 2409 - protein, 150 aa, Zea mays
MAPKAEKKPAAKKPAEEEPATEKAEKAPAGKKPKAEKRLPAGKSGAGEGKKGKKKAKKSVETYKIYIFKVLKQVHPDIGISSKAMSIMNSFINDIFEKLAAEAAKLARYNKKPTITSREIQTSVRLVLPGELAKHAVSEGTKAVTKFTSS

SEQ ID NO: 2410 - DNA, 450 bp, Zea mays
  CDS (1)..(450)
atggcggaccagctcaccgacgagcagatcgcggagttcaaggaggccttcagcctcttcgataaggatggcgacggctgcatcactaccaaggagcttggaacggtgatgcgctcccttggccagaaccctaccgaggcagagctgcaggacatgatcaacgaggtcgatgcggatggcaatgggaccatcgacttcccggagttcctgaacctgatggcgaggaagatgaaggacacggactcagaggaggagctcaaggaggccttccgcgtcttcgacaaggaccagaacggtttcatctcggctgccgagctccgccatgtcatgaccaaccttggcgagaagctgactgacgaggaggtcgacgagatgatccgtgaggccgacgtcgacggcgacggccagatcaactacgaggagttcgtcaaggttatgatggccaagtga

SEQ ID NO: 2411 - protein, 149 aa, Zea mays
MADQLTDEQIAEFKEAFSLFDKDGDGCITTKELGTVMRSLGQNPTEAELQDMINEVDADGNGTIDFPEFLNLMARKMKDTDSEEELKEAFRVFDKDQNGFISAAELRHVMTNLGEKLTDEEVDEMIREADVDGDGQINYEEFVKVMMAK

SEQ ID NO: 2412 - DNA, 414 bp, Zea mays
  CDS (1)..(414)
atggcgcccaaggccgagaagaagcccgcggagaagaagccggcggaggagaaggccgagaagaagccaagggcggagaagcgcgtgccgagcaaggagggcggcgagaagaagggaaagaagaaggcgaagaagagcgtcgagacgtacaagatctacatcttcaaggtgctcaagcaggtgcacccggacattggcatctcgtccaaggccatgtccatcatgaactccttcatcaacgacatcttcgagaagctcgccgccgaggcagccaagctcgcccgctacaacaagaagcccaccatcacctcccgggagatccagacctcggtgcgcctcgtcctccccggcgagctcgccaagcacgccgtctccgaagggaccaaggcggttaccaagtttacatcctcttag

SEQ ID NO: 2413 - protein, 137 aa, Zea mays
MAPKAEKKPAEKKPAEEKAEKKPRAEKRVPSKEGGEKKGKKKAKKSVETYKIYIFKVLKQVHPDIGISSKAMSIMNSFINDIFEKLAAEAAKLARYNKKPTITSREIQTSVRLVLPGELAKHAVSEGTKAVTKFTSS

SEQ ID NO: 2414 - DNA, 543 bp, Glycine max
  CDS (1)..(543)
atggcgacgaatccaatcgaagcggggaacggcgacgccgctcctaaccctaacgcgactaccaaaccctccgtctacctccaagacacggaggagctgaagcgagtcttcagccgcttcgacgctaattgcgacggcaagatctccgtcaccgagttggacaacgtcctccgctccctcggatccggcgtcccgccggaggatatccagcgcgtcatggacgacctcgacaccgaccacgacggattcattaacctctcggagttcgccgccttctgccgctccgacaccgcggatggcggcgacgccgagctccacgatgctttcaacctgtacgatcatgacaagaacggccatatctccgccacggagctctgccaggtgctgaaccgcctcggaatgaagtgctccgtcgaggaatgccacaacatgatcaaatccgtggattccgacggcgacggcaacgtcaacttccccgagttcaagcggatgatgagcaacaatcgtgaaaatgctagcaatggcgaagaaaaaaccgattag

SEQ ID NO: 2415 - protein, 180 aa, Glycine max
MATNPIEAGNGDAAPNPNATTKPSVYLQDTEELKRVFSRFDANCDGKISVTELDNVLRSLGSGVPPEDIQRVMDDLDTDHDGFINLSEFAAFCRSDTADGGDAELHDAFNLYDHDKNGHISATELCQVLNRLGMKCSVEECHNMIKSVDSDGDGNVNFPEFKRMMSNNRENASNGEEKTD

SEQ ID NO: 2416 - DNA, 447 bp, Glycine max
  CDS (1)..(447)
atggcaggagcactgacagatgatcagattgctgaattccatgaagccttttgcctcattgacaaggactctgatggattcattactgtggatgaattggcaaccattatccgatcattagaagggaatccaacgaaagaagaaatccaagacatgattagtgaggtcgatattgatgggaatgggagtatagattttgaagagttcttgaatattatgggaagaaaaatgaaggaaactctagctgaagagctgagagaagcattcaaagtatttgacagagatcaaaatggatacatatccgccactgagctgaggcacgtaatgatgaatttgggagagaggctgacagatgaagaggcagaacaaatgattagagaggcagatttggatggggatggtcaagttagctttgaagaatttgcaaggattatgatgctcaaatga

SEQ ID NO: 2417 - protein, 148 aa, Glycine max
MAGALTDDQIAEFHEAFCLIDKDSDGFITVDELATIIRSLEGNPTKEEIQDMISEVDIDGNGSIDFEEFLNIMGRKMKETLAEELREAFKVFDRDQNGYISATELRHVMMNLGERLTDEEAEQMIREADLDGDGQVSFEEFARIMMLK

SEQ ID NO: 2418 - DNA, 432 bp, Glycine max
  CDS (1)..(432)
atggcaccaaaggcggagaagaagcccgcagaggagaagaagtccacggtgggagacaaggctccggcggagaagaagccaaaggccggaaagaagcttccgaaggagggaggcgccggcggagaagggaagaagaagaagaggaacaagaagagcgtggagacatacaagatctacatcttcaaggttctgaagcaggttcaccctgacattggtatctcaagcaaggccatgggaatcatgaacagcttcatcaacgacatcttcgagaagcttgcccaggaatcttctagacttgcccgctacaacaagaaacccaccatcacttcgagggaaattcagaccgcggtcaggcttgtgctgcccggtgaattggctaagcacgccgtctctgagggtaccaaggccgtcaccaagtttactagctcttaa

SEQ ID NO: 2419 - protein, 143 aa, Glycine max
MAPKAEKKPAEEKKSTVGDKAPAEKKPKAGKKLPKEGGAGGEGKKKKRNKKSVETYKIYIFKVLKQVHPDIGISSKAMGIMNSFINDIFEKLAQESSRLARYNKKPTITSREIQTAVRLVLPGELAKHAVSEGTKAVTKFTSS

SEQ ID NO: 2420 - DNA, 816 bp, Glycine max
  CDS (1)..(816)
atggcgtccctcatcgaatctggctggcagtacttgatcacacatttcagtgactttcaactggcgtgtttgggaagtttctttctacatgaaggcgttttcttcttgtctggacttccctttatatggcttgagagggcagggtggatgagcaagtacaaaattcaggccaaaaataacacccctgcagctcaggagaaatgtattgttcgcctgttgctttaccattttggtgtcaatctacctgttatgattttttcatatcccgtcttcacatacatgggcatgcggagtagtcttcccctaccgtcctggaaagtagttctaattcaaataatcttttacttcattttggaggactttatattctactggggacatagaatactgcacacaaaatggctatacaagcatgtgcacagtgttcatcatgagtatgctacaccgtttggattgacttctgaatatgctcatcctgctgagatacttttccttgggtttgctaccatttttggtcccgccattactgggccccacttgataactctctggttatggatggttctgagagtcctagagacagttgaggctcactgtggttaccatttcccatggagtctttcgaacttccttccattgtatggaggagctgatttccacgactatcatcaccgtttattgtacaccaagtctgggaactattcatcaacttttacttacatggaccggatatttgggactgatataggctacagaaagttgaaagcattgaagagcataggagttgaagacaatagtgaacaaaagaaacaataa

SEQ ID NO: 2421 - protein, 271 aa, Glycine max
MASLIESGWQYLITHFSDFQLACLGSFFLHEGVFFLSGLPFIWLERAGWMSKYKIQAKNNTPAAQEKCIVRLLLYHFGVNLPVMIFSYPVFTYMGMRSSLPLPSWKVVLIQIIFYFILEDFIFYWGHRILHTKWLYKHVHSVHHEYATPFGLTSEYAHPAEILFLGFATIFGPAITGPHLITLWLWMVLRVLETVEAHCGYHFPWSLSNFLPLYGGADFHDYHHRLLYTKSGNYSSTFTYMDRIFGTDIGYRKLKALKSIGVEDNSEQKKQ

SEQ ID NO: 2422 - DNA, 894 bp, Glycine max
  CDS (1)..(894)
atgttggaactaccattcaacatggcacttcggtttcccaatttggatttcaagtctttaccctttgctgagaacctcaacactgaattgctaggtggcgtagttgctcttgttgccgttggctttacggttgcatatatttattatcgcacaaaacaccccaaaggaagcttggacccgaaaaatttcaaagaatttaaactcataaagaagactcagctcagccacaacgttgcaagattcagatttgcccttcctactccttcttcagtattaggccttcctgttggaaaaaacatacttgctagggggaaagatagccaaggagaggaagttatgagatcatatactccaatcacgttggattcagatattggctacttcgagttggttgtgaagatgtacccgaatggaaagatgtcccaccattttagacaaatgaaggaaggtgattacttggccgtgaggggccccaagggacgtttcagttacaagcctggccaggctagggcatttggaatgattgctgggggttcaggcataactccaatgtttcagctcataagagccattctagaaaaccctaaggacaaaacgaaggtgaaccttgtttacgccaatgtaacagtggacgacattctgttaaaagaagaactagataattttacaaacaaatttcctcaaaggtttgaagtctatcatgttcttaataagcctcctgaacaatggaatggtggcattggatttatatcgaaggagattattaaatcacattgtcctgaaccagcccacgatattcagatacttaggtgtggtccaccacctatgaataaagccatggctactcatcttgacgcacttggctacacatcaaacatgcagttcgagttctaa

SEQ ID NO: 2423 - protein, 297 aa, Glycine max
MLELPFNMALRFPNLDFKSLPFAENLNTELLGGVVALVAVGFTVAYIYYRTKHPKGSLDPKNFKEFKLIKKTQLSHNVARFRFALPTPSSVLGLPVGKNILARGKDSQGEEVMRSYTPITLDSDIGYFELVVKMYPNGKMSHHFRQMKEGDYLAVRGPKGRFSYKPGQARAFGMIAGGSGITPMFQLIRAILENPKDKTKVNLVYANVTVDDILLKEELDNFTNKFPQRFEVYHVLNKPPEQWNGGIGFISKEIIKSHCPEPAHDIQILRCGPPPMNKAMATHLDALGYTSNMQFEF

SEQ ID NO: 2424 - DNA, 483 bp, Glycine max
  CDS (1)..(483)
atgtccatgctcgaaaccgaccaaatcaagcaactgaacgacatattcaagcgcttcgacatggaccaggacggcagcctgacccacctggagctggcggcgctcctccggtccctgggcatcaaacccaccggcgacgaaatctacgccctcctctctaacatggacgaaaacggcaacggctacatcgagttcgacgagctcgtgcatgccatcatgcctgacctcaccgagagcgtcctcatcaaccaggagcagctcctcgaggtcttccggtctttcgaccgtgatggcaacggctacatcacagccagcgagctcgcgggttccatggcgaagatgggccagccactcacctaccgcgagctcgcctccatgatggctgaggccgatagcaacggcgacggcgtcattagcttcaacgagttcgccgccctcatggccaaatccgccgctgaatttctcggcgtcaaggtcgcctag

SEQ ID NO: 2425 - protein, 160 aa, Glycine max
MSMLETDQIKQLNDIFKRFDMDQDGSLTHLELAALLRSLGIKPTGDEIYALLSNMDENGNGYIEFDELVHAIMPDLTESVLINQEQLLEVFRSFDRDGNGYITASELAGSMAKMGQPLTYRELASMMAEADSNGDGVISFNEFAALMAKSAAEFLGVKVA

SEQ ID NO: 2426 - DNA, 972 bp, Glycine max
  CDS (1)..(972)
atggctgctttcttgagaaggtttgcgagggccactccgatcctattcgctgcccaatccaattcctctcacaccaatctccgccttcccttcactgccatcgccgccatttccggcggagtctccttcctttactaccattcctctcccaacttcgctcattcacaagaagcagaacaagtggaaagtaaaaacatcgcactcgttccggataaatgggtcgagtttaagttgcaggacactgccagggttagtcacaatacccagctattcaggttttcatttgatcccactcagaaattgggtctggatattgcctcttgcatccttacaagggctccattgggacaagatgctgaaggaaaaccaaaatttgtcatacgcccgtacactcctatttcagatccagaatcaaatggctattttgatttgctaatcaaggtatatcctgaagggaaaatgagccagcattttgcaagcttaaaaccgggtgatgttgttgaagtgaaagggcccattgaaaagctcagatatactcctaatatgaagaagcatattggcatgattgctggaggcacaggaattactcctatgcttcaggtaattgaagctatattgaggaatcctgatgacaaaactcagatatctttactttatgctaatgtctccccggatgacatactgcttaaacaaaagcttgacattcttgcaacaagccacccaaacttaaagatattctacactgtagataatccaacgaaaaattggagaggaggtgcaggttacatatcaaaggatgtggttgtgaaaggcttacccagtcctagtgatgatactctaatacttgtgtgtggacccccgggtatgatgaaagcaatatctggagaaaaggccaaggactggacacaaggagaggtttctggcatcctaaaagaggctggatacactgaacaaatggtatacaaattctga

SEQ ID NO: 2427 - protein, 323 aa, Glycine max
MAAFLRRFARATPILFAAQSNSSHTNLRLPFTAIAAISGGVSFLYYHSSPNFAHSQEAEQVESKNIALVPDKWVEFKLQDTARVSHNTQLFRFSFDPTQKLGLDIASCILTRAPLGQDAEGKPKFVIRPYTPISDPESNGYFDLLIKVYPEGKMSQHFASLKPGDVVEVKGPIEKLRYTPNMKKHIGMIAGGTGITPMLQVIEAILRNPDDKTQISLLYANVSPDDILLKQKLDILATSHPNLKIFYTVDNPTKNWRGGAGYISKDVVVKGLPSPSDDTLILVCGPPGMMKAISGEKAKDWTQGEVSGILKEAGYTEQMVYKF

SEQ ID NO: 2428 - DNA, 1602 bp, Glycine max
  CDS (1)..(1602)
atgggcaactgctgcagatccccggccgctgtggcccgcgaggacgtcaaatcgagcttctccaacgccgaccacggcaagcgcggcggaggtggctccgcctccgccgccgccaagcagaaggccccgatcacggtgcttgccggcgtgccgaaagagaacatcgaggaccggtacctcgtggaccgcgagctcgggcgcggcgagttcggcgtgacgtacctctgcatcgaccgcgacacgcgcgagctgctcgcgtgtaagagcatctcgaagaggaagctccggacagccgtggacgtcgaggacgtgcgccgcgaggtcgccatcatgcgccacctgccggagagcccgagcatcgtgtcgctccgcgaggcctgtgaggacgacaatgccgtccacctcgtcatggagctctgcgagggcggcgaactcttcgaccggatcgtcgcccgcgggcactacaccgagcgcgccgccgccgccgtcacgcggacgatcgtcgaggtcgtgcagctctgccacaagcacggggtcatccaccgagacctcaagccggagaacttcttgttcgcgaacaagaaggagaattcgccgctcaaggctattgactttggcctctccatattcttcaagccaggtgagaggttctcagaaattgttggaagtccatattatatggctccagaagtgctcaagcggaattatggaccagaaatagatatatggagtgcaggagtaattctctacatcttattgtgtggtgttcccccattttgggctgaatctgagcaaggagttgcacaggccattcttcgaggacttatagattttaaaagggaaccatggcccagtatttctgaaagtgctaaaagccttgttaggcaaatgttagaaccagaccccaagcttcgattaactgccaaacaagtgcttgagcatccctggattcaaaatgctaagaaggctcctaatgttccacttggagatgttgtcaagtcaaggcttaagcaattttcaatgatgaacagattcaaaagaaaagcccttagggtcattgctgatttcttatccaatgaagaagttgaagacatcaaagatatgttcaagaagatggataatgataatgatggcattgtttccattgaagaactaaaagctggatttcgaaactttgggtctcaactggctgagtctgaagttcagttgcttattgaagctgtagatactaatggtaagggaacactagactacggagaattcgttgctgtttcccttcatttaagaaggatggctaatgacgatcatcttcacaaggccttctcctattttgacaaagatgggaatggatatattgaaccagatgagctacggaatgctttgatggaagatggagcagatgactgtacagatgtagcgaatgacattttcctagaagtagacacggacaaggatggacgtatcagctacgatgaatttgttgctatgatgaaaactggaacagattggagaaaagcatcaaggcattactcacgtggaagattcaatagcttgagcttaaagttgatgaaagacggttctttaaacttaggaaatgagtag

SEQ ID NO: 2429 - protein, 533 aa, Glycine max
MGNCCRSPAAVAREDVKSSFSNADHGKRGGGGSASAAAKQKAPITVLAGVPKENIEDRYLVDRELGRGEFGVTYLCIDRDTRELLACKSISKRKLRTAVDVEDVRREVAIMRHLPESPSIVSLREACEDDNAVHLVMELCEGGELFDRIVARGHYTERAAAAVTRTIVEVVQLCHKHGVIHRDLKPENFLFANKKENSPLKAIDFGLSIFFKPGERFSEIVGSPYYMAPEVLKRNYGPEIDIWSAGVILYILLCGVPPFWAESEQGVAQAILRGLIDFKREPWPSISESAKSLVRQMLEPDPKLRLTAKQVLEHPWIQNAKKAPNVPLGDVVKSRLKQFSMMNRFKRKALRVIADFLSNEEVEDIKDMFKKMDNDNDGIVSIEELKAGFRNFGSQLAESEVQLLIEAVDTNGKGTLDYGEFVAVSLHLRRMANDDHLHKAFSYFDKDGNGYIEPDELRNALMEDGADDCTDVANDIFLEVDTDKDGRISYDEFVAMMKTGTDWRKASRHYSRGRFNSLSLKLMKDGSLNLGNE

SEQ ID NO: 2430 - DNA, 969 bp, Glycine max
  CDS (1)..(969)
atgttctcgttaagactccctattcctctcgttaaaacaccaccttctccctcttgttattattctcactattatcactatcgttatcgttatcgttgttatcatcctttccatcaccgttcccaaacacagagtcttatcgtctcgaagcgcggttccgccattgcgaagtgtcacgctgatagcgtgacacttcgtgatgacggagtctcgctcgcccaagagtcgttggagccacttccggcggaactcgcggcggagatgatgccgaagcatgtggcggtgataatggacgggaacgggaggtgggcgaaggtgaaggggctgccaccatcggcggggcaccaggcgggggtgcaatcgctgaggaaaatggtgaggctgtgttgcagctggggaattaaggttctaacggttttcgcgttctctacggataactgggttcgccccaaggtggaggttgatttcttgatgaggctgtttgagagaacaataaactctgaagttcaaacttttaagagggaaggaattagaatatctgtgattggagattcatcaaggttgcctgagtctttaaaaagaatgatagctagtgcagaagaggatacaaaacaaaattcgagattccaacttattgtggcagtgggatacagtggaaaatatgatgttgtgcaagcatgtaaaagtgtagccaagaaagtcaaagatggtcacattcacttggatgacataaacgaaaacattattgaacaagaattggaaactaattgtactgagtttccttatcctgatctactaatacgaactagtggcgagcttagagtgagtaacttcttgttgtggcaattagcctacacagaactttattttaatcgggaactctggccagattttgggaaggatgagtttgtagatgcattaagttcatttcaacaaagacaaagacgctatggtggtggacatacataa

SEQ ID NO: 2431 - protein, 322 aa, Glycine max
MFSLRLPIPLVKTPPSPSCYYSHYYHYRYRYRCYHPFHHRSQTQSLIVSKRGSAIAKCHADSVTLRDDGVSLAQESLEPLPAELAAEMMPKHVAVIMDGNGRWAKVKGLPPSAGHQAGVQSLRKMVRLCCSWGIKVLTVFAFSTDNWVRPKVEVDFLMRLFERTINSEVQTFKREGIRISVIGDSSRLPESLKRMIASAEEDTKQNSRFQLIVAVGYSGKYDVVQACKSVAKKVKDGHIHLDDINENIIEQELETNCTEFPYPDLLIRTSGELRVSNFLLWQLAYTELYFNRELWPDFGKDEFVDALSSFQQRQRRYGGGHT

SEQ ID NO: 2432 - DNA, 513 bp, Glycine max
  CDS (1)..(513)
atgtcatctttatatagaggggaatccaggaggtacaacaataaaccaagaggacgtcataatttgacaacgcagaagaagcaagagattaaggaagcctttgagttatttgatactgatggctcaggtactattgatgccaaggagctgaatgttgctatgagggcccttggatttgagatgacagaagagcaaatcaatcaaatgatagcagatgtggacaaggatggaagtggagcaattgattatgaagaatttgagtacatgatgacagccaaaataggagaaagggacactaaagaggagctcatgaaagctttccatattattgatcatgataaaaatggaaagatatccgcattagacatcaagcgcattgcaaaagagctaggtcaaaatttcactgacagagagattcaggagatggttgaggaagcagaccaagataatgatcgagaggttagtgcggaggagttcatcacgatgatgaacagaactcgcttccatcactag

SEQ ID NO: 2433 - protein, 170 aa, Glycine max
MSSLYRGESRRYNNKPRGRHNLTTQKKQEIKEAFELFDTDGSGTIDAKELNVAMRALGFEMTEEQINQMIADVDKDGSGAIDYEEFEYMMTAKIGERDTKEELMKAFHIIDHDKNGKISALDIKRIAKELGQNFTDREIQEMVEEADQDNDREVSAEEFITMMNRTRFHH

SEQ ID NO: 2434 - DNA, 837 bp, Glycine max
  CDS (1)..(837)
atggaattttcgcagagtcacagggtagagatgataagcatggcagttgctcttgttgccattgttggtggcaccgcttactattactacgtcaccaagaagccaaaagggtgcttggatcctgagaacttcaaagaatttaaacttgttaaacgcactcaactcagccataatgttgccacgttccgatttgatcttcctactcctaagtcagtgttgggacttcctattggacaacatatcagctgcagagggaaggatagtcttggtgaagaagttgtgaaaccatatactcctacaacattggatactgatgttggatactttgaattggttgtgaagatgtatccacaaggacggatgtctcatcactttagggagatacgtgaaggtgattacatggctgtgaagggaccaaagggacgttttaagtaccagcccaaccaagtaagagctttgggtatgattgctggtggcactggcatcaccccaatgtttcaagttacaagagctatattagaaaaccaacaggacaaaaccaacataaatttgatatatgccaatgtcacatttgatgacattcttttgaaggaagagctggatgcctttgccattaagttccctaatcaattcaaagtttactatgttctaaatcagccaccagaaatatgggacggtggtgttggattcgtcactaaggaaatgatccaaacagatttccctgcaccagcatcagatattaagatattaaggtgtggaccacctcccatgaacaaggctatggctgctaatcttgaagctcttggatacagtccccaaatgcagtttcagttttaa

SEQ ID NO: 2435 - protein, 278 aa, Glycine max
MEFSQSHRVEMISMAVALVAIVGGTAYYYYVTKKPKGCLDPENFKEFKLVKRTQLSHNVATFRFDLPTPKSVLGLPIGQHISCRGKDSLGEEVVKPYTPTTLDTDVGYFELVVKMYPQGRMSHHFREIREGDYMAVKGPKGRFKYQPNQVRALGMIAGGTGITPMFQVTRAILENQQDKTNINLIYANVTFDDILLKEELDAFAIKFPNQFKVYYVLNQPPEIWDGGVGFVTKEMIQTDFPAPASDIKILRCGPPPMNKAMAANLEALGYSPQMQFQF

SEQ ID NO: 2436 - DNA, 894 bp, Glycine max
  CDS (1)..(894)
atgctcccctacgcttccatcccggaggccgtggcggcgctgggccgcaacctcaccttcgcggagaccctctggttcaactactccgccgccaagtccgattacttcctctactgccacaacattctgttcctcttcctcgtcttctccctcgtccccctccccctcgtcttcctcgaattcaagcgcttctccttcgtctcttcccacaagatccaaccaaaagtccgcttgtccctggccgaaaccttcaagtgctacaaagacgtcatgcgcatgttcttcctcgtcgtcggccccctccaactcatctcttacccttccatccagatgattgggatcaggacgggcttgccattaccttcgtggcgggagatcctctcgcagcttctggtgtactttctcgtagaggattacaccaattactggatccacaggtttctgcacaacgattgggggtacgagaagattcaccgcgtccaccacgagtaccatgcgcccattggattcgccgcgccctatgcccactgggccgagatcttgatcctcgggattccctcctttcttgggcctgccatggttcctggccacattatcaccttctggctctggatagccttgcgccagattgaagccattgacacgcacagcgggtatgactttcctaggagtatcacaaaatatattccattttatggtggtgctgagtatcatgattaccatcattacgttggaagacaaagccaaagcaattttgcttcagttttcacatactgtgattacatctatggaactgacaaggggtataggtatcagaaaaaaatacttcagaagttgaaggaagagttggcaaatggtgttgagcagaacggaggattatacaagactgactga

SEQ ID NO: 2437 - protein, 297 aa, Glycine max
MLPYASIPEAVAALGRNLTFAETLWFNYSAAKSDYFLYCHNILFLFLVFSLVPLPLVFLEFKRFSFVSSHKIQPKVRLSLAETFKCYKDVMRMFFLVVGPLQLISYPSIQMIGIRTGLPLPSWREILSQLLVYFLVEDYTNYWIHRFLHNDWGYEKIHRVHHEYHAPIGFAAPYAHWAEILILGIPSFLGPAMVPGHIITFWLWIALRQIEAIDTHSGYDFPRSITKYIPFYGGAEYHDYHHYVGRQSQSNFASVFTYCDYIYGTDKGYRYQKKILQKLKEELANGVEQNGGLYKTD

SEQ ID NO: 2438 - DNA, 417 bp, Glycine max
  CDS (1)..(417)
atggctcccccaaaggccgagaagaagcccgcggagaaaaagcccgcagagaaggctccggcggagaagaagcccaaggccgagaagaagatatcgaaggaaggaggaagcgagaagaagaagaagagaacaaagaagagcgtggagacctacaagatttacatcttcaaggtgctgaagcaggttcaccccgacatcggaatctcaagcaaggccatggggatcatgaacagtttcataaacgacatcttcgagaagctcgcccaggagtcgtcgcgattggctaggtataacaagaagcctaccattacttccagggagatccaaacggcggtgcgtttggtcctccctggggagttggccaaacacgctgtctctgaaggtaccaaggccgtcaccaagttcaccagctcttga

SEQ ID NO: 2439 - protein, 138 aa, Glycine max
MAPPKAEKKPAEKKPAEKAPAEKKPKAEKKISKEGGSEKKKKRTKKSVETYKIYIFKVLKQVHPDIGISSKAMGIMNSFINDIFEKLAQESSRLARYNKKPTITSREIQTAVRLVLPGELAKHAVSEGTKAVTKFTSS

SEQ ID NO: 2440 - DNA, 636 bp, Glycine max
  CDS (1)..(636)
atgccaactattttgcataggattttccttctttacaacctcgtacactcattcctcctctgtctggtccccaagaaggtgcgtcccttcctccccccttcttggttccaaaccaaaaccatcactgcaccttcttcttcttcttcttcttcttccagtgcccgcatcatcaagagaacaacaatggaccccaacgagctgaagcgcgtgttccagatgttcgaccgcaacggcgacggaagaataacgaagaaggagctgaacgactcgctggagaatcttggcatcttcattcctgacaaggagctcggccaaatgatcgagaggattgacgtcaacggcgatggctgcgtcgacatcgacgagttcggggagctctaccagaccatcatggacgagcgcgacgaggaggaggacatgagggaggccttcaacgtcttcgaccagaacgccgacggcttcatcaccgtcgacgagttgaggaccgtcctgtcctccctcggcttgaagcagggcagaaccgtccaagactgcaagaacatgatatccaaggttgatgttgatggagacggcatggtcgatttcaaggagttcaagcaaatgatgaaagggggtggcttcagtgctctcacttaa

SEQ ID NO: 2441 - protein, 211 aa, Glycine max
MPTILHRIFLLYNLVHSFLLCLVPKKVRPFLPPSWFQTKTITAPSSSSSSSSSARIIKRTTMDPNELKRVFQMFDRNGDGRITKKELNDSLENLGIFIPDKELGQMIERIDVNGDGCVDIDEFGELYQTIMDERDEEEDMREAFNVFDQNADGFITVDELRTVLSSLGLKQGRTVQDCKNMISKVDVDGDGMVDFKEFKQMMKGGGFSALT

SEQ ID NO: 2442 - DNA, 492 bp, Glycine max
  CDS (1)..(492)
atgagcaaaaaacagacggtgaaattagacgaggagcaaatcgcagaattgcgagaaatctttcggtccttcgatcggaacaatgacgggagcctgacgcagttggagctgagttcgcttctgcgctcgcttggtctgaagcccagtgcagaccaactcgagggatttattcagagggcggacaccaacaacaacggcatggtggagttctcggagttcgttgctctggtcgcgccggagcttctgccggccaagtcgccctacacggaagagcagctgaagcagctgttccgaatgttcgatcgtgacgggaacggcctcatcactgcggcggagttggctcactccatggctaggcttggccatgccctcaccgccgaggagctgaccgggatgatcaaagaggccgacaccgacggcgatggcatgatcaactatcatgagtacgctcatgctattacttccgctgcttttgataattgctggccttaa

SEQ ID NO: 2443 - protein, 163 aa, Glycine max
MSKKQTVKLDEEQIAELREIFRSFDRNNDGSLTQLELSSLLRSLGLKPSADQLEGFIQRADTNNNGMVEFSEFVALVAPELLPAKSPYTEEQLKQLFRMFDRDGNGLITAAELAHSMARLGHALTAEELTGMIKEADTDGDGMINYHEYAHAITSAAFDNCWP

SEQ ID NO: 2444 - DNA, 450 bp, Glycine max
  CDS (1)..(450)
atgaaggacgccttgagggaagagcaaattggtgagtttttggaggccttctgtctttttgacaaagatggagatggctgcataaccatcgaagaattaagcactgcaatcagatcactagatgaaaatccaacggtggaggagttgcaaattatgatgaacgaagtggacatggacggcaacggaaccatagaattcggggaattcttgaatctcatggccagaaaaatgaaggaaactgaagcagaagaggaactgaaggaagctttcagggtgttagacaaagatcatgatggttatatatcgcccagcgagttgaggtctgtaatgagaactattggggagaaggtgacagacgaagaagtggaacagatggtcaaagaggcagatttagatggtgatggcctcattgattatgaagagttcgtgaggatgatgttggctgattaa

SEQ ID NO: 2445 - protein, 149 aa, Glycine max
MKDALREEQIGEFLEAFCLFDKDGDGCITIEELSTAIRSLDENPTVEELQIMMNEVDMDGNGTIEFGEFLNLMARKMKETEAEEELKEAFRVLDKDHDGYISPSELRSVMRTIGEKVTDEEVEQMVKEADLDGDGLIDYEEFVRMMLAD

SEQ ID NO: 2446 - DNA, 960 bp, Glycine max
  CDS (1)..(960)
atggctgctctcttgaggaggtttgcgagcgccactccgatcccatccaattcctctcacaccaatctccgccttcccttcaccgccatcgccgccatttccggcggagtctccttccttttctaccattcctctcccaacttcgctcattcacaagaagcagaacaagtggaaagtaaaaacatcgcactcgttccggataaatgggtcgagtttaagttgcaggatactgctagggttagtcacaatacccagctattcaggttttcatttgatcccactcagaaattgggtctggatattgcttcttgcatccttacaagggctccattgggacaagatgctgaaggaaaaccaaaatttgtcatacgcccgtacactcctatttcagatccacaatcaaagggatattttgatttgcttatcaaggtatatcctgaagggaaaatgagccagcattttgcaagcttaaaaccgggtgatgttgttgaagtgaaaggccccattgaaaagctcagatatactcctaatatgaagaagcatattggcatgattgctggaggcacaggaattactcctatgcttcaggtaattgaagctatattgaagaatcctgatgacaaaactcagatatctttactttatgctaatgtctccccggatgacatactgcttaaacaaaagcttgacattctagcaacaagccacccaaacttaaagatattctacactgtagataatccaacaaaaaattggagaggaggtgcggggtacatatcaaaggatattgttgtgaaaggcttacccggccctagtgatgatactcttatacttgtgtgtggaccccctggtatgatgaaagcaatatctggagaaaaggccaaggactggacacagggagaggtttctggcgtcctaaaagaggctggatacactgaacaaatggtatacaaattctga

SEQ ID NO: 2447 - protein, 319 aa, Glycine max
MAALLRRFASATPIPSNSSHTNLRLPFTAIAAISGGVSFLFYHSSPNFAHSQEAEQVESKNIALVPDKWVEFKLQDTARVSHNTQLFRFSFDPTQKLGLDIASCILTRAPLGQDAEGKPKFVIRPYTPISDPQSKGYFDLLIKVYPEGKMSQHFASLKPGDVVEVKGPIEKLRYTPNMKKHIGMIAGGTGITPMLQVIEAILKNPDDKTQISLLYANVSPDDILLKQKLDILATSHPNLKIFYTVDNPTKNWRGGAGYISKDIVVKGLPGPSDDTLILVCGPPGMMKAISGEKAKDWTQGEVSGVLKEAGYTEQMVYKF

SEQ ID NO: 2448 - DNA, 564 bp, Glycine max
  CDS (1)..(564)
atgagacctttagacgagaaggagacgagcgcggtgttcgagaagctgttcaaattcgtcggaaacaacctgaagaacatcgtggagaacccctcacacgaaggtcctgattcgaaccctggccgctactgcttccgcctccacaagaacaagatcttctacgccagcgagtccctcgtcaaacgcgccaccaacgtcgcgcgccccaacctcgtctccctcggcacctgcatcggcaaatacacccacggcggcagcttccacctcaccgtccaggccctaaacttgctcgccgccaacgccaagcacaaggtctggctcaagccgcagtccgagatgtccttcttgtacggtaaccatgtcttgaagggcgcactgggcaaactctccgaaaacattgctgccggcgacggggttgtcgtgttctccatggccgacgtgccgttgggtttcggtgtcgccgcgaagtccacgctggattgtaggaagctggatccgaacgggattgttgttctgcaccaggccgatgtgggagagtacttgaggatggaggatgagctttga

SEQ ID NO: 2449 - protein, 187 aa, Glycine max
MRPLDEKETSAVFEKLFKFVGNNLKNIVENPSHEGPDSNPGRYCFRLHKNKIFYASESLVKRATNVARPNLVSLGTCIGKYTHGGSFHLTVQALNLLAANAKHKVWLKPQSEMSFLYGNHVLKGALGKLSENIAAGDGVVVFSMADVPLGFGVAAKSTLDCRKLDPNGIVVLHQADVGEYLRMEDEL

SEQ ID NO: 2450 - DNA, 447 bp, Glycine max
  CDS (1)..(447)
atggcaccaaaggcagagaagaagccagcggagaagaagcccgcggaggagaagaagtccacggtgggagacaaggctccggcggagaagaagccaaaggccggaaagaagcttccgaaggagggaggcgccggcggagaagggaagaagaagaagagaaacaagaagagcgtggagacatacaagatctacatcttcaaggttctgaagcaggtccaccctgacattggtatctcaagcaaggccatgggaatcatgaacagcttcatcaacgacatcttcgagaagcttgcccaggaatcttctagacttgcccgttacaacaagaagcccaccatcacttcaagggaaattcagaccgcggtcaggcttgtgctgcccggtgaattggccaagcacgccgtctctgagggtaccaaggctgtcaccaagttcactagctcttga

SEQ ID NO: 2451 - protein, 148 aa, Glycine max
MAPKAEKKPAEKKPAEEKKSTVGDKAPAEKKPKAGKKLPKEGGAGGEGKKKKRNKKSVETYKIYIFKVLKQVHPDIGISSKAMGIMNSFINDIFEKLAQESSRLARYNKKPTITSREIQTAVRLVLPGELAKHAVSEGTKAVTKFTSS

SEQ ID NO: 2452 - DNA, 812 bp, Glycine max
  CDS (79)..(528)
cgattctctctttctctttcttcagaaaaattaaacccattcaaagaaagaaagaaagagcgatcatttccaatcacaatggcagatcaactcaccgatgaacagatctcggagttcaaggaagccttcagtttgttcgataaggatggcgatggttgcatcacaacaaaggagcttgggactgttatgcgttcgttgggtcagaatccaacagaggctgagctccaagacatgatcaatgaagtagatgctgatgggaatggcaccattgacttccctgagttcttgaacctcatggctagaaagatgaaggacactgattctgaggaggagctgaaagaggcgttccgagtgtttgacaaggaccagaatgggttcatttctgctgctgagctccgccatgtgatgaccaaccttggggagaagctcactgatgaagaggttgatgagatgattcgagaggctgatgtcgatggcgacggccaaataaactacgaggagtttgttaaggtcatgatggccaagtgatggtagtacaccatctccactaaattctgaactgatggaaaaaaatgacaaggttgaacttgtgatatagtacacctagtccttgcctaatgtcattactgtcttatttctagatttttatttgatgtttttgaattcaatctaaacgacatttagtggaaagctctgctgctaatagtaattgtggtggaatggtgtctttctagtttctgttgtgacttgtgtctcaagtgcttgatgtttattcaactcagctttcttctgctcccaaaaaaaaaaaaaaa

SEQ ID NO: 2453 - protein, 149 aa, Glycine max
MADQLTDEQISEFKEAFSLFDKDGDGCITTKELGTVMRSLGQNPTEAELQDMINEVDADGNGTIDFPEFLNLMARKMKDTDSEEELKEAFRVFDKDQNGFISAAELRHVMTNLGEKLTDEEVDEMIREADVDGDGQINYEEFVKVMMAK

SEQ ID NO: 2454 - DNA, 646 bp, Glycine max
  CDS (81)..(527)
cgaaataacgaccgtgtcacacattgctcatttataagttttcttgctttcccaattcagttgacaacacatcacaaatcatggcaggagcactgacagatgatcagattgctgaattccatgaagccttttgcctcattgacaaggactctgatggattcattactgtggatgaattggcaaccattatccgatcattagaagggaatccaacgaaagaagaaatccaagacatgattagtgaggtcgatattgatgggaatgggagtatagattttgaagagttcttgaatattatgggaagaaaaatgaaggaaactctagctgaagagctgagagaagcattcaaagtatttgacagagatcaaaatggatacatatccgccactgagctgaggcacgtaatgatgaatttgggagagaggctgacagatgaagaggcagaacaaatgattagagaggcagatttggatggggatggtcaagttagctttgaagaattttcaaggattatgatgctcaaatgatgaatttgtaaatacaacttttattttattcctttctacaatgcctactgttgttgaaatgtttattgccagttacaacttccccttttgtgcgcgcctaaaaaaaaaaaaaaaaaaaa

SEQ ID NO: 2455 - protein, 148 aa, Glycine max
MAGALTDDQIAEFHEAFCLIDKDSDGFITVDELATIIRSLEGNPTKEEIQDMISEVDIDGNGSIDFEEFLNIMGRKMKETLAEELREAFKVFDRDQNGYISATELRHVMMNLGERLTDEEAEQMIREADLDGDGQVSFEEFSRIMMLK

SEQ ID NO: 2456 - DNA, 1029 bp, Glycine max
  CDS (13)..(885)
ctaccattcaatatggcacttcggttccccaagttggatttcaagtcttttccctttactgagaacctcaaccctgaattgctaggtcacgtagttgctcttgttgccgttggctttacggctgcttatatttactatcgcgcaaaacaccccaaaggaagcttggaccccaaaaatttcaaggaatttaaactcataaagaagactcagctcagccataacgttgcaagattcaaatttgcccttcctactccttcttcggtattgggccttcctgttggaaaaaacatacttgctaggggaaaagatagccaaggagaggaagttatgagatcatatactccaatcacgttggattcaaatattggctacttcgagttggttgtgaagatgtacccgaatggaaagatgtcccaccattttagacaaatgaaggaaggtgatttcttggccgtgaggggccccaagggacgtttcacttacaaacctggccaagttagggcatttggaatgattgctgggggctcaggcataactccaatgtttcagctcataagagccattcttgaaaaccctaaggacaaaacaaaggtgcaccttgtttacgccaatgtaacagtggacgacattctgttaaaggaagaactagataactttgcaaacaaatttgctcaaagatttgaagtctaccatgttcttaataagcctcctgaacaatggaatggtggcattggatttatatcgaaggagattattaaatcacattgtcctgaaccagcccaagatattcagatacttaggtgtggtccaccacctatgaataaagccatggctactcatcttgacgcacttggctacacatctaacatgcagttcgagttctaaccgcttcaatctaattcatttaattattgccacgtacaattcattgtttgtatcgtatgtgtcttaatcaaattttatcacatgattcatttcataataatttatgccagtgacaagagtgctactgtcaaaaaaaaaaaaaaa

SEQ ID NO: 2457 - protein, 290 aa, Glycine max
MALRFPKLDFKSFPFTENLNPELLGHVVALVAVGFTAAYIYYRAKHPKGSLDPKNFKEFKLIKKTQLSHNVARFKFALPTPSSVLGLPVGKNILARGKDSQGEEVMRSYTPITLDSNIGYFELVVKMYPNGKMSHHFRQMKEGDFLAVRGPKGRFTYKPGQVRAFGMIAGGSGITPMFQLIRAILENPKDKTKVHLVYANVTVDDILLKEELDNFANKFAQRFEVYHVLNKPPEQWNGGIGFISKEIIKSHCPEPAQDIQILRCGPPPMNKAMATHLDALGYTSNMQFEF

SEQ ID NO: 2458 - DNA, 781 bp, Glycine max
  CDS (8)..(484)
gaatcccatggcgagagtgaagcacacgccagcttctcgcaaatccgctaaaaagcaagcgccacgcgcatccacttccacgcagccgccaccacaatcccaatcgcctgcaactagagagaggaggagagctcaacaagtggagccgcagcaggagcctgaggctcagggaaggaagaagaggcgcaataggtcgggaactgtggcgcttcgtgagattcggcattttcagaggagttgtgagcttctcatcccggctgctccctttatcagatgtgtcaaacagattacaaatcaattctctacggaggtgtctcgttggacacctgaagctgtggtagcacttcaggaggcagctgaggaatatctggttcacttatttgaagatggaatgctctgtgcaattcatgcaaggcgtattactcttatgaaaaaggacattgagttggcccggaggcttggaggaataggaaggccttggtgagtggacgatactagtagaagaccattggttcttttgtttgtaaaagttcacacagtagggggatttcaatgaagggaggcattggtgcttctgtactccgcactctaattgcagtgattatttgatattaaatgttaggaactagacactaactaatgtatgccaatggttatatctctgtaggtgaaacaaccattatagaatggttgctactataactttaaattgatgagtgaggtaatagtgtaacattgtagcaatgaagtattctaagattattgtaaaaaaaaaaaaaaa

SEQ ID NO: 2459 - protein, 158 aa, Glycine max
MARVKHTPASRKSAKKQAPRASTSTQPPPQSQSPATRERRRAQQVEPQQEPEAQGRKKRRNRSGTVALREIRHFQRSCELLIPAAPFIRCVKQITNQFSTEVSRWTPEAVVALQEAAEEYLVHLFEDGMLCAIHARRITLMKKDIELARRLGGIGRPW

SEQ ID NO: 2460 - DNA, 729 bp, Glycine max
  CDS (44)..(430)
acggatccactcgtcgaactcggagggctcgagcttctcgccgatgttggtgaggatgtggcggagctcggagacggcgacgaagccggtggagtccttgtcgaggaccttgaaggcgtcgcggagttggcgatcgaagggttcgggtttaatgtgtttggccattagatcgaggaatcgggggaagtcgaagggggccgtgaggttctcttcagccacgatggctttgagttgggcctgcgtcgggttacctcccagagacctcatcaggatccccagctccgacggagcgatccgaccgtctccgtcagtgtcgaatagagagaaggcttcgcaagagagaagactttgtctgatcagtttgaggctaagcgtgcaaagaacaaggctagcagggaaaggaaaattgctcggagggaggagcgcttagcccaaggtcctgttgacaagtcatttacagcacccagtgcccctgctgccacagtgccccagtctgcccaagcgccaaagaaatcgaagaagtgagcagcatatcctggaattcaaaggaccttgaatctttaatagctctgcaaaatctttagtctgctaaagtagttgtgacgaatctctttttgttggtttagactttgtagtgtgcatgtataagaacttcatatcttgaatacttttaattatatattttgtttgtcggtgtttaaaaaaaaaaaaaaaaaaaaaaaaaaaaaa

SEQ ID NO: 2461 - protein, 128 aa, Glycine max
MLVRMWRSSETATKPVESLSRTLKASRSWRSKGSGLMCLAIRSRNRGKSKGAVRFSSATMALSWACVGLPPRDLIRIPSSDGAIRPSPSVSNREKASQERRLCLISLRLSVQRTRLAGKGKLLGGRSA

SEQ ID NO: 2462 - DNA, 581 bp, Glycine max
  CDS (15)..(431)
aaaaaaacctaccaatggctcccgcaaaggcagagaagaagcccgcggagaagaagccggcagagaaggccccagcggagaagaagccgaaggcggagaagaagatatcgaaggaaggaggaagcgagaagaagaagaagagaacaaagaagagcgttgagacctacaagatctacatcttcaaggtgttgaagcaagtgcaccccgacatcgggatctccagcaaggctatggggatcatgaacagtttcataaacgacatcttcgagaagctcgcccaggagtcatcgcgtctcgctaggtacaacaagaagcccaccattacttccagggagatccaaacggcggtgcgtttggtcctccctggggagttggccaagcatgccgtttctgaaggcaccaaggccgtcaccaaattcaccagctcttgattggtttcgtgtgtttatgtcagggttttctgttagcccgatttaattagggtttcttttcctttttatttctttgagtatgtagatgtaaaattaaagccttttatttttaaataatataattgccgttttgttaaaaaaaaaaaaaaa

SEQ ID NO: 2463 - protein, 138 aa, Glycine max
MAPAKAEKKPAEKKPAEKAPAEKKPKAEKKISKEGGSEKKKKRTKKSVETYKIYIFKVLKQVHPDIGISSKAMGIMNSFINDIFEKLAQESSRLARYNKKPTITSREIQTAVRLVLPGELAKHAVSEGTKAVTKFTSS

SEQ ID NO: 2464 - DNA, 594 bp, Glycine max
  CDS (57)..(467)
gcatttctactctccaaacactcgaattcgcattctcttcactctttccccaatccatggccaagggagagaagaaaccggcggagaagaagcccgcggagaaggctccggcggagaaaacaaaagccgagaagaagatcccaaaggaacccgcctcgggcgagaagaagaagaagaagagaaacaagaagagcgtggagacgtacaagatctacatattcaaggtgctgaagcaagtgcaccctgacatcgggatctccagcaaagccatggggatcatgaacagcttcatcaacgacatcttcgagaagctcgctcaggaatcttccaggctcgcgcgctacaacaagaagcctaccatcacctctcgcgagatccagaccgccgttcgtcttgttctccccggcgagctcgccaagcacgctgtctccgaaggcaccaaggctgtcacaaagttcactagctaatgagtgggtttctgagaatttagggtttattagatgtatattttcaatctttgcggtgtaacggaacggcatatttttgggagaaattgaattttatatttattttctttagaaaaaaaaaaaaaaa

SEQ ID NO: 2465 - protein, 136 aa, Glycine max
MAKGEKKPAEKKPAEKAPAEKTKAEKKIPKEPASGEKKKKKRNKKSVETYKIYIFKVLKQVHPDIGISSKAMGIMNSFINDIFEKLAQESSRLARYNKKPTITSREIQTAVRLVLPGELAKHAVSEGTKAVTKFTS

SEQ ID NO: 2466 - DNA, 895 bp, Glycine max
  CDS (183)..(695)
attttgcagaaaacaacagggaaagaaatttctgaccctaaccgcgtgtcgttaaaatcctcaaacgcagagtagacatagaattatcaaaaagcggggaaagggagattgaattcgatcctgggacgttaacgttgtttcaattcaattgtggtcctgtcggtgccctatctcagacgacgatgtcatctttatatagaggggaatccaggaggtacaacaataaaccaagaggacgtcataatttgacaacgcagaagaagcaagagattaaggaagcctttgagttatttgatactgatggctcaggtactattgatgccaaggagctgaatgttgctatgagggcccttggatttgagatgacagaagagcaaatcaatcaaatgatagcagatgtggacaaggatggaagtggagcaattgattatgacgaatttgagtacatgatgacagccaaaataggagaaagggacactaaagaggagctcatgaaagctttccatattattgatcatgataaaaatggaaagatatccgcattagacatcaagcgcattgcaaaagagctaggtcaaaatttcactgacagagagattcaggagatggttgaggaagcagaccaagataatgatcgagaggttagtgcggaggagttcatcacgatgatgaacagaactcgcttccatcactagtcttatctatatgggggcagttgatatctttgtttggctgcactactagtataggaaaattaaaaataaaataaaaaactgaagctatgtactctttgctattgtaaaagttgtatgaatgattcctatctatgtttgggtattgcctatgaataaaattgatgtgtatgtccatattttggtttaaaaaaaaaaaaaaa

SEQ ID NO: 2467 - protein, 170 aa, Glycine max
MSSLYRGESRRYNNKPRGRHNLTTQKKQEIKEAFELFDTDGSGTIDAKELNVAMRALGFEMTEEQINQMIADVDKDGSGAIDYDEFEYMMTAKIGERDTKEELMKAFHIIDHDKNGKISALDIKRIAKELGQNFTDREIQEMVEEADQDNDREVSAEEFITMMNRTRFHH

SEQ ID NO: 2468 - DNA, 727 bp, Glycine max
  CDS (80)..(490)
tttttcttgtaaaagaaacattagtttcgataatattattataaacttttaaaaaaaaaaatatcatctaaatacaacaatggccagaacaaagcaaactgcccgtaaatcaactggtggaaaagcacctcgcaaacaacttgctactaaagctgcacgaaaaagcgccccagctgctggtggtgtcaagaagccacatcgttatagaccaggtaccgtcgctcttagagaaattagacgttatcaaaagtccactgaattgttgattcgcaagcttccattccaacgcttggtacgtgaaatcgcacaagacttcaaaactgacttacgtttccaaagttcagctattggagctcttcaagaagctgccgaagcctacttggttgcattgttcgaagatacaaatttagcggccattcatgcaaaacgtgttacaattcaaccaaaagatatccaactcgctaggcgacttcgtggtgaacgatcttgaacgatcttactattttcttttaatggaggaacatttttatatcaattattatcaaatatcaattggttttttttatttcttaatgtaattgggtgggataatcggatattgctatatttttccttcataattttctatatgtacatgctcatgaatgtttcgtaataaatcttacgaacccgcacaattcgcacaattgttattaaatcaaacaaaaaaaaaaaaaaccgacacgca

SEQ ID NO: 2469 - protein, 136 aa, Glycine max
MARTKQTARKSTGGKAPRKQLATKAARKSAPAAGGVKKPHRYRPGTVALREIRRYQKSTELLIRKLPFQRLVREIAQDFKTDLRFQSSAIGALQEAAEAYLVALFEDTNLAAIHAKRVTIQPKDIQLARRLRGERS

SEQ ID NO: 2470 - DNA, 555 bp, Glycine max
  CDS (33)..(437)
ccctccatttcttcaaactaaatttcctgagaatggcgaaggctgcggagaaaaagcctgcggccgagaaggctccggcggagaaaaagccaaaggcggagaagaaggttccaaaggaaggcagcggcggagagaagaagaagaagaggtcgaagaagagcgtggaaacgtacaagatctacatattcaaggtgctgaagcaggtacatcctgacatcggcatttcgagcaaggccatggggatcatgaacagcttcatcaacgatatattcgagaagcttgcgcaggaagcagcgcgtctcgcgaggtataacaagaagccgaccattacatccagggagatccagaccgctgtcaggttggtgctgcccggggaacttgccaagcacgctgtttcggaaggaaccaaggctgttacaaagttcactagctcttagggttaggggttttttcgtttaggtattttttttgtaaagcttagtcgtagttagtggcttcatttggtattctatatgctaatgaaaatttttatttaaaaggaaaaaaaaaaaaaaa

SEQ ID NO: 2471 - protein, 134 aa, Glycine max
MAKAAEKKPAAEKAPAEKKPKAEKKVPKEGSGGEKKKKRSKKSVETYKIYIFKVLKQVHPDIGISSKAMGIMNSFINDIFEKLAQEAARLARYNKKPTITSREIQTAVRLVLPGELAKHAVSEGTKAVTKFTSS

SEQ ID NO: 2472 - DNA, 1901 bp, Glycine max
  CDS (476)..(1510)
cagccatcgccgttgacgtcaatcctctcgatcatttggccgagctccttgtcaggaatgaagatgccaagattctccagcgagtcgttcagctccttcttcgttattcttccgtcgccgttgcggtcgaacatctggaacacgcgcttcagctcgttggggtccattgttgttctcttgatgatgcgggcactggaagaagaagaagaagaagaagaaggtgcagtgatggttttggtttggaaccaagaaggggggaggaagggacgcaccttcttggggaccagacagaggaggaatgagtgtacgaggttgtaaagaaggaaaatcctatgcaaaatagttggcatggggatgggaatgggaaccgagaattaatcttagccacttgaacccccttcgtaagcctcttcacatcttcacttcttcttccgcactaatacgaaaccagagggaattcacaaaagaggttaccatgtcggacgatgagagagaggagaaggagttggatctcacttctccggaagttgtcaccaagtacaagagcgccgcggagattgttaacagggctttgcagttagttatttcagaatgtaaaccgaaggcaaagattgttgacctttgcgagaaaggggattcgtatattagagagcaaactggtagcatgtacaagaatgtgaagaggaagatagagagaggtgttgccttccctacatgtgtgtctgtgaacaacactgtctgtcacttctctcctcttgccagtgatgaaacagtgttggaagatggtgatatagtgaaaattgacatggcttgccatatagatgggttcattgctgctgtggcacacactcatgttcttcaggaggggccagttacaggacgggcagccgatgctcttgcagcagcaaacaccgctgccgaagtggccttgcggcttgtaaggcctggaaggaagaacaaggatgtaactgaagcaattcagaagattgccgcagcgtatgattgtaaaattgttgagggtgttcttagccaccaaatgaaacagtttgtgattgatgggaataaggttgtgctaagtgtatccaatccagatacaagggttgatgatgcagagtttgaggagaatgaagtttatgcaattgatatcgtagcaagtactggagatggcaagcctaagcttttggatgaaaagcagacaactatttataagagagctgttgacaagagctatcacttgaagatgaaagcatctaggttcattttcagtgaaataagccaaaagtttcccatcatgcccttctctgcaagggctttggaagagaaaagagctcgtttgggtttagtggaatgtgtgaatcatgagctcctgcaaccttatcctgttctgcatgaaaagcctggtgattatgttgcacatatcaaattcactgtcttgctaatgcccaaatggatcagatcgtgttacgtctcactcactccaggagttgcagcccaccaaaacaatagatgatcccgaaatcaaggcgtggctagcattgggcacaaagacaaagaagaaaggcggtggaaagaagaagaaaggtaagaagggggcagaagctgaaccaatggatgcaacaaatgatgctacaccccaagaacaagattgagagacaaaaaccctttgattttgcttttgatccctttcaattttggtacatttttcaccaagttgtatctgcttgattgtgaatttagtacagctttcggacatccaatgttaataggaatttgatttccttggctattgtacttgacctgaatgctgtactcctgattaagcataaatatgcttaattgttggaggggttttaatttataaacaaaagatatcaaatttaaaacccaaaaaaaaaaaaaaa

SEQ ID NO: 2473 - protein, 344 aa, Glycine max
MSDDEREEKELDLTSPEVVTKYKSAAEIVNRALQLVISECKPKAKIVDLCEKGDSYIREQTGSMYKNVKRKIERGVAFPTCVSVNNTVCHFSPLASDETVLEDGDIVKIDMACHIDGFIAAVAHTHVLQEGPVTGRAADALAAANTAAEVALRLVRPGRKNKDVTEAIQKIAAAYDCKIVEGVLSHQMKQFVIDGNKVVLSVSNPDTRVDDAEFEENEVYAIDIVASTGDGKPKLLDEKQTTIYKRAVDKSYHLKMKASRFIFSEISQKFPIMPFSARALEEKRARLGLVECVNHELLQPYPVLHEKPGDYVAHIKFTVLLMPKWIRSCYVSLTPGVAAHQNNR

SEQ ID NO: 2474 - DNA, 369 bp, Unknown
  Unidentified
  CDS (1)..(366)
atgtttgaggagaatctcaggagcaacatagtatgggctgccgactacatcagtgaaaacttgaccgggtttgaagaaaacggagaggccaaagtcaatggctttaagagagaaatcatcatctttgttgaccaagagaaagttttcaggcttgagatctctatgcatgaccccaagggaatggcaagcctcaacaacaccaacaataattttggtcaagtcagcggccttcctctcggtatagtggcccctctggatgatgcgatcaaacaactcacccccggaacaaagctccatgacaatatgaacatagagtggatcctcataagcacccttgatggtgacaatgttcttgtgaccagctaaatg

SEQ ID NO: 2475 - protein, 121 aa, Unknown
  Unidentified
MFEENLRSNIVWAADYISENLTGFEENGEAKVNGFKREIIIFVDQEKVFRLEISMHDPKGMASLNNTNNNFGQVSGLPLGIVAPLDDAIKQLTPGTKLHDNMNIEWILISTLDGDNVLVTS

SEQ ID NO: 2476 - DNA, 2059 bp, Glycine max
  CDS (199)..(1785)
ttctgatccattctgcatcaaactttggcctctgctcctcctctgtctctctctctctcttcacacttgaatgaatattctttcttgaattctcatctgggttcattccttttctcatgcgttgacaaaatcttcacactttcaaagttggtaactgataaaacttgaaaataaatcttccctttttgtgtcacaaccatgggttgttgtatgagtaaaaaagggtcagagccagaagaacacattgtttacagacatgttgctggtgctgggggtgctggtgtgtacaataatcacaagagccatgaacccccttctcatcaaccttacccattacctgagaagcatgccccttggaggcctccaccaagcccaaaacatgtttacaagcatgacacaatcactgggaagccatttgaggatgttaaacagcactacacacttgggaaggaattggggagaggccaattcggggtgacttatctctgcactgagaattcaactggttttcagtatgcctgcaagtccatttcaaagaggaagcttgtgagcagagacgacaaggaggacatgaagagggagattcaaatcatgcagcatttgagtggacaatccaacattgtggagttcaaaggtgcttttgaggataagcaatcagttcatgtggttatggagctgtgtgctggtggtgaactttttgacaggattattgccaagggccactacagtgaaagggctgctgcttcaatatgtaggcaggttgttaaggttgttaacacctgccattttatgggtgtcattcatagggatctcaagccagagaatttcttgctatctagtaaggatgacaagggacttctcaaggccacggattttggcttgtcagtcttcattgaagaaggaaaggtgtatcgagatatagttggcagtgcttactatgttgctccagaagttctacgtcgtagctatgggaaggaagcagatatatggagtgcaggagttatattgtatatcttacttagtggtgtacctccattttgggcagagacggaaaagggaatatttgatgtcatattgcaaggtcatattgattttgaaagtagtccatggccaagcatatcaaacagtgctaaggaccttgttcgcaaaatgcttataaaggatccaaagaaacgcattactgctgctcaggttctagagcacccatggcttaaagaaggtggaaatgcttctgacaagccaatagacagtgcagtgctttccagaatgaagcaattcagagcaatgaataaactaaaaaaactagccctcaaggtcattgctgaaaatctttctgaagaagagatccaaggcttgaaggcaatgttcacaaatatcgacactgacaatagtggtacaatcacatatgaggaactgagggcaggattgcaaagacttggctcaaagcttactgaagctgaagtgcagcagcttatggatgctgctgatgtagatggaaatggcacaattgactacatagaattcatcactgctacaatgcatagacacaggttagaaagagatgagcaccttcacaaggccttccaatattttgacaaagatggcagcgggtatatcacaagagatgaactagaaacagccatgaaggagtatggtatgggcaacgaggccacaatcagggaaattatatctgaagttgacacagataatgatggtagaatcaactatgatgaattttgtacaatgatgaggagtggaacccaacaacaaggcaagctattctaatgtctctagattgagtgtcctgcagccaagatggggtgcttgcttcagagaaaggcttccaaaagttaatattcatcttaggcatgtaaagcttgtagtttagatttgttttgagttatatgctccgcgtgatttgttgtcaactcttatttctctttatggtttccatttcactttgaattttattattgagtcctcatgtaatttattaggtacaccaataataaatgggcttgcctagggaaggtgattttccaaaaaaaaaaaaaaaaaa

SEQ ID NO: 2477 - protein, 528 aa, Glycine max
MGCCMSKKGSEPEEHIVYRHVAGAGGAGVYNNHKSHEPPSHQPYPLPEKHAPWRPPPSPKHVYKHDTITGKPFEDVKQHYTLGKELGRGQFGVTYLCTENSTGFQYACKSISKRKLVSRDDKEDMKREIQIMQHLSGQSNIVEFKGAFEDKQSVHVVMELCAGGELFDRIIAKGHYSERAAASICRQVVKVVNTCHFMGVIHRDLKPENFLLSSKDDKGLLKATDFGLSVFIEEGKVYRDIVGSAYYVAPEVLRRSYGKEADIWSAGVILYILLSGVPPFWAETEKGIFDVILQGHIDFESSPWPSISNSAKDLVRKMLIKDPKKRITAAQVLEHPWLKEGGNASDKPIDSAVLSRMKQFRAMNKLKKLALKVIAENLSEEEIQGLKAMFTNIDTDNSGTITYEELRAGLQRLGSKLTEAEVQQLMDAADVDGNGTIDYIEFITATMHRHRLERDEHLHKAFQYFDKDGSGYITRDELETAMKEYGMGNEATIREIISEVDTDNDGRINYDEFCTMMRSGTQQQGKLF

SEQ ID NO: 2478 - DNA, 816 bp, Glycine max
  CDS (1)..(816)
atggcgtccctcatcgaatctggctggcagtacttgatcacacatttcagtgactttcaactggcgtgtttgggaagtttctttctacatgaaggcgttttcttcttgtctggacttccctttatatggcttgagagggcagggtggatgagcaagtacaaaattcaggccaaaaataacacccctgcagctcaggagaaatgtattgttcgtctgttgctttaccattttggtgtcaatctacctgttatgattttttcatatcctgtcttcacatacatgggcatgcggagtagtcttcccctaccgtcctggaaagtagttctaattcaaataatcttttacttcattttggaggactttatattctactggggacatagaatactgcacacaaagtggttatacaagcatgtgcacagtgttcatcatgagtatgctacaccgtttggattgacttctgaatatgctcatcctgctgagatacttttccttgggtttgctaccatttttggtcctgccattactgggccccacttgataactctctggttatggatggttctgagagtcctagagacagttgaggctcattgtggttaccatttcccatggagtctttccaacttccttccattgtatggaggagctgatttccatgactatcatcaccgtttattgtacaccaagtctgggaactattcatcaacttttacttacatggaccggatatttgggactgatataggctacagaaagttgaaagcattgaagagcataggagttgaagacagtggcgagcaaaagaaacaataa

SEQ ID NO: 2479 - protein, 271 aa, Glycine max
MASLIESGWQYLITHFSDFQLACLGSFFLHEGVFFLSGLPFIWLERAGWMSKYKIQAKNNTPAAQEKCIVRLLLYHFGVNLPVMIFSYPVFTYMGMRSSLPLPSWKVVLIQIIFYFILEDFIFYWGHRILHTKWLYKHVHSVHHEYATPFGLTSEYAHPAEILFLGFATIFGPAITGPHLITLWLWMVLRVLETVEAHCGYHFPWSLSNFLPLYGGADFHDYHHRLLYTKSGNYSSTFTYMDRIFGTDIGYRKLKALKSIGVEDSGEQKKQ

SEQ ID NO: 2480 - DNA, 1081 bp, Helianthus annuus
  CDS (20)..(931)
cattccaccgatccccaaaatgctgccatacaccaccgtacacgccgccgaaaccgccatcggccgcccactcaccgccgcagaaaccctctggttcaactactccgccaccaaatccgactacttcctctactgccacaacattctcttcctcttcctcgtcttcactctcgttcccctcttctacgtcttcatcgaattcttcttccctaaatatgtaactgcttacaagattcaacccaaagtcaaatactcctttgttgataatattaattgctactttgatgtaatgcggacgtttgttcttgttgttggacctctgcagcttgtttcctatccttccattcaaatgattggcattagaacaagcttgcccttaccgtctctaacggagatcgtttcgcaattgttcgtttattttctcgtggaggacttcacaaattactggattcatcgatttctgcacggaaaatgggggtatgaaaatattcacaaggttcaccatgaatacacaacacctataggatatgccgcaccatacgctcactgggccgaggtcttaattcttgggataccgtcttttctggggcccgccatggttccgggccatatgattacattctggctgtggattgctttgaggcagattgaagctattgagactcacagtgggtatgatctcccctggacattaacaaagtttattcctttctatggtggagctgattaccatgattatcatcattatgttggaggacaaagccagagtaattttgcatctgccttcacttattgtgactacatatatggaacagacaagggttaccgttaccagaagaaagtcctgcgacagctgagagatggcttgaaaagtgatggaaaacctaatgatggatcacatgcttctggacaaggtattaaatctgactagccatgaatacaaaatgccccttgtttattgtgctattttacaatcacttgtgcaccttaatcctttttgttttgtagcccttgtaagttgtaaccaaactatgtttatatatcccagattcgcggttatgatgttaaaaaaaaaaaaaaa

SEQ ID NO: 2481 - protein, 303 aa, Helianthus annuus
MLPYTTVHAAETAIGRPLTAAETLWFNYSATKSDYFLYCHNILFLFLVFTLVPLFYVFIEFFFPKYVTAYKIQPKVKYSFVDNINCYFDVMRTFVLVVGPLQLVSYPSIQMIGIRTSLPLPSLTEIVSQLFVYFLVEDFTNYWIHRFLHGKWGYENIHKVHHEYTTPIGYAAPYAHWAEVLILGIPSFLGPAMVPGHMITFWLWIALRQIEAIETHSGYDLPWTLTKFIPFYGGADYHDYHHYVGGQSQSNFASAFTYCDYIYGTDKGYRYQKKVLRQLRDGLKSDGKPNDGSHASGQGIKSD

SEQ ID NO: 2482 - protein, 789 aa, Helianthus annuus
MAPKAAEKKPAEKKPAAEKAPAEKKPKAGKKLPKEAGAGAADKKKKRSKKSVETYKIYIFKVLKQVHPDIGISSKAMGIMNSFINDIFEKLAQESSRLARYNKKPTITSREIQTAVRLVLPGELAKHAVSEGTKAVTKFTSSHASINGLECLNECDSSHELIANTHSANNSAATCCCCAATTTCAAACCCTAACCCTAACTTTTTCAACCTCCAAATTCTCAACAAATTCAATGGCACCAAAGGCAGAGAAGAAGCCCGCCGAGAAGAAACCGGCAGAGGAGAAGAAAACACCGGCGGCCGAGAAAGCTCCGGCTGAGAAGAAGCCAAAGGCCGGAAAGAAGCTCCCGAAGGAAGCCGGAGCCGGTGCAACCGACAAGAAGAAGAAGAGGACGAAGAAGAGCGTTGAGACGTACAAGATCTACATCTTCAAGGTGTTGAAGCAGGTGCATCCAGACATCGGGATCTCGAGCAAAGCTATGGGGATCATGAACAGTTTTATCAACGATATTTTTGAGAAACTTGCTCAGGAGAGTTCCAGGCTTGCGAGGTACAACAAGAAGCCAACCATCACTTCGAGGGAGATTCAGACCGCCGTGAGACTCGTTCTTCCCGGTGAATTGGCTAAGCACGCCGTGTCTGAAGGAACCAAGGCCGTAACCAAGTTTACAAGCTCTTGAATGGTTTAGGTTTTGTTATGGTGTTGATGTATGGTAGGGTTAGATCTTCATGTCTCGTGATGGTTTACCGTGTTAGTTGCGTTTATGACTTTTTTTTTCTTTTTTAATTTG

SEQ ID NO: 2483 - DNA, 618 bp, Helianthus annuus
  CDS (61)..(507)
aatccccaatttcaaaccctaaccctaactttttcaacctccaaattctcaacaaattcaatggcaccaaaggcagagaagaagcccgccgagaagaaaccggcagaggagaagaaaacaccggcggccgagaaagctccggctgagaagaagccaaaggccggaaagaagctcccgaaggaagccggagccggtgcaaccgacaagaagaagaagaggacgaagaagagcgttgagacgtacaagatctacatcttcaaggtgttgaagcaggtgcatccagacatcgggatctcgagcaaagctatggggatcatgaacagttttatcaacgatatttttgagaaacttgctcaggagagttccaggcttgcgaggtacaacaagaagccaaccatcacttcgagggagattcagaccgccgtgagactcgttcttcccggtgaattggctaagcacgccgtgtctgaaggaaccaaggccgtaaccaagtttacaagctcttgaatggtttaggttttgttatggtgttgatgtatggtagggttagatcttcatgtctcgtgatggtttaccgtgttagttgcgtttatgactttttttttcttttttaatttg

SEQ ID NO: 2484 - protein, 148 aa, Helianthus annuus
MAPKAEKKPAEKKPAEEKKTPAAEKAPAEKKPKAGKKLPKEAGAGATDKKKKRTKKSVETYKIYIFKVLKQVHPDIGISSKAMGIMNSFINDIFEKLAQESSRLARYNKKPTITSREIQTAVRLVLPGELAKHAVSEGTKAVTKFTSS

SEQ ID NO: 2485 - DNA, 844 bp, Helianthus annuus
  CDS (56)..(562)
cgcttctacgcgcagacgctattttttcaacaatctccagatttagatccacaaaatgggagtttacggagaacaatcccggagagaaaagcccagaggtcgtaatcatgggttaactcagcagaaacggcaagagatcaaagaagcatttgagctattcgataccgatggatctgggaccattgatgccaaggagttgaatgttgccatgagggcccttggttttgaaatgacagaggagcaaattaatcaaatgatcgctgatgtggacaaagatggcagcggtgcaattgatttcgatgaatttgtatacatgatgactgccaaaatcggtgaacgggacagcaaacaagagcttacaaaagcattccagatcatcgaccaagataaaaatgggaagatatcaattcaagatatcaagaatattgctaaggaacttggtgaacatttcactgatgcagagatcaatgagatggtggaggaagcagatcgtgaccgtgatggagaagttagtgtggaggaattcatgagaatgatgaagaggacttcatatggatactaggtgacttttatccactgcctattcctttgatcctacggggtgtatagtccacttatatcttgatggtaaataataaattgttggtttttatgttattattttcgtaccatccatttgagtttgttatccgagctatgaacgggagatgttagagataatagcgccgcatatgtttatgttgattgatggtttgttttggtaattacacttggtaatatcttgatgtggtaatcgtagcttttctatttggtgaaaaaaaaaaaaaagaaaaaaaaaaaaaaa

SEQ ID NO: 2486 - protein, 168 aa, Helianthus annuus
MGVYGEQSRREKPRGRNHGLTQQKRQEIKEAFELFDTDGSGTIDAKELNVAMRALGFEMTEEQINQMIADVDKDGSGAIDFDEFVYMMTAKIGERDSKQELTKAFQIIDQDKNGKISIQDIKNIAKELGEHFTDAEINEMVEEADRDRDGEVSVEEFMRMMKRTSYGY

SEQ ID NO: 2487 - DNA, 799 bp, Helianthus annuus
  CDS (51)..(494)
gagtttcacacacagaaaacgagtcaccgattcaccgattcaacacagcaatggggaaagatacagccaccgatcaaacctccgccatgaaagaagcctttacactcttcgacaccgacggggacggcaagatcgccccatcggagctcggaatcctcatgcgttcactcggcggaaaccctacgcaagcgcagttgaaatccatcatctccgaagaaaaactcacatctccgtttgactttaaacgtttcactgagctcatgaacaagcacctgaaaccggagccctttgatcgacagcttcgtgacgccttcaaggttattgataaggacggaaccggatacgtcgtcgttgcggatcttaaacatattttgacgagtattggggagaagcttgagcctgcggagtttgatgagtggatccgagagattgatgttggatccgatgggaagattaagtatgaggagtttattgccagaatggttgccaaatgatttgttggaggtgctgatgagctgccggcctgggtcccacttcttccgcttctttagttgcaatgttttcttgtggcgttttttttttcactccagaattggagtattctgcttgctagtttttgataaattgtactcaaggtttgctcaagaaacctgaagttcctgtgctttgtttttttctcctttcaaaaaggctgcttgtgaataggtttatttcaaacgttgtagtgtaaaacatttggtttctgtcaaaaaaaaaaaaaaaaaaaaaaaaaaaaaaaaaaaaaaaaaaaaaaaaaaaa

SEQ ID NO: 2488 - protein, 147 aa, Helianthus annuus
MGKDTATDQTSAMKEAFTLFDTDGDGKIAPSELGILMRSLGGNPTQAQLKSIISEEKLTSPFDFKRFTELMNKHLKPEPFDRQLRDAFKVIDKDGTGYVVVADLKHILTSIGEKLEPAEFDEWIREIDVGSDGKIKYEEFIARMVAK

SEQ ID NO: 2489 - DNA, 710 bp, Hordeum vulgare
  CDS (30)..(482)
ccagcgaatccaccccaccgtcggcatccatggcgcccaaggccgagaagaagccggcggcgaagaagccggtggaggaggagcccgcggcggagaaggccgagaagacgaccgccgggaagaagcccaaggccgagaagcggctgccggcgggcaagtcggcggccaaggagggcggcaaggccaagaagaaggccaagaagagcgtggagacgtacaagatctacatcttcatggtgctgaaacaggtgcaccccgacatcggcatctcctccaaggccatgtccatcatgaactccttcatcaacgacatcttcgagaagctcgccggcgaggccgccaagctcgcccgctacaacaagaagcccaccatcacgtcccgggagatccagacctccgtccgcctcgtcctccccggcgagctcgccaagcacgccgtctccgagggcaccaaggccgtcaccaagttcacctcttcctaggctgttcctgctcctgtgttccgtagtcttaggtgccccgtctgtgtgtgtttgtggccgtgctatcgtgcaagaatcgcatcgccatgtttctggatctcgagaaatagtaacggtgcttgcctcatgttcagttcatggatcctgttgctttgttctggtcttgaattctggactttgaatcaaagtgctaattctcttttccccctgaccaaaaaaaaaaaaaaa

SEQ ID NO: 2490 - protein, 150 aa, Hordeum vulgare
MAPKAEKKPAAKKPVEEEPAAEKAEKTTAGKKPKAEKRLPAGKSAAKEGGKAKKKAKKSVETYKIYIFMVLKQVHPDIGISSKAMSIMNSFINDIFEKLAGEAAKLARYNKKPTITSREIQTSVRLVLPGELAKHAVSEGTKAVTKFTSS

SEQ ID NO: 2491 - DNA, 846 bp, Hordeum vulgare
  CDS (72)..(521)
gccacgccatcgtcgccccatcaacgcagctcgcataacatttgcatcgtcccctccctccgttttgccccatggcggaccagctcagcgaggagcagattggcgagttcaaggaggccttcagcctcttcgacaaggacggcgacggtagcatcaccaccaaggagcttggaaccgtgatgcgctcccttggccagaaccctaccgaggcggagctgcaggacatgatcaacgaggtggatgcggacggcaacggcaccattgacttcccagagttcctgaacctgatggcccgcaagatgaaggacaccgactcggaggaggagctcaaggaggcgttccgtgtctttgacaaggaccagaacggcttcatctccgcggcggagctccgccaggtgatgaccaacctcggggagaagctgtcggaggaggaggtggaggagatggtccgggaggcggacgtggacggcgacggccagatcaactacgacgagttcgtcaaggtcatgatggccaagtgaggaacaaccaccaccctctgaaataacccctttctattttccgccgaataacgagccgtctggcactcctacttcataacaatttctactttattaccgtgcgcgctgctggtactgacacttgttggctaggtgtagtcactgaggggagaagggccagatattttttttttccttcttgtcttggccacggacttctcctgtactcgctggattcggtgttttcctaatttccttggttgggttgcttcttggttcatgtttgtcgttcggtttgttgttgattgaaagttacactgattttgccaccaaaaaaaaaaaaaaa

SEQ ID NO: 2492 - protein, 149 aa, Hordeum vulgare
MADQLSEEQIGEFKEAFSLFDKDGDGSITTKELGTVMRSLGQNPTEAELQDMINEVDADGNGTIDFPEFLNLMARKMKDTDSEEELKEAFRVFDKDQNGFISAAELRQVMTNLGEKLSEEEVEEMVREADVDGDGQINYDEFVKVMMAK

SEQ ID NO: 2493 - DNA, 915 bp, Hordeum vulgare
  CDS (271)..(777)
gtcgctctcacgattgggggcgacgctaatcgcggtgccaccacttccaatccactctcgcggtcgccgtgccgagctgttcatgctctgtcctcaactactccaagatttgttctttagacgccgtgcagcttcggtgcgcagggacggcggagagctcgggacttggttcagagcttaggatctttgtcgattcaggttttgattggtttcgtctgctcggctgactgggttgtaaatttggaactggaaggaagcatttgagcacagatgggccagtgttgcagcagagctacgtccccggattctgtccaaggaggagccaatggctatggctattctcaccaaccaaaacaggctcaaacacctcctagttacaacaatgctcagccaccaccacaagctgaggtaaggtacacaccgccagcgatgaaccctcctgtagtcccacctgtggtagccccctcaaagcccacgccggacacgattctcggcaagcagtacgaggatgtgcgctctgtctactcccttggcaaggaacttggtagggggcagttcggggtgacgtacctttgcactgagattagcactggcaggcagtatgcttgcaagtccatatccaagcgcaagctcgtgagtaaggccgacaaggaggatatccgcagggagatccagatcatgcagcacctatctggacagccaaacatagtggagttctgtggttccttcttttttcactgcacggatgagaagttctctttggccttgttgagatgattgtgtatatcttatggagttttgctcgtgcatgttgttcctctagtcctactttcttctgtaagttggtttttgcaagtacatctaataaaagagtattttgcacgtcaaatgtgcatatttaaaaaaaaaaaaaaa

SEQ ID NO: 2494 - protein, 168 aa, Hordeum vulgare
MGQCCSRATSPDSVQGGANGYGYSHQPKQAQTPPSYNNAQPPPQAEVRYTPPAMNPPVVPPVVAPSKPTPDTILGKQYEDVRSVYSLGKELGRGQFGVTYLCTEISTGRQYACKSISKRKLVSKADKEDIRREIQIMQHLSGQPNIVEFCGSFFFHCTDEKFSLALLR

SEQ ID NO: 2495 - DNA, 975 bp, Hordeum vulgare
  CDS (150)..(701)
ccggcggctaccagctcgtcctgcaccgccgcccgctccagcgctacaggctccacacaagggcagaggaggaggacaagaacctcgtcaccctccccgcggtcgtgcgtggggtgctcctgcagcagctcgtgcaggccatcgtcgccatgatcctcttcatgattacttcagatagttcaactgttctagtccaaccatctatggtggttcagtcgtttcagttcttggttgcaatgctggtgatggacacatggcaatattttgtgcaccgctatatgcatcagaacaaattcctctaccgacatatccactcacaacatcaccggctgatcgttccttacgctatcggggctctctacaaccacccactggaggggctccttctggacactttaggtggtgctatgtccttcttggtctccggtatgacgccgaggactgccgtattcttcttctgttttgctgtgctcaagacggtcgatgatcactgcggactttggttgccatataacatcttccagcacctgttccaaaataacacggcataccatgatatccaccaccagctccaaggcacgaagtacaattactctcagccgttcttctccatatgggacagaatcctaggaacccacatggcctacgacctagtgagccgcaaggaagggggtctcgaagccaggccattgcgagactagcttggaactcatcgaagtgtatagaactccggcgactcagcgggatatacgatgctgtttcactccccatcgtgtgattggtagctcacaggagccatctaacttcttgtaagatgatgaaggtattccagtactcccggtttcttgtgcaaagccgccgtttaattacatcgctgtgcagatagtgtattcgaaaatcagtcacgcttctgtatgtatccaatttatttatgtagttgaatctttgggcatgactatgaaaaaaaaaaaaaaa

SEQ ID NO: 2496 - protein, 183 aa, Hordeum vulgare
MILFMITSDSSTVLVQPSMVVQSFQFLVAMLVMDTWQYFVHRYMHQNKFLYRHIHSQHHRLIVPYAIGALYNHPLEGLLLDTLGGAMSFLVSGMTPRTAVFFFCFAVLKTVDDHCGLWLPYNIFQHLFQNNTAYHDIHHQLQGTKYNYSQPFFSIWDRILGTHMAYDLVSRKEGGLEARPLRD

SEQ ID NO: 2497 - DNA, 637 bp, Hordeum vulgare
  CDS (64)..(474)
agccacacacacaccagagcccatctccccctcgcagcagcagcagccggagcatcatcatccatggcccccaaggcagccgagaagaagccggtggagaagaccccggcgggcaagaagcccaaggcggagaagaaggtgccggcgtccaaggagggcggcggcgacaagaagggcaagaagaagtccaagaagagcgtggagacgtacaagatctacatcttcaaggtgctcaagcaggtgcaccccgacatcggcatctcctccaaggccatgtccatcatgaactccttcatcaacgacatctttgagaagctcgccggcgagtcggccaagctggcgcggtacaacaagaagcccaccatcacgtcccgggagatccagacctccgtgcgcctcgtcctccctggcgagctcgccaagcacgccgtctccgagggcaccaaggccgtcaccaagttcacctctgcctaagtagtttcttcccggtgcatcgatgttgctgtgtaattgttggttcagactccgttgtcatgtaacctttgtttgtgggatcaaatcttatgatctggagaaatagcaacagccctttcagttcttgccaaaaaaaaaaaaaaaaaaaaaaaaaaaaaaaaaa

SEQ ID NO: 2498 - protein, 136 aa, Hordeum vulgare
MAPKAAEKKPVEKTPAGKKPKAEKKVPASKEGGGDKKGKKKSKKSVETYKIYIFKVLKQVHPDIGISSKAMSIMNSFINDIFEKLAGESAKLARYNKKPTITSREIQTSVRLVLPGELAKHAVSEGTKAVTKFTSA

SEQ ID NO: 2499 - DNA, 880 bp, Hordeum vulgare
  CDS (82)..(651)
cgcctgttaacctcgcacaagacaagatcatcacccaaccccaagtttccgtccgctcctccatcccgcagcgacaacaccatgggcaagatgcggtcactcttctcacggagccggagcggcaacggcggcagccggcggtccacctcctcctccaggtcgtcagcgccgccgtcgcccgcgcgcggggcctcgagggaggacgagatggagcgcgtgttccgcaagttcgacgccaacggcgacggcaggatctcgcgggcggagctggcggcgctcttcgagagcgtgggccacgcggtcaccgacgacgaggtggcgcgcatgatggaggaggccgacgcagacggcgacggctacatcagcctcgccgagttcgccgccatcaacgccgcgcccgacgcagccgtcgaggaggacctccgccacgccttccgcgtcttcgacgccgacggcaacggcgtcatctcccccgccgagctcgcgcgcgtgctgcgggggctcggcgaggccgccaccgtcgcgcagtgccgccgcatgatcgagggcgtcgaccgcaacggcgacggcctcgtctccttcgacgagttcaagctcatgatggccaacggcgccgggttcgccatcgcccagggcaacgtccgcgcctgaagaccgtccgtctgttcctacattcttttgcgagaccgtgtaaatacgcccgaccacccaccgccaaatacttacttactactactagctttatacatagtcgcagatcacaccaacattatcggtgtgcgattaattttgatgtatatatgttatcggaattgctgtatcgacgctgaagaataatcctctaatgtcgaattttatgtgcaccaaaaaaaaaaaaaaa

SEQ ID NO: 2500 - protein, 189 aa, Hordeum vulgare
MGKMRSLFSRSRSGNGGSRRSTSSSRSSAPPSPARGASREDEMERVFRKFDANGDGRISRAELAALFESVGHAVTDDEVARMMEEADADGDGYISLAEFAAINAAPDAAVEEDLRHAFRVFDADGNGVISPAELARVLRGLGEAATVAQCRRMIEGVDRNGDGLVSFDEFKLMMANGAGFAIAQGNVRA

SEQ ID NO: 2501 - DNA, 1385 bp, Linum usitatissimum
  CDS (355)..(1119)
aagagatccaacagatacaagaaatgaaaaatccaaggtgactgaagacttacctcaggagtgatgaatacgattactgaaatgtcgtttactcacccagaagcttcttcatcgattcggcttcggcttccagcttcctgatcgtgattttgtgctcattcttcaacctctgctgctcctggaccgagctcgttcctcctcttcaaatccgtctggtacatctttcagttcgtcgtagtctaccggcggccttggtagaagaaggtcacgactttctggcagcctcgtggactccgaggtcttcatgctaacagtcagagattcataagcgttgatcatattggctaagctacaatgagttccaatgcaacaatggataaagttaatgggagatccgttgggttgctggggaggtatgctaaaaagatgaacatggaagaaggtgcaggtcacagggctggtttctttgctctcgtgtctgtgctcaagtgctgttacgaactgggagtgaagtatatctcgatctatgcctttagcattgataacttcaaaaggcggcctgatgaagtgaagactataatggatttgattctagagaagactgaaggtttgcttgaggaaggaagtattgcagaccagtacggcgtcagggtgtactttgttggtaacttgaagctcctgaatgagcgcatgagaaatgcagctgaggaggttatgaaggctactgcacataacaccaagtgtgtgctcttgatatgcatagcctacacctcctacgacgagattgtgcattctgtgcgggagtcttgtaaagacaaactggtggagattgaatcaacatcttgtgaaaatggtgggaacgaaggtgattattcagcgataaaagtggttgacatagagaaacacatgtacatgggagtggctcctgatccggacatcctgctgagaagctctggggagatgcggttgagcaactacttgctgtggcaaaccacttactgcacattgtattctccaaaagcactgtggccagagattggtctatggcatgttgtatggggaatactgaaattccaacgcacctatgcttactttgagaagaagaagaagatagcttaggattatggtatcagttttgcatctaatcctgcaggctagtacaatatataatccactggtttatcagagatttgtttgtaacttgagatcaaacccttttcttataatatatgtaagtttaaaagttccacttacatgtagcaacatccttgttcctatgctcattcttaataaaggtgggaaagaaagattggctgaaaaaaaaaaaaaaaaaaaaaaaaaaaaaaaaaaaaaaaaaaaaaaaaaaaaaaaaaaaaaaaaaaaaa

SEQ ID NO: 2502 - protein, 254 aa, Linum usitatissimum
MSSNATMDKVNGRSVGLLGRYAKKMNMEEGAGHRAGFFALVSVLKCCYELGVKYISIYAFSIDNFKRRPDEVKTIMDLILEKTEGLLEEGSIADQYGVRVYFVGNLKLLNERMRNAAEEVMKATAHNTKCVLLICIAYTSYDEIVHSVRESCKDKLVEIESTSCENGGNEGDYSAIKVVDIEKHMYMGVAPDPDILLRSSGEMRLSNYLLWQTTYCTLYSPKALWPEIGLWHVVWGILKFQRTYAYFEKKKKIA

SEQ ID NO: 2503 - DNA, 853 bp, Linum usitatissimum
  CDS (76)..(525)
ccccatcccccgaattattccctccgtcgcctttccgctgatttcatcttctctcctccttctcccaccacagccatggccgaccagctcaccgacgaccagatctctgagttcaaggaggccttcagcctattcgacaaggacggcgatggttgcatcaccaccaaggagctgggaacagttatgcgttcattgggacagaacccaaccgaagctgagcttcaagacatgatcaacgaggttgatgctgacggtaacgggacgattgatttcccggagttcctgaacctgatggcccgtaaaatgaaggacacagactcagaagaggagctgaaggaggcattcagagtgttcgacaaggaccagaacggcttcatatctgctgcagagctccgccatgtgatgacaaatctcggcgagaagctgacagatgaggaggttgacgagatgatccgtgaggccgatgtcgatggtgatggccagatcaactacgaagagttcgtcaaagtcatgatggccaagtgaggacaactccaaactctataaaaaaaaaccctaattgaatttttttaaaaaatattcgaggcggacagtgggatgatcacaggagcagataagttggatctaggcgaaatctgtatttgtttcgttacgctttggtgttgagttttgctccttgctggtctctacttgtttgctctcctgggtctaagtaagtagcagctttgttttgtattgtttgctcctaagttcctttcactcttcttcttcttcttcttcttcgttgctaccttgaaccgctagaacaatttgagtataatttcatgtttcttttgctaaaaaaaaaaaaaaa

SEQ ID NO: 2504 - protein, 149 aa, Linum usitatissimum
MADQLTDDQISEFKEAFSLFDKDGDGCITTKELGTVMRSLGQNPTEAELQDMINEVDADGNGTIDFPEFLNLMARKMKDTDSEEELKEAFRVFDKDQNGFISAAELRHVMTNLGEKLTDEEVDEMIREADVDGDGQINYEEFVKVMMAK

SEQ ID NO: 2505 - DNA, 444 bp, Unknown
  Unidentified
  CDS (1)..(441)
atgggaaaggttagcgacgaccaggttcactcgatgaaagaggccttcgtcctcttcgacaccgacggcgacggcaaaatcgcgccctccgagctcgggatcctcatgcgatccctcggcggcaaccctacccaggcccagctcaaagccatcgtcaccgaggagaagctaaccgctccgttcgatttccagaggttcctcgatatcatggggaagcacatgaaaaccgagcccttcgatcgccagctccgcgacgctttcaaggtcctcgataaggactccgccgggttcgtctcagtacaggatctgcgccacatcttgacgagtatcggggagaagctggagcctgcagagttcgacgagtggatccgggaggtggatgtcggatcggatgggaagatccggtacgaggatttcattgctaggatggttgccaagtgaaaa

SEQ ID NO: 2506 - protein, 146 aa, Unknown
  Unidentified
MGKVSDDQVHSMKEAFVLFDTDGDGKIAPSELGILMRSLGGNPTQAQLKAIVTEEKLTAPFDFQRFLDIMGKHMKTEPFDRQLRDAFKVLDKDSAGFVSVQDLRHILTSIGEKLEPAEFDEWIREVDVGSDGKIRYEDFIARMVAK

SEQ ID NO: 2507 - DNA, 1349 bp, Linum usitatissimum
  CDS (71)..(916)
acccaacccattttccctgcattggaatccacctctctgcaaatccgaccagctccaatttctgtatccaatggacgccttgcaatcccgcagaaccgaagtgattagcatcgccgttgccctagtcgccatcggcgccggcactgcctactatttctacctcaccaggaaacccaaaccagctaaagcctgcctggacccagaaaacttcaaggagtttaagcttgttaagcgtacagaactcagccacaatgttgccaagtttcggttcgagcttccaactcttgactcggttctaggattgccaattggacagcacatgagttgcagagggaaagacggcgtaggagaagatgtcgttaagccatatactccgacaactttggactctgatgttggctactttgatttagtgataaagatgtatccacaagggcgaatgtctcaccatttccgagaattgcatgaaggtgactacttgtctgtgaaggggcccaaggggcgcttcaaatatcaacccaaccaagtgagagcattcgggatgcttgccggaggcaccggcatcactccaatgttccaagttaccagagccatattggagaacccaaaagacaaaaccaacgttaatcttatctatgccaatgtcacatccgacgacatcctattgaaggaagagctagataatctcgtcgcaagtttccctgaccgcttcaaggtgtactacgttctaaatcagccaccggaaggatggaatggtggtgtcgggtttgtaacaaaagaaatgattgagacaaactgcccctcaccagcaccagatgttcagatattgaggtgcgggccaccaccgatgaacaaggctatggctggtcacctagaagctctgggatacactccccaaatgcagttccagttttgagagagctgctgctgcaagctagagatgaacttcattagttatatcaaattccacatgtttctttccttaggtttccgagttacagcattcatgtaagcccatagagggaggatcagtgacctcatatacccctgcttctgaagaatcgtagctacattctgcttcagaagttaactcgaaaagggaacgccaaaccgtaagcatttgatgattatatcatttgagaactagaagtttctcctgtcttatccttcggaggcattggtttgttaaacctctggagtctgcattttttattttcatagtaggaaattatgctgaattttgttggtttggtttttggctattacaaacattgaacgaaaacccaaaataattgaatcggctggtaatagttcttattttttccaaaaaaaaaaaaaaaaaaaaaaaa

SEQ ID NO: 2508 - protein, 281 aa, Linum usitatissimum
MDALQSRRTEVISIAVALVAIGAGTAYYFYLTRKPKPAKACLDPENFKEFKLVKRTELSHNVAKFRFELPTLDSVLGLPIGQHMSCRGKDGVGEDVVKPYTPTTLDSDVGYFDLVIKMYPQGRMSHHFRELHEGDYLSVKGPKGRFKYQPNQVRAFGMLAGGTGITPMFQVTRAILENPKDKTNVNLIYANVTSDDILLKEELDNLVASFPDRFKVYYVLNQPPEGWNGGVGFVTKEMIETNCPSPAPDVQILRCGPPPMNKAMAGHLEALGYTPQMQFQF

SEQ ID NO: 2509 - DNA, 633 bp, Linum usitatissimum
  CDS (41)..(481)
attcccaacaccagttgctactcagttctcaatcaacatcatggcgcccaaggcagcagagaagaagccggcagagaagaagccagcagaggagaagaaagccgagaaggctccggcggagaagaagcccagagccgagaagaaactcccgaaagaaggaggcgccgctgccgccgacaagaagaagaagcgcaacaagaagaacgtcgagacctacaagatctacatcttcaaggtcctgaagcaagtccaccctgacatcggcatctccagcaaagccatgggaatcatgaacagcttcatcaacgacatattcgagaagctcgctgcagagtcctccaggctcgcaaggtacaacaagaagccaaccataacttccagggaaatccagaccgccgtccgcctagtcctccccggcgagctcgccaaacacgccgtctctgaaggaaccaaggccgtcaccaagttcaccagctcgtaaaaaactcctaccgtacaagatctagggtttactgtttctgaagtattttgtgtagtttgatggaactgcagaagtagtttgtacaagtttccattgttaaatctggaaaattgggttctatatatgcggatttctcgaaaaaaaaaaaaaaa

SEQ ID NO: 2510 - protein, 146 aa, Linum usitatissimum
MAPKAAEKKPAEKKPAEEKKAEKAPAEKKPRAEKKLPKEGGAAAADKKKKRNKKNVETYKIYIFKVLKQVHPDIGISSKAMGIMNSFINDIFEKLAAESSRLARYNKKPTITSREIQTAVRLVLPGELAKHAVSEGTKAVTKFTSS

SEQ ID NO: 2511 - DNA, 724 bp, Linum usitatissimum
  CDS (73)..(516)
atcttcatttctctgtcaattccttgaaaccgatcagagacctcgccggagaaaggaaacgagcccgacgatatggggaaggatctaagcgacgaccaggttcactcgatgaaggaggccttcgtcctcttcgacacggacggcgacggcaagatcgcgccctccgagctggggatcttaatgcggtccctcggcgggaacccgacccaggcccagctgaaatcgatcgtcgccgaggagaagctgaccgcccccttcgatttccagaggtttctcgagctgatggggaagcacatgaagccggagccgttcgatcgccagctccgcgacgcgttcaaggtgctggacaaggattcgaccgggttcgtctccgtgcaggatctgcggcatatcttgaccagcatcggggagaagctggagcctgcggagttcgacgaatggatccgggaggtggatgttgggtcggatgggaagatccggtatgaggatttcattgctaggatggtggctaagtgatttggtggattttgctgctgttcatcaaatgttatgatttggcttgctttgttttttgtttgttgcgatgtttgttcgtctggtttggaattagggtttgtttcgtttggatgatgatgacgattgacaatgctgattttgattttgtgtttgttcatcttaattctgtatctaatgcattaacatctttgcgaaaaaaaaaaaaaaa

SEQ ID NO: 2512 - protein, 147 aa, Linum usitatissimum
MGKDLSDDQVHSMKEAFVLFDTDGDGKIAPSELGILMRSLGGNPTQAQLKSIVAEEKLTAPFDFQRFLELMGKHMKPEPFDRQLRDAFKVLDKDSTGFVSVQDLRHILTSIGEKLEPAEFDEWIREVDVGSDGKIRYEDFIARMVAK

SEQ ID NO: 2513 - DNA, 713 bp, Linum usitatissimum
  CDS (60)..(506)
attcccaattcccaatctcagctccatcttacaaccaaccaaaccctaaattcccagaaatggcgcccaaagcagagaagaagccagcggagaagaagcccgcagaggagaagaaaaccgtcgccgagaaagctcccgccgagaagaaacccaaggccgggaagaagctccccaaagaagccggcgcagctgctgcaggcgacaagaagaagaagaagtcaaagaagagcgtcgagacctacaagatctacatcttcaaggttctcaagcaggtccatcccgatatcggtatctccagcaaggctatggggatcatgaactccttcatcaacgacattttcgagaaactagctcaggagtcctccagactcgctcgctacaacaagaagccgacgattacctccagggagatccagactgccgtccgattggtgcttccgggagaattggccaaacatgccgtgtctgaagggaccaaggctgttaccaagttcaccagctcttgaatttggagtaattctgtatctgttgctagggttagatgtttagatttgtaggttgtgactgtggaatctggtgtttgtttgtgttctcttaaaagggtttgcttgtaattcgatgatttgatctgctcgatcaagattgttgttgttctatggtaacaagtgaaatacataattggttagtttgtgtgctcgaaaaaaaaaaaaaaa

SEQ ID NO: 2514 - protein, 148 aa, Linum usitatissimum
MAPKAEKKPAEKKPAEEKKTVAEKAPAEKKPKAGKKLPKEAGAAAAGDKKKKKSKKSVETYKIYIFKVLKQVHPDIGISSKAMGIMNSFINDIFEKLAQESSRLARYNKKPTITSREIQTAVRLVLPGELAKHAVSEGTKAVTKFTSS

SEQ ID NO: 2515 - DNA, 249 bp, Unknown
  Unidentified
  CDS (1)..(246)
atgcagaacgaagagggtaacaacgtggatctctacatcccgaggaaatgctccgccactaacaggctgattacctcgaaggaccacgcctccgtccagatcaatgttggacatttggacgctaacggccgttacaccggccagttcaccacctttgccctctgcggattcgtccgtgctcagggtgatggagacagcggccttgacaggctgtggcagaagaagaaagccgaactcaggcaatgatag

SEQ ID NO: 2516 - protein, 81 aa, Unknown
  Unidentified
MQNEEGNNVDLYIPRKCSATNRLITSKDHASVQINVGHLDANGRYTGQFTTFALCGFVRAQGDGDSGLDRLWQKKKAELRQ

SEQ ID NO: 2517 - DNA, 473 bp, Linum usitatissimum
  CDS (76)..(321)
tcatcgctctcggcactcgcaaactcggcgaattctgagctctgaaagttctcgttcccggattaatcagccaagatgcagaacgaagaaggtcagaacgtggatctctacatcccgaggaaatgctcggccaccaacaggctgattacctccaaggatcacgcttccgtccagattaacgtcggtcatttggatgctaacggccgttacactggccagttcactacttttgctctctgtggattcgtccgtgctcagggtgatggagacagtggactcgacaggctgtggcaaaagaaaaaggcagagcttcgccagtgatctgtttatctgcagcaagaatccaaccatgttttagtcgtcggaccagcgagatggtgtttgtagtatgaacacacttgagattcaacttttttgttatggattttatgttcagaatcaatcgttttcctcctaacaaaaaaaaaaaaaaa

SEQ ID NO: 2518 - protein, 81 aa, Linum usitatissimum
MQNEEGQNVDLYIPRKCSATNRLITSKDHASVQINVGHLDANGRYTGQFTTFALCGFVRAQGDGDSGLDRLWQKKKAELRQ

SEQ ID NO: 2519 - DNA, 908 bp, Triticum aestivum
  CDS (8)..(697)
catcaccatgcgccggaccgtcaagagcgcgccccagagcatctggtacggccctgaccgtcccaagtacctgggcccgttctccgagcagaccccgtcgtacctgaccggcgagttccccggcgactacggctgggacaccgccgggctgtctgccgaccccgagacgttcgccaaaaaccgggagctggaggtgatccactcgcggtgggcgatgctcggcgccctggggtgcgtgttcccggagattctgtccaagaacggcatcaagttcggcgaggccgtgtggttcaaggccggcgcccagatcttctccgagggcggcctcgactacctgggcaaccccaacctggtgcacgcgcagagcattctcgccatctgggcggttcaggtggtgctcatgggcttcatcgagggttaccgcgttggtggcggccccctcggcgagggcctcgacatcatctacccgggcggcgccttcgacccgcttggcctcgccgacgaccccgacaccgccgccgagctcaaggtcaaggagctcaagaacggccgcctcgccatgttctccatgttcggcttcttcgtgcaggccatcgtcaccgggaaggggccagttgagaacctcttcgaccacgtcgccgacccagtcaacaacaacgcgtgggccttcgccaccaacttcgcccccggaagctaaatgtgtttagccatccgtccgtccgtccgtccatcggacgagatatgcatgtgtacttgtacgtcgtggatcaacgtgtagctgcacgtactttgtgtgtttatttgtaccatgatcgagcgagcgagaggtcctctcgctagctgtgcgcaatgtaaattaattaagcacgaggtgtgcacgagggaatggatggaagaatcgtgtgtca

SEQ ID NO: 2520 - protein, 229 aa, Triticum aestivum
MRRTVKSAPQSIWYGPDRPKYLGPFSEQTPSYLTGEFPGDYGWDTAGLSADPETFAKNRELEVIHSRWAMLGALGCVFPEILSKNGIKFGEAVWFKAGAQIFSEGGLDYLGNPNLVHAQSILAIWAVQVVLMGFIEGYRVGGGPLGEGLDIIYPGGAFDPLGLADDPDTAAELKVKELKNGRLAMFSMFGFFVQAIVTGKGPVENLFDHVADPVNNNAWAFATNFAPGS

SEQ ID NO: 2521 - DNA, 483 bp, Triticum aestivum
  CDS (34)..(435)
tcctcgtcggtgagcttctcgccgaggctgatcatgacgtggcgcagctcggccttggagatgtggccgtcgtggtccttgtcgaacaccctgaaggcttcccggagctcctcctcggggtcggcggcgtccgcgtcggcgtcggccttgcgggacatgagcgccaggaactcggcgaactcgatggtgccgttgccgtcggcgtccacgtcgcgcaccatgtcgcgcagctcctcgggcgtcggggactggcccagggagcggatgaccgtggacagctcctccgccgtgatgcagccgtcgccgtccttgtcgaagaaggcgaaggcctcccggaactcgctcatctgctccgagctgatcgctgctgcggcaccggcgccggccatcctgctacctcttttcgatgcgggcacagagatgacgatggagtgatcgatgtgggtgggtaggaggaatgaaggcgaggagaccgacacgcag

SEQ ID NO: 2522 - protein, 133 aa, Triticum aestivum
MTWRSSALEMWPSWSLSNTLKASRSSSSGSAASASASALRDMSARNSANSMVPLPSASTSRTMSRSSSGVGDWPRERMTVDSSSAVMQPSPSLSKKAKASRNSLICSELIAAAAPAPAILLPLFDAGTEMTME

SEQ ID NO: 2523 - DNA, 571 bp, Triticum aestivum
  CDS (1)..(411)
atggcgcccaaggccgagaagaagcccgccgcggagaagaagccggtggagacggagaagaagcccaaggccgagaagcgcgtgcccggcaaggacggcggcgccgacaagaagaagaagaaggccaagaagagcgtcgagacctacaagatctacatcttcaaggtgctcaagcaggtccaccctgacatcggcatctcctccaaggccatgtccatcatgaactccttcatcaacgacatcttcgagaagctcgccggcgagtcggccaagctcgcgcgctacaacaagaagcccaccgtcacctcccgggagatccagaccgccgtgcgcctcgtccttcccggcgagctcgccaagcatgccgtctccgagggcaccaaggccgtcaccaagtttacctcctcttagattgcctgccgcccaccgagtctcttgtcagtttggtttcgtttgttcgtgtgtcaacaatcgcagggggttagacccccctatacaaacattgtaaaatgagtcgtattttctaaatcaatgaattatcgtggtcccttgttacaaaaaaaaaaaaaaa

SEQ ID NO: 2524 - protein, 136 aa, Triticum aestivum
MAPKAEKKPAAEKKPVETEKKPKAEKRVPGKDGGADKKKKKAKKSVETYKIYIFKVLKQVHPDIGISSKAMSIMNSFINDIFEKLAGESAKLARYNKKPTVTSREIQTAVRLVLPGELAKHAVSEGTKAVTKFTSS

SEQ ID NO: 2525 - DNA, 720 bp, Triticum aestivum
  CDS (58)..(564)
cgcgggcggcgaccctattcgtcggcggctcacctttcgcgacgctcctctctagccatgtctacaatgaaggggcagacaaggagggagaggcctagaactcgtcctcatggcctcacgcaacagaagaggcaggaaataaaggaagcgtttgatctttttgacaccgataactcaggaaccatcgatgccaaggagctgaatgttgcgatgagagccttgggatttgagatgacagaagagcaaatcaatcagatgattgctgatgttgacaaagatggcagtggatcgatagattatgaggagtttgagcacatgatgactgccaagattggggagagggatactaaagaagagcttacaaaagcgttccgcatcattgaccaagataaaaatgggaagatttcagatgttgatattcagcgtattgccaaggagttgggtgaaaacttcactctccaagagatccaagaaatggttcaagaggcagatcaaaatggtgatggtgagatagattttggcgagtttgccaggatgatgaagaagaccagttatggctactaggcggggatggcatctgcgagtgtctgatctttgtgtagttgttcaataaccaccgcatgtttgcctaatgtacctactgctgtatctactctgagcgatcccgttgatctctgtgtgcttgttattggaacatgtttctgcaaaaaaaaaaaaaaa

SEQ ID NO: 2526 - protein, 168 aa, Triticum aestivum
MSTMKGQTRRERPRTRPHGLTQQKRQEIKEAFDLFDTDNSGTIDAKELNVAMRALGFEMTEEQINQMIADVDKDGSGSIDYEEFEHMMTAKIGERDTKEELTKAFRIIDQDKNGKISDVDIQRIAKELGENFTLQEIQEMVQEADQNGDGEIDFGEFARMMKKTSYGY

SEQ ID NO: 2527 - DNA, 1343 bp, Triticum aestivum
  CDS (26)..(1216)
ggtgcggcgcgccgacgtggaggacatgcgccgggaggtgaccatcctgcagcacctcagcggccagcccaacatcgccgagttcaggggcgccttcgaggacgccgagagcgtgcacctcgtcatggagttctgctccggcggggagctcttcgaccgcatcaccgccaaggggagctactccgagcgccaggccgccgccgtctgcagggacatcctcaccgtcgtccacgtctgccacttcatgggggtcctgcaccgggacctcaagcccgagaacttcctgctcgccagccccgccgacgacgccccgctcaaggccatcgacttcggcctctccgtcttcatcgaagaaggaaaggtgtacaaggacattgtgggaagtgcatactatgtggcgccagaagtactgcatcggaactatgggagagaaattgatgtctggagcgctggagtgatcttgtacattctcttatgcggttcaccgcctttctgggcagaaactgagaagggcatatttgacgcaatactggtgggtcagcttgatttcagtagcagcccctggccgacgatatctgagagtgcaaaggatcttatcagacaaatgttaaacagagatcccaaaaggcgtatcacggcagcacaggccctagaacatccatggctcaaagaaggcggtgcatccgacaggcctatcgacagcgcagtcctatcaagaatgaagcaattcaaggcgatgaacaagctaaaacaactggcgcttaaggtaattgcagagaacctgtcacctgaggaaatcaagggcctgaaacagatgttcaataacatggacacagacaagagtgggactatcacagttgaagaactcaagattggtttaacaaagttagggtcaaagatcactgaggcagaggttcagaagcttatggaagcagttgatgtagacaagagtggcagcatagattacacagaattcctgactgctatgatgaataaacataagctggaaaaggaggaggatctgctccatgcatttcaacactttgacaaagataacagcgggtacatatcaagagaagaactggaacaagccatgacagagtatggaatgggtgatgaagcaaatattaaagcagtattggacgaagttgacaaagacagagatgggaatatcgactacgaagagtttgtggaaatgatgaggaagggaaaatagacctgaggaaacttgggcctcttgatgaacagagttgtagagagatgttttaatatataatgcaaacataagcaaactgtaaagtactataactctggaacaagttgattgcaaaaaaaaaaaaaaa

SEQ ID NO: 2528 - protein, 396 aa, Triticum aestivum
MRREVTILQHLSGQPNIAEFRGAFEDAESVHLVMEFCSGGELFDRITAKGSYSERQAAAVCRDILTVVHVCHFMGVLHRDLKPENFLLASPADDAPLKAIDFGLSVFIEEGKVYKDIVGSAYYVAPEVLHRNYGREIDVWSAGVILYILLCGSPPFWAETEKGIFDAILVGQLDFSSSPWPTISESAKDLIRQMLNRDPKRRITAAQALEHPWLKEGGASDRPIDSAVLSRMKQFKAMNKLKQLALKVIAENLSPEEIKGLKQMFNNMDTDKSGTITVEELKIGLTKLGSKITEAEVQKLMEAVDVDKSGSIDYTEFLTAMMNKHKLEKEEDLLHAFQHFDKDNSGYISREELEQAMTEYGMGDEANIKAVLDEVDKDRDGNIDYEEFVEMMRKGK

SEQ ID NO: 2529 - DNA, 710 bp, Triticum aestivum
  CDS (50)..(547)
gaccaatccatagccatctccgtgcaagcatcgaagaagaggtagcaggatggccggcgccggtgccgcagcagcgatcagctcggagcagatgagcgagttccgggaggccttcgccttcttcgacaaggacggcgacggctgcatcacggcggaggagctgtccacggtcatccgctccctgggccagtccccgacgcccgaggagctgcgggacatggtgcgcgacgtggacgccgacggcaacggcaccatcgagttcgccgagttcctggcgctcatgtcccgcaaggccgacgccgacgcggacgccgccgaccccgaggaggagctccgggaggccttcagggtgttcgacaaggaccacgacggccacatctccaaggccgagctgcgccacgtcatgatcagcctcggcgagaagctcaccgacgaggaggtggacgggatgatccaggaggccgacctcgacggcgacggcctcgtcaacttcgacgagttcgtcaggatgatgatgctctccgacgccgaccagcagcagcattgagagtctgtccgagatagatatatagtccgtccgtccgtccgtcgtccatttcttcggtggacggacacatcttgtcggggaggaagttagctaagctagccatgcatgtctggatgaatggatcttgaattcttgattgattggttacaaaaaaaaaaaaaaa

SEQ ID NO: 2530 - protein, 165 aa, Triticum aestivum
MAGAGAAAAISSEQMSEFREAFAFFDKDGDGCITAEELSTVIRSLGQSPTPEELRDMVRDVDADGNGTIEFAEFLALMSRKADADADAADPEEELREAFRVFDKDHDGHISKAELRHVMISLGEKLTDEEVDGMIQEADLDGDGLVNFDEFVRMMMLSDADQQQH

SEQ ID NO: 2531 - DNA, 784 bp, Triticum aestivum
  CDS (58)..(564)
caacccacccacccacatcgaccatctccgtgcaagcatcgaagaagaggtagcaggatggccggcgccggtgcagcagcgatcagttcggagcagatgagcgagttccgggaggccttcgccttcttcgacaaggacggcgacggctgcatcacggcggaggagctgtccacggtcatccgctccctgggccagtccccgacgcccgaggagctgcgcgacatggtgcgcgacgtggacgccgacggcaacggcaccatcgagttcgccgagttcctggcgctcatgtcccgcaaggccgacgccgacgccgacgccgccgacccagaggaggagctccgggaggccttcagggtgttcgacaaggaccacgacggccacatctccaaggccgagctgcgccacgtcatgatcagcctcggcgagaagctcaccgacgacgaggtggacgggatgatccaggaggccgacctcgacggcgacggcctcgtcaacttcgacgagttcgtcaggatgatgatgctctcagacgccgaccagcagcagcagcagcagcagcattgagagtttgtccctgccgagatactagatatacagtccgtccgtccgtcgtccatttctcggtggacggacggacacctctctaatccgcccggggataagttagctaagctagccatgcatgtgtggatgaatggatcttgaattcttgattgattggttacaactgttattggaaaagctagagattataaataactaattgaagaaaaaaaaaaaaaaa

SEQ ID NO: 2532 - protein, 168 aa, Triticum aestivum
MAGAGAAAISSEQMSEFREAFAFFDKDGDGCITAEELSTVIRSLGQSPTPEELRDMVRDVDADGNGTIEFAEFLALMSRKADADADAADPEEELREAFRVFDKDHDGHISKAELRHVMISLGEKLTDDEVDGMIQEADLDGDGLVNFDEFVRMMMLSDADQQQQQQQH

SEQ ID NO: 2533 - DNA, 698 bp, Triticum aestivum
  CDS (46)..(456)
caatcccccaaatctcctcaacctccccggcgcatctccgacgacatggcccgcaccaagcagacggcgaggaagtccaccggcggcaaggcgccgaggaagcagctggccaccaaggccgcccgcaagtccgccccggccaccggcggcgtcaagaagccccaccgcttccgccccggcaccgtcgcgctccgcgagatccgcaagtaccagaagagcaccgagctgctcatccgcaagctccccttccagcgcctcgtccgcgagatcgcccaggacttcaagaccgacctccgcttccagtcctccgccgtctccgccctgcaggaggccgccgagtcctacctcgtcgggctgttcgaggacaccaacctgtgcgccatccacgccaagcgcgtcaccatcatgcccaaggacatccagctcgcccgccgcatccgtggcgagagggcctaggccgcaatctgcaatcaatatgccgtctgtccttgttaggttgagttcgtccgtggaagtgtgtgtgctattagggtttacgaatgtgtctgtgttgttcttgtcatggtggatgcgttatgcctaatctgatggtaccgtcttgttgccatcagcacattttcagtggaaatgaaaatgttggcttgctgttctcaaaaaaaaaaaaaaaaaaaaaaaaaaaaaaaaaaaaaaaaaaaaaa

SEQ ID NO: 2534 - protein, 136 aa, Triticum aestivum
MARTKQTARKSTGGKAPRKQLATKAARKSAPATGGVKKPHRFRPGTVALREIRKYQKSTELLIRKLPFQRLVREIAQDFKTDLRFQSSAVSALQEAAESYLVGLFEDTNLCAIHAKRVTIMPKDIQLARRIRGERA

SEQ ID NO: 2535 - DNA, 1155 bp, Triticum aestivum
  CDS (102)..(941)
cgcaccatcaccgcagcccgaggcacccaaccaaccaacccccgccccgagcgtcgcgagggagacagacagacagacagccgcgcgggaggaagggggccatggatttcctgcaggggcggagcgtcgagaccatggtggccgtcgccgtcgcggtcgtcgccgtcgccgtgggcgccgcactcctcctccgccggtccaagaggcccaagggctgcttggatcctgagaacttcaggaagtttaaacttgtggaaaagacacaaataagccataatgttgccaaattccgatttgctcttccaacccctacctctgtgttaggccttccaattggtcaacatatcagttgcagaggtcaagatgctaccggtgaagaagtaatcaagccttacacacctactacattggattctgatcttggaaattttcagcttgttataaagatgtaccctcaaggaagaatgtcgcatcacttccgtgaaatgaaagttggtgattatatgtctgtaaagggacctaagggtcgtttcaagtaccaagtaggacaagtgagagctttcggaatgctggctggtggatctggcatcactccgatgttccaagttgcaagggcaattctcgagaaccctaatgacaaaacgaaggttcatctagtctatgcaaatgtcacacctgaagacattcttctgaaggaagagctggacagcctggccgaagaatatcctgaccgcttcaagatcttctacgtgttgaatcagcctcctgaagtctggaatggtggtgttggctttgtgtcccaggacatgattaagactcactgtccagcacctgctgaggatatccagatcttgagatgcggccctcctccgatgaacaaggcgatggctgcacaccttgaggagctcggatacacaaaggagatgcagttccaattctaagtttccggagctccaaaataaggcccccaggccctacattatccagcatggagactgtccgacccctcttgatatcttccagaagcgatgcatttttagtcttgtagtacctcctttttcgcggccaaatgttagctgcatagctaggcagaggcccacatttcgctcgactccacctctattattggtttgaaaaatgaaaaaaaaaaaaaaa

SEQ ID NO: 2536 - protein, 279 aa, Triticum aestivum
MDFLQGRSVETMVAVAVAVVAVAVGAALLLRRSKRPKGCLDPENFRKFKLVEKTQISHNVAKFRFALPTPTSVLGLPIGQHISCRGQDATGEEVIKPYTPTTLDSDLGNFQLVIKMYPQGRMSHHFREMKVGDYMSVKGPKGRFKYQVGQVRAFGMLAGGSGITPMFQVARAILENPNDKTKVHLVYANVTPEDILLKEELDSLAEEYPDRFKIFYVLNQPPEVWNGGVGFVSQDMIKTHCPAPAEDIQILRCGPPPMNKAMAAHLEELGYTKEMQFQF

SEQ ID NO: 2537 - DNA, 576 bp, Unknown
  Unidentified
  CDS (1)..(573)
atgggcaagatcaagatgccggccctgttccgccgccgctcctcctccaagtcgcgctccgcgtcgccgccgcctactccccaggaggaagagggcacccggccggcgtctggcgcggggtccccggcgcggtcggcggaggaggagatggagcgggtgttccgcaagttcgacgccaacggcgacggccggatctcgcggccggagctggcggccctgttcgagagcctgggccacgcggccacggaggacgagctgacccgcatgatggcggaggccgacgcggacggcgacggcttcatcagcctggaggagttcgcggcgctgaacgccacggcggccggcgacgacgaggaggacctgcggctggccttcaaggtgttcgacgcggacggcagcggcgacatctcggccgcggagctggctcgcgtgctccacggccttggcgagaaggcgacagtgcagcagtgccggcgcatgatcgagggcgtggacaagaacggcgacgggctcatctccttcgacgagttcaaggtcatgatggcctccggcttggccgccaagatggcctgatcc

SEQ ID NO: 2538 - protein, 190 aa, Unknown
  Unidentified
MGKIKMPALFRRRSSSKSRSASPPPTPQEEEGTRPASGAGSPARSAEEEMERVFRKFDANGDGRISRPELAALFESLGHAATEDELTRMMAEADADGDGFISLEEFAALNATAAGDDEEDLRLAFKVFDADGSGDISAAELARVLHGLGEKATVQQCRRMIEGVDKNGDGLISFDEFKVMMASGLAAKMA

SEQ ID NO: 2539 - DNA, 915 bp, Triticum aestivum
  CDS (223)..(684)
caaggcagggacgaacttcataggattaagcttcatgaactcgggatcagactgctcgcccttgaggaggttcaccgccctgtactcataatcgatacctttgaggttgagtgcgatgcggacgcggtgggagcaggagctgcgccagtacgagtacagaatcggccttgccgccggcgcctccgccgaagccatacgcagctcgctctggttcgggcagccatggcccccaaggcagacaagaagcccgcggccgagaacaaggtcgagaaggcggcggagaagacccccgcgggcaagaagcccaaggccgagaagcggctgccggcgggcaagacggcgtccaaggaggccggcggcgaggggaagacccggggccggaagaagggcagcaaggcgaagaagggcgtggagacgtacaagatctacatcttcaaggtgctgaagcaggtgcaccccgacatcggcatctcctccaaggccatgtccatcatgaactccttcatcaacgacatcttcgagaagctcgccggcgagtccgccaagctcgcccgctacaacaagaagcccaccatcacctcccgggagatccagacctccgtccgcctcgtcctccccggcgagctcgccaagcacgccgtctccgagggcaccaaggctgtcaccaagttcacctcctcctagattgactatgcgtcgcttgttgtgatagatgtagttggctgctgttagtcgctgactctgcttatgtatctgcaagtagtggtagtagtagtcgtctgtgtgctggctgattgccaacgtttcgttggctagttggttgttagaactgaagttgctgatccatctgaatgttaatgttgccagtcgtattattactgaatttcatgggaatcgccgaaaaaaaaaaaaaaa

SEQ ID NO: 2540 - protein, 153 aa, Triticum aestivum
MAPKADKKPAAENKVEKAAEKTPAGKKPKAEKRLPAGKTASKEAGGEGKTRGRKKGSKAKKGVETYKIYIFKVLKQVHPDIGISSKAMSIMNSFINDIFEKLAGESAKLARYNKKPTITSREIQTSVRLVLPGELAKHAVSEGTKAVTKFTSS

SEQ ID NO: 2541 - DNA, 516 bp, Triticum aestivum
  CDS (19)..(495)
gatccactcgtcgaactcatggggctcgagcttctcgccgatggaggtgaggacgtggcggaggtccgcgacggagacggtgcccgacgcgtccttgtcgaggacgcggaaggcgtcgcggagcgggcggtcgaagggctccgggcggaggtgggcgcgcatgagttcgaggaatcgcttgaagtcgaagggcgccgtgagcttctcctgggcggtgatgtcgcggagctgcgcctgcgtcgggttcccacccagggagcgcatgaggacgccgagctccgagggggcgatgcggccgtcgccgtcagtgtcgaagagggagaaggcctcccgcatcgacgcaatctgctcctcgctcagctccttgccggccatcgccgccggtggggtcggatcggggatttgagatctcgcgacgcggggcggtgcggtgcggtgcgtgcgtctcagggaggaagtccgcgtttgattgatttggtggtgaggggcatgtgagaggggagaaaaaaaaaaaag

SEQ ID NO: 2542 - protein, 158 aa, Triticum aestivum
MGLELLADGGEDVAEVRDGDGARRVLVEDAEGVAERAVEGLRAEVGAHEFEESLEVEGRRELLLGGDVAELRLRRVPTQGAHEDAELRGGDAAVAVSVEEGEGLPHRRNLLLAQLLAGHRRRWGRIGDLRSRDAGRCGAVRASQGGSPRLIDLVVRGM

SEQ ID NO: 2543 - DNA, 2534 bp, Triticum aestivum
  CDS (57)..(2246)
cgcgtcggcacccaccccacgcgcccgcgcgtcctcctcgccgccgcgccgccgccatgtcgggctgggacgagggcgccgtcttctacagcgaccaggcgcagttcccgcagggcgaccccgccgccgccgacatcacccgccactccgccctccgcaagttcaaggagttcctccgcggcttcaccagccccaccggcgacttcccctaccgcgagagcctcgtgcacaaccgcgaccatgtcaccgtcgccatcgaggacctcgacgccttcgacgccgagctcgccgacaggatccgcaaggcgcccgcggattacctgccgctgttcgagacggccgggtccgaggttctcgccagcctacggtcgaaggtcgccggcgagaccggggaaatggaggagcccgtcaccggcgatgtgcagatcttcctgtcctccaaggagaattgcgtctccatgagatctattggggccgattacatgtcgaaactggtgaagattgcgggtattgcaattgccgcatcgagggtgaaggccaaggccactcatgtgacactgctctgcaagaactgcaggagtgtgaggactgtgccgtgcaggccaggcctcggtggggctattgtcccacgatcctgtgatcatgttcctcagcctggagaagagccttgccccctggacccctggattgcagtccctgacaagagcaagtatgtggatctacagactctcaaattgcaggaaaatcccgaggatgttccaaccggtgagcttccaaggaatgtgctgctttctgtagatagacatcttgtccagacaattgttccagggactagattaactgtgattggcatctacagtgtattccaagcatccgggacgaacaaccagaaaggtgctgttggagttaaacagccctacattagaatcgttgggttagagcagtctcgagatgacaacacaaatggcccctcacatttcacactcgatgaggaaatggaattcaaagaatttgcacagaggccagatgcatatgccaagatttgttcaatgataggcccttcaatttatggtcatggtgacgtcaggaaagctattgcttgccttctgtttgggggatcaaaaaagaggctaccagatggtgtccgtttgagaggggacattcatgccttgcttttgggtgatccatccacagcaaaatcccagtttctgaagtttgtagagaagacagcaccaattgcagtctatacctctggaaaaggttcatctgcagctggtcttacagcatctgtaacccgggatagtaactcgcgtgaattttatttggaaggaggagccatggtattggctgatggtggagtagtttgtattgatgaatttgacaaaatgaggcctgaagacagagttgcaattcatgaagccatggagcagcagaccatatctattgccaaggctggcattacaacagtactcaattcaaggacctcagttcttgcagctgccaatccaatttcagggcgttatgatgaccttaagactgcacaagataacatagacctgcagacaacaatcctttctcgatttgatctaatcttcatagttaaagatgtcagaatgtatgagcaagataagcgaatagcaaaccacatcattaaggtgcatgccagtggtgctgcaactcaagtaaacaggaatgcagataccaatgaaggagagaattggctgaaaaggtatgttgagtactgccgcaacacatgtagaccacgactctcagaaaaagcagcagagatgctgcagaacaaatatgttgagatcagacagaaaatgagacaacaatcccatgagacaggaagagctgcagccatacccatcactgtgaggcagcttgaagctattatacggttgagcgaatctcttgcaaagatgagattgactagtgtggctacgccagagcacatcgaagaggcatttagactgttcaacgtctccaccgtggacgccgcaagatccggaatcaacgagcatctgaacttgtcaccggagatcgcaaacgaaatcaagcaagcggaagcgcagataaagagaaggatgggaatcgggagccacatatccgaacgtcggctgctcgatgaactgaaccggatggggttgaatgaatccattgtgagaagagcccttgtgatcatgcaccagagggacgaagtggagtacaagagggagcgccatgtgattgtccgcaaggcttgagctgaaccgaaatgatggaactaccatggaaaccatctggccatctgatgtgtgtgtataagtagtgctgacactgcagcctgtttcctgaggaaatttgttgcgtcgttgaaattgagttgtagttgtactactttaagctgtagctgtagccctaaattatcttgtgtcgaactgaagatgtaccacagtaagttcattcatgattgcaacatttgggcgttctgcagctgagcagagttaatgcctaggaaacgagagagagagagaccgacacgcagcggccgc

SEQ ID NO: 2544 - protein, 729 aa, Triticum aestivum
MSGWDEGAVFYSDQAQFPQGDPAAADITRHSALRKFKEFLRGFTSPTGDFPYRESLVHNRDHVTVAIEDLDAFDAELADRIRKAPADYLPLFETAGSEVLASLRSKVAGETGEMEEPVTGDVQIFLSSKENCVSMRSIGADYMSKLVKIAGIAIAASRVKAKATHVTLLCKNCRSVRTVPCRPGLGGAIVPRSCDHVPQPGEEPCPLDPWIAVPDKSKYVDLQTLKLQENPEDVPTGELPRNVLLSVDRHLVQTIVPGTRLTVIGIYSVFQASGTNNQKGAVGVKQPYIRIVGLEQSRDDNTNGPSHFTLDEEMEFKEFAQRPDAYAKICSMIGPSIYGHGDVRKAIACLLFGGSKKRLPDGVRLRGDIHALLLGDPSTAKSQFLKFVEKTAPIAVYTSGKGSSAAGLTASVTRDSNSREFYLEGGAMVLADGGVVCIDEFDKMRPEDRVAIHEAMEQQTISIAKAGITTVLNSRTSVLAAANPISGRYDDLKTAQDNIDLQTTILSRFDLIFIVKDVRMYEQDKRIANHIIKVHASGAATQVNRNADTNEGENWLKRYVEYCRNTCRPRLSEKAAEMLQNKYVEIRQKMRQQSHETGRAAAIPITVRQLEAIIRLSESLAKMRLTSVATPEHIEEAFRLFNVSTVDAARSGINEHLNLSPEIANEIKQAEAQIKRRMGIGSHISERRLLDELNRMGLNESIVRRALVIMHQRDEVEYKRERHVIVRKA

SEQ ID NO: 2545 - DNA, 1726 bp, Triticum aestivum
  CDS (97)..(1368)
cgggacaccaaggagcagctcgcctgcaagtccatctccaagcgcaagctgcgcacccccgtggacgtggaggacgtgcggcgggaggtggccatcatgcgccacctgccccggagccacagcatcgtggccctgcgggaggcgtgcgaggacgagggcgccgtgcacctcgtcatggagctctgcgagggcggcgagctcttcgaccgcatcgtcgccaggggccactacacggagcgcgccgccgccaacgtcacccgcaccatcgtcgaggtcgtgcagctctgccaccgccacggcgtcatccaccgggacctcaagcccgagaacttcctcttcgccaacaagaaggagaactcgccgctcaaggccatcgatttcggcctctccattttcttcaagcccggtgaaaagttttcagaaattgttggaagcccttattacatggctcccgaagtattgaagagaaactatggaccggaaatagacatatggagtgccggggttatcttatatattttactatgtggagttcctccattttgggccgagaccgaacaaggggtagcacaagctattcttcgtggaaatatcgattttaagcgggaaccctggcctaatgtatcggaaaatgctaaagatttggttcgacgtatgttggaaccagatccaaagctcaggttaactgcaaagcaggttcttgagcaccattggcttcaaaatgctaagaaagctccaaatgttcctcttggcgatattgtcaagtcaaggcttaagcaattttcgagaatgaatagattcaaaagaagagctctaagagtcatcgctgatcatttgtcagctgaggaagttgaggatataaaggagatgtttaaggcaatggatactgacaatgatggcattgtctcttgtgaagaattgaagagtgggatagcaaaatttggctctcaccttgcggaatcagaagtgcagatgcttattgaagctgtggatacaaacggtaaaggagtactagattatgccgaatttctagctgtctctcttcatctgcaaaggatggcaaatgacgagcaccttcggcgggccttcttatttttcgacaaggatggcaatggctacatcgagccggacgagcttcgagaggctctgaaggatgacggagcagctgatagcatggaagttgtgaatgacatactgcaagaagttgaccccgataaggatggcaaaattagctacgacgaattcgtggcgatgatgaagacgggcccagactggagaaaggcatcacggccctactcgagaggcagattcaacacccttagcatgaagcttgtgaaggacggttccgtcaaattgggcggggggtaaaagccatggtgtttatttgtgcatgtagttaggcatttgggcccccctaagcagcagctcctttagtttttgtcatggtcgttttggggggaaatttagatagggggaaccccctttgattggctcccatgtgtaattagttttcctggatcagtggcagtcgcccccccgcgctgacggatgtcccaagagcagtgcccctgcttttttgaacccctgatgttaagtgttgtacaatgttttcccgtacccaaatacagtttttagatttggggtaaatgtgtttgaaataagatgttgtgctggccccctaaaaaaaaaaaaaaaaaaaaaaaaaaaaaaaaaaaaaaaaaaaaaa

SEQ ID NO: 2546 - protein, 423 aa, Triticum aestivum
MRHLPRSHSIVALREACEDEGAVHLVMELCEGGELFDRIVARGHYTERAAANVTRTIVEVVQLCHRHGVIHRDLKPENFLFANKKENSPLKAIDFGLSIFFKPGEKFSEIVGSPYYMAPEVLKRNYGPEIDIWSAGVILYILLCGVPPFWAETEQGVAQAILRGNIDFKREPWPNVSENAKDLVRRMLEPDPKLRLTAKQVLEHHWLQNAKKAPNVPLGDIVKSRLKQFSRMNRFKRRALRVIADHLSAEEVEDIKEMFKAMDTDNDGIVSCEELKSGIAKFGSHLAESEVQMLIEAVDTNGKGVLDYAEFLAVSLHLQRMANDEHLRRAFLFFDKDGNGYIEPDELREALKDDGAADSMEVVNDILQEVDPDKDGKISYDEFVAMMKTGPDWRKASRPYSRGRFNTLSMKLVKDGSVKLGGG

SEQ ID NO: 2547 - DNA, 1671 bp, Zea mays
  CDS (1)..(1671)
atgggcaacgcatgcggcggcgcccttagatccaagtaccagcacagcttcaagcacgccgcgtcgtcgcagcgccgcgcctcctccgagtacagcgccagcgccgtggccgacgactcgcccaggaagcccacgcagccgcccgccaccacggacgcccacgcgccgccaccgccgcccgccaccgccgcagccgccatgaggcgcggcggggccggcgcgccgccggacctggggtccgtgctcggccaccccacccccaacctccgcgacctctacgcgctcggcaggaagctcgggcaggggcagttcggcaccaccttcctctgcaccgagctcgccacgggggtcgactacgcctgcaagtccatctccaagcgcaagctcatcaccagggaggacgtcgacgacgtgcgccgcgagatccagatcatgcaccacctctccggccacaccaacgtcgtcgccatcaagggcgcctacgaggaccagctctacgtccacatcgtcatggagctctgcgccgggggcgagctcttcgaccggatcatacagcgcggacactacagcgagcgcaaggccgccgcgctcacaaggatcatcgtcggggtcgtcgaggcctgccactcgctcggggtcatgcaccgggacctcaagcccgagaacttcctgctcgccaacagggacgatgacctctcgctcaaggccatcgatttcggtctctctgtcttcttcaagcctggtcaagttttcaccgatgtagttggtagcccatattatgtagctccagaagttctgttgaaaagttatggacccgcagctgatgtatggacagccggtgtcattctttacattctactgagtggtgtgcctccattttgggcagaaacacaacaaggaatatttgatgctgtattgaagggtgccattgattttgattctgatccgtggcctgtcatatctgatagtgcaaaagatcttatcagacgaatgctgaatcctcgctctgccgagcgcttaacagcacatgaagttctatgccatccatggattcgtgatcatggagtagctcctgaccgtccactggatccagctgtcttatctcgcattaagcaattctctgcaatgaataagttgaagaaaatggctttacgagtaatagctgagagcctatcagaagaggaaattgcggggttgaaggaaatgttccagatcatggacactgacaacagtggcgcaatcacttatgatgagctaaaagaaggattgagaaaatatggctccacactaaaggacactgagattcgtgatcttatggaagcagctgatattgacaacagtggaacaattgactacatagaattcattgctgcaactttgcatctcaataagctggagcgtgaggaacatctcgtggcagccttttcatatttcgacaaagatggtagtggctatatcacagtggacgaactacagcaagcttgcaaagagcataacatgccggatgcttttcttgatgatgtcatcaacgaagctgatcaggacaatgatggccgcattgactatggagaatttgttgccatgatgaccaagggcaatatgggagtcggtcgaagaacaatgagaaacagcttgaatatcagcatgagggacgcacctggtgcgttctga

SEQ ID NO: 2548 - protein, 556 aa, Zea mays
MGNACGGALRSKYQHSFKHAASSQRRASSEYSASAVADDSPRKPTQPPATTDAHAPPPPPATAAAAMRRGGAGAPPDLGSVLGHPTPNLRDLYALGRKLGQGQFGTTFLCTELATGVDYACKSISKRKLITREDVDDVRREIQIMHHLSGHTNVVAIKGAYEDQLYVHIVMELCAGGELFDRIIQRGHYSERKAAALTRIIVGVVEACHSLGVMHRDLKPENFLLANRDDDLSLKAIDFGLSVFFKPGQVFTDVVGSPYYVAPEVLLKSYGPAADVWTAGVILYILLSGVPPFWAETQQGIFDAVLKGAIDFDSDPWPVISDSAKDLIRRMLNPRSAERLTAHEVLCHPWIRDHGVAPDRPLDPAVLSRIKQFSAMNKLKKMALRVIAESLSEEEIAGLKEMFQIMDTDNSGAITYDELKEGLRKYGSTLKDTEIRDLMEAADIDNSGTIDYIEFIAATLHLNKLEREEHLVAAFSYFDKDGSGYITVDELQQACKEHNMPDAFLDDVINEADQDNDGRIDYGEFVAMMTKGNMGVGRRTMRNSLNISMRDAPGAF

SEQ ID NO: 2549 - DNA, 906 bp, Zea mays
  CDS (1)..(906)
atgctgccctacgcgacggcggcggaggcggaggcggcgcttggccggcccatgacgcccgccgaggcgctgtggttccggtacaccgcgggggtgtccgactaccacctctactgctgcaacatcctcttcctcttcgtcgtcttcacggtggccccgcttcccatcgcgctcctcgagctccgggccccggccgcggtctcgccgtacaaactgcagccgcgggtgcggctctccagggccgagttcgtccggtgctacaaggacgtcctccgcatcttcttcctcgtcatcggcccgctccagctcgtctcctacccggcggtcaagtttgtgggaattcacacgaagttgcctttgccgtcccttgcggagttggcagcacagctactggtgtacttccttgttgaggactacctcaattactggatccacaggtttctccacggggagtgggggtaccagaatatccaccgtgttcaccatgagttcactgcgccaataggattcgcagctccatatgcacactgggctgaggtgctgatactcggcatcccctccttcgtcgggccagccattgttccaggccacatgatcacattctggctctggattatactccgtcaggtggaggctatcgagacacatagcggctttgatttcccattcaccccgacaaagtatattccattctatggaggagcagaataccatgactatcatcattatgtaggaggccagagccaaagcaattttgcttctgttttcacttactgtgattacttatatggcactgacaaaggttacagattccacaaaacatacctagcaaagctgaaggatctggggcataatgatggccagaaaggagacggcagcggacccagctatgtgaaactggattag

SEQ ID NO: 2550 - protein, 301 aa, Zea mays
MLPYATAAEAEAALGRPMTPAEALWFRYTAGVSDYHLYCCNILFLFVVFTVAPLPIALLELRAPAAVSPYKLQPRVRLSRAEFVRCYKDVLRIFFLVIGPLQLVSYPAVKFVGIHTKLPLPSLAELAAQLLVYFLVEDYLNYWIHRFLHGEWGYQNIHRVHHEFTAPIGFAAPYAHWAEVLILGIPSFVGPAIVPGHMITFWLWIILRQVEAIETHSGFDFPFTPTKYIPFYGGAEYHDYHHYVGGQSQSNFASVFTYCDYLYGTDKGYRFHKTYLAKLKDLGHNDGQKGDGSGPSYVKLD

SEQ ID NO: 2551 - DNA, 519 bp, Zea mays
  CDS (1)..(519)
atgagtttcaaccagtctactgtcaaggggcaggccaggagggagaggcctagggctcgccctcatggcctgacgcagcagaggaggcaggaaataaaggaagcttttgatctgtttgatacagataactctggaaccattgatgcaaaagagctcaatgttgccatgagagccttgggatttgagatgactgaagagcaaattaggcaaatgattgctgatgttgacaaagatggcagtggagcgatcgactacgaggagtttgagcacatgatgactgccaaaatcggagagagggatagtaaagaggagctttcaaaagcattccgcattattgatcaagatggaaatggaaagatttctaacattgatatccagaggattgccaaagagctgggtgtaaatctcaccctcgatgagatccaagacatggtgcaagaggctgatagaaatggtgacggtgagatagactttgacgagttcatcaggatgatgaggaggaccagctttggctactag

SEQ ID NO: 2552 - protein, 172 aa, Zea mays
MSFNQSTVKGQARRERPRARPHGLTQQRRQEIKEAFDLFDTDNSGTIDAKELNVAMRALGFEMTEEQIRQMIADVDKDGSGAIDYEEFEHMMTAKIGERDSKEELSKAFRIIDQDGNGKISNIDIQRIAKELGVNLTLDEIQDMVQEADRNGDGEIDFDEFIRMMRRTSFGY

SEQ ID NO: 2553 - DNA, 1608 bp, Zea mays
  CDS (1)..(1608)
atgggcaactgctgcgccacgccgtcgacgacggaggagagcggcaagagccgccagaagaaaccgaagcagaagacgaacccctacaacgtggcgtacaaccgcggggcggcgccggcgccggcgcgcccgggcctggtggtgcttcgggacccgacggggcgggacctcggcgcgcagtacgagctgggcggcgagctgggccgcggcgagttcggcgtcacgtacctgtgcacggagtccgccacgggggcgcgctacgcgtgcaagtccatctccaagcgcaagctgcgcacgcccgtggacgtggaggacgtgcgccgggaggtggacatcatgcgccacatgccgccgcaccccaacatcgtcagcctccgcgccgcctacgaggacgaggacgccgtgcacctcgtcatggagctctgcgagggaggcgagctcttcgacaggatcgtcgcccggggccactacaccgagcgcgccgccgccgccgtcacgcgcaccatcgtcgaggtcgtccagatgtgccacaggcatggcgtcatgcaccgggatcttaaaccagagaactttttatatgcaaacaagaaggagagttcccctctgaaagcaatcgattttgggctgtcagtgttcttcaggcctggtgagcgatttactgaaatcgtaggcagtccatactacatggctccagaggttctaaagcgaaactatggccctgaagttgatgtttggagtgctggagtgatactttacatacttctctgtggtgtaccaccattttgggcagaaactgaacagggagtagcacaggcaattatacgatctgtggtagatttcaaaagagaaccatggcccagagtatctgagcctgctaaagatcttgtcaggcggatgctggacccaaatccattgacacggtttactgcagcacaagtacttgagcatccatggttacatgactctaaaaagatgccagacatttctcttggtgatactgtccgagcaagactgcaacaatttgctgcgatgaacaagttaaagaagaaagcattaagggtgattgccgagcatctgtcagtggaggaagtagctgacataaagcaaatgtttgacaagatggacgtgagcaagaatggcaagctaacattcgaggaattcaaggcgggccttcgtaaactggggaaccaaatgcctgattcagatcttcagataatgatggatgccgctgacatcgataaaaacgggaccctagattacgaggaattcgtcaccgtgtctgttcatgtgagaaaaataggcaacgatgagcacatccaaaaggccttcacatacttcgaccggaacaagagcgggtacatagagatcgaagagcttagagaggcactggctgatgaactggagggaaccgatgaagacatcatcaatggcatcatccgagacgtggacacagataaggacgggaaaataagctacgacgagttcgcggcgatgatgaaggccggcactgactggaggaaggcatcacggcagtactcgaggcagcggttcagcaacctgagcctgaagcttcagaaggacgggtccctcggcgccgagacacggtag

SEQ ID NO: 2554 - protein, 535 aa, Zea mays
MGNCCATPSTTEESGKSRQKKPKQKTNPYNVAYNRGAAPAPARPGLVVLRDPTGRDLGAQYELGGELGRGEFGVTYLCTESATGARYACKSISKRKLRTPVDVEDVRREVDIMRHMPPHPNIVSLRAAYEDEDAVHLVMELCEGGELFDRIVARGHYTERAAAAVTRTIVEVVQMCHRHGVMHRDLKPENFLYANKKESSPLKAIDFGLSVFFRPGERFTEIVGSPYYMAPEVLKRNYGPEVDVWSAGVILYILLCGVPPFWAETEQGVAQAIIRSVVDFKREPWPRVSEPAKDLVRRMLDPNPLTRFTAAQVLEHPWLHDSKKMPDISLGDTVRARLQQFAAMNKLKKKALRVIAEHLSVEEVADIKQMFDKMDVSKNGKLTFEEFKAGLRKLGNQMPDSDLQIMMDAADIDKNGTLDYEEFVTVSVHVRKIGNDEHIQKAFTYFDRNKSGYIEIEELREALADELEGTDEDIINGIIRDVDTDKDGKISYDEFAAMMKAGTDWRKASRQYSRQRFSNLSLKLQKDGSLGAETR

SEQ ID NO: 2555 - DNA, 2307 bp, Zea mays
  CDS (1)..(2307)
atggaaatcaacgaggaggcaatggcggcgcataagcgcgccttcctcgacttcctcgaccaagacgtcgggaagggggtttacatgcaggccgtccgcgacatggtccagaacaagcgccaccgcctcatcatcggcatggacgacctccgcaatcacaatctcgatctcgcccgcagggtgatccggacccccggggagtatatgcagccggcgtcggacgcggtgtcggaggtggcgaggaacctggatcccaagtttttgaaggaaggggagcgcgtgatggtgggcttctcgggtccgttcgggttccacagggtcacgcccagggatctcatgtcctccttcatcggcaccatggtctgcgttgagggcatcgtcaccaaatgctcgttggttaggccaaaagttgttaagagtgtccacttctgccctgtgactggggactttctctcgcgtgaatacagggacatcacttcttttgtaggcttgcctactggctcggtttatccaacaagggatgacaatggtaacttgttggttaccgagtatggaatgtgtgaatacaaggatcaccagacattgtccatgcaagaagtgcctgaaaattctgcacctggacagctcccaagaactgtcgatgttattgtagaagatgatcttgtagattgttgcaaacctggcgaccgtgtctcaattgtcggtgtgtacaaggctctaccagggaaaagcaagggaagtgttagtggtgtcttcagaactgtccttattgcaaataatgtgtcgcttcttaacaaagaggcaaatgcacctgtgtatactcgggaagatttgaagcgtatgaaagaaatatcaaggagaaatgacacctttgacttactgggaaactcacttgctccgtccatttatggccatctatggataaagaaggcagtagtactgttgatgcttggtggtgttgagaagaatctaaaaaatggaactcacttgagaggagatataaacatgatgatggtgggagatccttcagttgccaagtcccagctcctaagagctgtcatgaacattgcccctttggctatctcaacaactggcaggggttcatctggtgttggtttgactgctgctgtgacttctgatcaagagactggggagcgaaggcttgaagctggtgccatggttcttgctgatcgtggtgttgtctgcattgatgagtttgataaaatgaatgatcaagatcgagttgctattcatgaagttatggaacagcaaactgtaaccattgcaaaggcaggaatacatgcctcactaaatgcaagatgtagtgtaattgctgcagcaaatccaatatatggaacttatgatcgttcattgacaccaacaaagaatatcgggcttccggattcactgctttcccgttttgatttactttttattgttcttgatcaaatggaccctgagattgaccggcaaatctcagaacatgttgcccgaatgcatagatattgcactgacgatggaggagcaaggtctcttgataaagagggatatgctgaagaagatgatggtgatgctaatgcagccatttttgtcaagtatgatagaatgctccatggtcaggatagaagaagaggaaagaaatccaagcaggacaggctaactgtcaaatttctgaagaaatatattcattatgcgaagaaccttattcaaccaaggctcactgatgaggcatctgatcatattgcaacctcatatgctgagctcagggatggtagtgcaaatgcaaagtccggtggaggtacacttccaattacagcaaggacactggaaaccataattcgtctatcgacagctcatgccaagatgaaactgaggcatgaggttctgaaatccgatgttgaggctgcattgcaagttctaaattttgcaatataccacaaggaattgactgagatggaagagagagaacagagagaaatggagatgaaacagcaagctgatcatgatgcaggtgcaaccggtggcactgtggatgggcatggaagctctggcaatgatccaatggatgtggatgtaggatcaaatgatcagaatgtttccgcagagagaattgaagcatttgaagcacttctgggtcagcatgtgttggcaaaccatatagatcaaatgtcaattgatgatatcgagcagatggttaatagggagtcaactgcaccttacaccagaagccaagtagagtttattttggagaggatgcaagatgcaaacagggtaatgatacgagatggtgttgttcgaatcatataa

SEQ ID NO: 2556 - protein, 768 aa, Zea mays
MEINEEAMAAHKRAFLDFLDQDVGKGVYMQAVRDMVQNKRHRLIIGMDDLRNHNLDLARRVIRTPGEYMQPASDAVSEVARNLDPKFLKEGERVMVGFSGPFGFHRVTPRDLMSSFIGTMVCVEGIVTKCSLVRPKVVKSVHFCPVTGDFLSREYRDITSFVGLPTGSVYPTRDDNGNLLVTEYGMCEYKDHQTLSMQEVPENSAPGQLPRTVDVIVEDDLVDCCKPGDRVSIVGVYKALPGKSKGSVSGVFRTVLIANNVSLLNKEANAPVYTREDLKRMKEISRRNDTFDLLGNSLAPSIYGHLWIKKAVVLLMLGGVEKNLKNGTHLRGDINMMMVGDPSVAKSQLLRAVMNIAPLAISTTGRGSSGVGLTAAVTSDQETGERRLEAGAMVLADRGVVCIDEFDKMNDQDRVAIHEVMEQQTVTIAKAGIHASLNARCSVIAAANPIYGTYDRSLTPTKNIGLPDSLLSRFDLLFIVLDQMDPEIDRQISEHVARMHRYCTDDGGARSLDKEGYAEEDDGDANAAIFVKYDRMLHGQDRRRGKKSKQDRLTVKFLKKYIHYAKNLIQPRLTDEASDHIATSYAELRDGSANAKSGGGTLPITARTLETIIRLSTAHAKMKLRHEVLKSDVEAALQVLNFAIYHKELTEMEEREQREMEMKQQADHDAGATGGTVDGHGSSGNDPMDVDVGSNDQNVSAERIEAFEALLGQHVLANHIDQMSIDDIEQMVNRESTAPYTRSQVEFILERMQDANRVMIRDGVVRII

SEQ ID NO: 2557 - DNA, 912 bp, Zea mays
  CDS (1)..(912)
atggtggggtcacttatctttcccacacctaatgtggatccgaaggcagagaatcctaatgagatggttacagccggtgtgctttcaagccttcagaatttcctacgcaagtgcctcatagccatcctctcatatggcccaatgccgaagcacattgcatttattatggatggcaatcgtcgatatgctaaattcagaagcatgcaagaaggagcgggtcacaggatgggtttctctacccttattgcaagtctgatgtactgctatgaaatgggtgtgaagtacatcactgtctacgcattcagcatcgacaattttaaaagggacccaagtgaggtggaatccttgatgcagttaatggaggaaaaaatcaacgaactcttagagaaccgaagtgtaatcaacaagattaactgtaagatcaacttttggggtaacttggacttgttatatgagccggtgcggttggcggctgagaagctgatggcgagcacagctgggaacacagggctggtcttttctatctgcatgccatacaactcgacttctgagattgtcaatgctgtcagtgaagtctgtgtggaaaggatggaaatgtttcagagtgaacatattggcgactgcaatggtcatgctgcaaataacggtgtgcgttcagagatttcagtggcggatttggatcgccacatgtatagtgccggatgcccagatcctgatatcgtcatccggacttcgggcgagactcgattgagcaatttcctcctttggcagacaacgtttagtcacttgcagaatccagatcctctgtggcccgagttctctttcaggcaccttgtttgggctgtcttgcagtatcagagagtttaccctgctctggagcataacagaaagttggctaagaagcagttgtga

SEQ ID NO: 2558 - protein, 303 aa, Zea mays
MVGSLIFPTPNVDPKAENPNEMVTAGVLSSLQNFLRKCLIAILSYGPMPKHIAFIMDGNRRYAKFRSMQEGAGHRMGFSTLIASLMYCYEMGVKYITVYAFSIDNFKRDPSEVESLMQLMEEKINELLENRSVINKINCKINFWGNLDLLYEPVRLAAEKLMASTAGNTGLVFSICMPYNSTSEIVNAVSEVCVERMEMFQSEHIGDCNGHAANNGVRSEISVADLDRHMYSAGCPDPDIVIRTSGETRLSNFLLWQTTFSHLQNPDPLWPEFSFRHLVWAVLQYQRVYPALEHNRKLAKKQL

SEQ ID NO: 2559 - DNA, 1575 bp, Zea mays
  CDS (1)..(1575)
atgggcaaccgtgcgtcgcgccaccaccgccacgccaccgagcagcagccagagacgccgacccttcccaagccccagatccagccgccgccgccgccgacgcagacgcagcagtaccagcaggccccgccgccgccgaagccgaagccggcggcggacgcgagggcggtggggcgcgtgctggggcggcccatggaggacgtcaaggcgacctacaccttcggccgcgagctcgggcggggccagttcggggtcacctacctcgtcacgcaccgggagactgggcagcgcttcgcctgcaagtccatagccacgcggaagctcgtccaccgcgacgacatcgaggacgtgcgccgggaggtgcagatcatgcaccacctcaccggccaccggaacatcgtcgagctccggggagcctacgaggacaggcgctcggtcaacctcgctatggagctctgcgagggcggggagctcttcgaccgcatcattgccaggggccactacaccgagcgcgctgccgccgcgctttgccgggagatcgtcgccgtcgtccacagctgccactccatgggggtcttccaccgggacctcaagcccgagaacttcctgttcctcaataacaaggaggactccccgctcaaggccacggacttcggcctctccgtcttcttcaagcccggggacacgtttaaggatcttgtgggaagtgcatattatgttgctcccgaggtattgaagcggcactatggggcagaggctgacatatggagtgctggggttattctttacatccttttatctggtgttcctcctttttgggcagagaatgaggatggcatatttgatgctgtcttgcacagtcacattgatttctcttctgatccttggccttcaatatctaatggtgcaaaagatttggttaagaagatgctgcgacaagacccaaaagaacgcctgactgctgctgaaattttgaaccacccatggattagagaggatggagaggccccagataagccacttgacattacggtcatcagtagaatgaaacagttcagggcaatgaacaagctcaagaaagttgcattgaaggttgtggcagagaacttatcagatgaagagattatgggcctaaaagaaatgttcagatccctggatactgataacagtgggacaattactcttgaagagctaagatctggtttaccaaaacttggtactaaaatttctgaatcagaaatcaaacagttgatggaggcggctgatgttgatggaaatggtaccattgattacgcggagttcatatcagccacaatgcatttgaatagattggagaaggaagaccgtatactcaaagcttttgaatattttgataaggaccatagcgggtacataacagtagatgagttggaagaagctctgaagaagtatgatatgggagatgataaaacaataaaagagatcattgctgaagtagatacagatcatgatggaagaattaattaccaggagtttgttgccatgatgaggaacaatacccctgagattgttccaaaccggagacgcatgttctaa

SEQ ID NO: 2560 - protein, 524 aa, Zea mays
MGNRASRHHRHATEQQPETPTLPKPQIQPPPPPTQTQQYQQAPPPPKPKPAADARAVGRVLGRPMEDVKATYTFGRELGRGQFGVTYLVTHRETGQRFACKSIATRKLVHRDDIEDVRREVQIMHHLTGHRNIVELRGAYEDRRSVNLAMELCEGGELFDRIIARGHYTERAAAALCREIVAVVHSCHSMGVFHRDLKPENFLFLNNKEDSPLKATDFGLSVFFKPGDTFKDLVGSAYYVAPEVLKRHYGAEADIWSAGVILYILLSGVPPFWAENEDGIFDAVLHSHIDFSSDPWPSISNGAKDLVKKMLRQDPKERLTAAEILNHPWIREDGEAPDKPLDITVISRMKQFRAMNKLKKVALKVVAENLSDEEIMGLKEMFRSLDTDNSGTITLEELRSGLPKLGTKISESEIKQLMEAADVDGNGTIDYAEFISATMHLNRLEKEDRILKAFEYFDKDHSGYITVDELEEALKKYDMGDDKTIKEIIAEVDTDHDGRINYQEFVAMMRNNTPEIVPNRRRMF

SEQ ID NO: 2561 - DNA, 1653 bp, Zea mays
  CDS (1)..(1653)
atgggtggctgccactccgccatcgcggccaccaagctgaagattctgcgccgcggaggccggggtgccgctgccgtcctccccgtcaccaaccacgacggcccgtgctgctcctccgaccacggcagcaaggagaagaagaagaaaaagaagggcgccaggaagggcaggaaacgcgcctccatcctgggcgacgccggcaccttcgacccggacttctcgcggcggtaccggctcggcgcggagctcgggcgcggcgagttcggcgtcacgcggcggtgcgaggacgccgccacgggggaggccctggcgtgcaagacgatccggcggaagcggctgctcctgcgcctcgccgggcccgacgcgaccgacgtgcagcgcgaggtggagatcacgcggcgcatgtcggaggtgagcgggggcagggtcgcgtgcctgcgcgaggcgtgcgaggacgacgacggtgtgcacctcgtcatggagctctgcgagggcggcgagctcttcgaccgcatcttcgagcggaagcactactccgagcgcgccgccgccaagctcgcccgcaccatcgtcgaggtcgtgcagctgtgccacgagaacggagtgatgcacagggacctgaagccggagaacttcctgttcgtgaacaagtcggaggagtcacctctcaaggccatcgacttcggcctctccgtgttcttcaagcctggagatcggttcaccgaagtggttggcagcgggtgttacatggctccagaggttctcaagagaagctatgggccagagatagacgtgtggagcgctggtgtcatcctgcacatccttctctgcgggttccctccgttttggggaggctccgatgagaaaattgcacagtcgatactccgtggggtaattaacttacagaaggatccatggcccaaggtctcccagagcgcaaaggatcttgtcacgaggatgcttgacccagatccttgtacacggttgacggcaaagcaagtccttgagcacccttggctcaagaatgctgataaggcttcaaatgtgtcactcggagaggttgttcggtcgaggctgaagcagttgtcgtctatgaacaagcttaagaagaaggcacttggagtcgtcgccatgaatttaccgatggaagagattggcaaattcaaagagatgttccatacaatggacaaaaacaaggacggtagtttgtcacttgaagagctgaaggagggtttccggataaacgatcatcctgttccagaggaagagataaagatgttgttacaagcgggcgatatacatggaactgacacattagattgtgaggaatttgtgacagtcttgcttcacattaaaaagatgagtaatgacgagtatctacctaaagctttcgagttcttcgacaaagacgggaatggttttattgaaatgtccgagttaatggagactctaagtgatggtgaactaaagcctgatgagcaattggttaacgacattattcaagaggttgacaaggataaggatggtcgcatcagttacccagagtttgaattgatgatgaaaagtggatcggactggaggaacgcctctagacgttactcaacagagaatttcagcagcctcagtcaaaaactgtgcaaagatactttatga

SEQ ID NO: 2562 - protein, 550 aa, Zea mays
MGGCHSAIAATKLKILRRGGRGAAAVLPVTNHDGPCCSSDHGSKEKKKKKKGARKGRKRASILGDAGTFDPDFSRRYRLGAELGRGEFGVTRRCEDAATGEALACKTIRRKRLLLRLAGPDATDVQREVEITRRMSEVSGGRVACLREACEDDDGVHLVMELCEGGELFDRIFERKHYSERAAAKLARTIVEVVQLCHENGVMHRDLKPENFLFVNKSEESPLKAIDFGLSVFFKPGDRFTEVVGSGCYMAPEVLKRSYGPEIDVWSAGVILHILLCGFPPFWGGSDEKIAQSILRGVINLQKDPWPKVSQSAKDLVTRMLDPDPCTRLTAKQVLEHPWLKNADKASNVSLGEVVRSRLKQLSSMNKLKKKALGVVAMNLPMEEIGKFKEMFHTMDKNKDGSLSLEELKEGFRINDHPVPEEEIKMLLQAGDIHGTDTLDCEEFVTVLLHIKKMSNDEYLPKAFEFFDKDGNGFIEMSELMETLSDGELKPDEQLVNDIIQEVDKDKDGRISYPEFELMMKSGSDWRNASRRYSTENFSSLSQKLCKDTL

SEQ ID NO: 2563 - DNA, 840 bp, Zea mays
  CDS (1)..(840)
atggatttcctgcaggagcaaagcgtcgagaccacagtggccgtcgccgtcgctgtcgccgccgtcgccgcaggcggcgccttcctcctccttcgatccaggaagcccaagggctgcttggatcctgagaacttcaggaagttcaaacttgttgaaaagaagcaaataagtcataatgttgccaggttcaagttcgctcttccaactccaacttctgtattgggccttccaatcggtcaacatatcagctgcagaggacaagacgctacaggtgaagaagtaatcaagccttatacccctactacattggattctgatcttggatattttgagcttgtcataaagatgtatccccaagggagaatgtcccatcatttccgcgagatgaaagttggtgattatttgtctgtgaagggacctaagggccgattcaagtaccacgttggccaagtgagggcatttggaatgctggctggtggatcaggcattactccaatgtttcaagttgccagagcaattcttgagaaccctaatgacaacaccaaggttcacttaatttatgctaatgtcacatatgaagacattcttctgaaggatgagctggacgacatggccaaaacctatcctggccgctttaagatctactatgtgttgaatcagcctcctgagaactggaacggtggtgttgggtttgtgtctaaggaaatgatccaatctcattgtccagcgcctgctgaggacattcagatcctgagatgtggtcctcctccgatgaacaaggccatggctgcacaccttgacgagctcaactacacaaaggagatgcagttccagttctaa

SEQ ID NO: 2564 - protein, 279 aa, Zea mays
MDFLQEQSVETTVAVAVAVAAVAAGGAFLLLRSRKPKGCLDPENFRKFKLVEKKQISHNVARFKFALPTPTSVLGLPIGQHISCRGQDATGEEVIKPYTPTTLDSDLGYFELVIKMYPQGRMSHHFREMKVGDYLSVKGPKGRFKYHVGQVRAFGMLAGGSGITPMFQVARAILENPNDNTKVHLIYANVTYEDILLKDELDDMAKTYPGRFKIYYVLNQPPENWNGGVGFVSKEMIQSHCPAPAEDIQILRCGPPPMNKAMAAHLDELNYTKEMQFQF

SEQ ID NO: 2565 - DNA, 450 bp, Zea mays
  CDS (1)..(450)
atggcggaccaactcaccgacgaccagatcgccgagttcaaggaggccttcagcctcttcgacaaggacggggatggttgcatcacgaccaaggagctgggaactgtcatgcgttcactggggcaaaaccctacagaggctgagctccaggacatgatcaatgaggtcgatgccgatggcaacggcaccatcgattttccagagtttctgaaccttatggctcgcaagatgaaggacaccgactctgaggaagagctcaaggaggcctttcgtgtgtttgacaaggaccagaacggcttcatctccgccgccgagctccgccatgtcatgacaaatcttggggagaagctaactgatgaggaggtagacgagatgatccgtgaggctgatgtcgatggtgatggccagattaactacgaggagtttgttaaggtcatgatggccaagtga

SEQ ID NO: 2566 - protein, 149 aa, Zea mays
MADQLTDDQIAEFKEAFSLFDKDGDGCITTKELGTVMRSLGQNPTEAELQDMINEVDADGNGTIDFPEFLNLMARKMKDTDSEEELKEAFRVFDKDQNGFISAAELRHVMTNLGEKLTDEEVDEMIREADVDGDGQINYEEFVKVMMAK

SEQ ID NO: 2567 - DNA, 459 bp, Zea mays
  CDS (1)..(459)
atggcggagaagctgacgccggagcaggtggacgagtgcaaggaaatcttcgacctgttcgacgccgacgaggacggtcgcatcgccacgggcgagctcgtgacggcgctgcgctccctgggccagaacgtggacgaggcggaggcgcggcgcttcctggaggacgcgggcatcgcggcgggcgccggcgacatcgacctcgcggcgttcctggccgtggcggcgcgcaagatgggcgccaggcagtcggaggcgcgcctcgccgagtgcttcgacgtgttcgacgacgcctgcagcgggtccatccccgcggagcagctgcggcaggtgatggtaagccacggcgaccgactcacggaggaggaggccgacgcgatgctccgcgaggccgacccgcgcggcgagggccgcatcgagtacaaacactacgtcaaagtgctgctcagggacaataagtga

SEQ ID NO: 2568 - protein, 152 aa, Zea mays
MAEKLTPEQVDECKEIFDLFDADEDGRIATGELVTALRSLGQNVDEAEARRFLEDAGIAAGAGDIDLAAFLAVAARKMGARQSEARLAECFDVFDDACSGSIPAEQLRQVMVSHGDRLTEEEADAMLREADPRGEGRIEYKHYVKVLLRDNK

SEQ ID NO: 2569 - DNA, 1602 bp, Zea mays
  CDS (1)..(1602)
atggggcagtgttgtagcagagctcccgccccggactctggacggggaggcaccaatggttatggctattctaaccaggcaaagccagcgcaaacaccttcgagttacaaccctcctcagcagccggccgaggtgaggtacacgccgccggcgacgaaccctccggtagtcccacctgtgcctgtgcctgtgccaccgaagcccacggcggacacgattcttggcaaacagtacgaggacgtacgctctgtctactccctcggaaaggagcttggccggggccagttcggggtgacatacctctgcacagaggttgcctctggtaagcagtacgcctgcaagtccatctccaagcgcaagcttaccagcaaggcagacagggaggacattcgaagagagatccagatcatgcagcatctgtctggacagccaaacattgttgagttccggggagcatacgaggacaagagcaatgtccatgtggtgatggagctctgcgcaggtggggagctcttcgatcgcatcattgccaaggggcactacacagagcgtgcagctgctacaatctgcagagcagttgtgaatgttgtcaacatttgccacttcatgggtgtgatgcaccgtgacctgaaaccggagaacttcttgcttgcgagcaaggaggagaatgcaatgctcaaggccactgattttgggctttccgtcttcatcgaagaaggaaagatgtacagggacatcgttggaagtgcttattatgttgcgcctgaagtccttaagcggagctatggaaaagagatagatgtttggagcgcaggtgttattttgtacattcttctcagtggtgtgcctccattttgggctgaaactgaaaaggggatatttgatgctattctgcatgaggagattgactttgaaagtcaaccttggccatcaatttctgagagtgctaaagacttggttagaaagatgttgacacgagatccaaagaaaagactgacttcagctcaagttcttcaacattcatggctcagagaaggtggaggtgcatctgataagcctatcgacagtgctgttctttctagaatgaagcagttcagagcaatgaataagctgaaaaagatggccctaaaggttattgcctcaaaccttaacgaggaagagatcaaggggctaaagcaaatgttcatgaacatggacacagacaatagtggcacaatcacgtatgaagaactcaaagcaggactagccaaacttggatcaaagctgtcggaagctgaagtaaagcagttgatggaggctgctgatgttgatgggaatggatccatcgactatgttgagttcatcactgccacaatgcatagacacaagctcgaaagagacgagtatttgtttaaggcattccagtacttcgataaagataacagcggtttcatcacaagagatgagctggagtctgctttgatcgagcatgagatgggtgacacgagtacaataaaggagatcatatcagaagtggacacagacaatgatgggaggattaactatgaggagttctgcgcaatgatgagaggagggatgcagcagccaatgaggctcaagtag

SEQ ID NO: 2570 - protein, 533 aa, Zea mays
MGQCCSRAPAPDSGRGGTNGYGYSNQAKPAQTPSSYNPPQQPAEVRYTPPATNPPVVPPVPVPVPPKPTADTILGKQYEDVRSVYSLGKELGRGQFGVTYLCTEVASGKQYACKSISKRKLTSKADREDIRREIQIMQHLSGQPNIVEFRGAYEDKSNVHVVMELCAGGELFDRIIAKGHYTERAAATICRAVVNVVNICHFMGVMHRDLKPENFLLASKEENAMLKATDFGLSVFIEEGKMYRDIVGSAYYVAPEVLKRSYGKEIDVWSAGVILYILLSGVPPFWAETEKGIFDAILHEEIDFESQPWPSISESAKDLVRKMLTRDPKKRLTSAQVLQHSWLREGGGASDKPIDSAVLSRMKQFRAMNKLKKMALKVIASNLNEEEIKGLKQMFMNMDTDNSGTITYEELKAGLAKLGSKLSEAEVKQLMEAADVDGNGSIDYVEFITATMHRHKLERDEYLFKAFQYFDKDNSGFITRDELESALIEHEMGDTSTIKEIISEVDTDNDGRINYEEFCAMMRGGMQQPMRLK

SEQ ID NO: 2571 - DNA, 1596 bp, Zea mays
  CDS (1)..(1596)
atggggcagtgttgcagcagagctacggccccggactctggacggggaggtgccaatggttatggctattctaaccaggcaaagccggcgcaagcacctccgagttacaaccctcctcagcaggcggccgaggtgaggtacacaccatcggcgacgaactcttcggcagtcccacccgtggctgtgccgccgaagccaacggcggacacgattcttggcaagcagtacgaggacgtgcgctctgtctactccctcgggaaggagcttggccggggccagttcggggtgacatacctctgcacagagattgcctctggtaggcagtacgcctgcaagtccatctccaagcgcaagctcgtcagcaaggcagacagggaggacattcgaagggagatccagatcatgcagcacctgtctgggcagccaaacattgttgagttccggggagcatacgaggacaagagcaatgtccatgtggtgatggagctctgcgcaggtggggagctcttcgatcgcatcattgcaaaggggcactacacagaacgtgcggctgctacaatctgcagagcagttgtgaatgttgtcaacatttgccacttcatgggtgtgatgcatcgtgatctgaaacccgagaacttcttgcttgcgaccaaggaggagaatgcaatgctcaaggccactgattttgggctttctgtcttcattgaagaaggaaagatgtacagggacattgttggaagtgcttactatgttgctcctgaagtccttagacggagctatggaaaagagatagatgtttggagtgcgggtgttattttgtacattcttctcagtggcgtgcctccattttgggctgaaactgaaaaggggatatttgatgctattctgcatgaggagattgactttgaaagtcaaccttggccatcaatttctgagagtgctaaagacttggtgagaaagatgttgacacgagatccaaagaaaagactgacttcagcccaagttcttcaacatcagtggctcagagaaggtggggaggcatctgataagcctatcgacagtgctgttctttctagaatgaagcaattcagagcaatgaataagctgaaaaagatggccctaaaggttattgcttcaaaccttaacgaggaagagatcaaggggctaaagcaaatgttcatgaacatggacacagacaatagtggcacaatcacatacgaagaactcaaagcaggattagccaaacttggatcaaagctgtcagaagctgaagtaaagcagttgatggaggctgctgatgttgatgggaatggatctattgactatgttgagttcatcactgccacaatgcatagacacaagctcgaaagggacgagcatttgttcaaggcattccagtactttgacaaagataacagcggcttcatcacaagggatgaactggaatctgctttgattgagcatgagatgggcgacacgagtacaataaaggagatcatatcagaagttgacacagataatgatgggaggattaactatgaggagttttgtgcaatgatgagaggagggatgcagcagccaatgaggctcaagtag

SEQ ID NO: 2572 - protein, 531 aa, Zea mays
MGQCCSRATAPDSGRGGANGYGYSNQAKPAQAPPSYNPPQQAAEVRYTPSATNSSAVPPVAVPPKPTADTILGKQYEDVRSVYSLGKELGRGQFGVTYLCTEIASGRQYACKSISKRKLVSKADREDIRREIQIMQHLSGQPNIVEFRGAYEDKSNVHVVMELCAGGELFDRIIAKGHYTERAAATICRAVVNVVNICHFMGVMHRDLKPENFLLATKEENAMLKATDFGLSVFIEEGKMYRDIVGSAYYVAPEVLRRSYGKEIDVWSAGVILYILLSGVPPFWAETEKGIFDAILHEEIDFESQPWPSISESAKDLVRKMLTRDPKKRLTSAQVLQHQWLREGGEASDKPIDSAVLSRMKQFRAMNKLKKMALKVIASNLNEEEIKGLKQMFMNMDTDNSGTITYEELKAGLAKLGSKLSEAEVKQLMEAADVDGNGSIDYVEFITATMHRHKLERDEHLFKAFQYFDKDNSGFITRDELESALIEHEMGDTSTIKEIISEVDTDNDGRINYEEFCAMMRGGMQQPMRLK

SEQ ID NO: 2573 - DNA, 1614 bp, Zea mays
  CDS (1)..(1614)
atgggcaactgctgccgctcgccggccgccgtcgcgcgggaggacgtcagctcctcgcacttccccgcatccaacgcgaagaagaagccgcaccaagcgcggaacggcggcgccggcggcgggcagaagcggctctcggttctgggcgacgaggggtgcgaggtcgtcgggatcgacgacaagtacgtcctggacagggagctcggccgcggggagttcggggtcacgtacctgtgtatggatcgggacaccaaggagctgctcgcctgcaagtccatctccaagcgcaagctgcggacggccgtcgacgtggaggacgtgcgccgggaggtggccatcatgcgccacctgcccaagagccccagcgtcgtgtccctgcgggaggcgtgcgaggacgacggcgccgtccacctcgtcatggagctctgcgagggcggcgagctcttcgaccgcatcgtcgcgcggggccactacaccgagcgcgccgccgccagtgtcacccgcaccatcctcgaggtcgtccagctctgccaccgccacggcgtcatccaccgcgacctcaagccggagaacttcctcttcgccaataagaaggagaactcgccgctcaaggccatcgacttcggtctctccatcttcttcaagcctggtgaaaagttttcagaaattgtgggaagcccctattacatggctcctgaagtattgaagagaaactatgggccagaaatagacatatggagtgcgggagttatcctgtatattttattatgtggagtccctccattttgggctgagactgaacaaggggtggcgcaggctattcttcgtggaaatatcgattttaagcgggaaccctggcctaatgtttcggaaaatgcaaaagatttagttcgacacatgttggagcctgatccaaagctcaggctaactgcaaagcaggttcttgaacatcattggcttcaaaatgcaaagaaggctcctaatgtccctcttggagatattgtaaagtcaaggctcaaacaattttctaggatgaatagattcaaaagaagggctctaagggtcattgctgatcatttgtctgctgaggaagttgaggatataaaggatatgttcaagactatggatactgacaatgatggaattgtatcttatgaagaactgaagactggaatagcaaaacttggttctcatcttgcggaatcagaagtacagatgctcattgaagctgtggacacaaacgggaggggggcactagactacggggaatttctggccgtctcgctccacctgcagaggatggcgaacgacgagcatctccggcgggccttcctgttcttcgacaaggacggcaacggtttcatcgagcccgaggagcttcgagaggctctggtggacgacggggcggccgacagcatggaggaagtggtgaacgacatactgcaagaagtcgacaccgacaaggacggcaagatcagctacgaggagtttgtggcgatgatgaagaccggcacggactggagaaaggcgtcccggcactactcgagagggaggttcaacagcctcagcatgaagcttataaaggacgggtcggtaaagctgggtgtcgagtga

SEQ ID NO: 2574 - protein, 537 aa, Zea mays
MGNCCRSPAAVAREDVSSSHFPASNAKKKPHQARNGGAGGGQKRLSVLGDEGCEVVGIDDKYVLDRELGRGEFGVTYLCMDRDTKELLACKSISKRKLRTAVDVEDVRREVAIMRHLPKSPSVVSLREACEDDGAVHLVMELCEGGELFDRIVARGHYTERAAASVTRTILEVVQLCHRHGVIHRDLKPENFLFANKKENSPLKAIDFGLSIFFKPGEKFSEIVGSPYYMAPEVLKRNYGPEIDIWSAGVILYILLCGVPPFWAETEQGVAQAILRGNIDFKREPWPNVSENAKDLVRHMLEPDPKLRLTAKQVLEHHWLQNAKKAPNVPLGDIVKSRLKQFSRMNRFKRRALRVIADHLSAEEVEDIKDMFKTMDTDNDGIVSYEELKTGIAKLGSHLAESEVQMLIEAVDTNGRGALDYGEFLAVSLHLQRMANDEHLRRAFLFFDKDGNGFIEPEELREALVDDGAADSMEEVVNDILQEVDTDKDGKISYEEFVAMMKTGTDWRKASRHYSRGRFNSLSMKLIKDGSVKLGVE

SEQ ID NO: 2575 - DNA, 246 bp, Zea mays
  CDS (1)..(246)
atgcagaacgaggagggtaagactgtggacctctatgtccccaggaagtgctcggccacaaacaggatcatcactgccaaggaccatgcctctgtccagatcaacattggccacttggatgcgaatggcctgtatgatggtcacttcacaacgtttgctctctctgggtttgtccgtgctcagggcgacgcagacagctccttggacaggttgtggcagaagaagaaggttgatatcaagcagtag

SEQ ID NO: 2576 - protein, 81 aa, Zea mays
MQNEEGKTVDLYVPRKCSATNRIITAKDHASVQINIGHLDANGLYDGHFTTFALSGFVRAQGDADSSLDRLWQKKKVDIKQ

SEQ ID NO: 2577 - DNA, 447 bp, Zea mays
  CDS (1)..(447)
atggcgcccaaggcggagaagaagccagcggagaagaagccggcggccgaggagaaggcggagaagacgaccgcagggaagaagcccaaggccgagaagcggctgcccgcgtccaagtcctccggcaaggagggcggcgagaagaaggggaagaagaaggccaagaagagcgtggagacctacaagatctacatcttcaaggtgctgaagcaggtgcaccccgacatcggcatatcctccaaggccatgtccatcatgaactccttcatcaacgacatctttgagaagctggccggcgaggccgccaagctggcgcggtacaacaagaagcccaccatcacgtcccgcgagatccagacctccgtgcgcctagtcctccccggagagctcgccaagcacgccgtctccgagggaaccaaggccgtcaccaagttcaccagcaactga

SEQ ID NO: 2578 - protein, 148 aa, Zea mays
MAPKAEKKPAEKKPAAEEKAEKTTAGKKPKAEKRLPASKSSGKEGGEKKGKKKAKKSVETYKIYIFKVLKQVHPDIGISSKAMSIMNSFINDIFEKLAGEAAKLARYNKKPTITSREIQTSVRLVLPGELAKHAVSEGTKAVTKFTSN

SEQ ID NO: 2579 - DNA, 1620 bp, Zea mays
  CDS (1)..(1620)
atgggcaactgctgcgtgacgccgaaagcagccgacgacgccggcggcggcaagaagcccaaggagccgaagcagaagaagggtaagaagccgaaccccttctcgatcgagtacaaccgctcggggcaggcgagcgcgccaaagctggtggtgctgcgggatcccacggggcgggacatcgcggcgcggtacgagctcggcgcggagctcgggcgcggcgagttcggggttacctacctctgcacagaccgcgcctcaggggaggcgctggcctgcaagtccatctccaagaagaagctccgcaccgccgtcgacctcgaggacgtgcgccgggaggtggagatcatgcgccacctccccaagcaccccaacgtcgtcacgctcagggacacgtacgaggacgacaatgccgtgcacctcgtcatggagctctgcgagggcggtgagctcttcgaccgcatcgtggcgcggggacactacactgagcgtgctgccgccttggtcttacgcactatcgttgaggtcgtgcagatgtgccataagcatggagtgatgcacagggatctcaaaccagaaaattttttgtttgcaaacaagaaagaatcagcggcacttaaggccattgattttggcctgtctgtatttttcactccaggcgaacggttttctgagattgttggaagtccttattacatggctccagaggtgctaaagagaaactatggcccagaggttgatgtttggagtgcaggagtgattctgtacattcttctttgtggtgtccccccattctgggcagaaacggaacagggtgttgctcaggcaatcattcgatctgtcattgatttcaaaagagatccatggccaagggtgtctgataacgccaaagaccttgtcagaggaatgctgaatccggacccaaaacgacgattgacagctcaccaagtgcttggtcacccatggttgcagaacattaagaaggctccaaatgtcaatttgggtgaaactgttaaggccagactccaacaattctctgtgatgaacaagttcaagaagcatgcacttagggttatagctgagcatctttcggtagaagaggctgctgacataaaggatatgtttgagaagatggatcttaacaaggatcaaatgcttagtttcgaggagctgaagcttggtctgcataagtttggtcaccaaatgcctgatgcagatgttcaaacactaatggaagcggcggatgctgatggaaatgggtccttgaattatggagaatttgttacattatttgttcatctaagaaagattggaaacgatgagcatctgcataaggcattcgcatacttcgaccggaaccagagtggttatattgaaattgatgaactccgtgagtcattagctgatgaccttggacaaaaccgtgaagagattatcaatgccatcatccgtgatgtagacaccgataaggatggcaagataagctacgatgagtttgcgacgatgatgaaggctggaacagactggaggaaagcatccagacagtactcgagagagcggttcacaagcctgagccttaagctgcaaaaggatggatcgctgcagatgacgagtacacggtag

SEQ ID NO: 2580 - protein, 539 aa, Zea mays
MGNCCVTPKAADDAGGGKKPKEPKQKKGKKPNPFSIEYNRSGQASAPKLVVLRDPTGRDIAARYELGAELGRGEFGVTYLCTDRASGEALACKSISKKKLRTAVDLEDVRREVEIMRHLPKHPNVVTLRDTYEDDNAVHLVMELCEGGELFDRIVARGHYTERAAALVLRTIVEVVQMCHKHGVMHRDLKPENFLFANKKESAALKAIDFGLSVFFTPGERFSEIVGSPYYMAPEVLKRNYGPEVDVWSAGVILYILLCGVPPFWAETEQGVAQAIIRSVIDFKRDPWPRVSDNAKDLVRGMLNPDPKRRLTAHQVLGHPWLQNIKKAPNVNLGETVKARLQQFSVMNKFKKHALRVIAEHLSVEEAADIKDMFEKMDLNKDQMLSFEELKLGLHKFGHQMPDADVQTLMEAADADGNGSLNYGEFVTLFVHLRKIGNDEHLHKAFAYFDRNQSGYIEIDELRESLADDLGQNREEIINAIIRDVDTDKDGKISYDEFATMMKAGTDWRKASRQYSRERFTSLSLKLQKDGSLQMTSTR

SEQ ID NO: 2581 - DNA, 411 bp, Zea mays
  CDS (1)..(411)
atggcccgcacgaagcagacggcgcgcaagtcgaccggcggcaaggcgccgcggaagcagctggccaccaaggcggcgcgcaagtcggccccggccacgggcggcgtgaagaagccgcaccgcttccgccccggcaccgtcgcgctccgcgagatccgcaagtaccagaagagcgctgagctgctcatccgcaagctccccttccagcgcctggtccgcgagatcgcgcaggacttcaagacggacctccggttccagtcctccgccgtcgccgcgctgcaggaggccgccgaggcctacctggtgggcctcttcgaggacaccaacctctgtgccatccacgccaagcgcgtcaccatcatgcccaaggacatccagctcgcgcgccgcatccgcggcgagcgcgcctag

SEQ ID NO: 2582 - protein, 136 aa, Zea mays
MARTKQTARKSTGGKAPRKQLATKAARKSAPATGGVKKPHRFRPGTVALREIRKYQKSAELLIRKLPFQRLVREIAQDFKTDLRFQSSAVAALQEAAEAYLVGLFEDTNLCAIHAKRVTIMPKDIQLARRIRGERA

SEQ ID NO: 2583 - DNA, 807 bp, Zea mays
  CDS (1)..(807)
atggcggcgcccatgtcagccatcgactcagcgtggcagctcctgatcgccaacttcaccgagttccagctcgccaccgtcgtcaccttcctgctccacgagaccgtcttcttcctctccggcctcccctccctcctcttcgagcgcttcggactcttcgccaagtacaagatccagaagaagagcaacacctctgcttaccaaaacagatgtgtcttgcgcctcattctctaccatgtatgtgtgaacctgcctgtcatgattttctcgtatcctgccttcaaattcatgggtctcaggagctctcttcctttgccacattggtcggttgttgtatctcaagttcttttctactttgtccttgaggattttatattctattgggggcacagggcattgcatacgaaatggctatacaaacacgttcacagcgtccaccatgagtacgccacaccctttggtttaacatcggaatatgcccacccagctgaaattttgttcctgggattcgccacagttgttggtcctgctcttactggccctcatctcttcaccctgtggctgtggatggtgttgagggttttggagacagttgaagctcacagcggctatcacttcccatggagcccatcaaatttcctgccgctgtatggcggctcggacttccatgactaccatcaccgtgtgctgtacacaaagtcagggaactatgcctcaacatttgtttacatggactggttgttcggcacggacaaggattatcgcaaggcaaagaccattgaggagaaagaagggaaaaatctgtag

SEQ ID NO: 2584 - protein, 268 aa, Zea mays
MAAPMSAIDSAWQLLIANFTEFQLATVVTFLLHETVFFLSGLPSLLFERFGLFAKYKIQKKSNTSAYQNRCVLRLILYHVCVNLPVMIFSYPAFKFMGLRSSLPLPHWSVVVSQVLFYFVLEDFIFYWGHRALHTKWLYKHVHSVHHEYATPFGLTSEYAHPAEILFLGFATVVGPALTGPHLFTLWLWMVLRVLETVEAHSGYHFPWSPSNFLPLYGGSDFHDYHHRVLYTKSGNYASTFVYMDWLFGTDKDYRKAKTIEEKEGKNL

SEQ ID NO: 2585 - DNA, 1593 bp, Zea mays
  CDS (1)..(1593)
atgggcaaccgtgcgtcgcgccaccaccgccaagccgccgagcagcaaccggcgacgccgaccctgccgaagccccagccccagatccagccgccgcctccgcctccgccgacgcagacgcagcagtaccagcaggcgccgccgcagtcgcagcagaagccgaagccggcggcggacgtgggggcggtggggcgcgtgctggggcggcccatggaggacgtgcgcgcgacctacactttcggccgcgagctcgggcggggccagttcggggtcacctacctcgtcacgcactcggagaccgggcagcgcttcgcctgcaagtccatcgccacgcggaagctcgtccaccgcgacgacattgaggacgtgcgccgggaggtgcagatcatgcaccacctcacgggccaccgcaacatcgtcgagctccggggagcatacgaggacaggcactcggtcaaccttgttatggagctctgcgagggcggggagctcttcgaccgcatcatagccaagggccactacaccgagcgagccgccgcctcgctctgccgcgagatcgtcgccgtcgtccacagctgccactccatgggggtcttccatcgggatctcaagcccgagaacttcctgttcctcaataacaaggaggactccccgctcaaggccacggacttcggtctctccgtcttcttcaagcacggggagacgtttaaggatcttgtgggaagtgcatattatgttgctcctgaggtactgaaacggaaatatggggcagaggctgacatatggagtgctggggtcattctttacatccttctgtctggtgttcctcctttttgggcagagaatgaggatggcatatttgatgctgtcttgcgcggtcacatcgatttctcttctgacccttggccttcaatatccaatggtgcaaaggatttggttaagaagatgctgcgacaagacccaaaagaacgcctgactgctgctgaaattttgaaccacccatggattagagaggatggagaggccccagataagccacttgacattactgtcattggtagaatgaaacagttcagggcaatgaacaagctcaagaaagttgcattgaaggttgtggctgagaacttatcagatgaagagattatgggcctaaaagaaatgttcagatccctggatacagataacagtgggacaattactcttgaagagctaagatctggtttaccaaaacttggtacaaaaatttctgaatcagaaattaaacaattgatggaggcggctgatgttgatggaaatggtaccattgattatgcggagtttatatcagccacaatgcatttgaatagattggagaaggaagaccacatactcaaagcttttgaatatttcgataaggatcacagcggatacataaccgtagatgagttggaagaagctttgaagaagtatgatatgggagatgacaaaactataaaagaaatcattgctgaagtagatacagatcatgatggaagaattaattaccaggagtttgttgccatgatgaggaacaacagccctgagattgttccaaatcggaggcgcatgttctaa

SEQ ID NO: 2586 - protein, 530 aa, Zea mays
MGNRASRHHRQAAEQQPATPTLPKPQPQIQPPPPPPPTQTQQYQQAPPQSQQKPKPAADVGAVGRVLGRPMEDVRATYTFGRELGRGQFGVTYLVTHSETGQRFACKSIATRKLVHRDDIEDVRREVQIMHHLTGHRNIVELRGAYEDRHSVNLVMELCEGGELFDRIIAKGHYTERAAASLCREIVAVVHSCHSMGVFHRDLKPENFLFLNNKEDSPLKATDFGLSVFFKHGETFKDLVGSAYYVAPEVLKRKYGAEADIWSAGVILYILLSGVPPFWAENEDGIFDAVLRGHIDFSSDPWPSISNGAKDLVKKMLRQDPKERLTAAEILNHPWIREDGEAPDKPLDITVIGRMKQFRAMNKLKKVALKVVAENLSDEEIMGLKEMFRSLDTDNSGTITLEELRSGLPKLGTKISESEIKQLMEAADVDGNGTIDYAEFISATMHLNRLEKEDHILKAFEYFDKDHSGYITVDELEEALKKYDMGDDKTIKEIIAEVDTDHDGRINYQEFVAMMRNNSPEIVPNRRRMF

SEQ ID NO: 2587 - DNA, 447 bp, Zea mays
  CDS (1)..(447)
atgggcggcaaggacctgacagaggagcagatcgcctcgatgcgggaggccttcacgctgttcgacacggacggggacggccgcatcgctcccacggagctgggcgtcctcatgcgctccctcggcgggaacccaacccaggcgcagctccgggacatcgccgcgcaggagaagctcacggcgcccttcgacttcccgcgcttcctcggcctcatgcgcgcccacctcaggcccgagcccttcgaccgcccgctccgcgacgccttccgcgtcctcgacaaggacggctccggcaccgtcgccgtcgccgacctccgccacgtcctcacgtccatcggagagaagctcgaggtgcacgagttcgacgagtggatccgcgaggtcgacgtcgcgcccgacggcaccatccgctacgacgacttcatccgccgcatcgtcgccaaatga

SEQ ID NO: 2588 - protein, 148 aa, Zea mays
MGGKDLTEEQIASMREAFTLFDTDGDGRIAPTELGVLMRSLGGNPTQAQLRDIAAQEKLTAPFDFPRFLGLMRAHLRPEPFDRPLRDAFRVLDKDGSGTVAVADLRHVLTSIGEKLEVHEFDEWIREVDVAPDGTIRYDDFIRRIVAK

SEQ ID NO: 2589 - DNA, 246 bp, Zea mays
  CDS (1)..(246)
atgcagaacgaggagggtaagactgtggacctctatgtccccaggaagtgctcggccacaaacaggatcatcactgccaaggaccatgcctctgtccagatcaacattggccacttggatgcgaatggcctgtatgatggtcacttcacaacgtttgctctctctgggtttgtccgtgctcagggcgacgcagacagctccttggacaggctgtggcagaagaagaaggctgatatcaagcagtag

SEQ ID NO: 2590 - protein, 81 aa, Zea mays
MQNEEGKTVDLYVPRKCSATNRIITAKDHASVQINIGHLDANGLYDGHFTTFALSGFVRAQGDADSSLDRLWQKKKADIKQ

SEQ ID NO: 2591 - DNA, 567 bp, Zea mays
  CDS (1)..(567)
atgaggcctctcgacgagaaggagacgactcaggtattcgagaagctgttcaagttcacggggcccaacctgaagcacctcctggagcgccccgcagtggagggccccgacgcggagcccggccgctactgcctccggcttcaccgcaatcgcgtctactacgcctccgaggcgctcgtgcgccgcgccaccgccgtgtcccgaccgcgcctcgccggcgtggggacgcccatcggcaagttcacccaccacggcgcgttccaccttacggtccacgcgctcgacctcctcgctgcacacgcgcgccgccgcgtctggctcaaacccgacaccgagcgttcctttctctttggcaattccgtgcccaagtcttctctcgctcgcatcaccgagaacaccaaggccggggacggggtggtcgtcatgtccatggctgacgtccctctcgggttcggcattgcggcgaggtcggcgcaggattgcaggaaggccgacaccaacgccgtcgtcgtgctgcaccagtcggacgccggggagtacctccgcaaggaggaggagctcatgtga

SEQ ID NO: 2592 - protein, 188 aa, Zea mays
MRPLDEKETTQVFEKLFKFTGPNLKHLLERPAVEGPDAEPGRYCLRLHRNRVYYASEALVRRATAVSRPRLAGVGTPIGKFTHHGAFHLTVHALDLLAAHARRRVWLKPDTERSFLFGNSVPKSSLARITENTKAGDGVVVMSMADVPLGFGIAARSAQDCRKADTNAVVVLHQSDAGEYLRKEEELM

SEQ ID NO: 2593 - DNA, 411 bp, Zea mays
  CDS (1)..(411)
atggctcgtacgaagcagaccgcccgcaagtccaccggaggcaaggccccgcgcaagcagctcgcaaccaaggcggcgagggagtcggcgccgacgaccggcggcgtgaagaagccccacaggtacaggcccggcaccgtggcgctgcgcgagatccgcaagtaccagaagagcacggagctgctgatccggaagttgcccttccagcgcctggtccgtgagatcgctcaggacttcaagacggatctgcggttccagagccacgccgtcctggccctccaggaagccgccgaggcctacctcgtcggcctgttcgaggacaccaacctctgcgccatccacgccaagcgcgtcaccatcatgcccaaagacatccaactcgcccgccgcatccgcggcgagcgcgcgtag

SEQ ID NO: 2594 - protein, 136 aa, Zea mays
MARTKQTARKSTGGKAPRKQLATKAARESAPTTGGVKKPHRYRPGTVALREIRKYQKSTELLIRKLPFQRLVREIAQDFKTDLRFQSHAVLALQEAAEAYLVGLFEDTNLCAIHAKRVTIMPKDIQLARRIRGERA

SEQ ID NO: 2595 - DNA, 453 bp, Zea mays
  CDS (1)..(453)
atggcgcccaaggccgagaagaagcccgcggcgaagaagccggcggaggaggagcccgcggcggagaagacgaccgccgggaagaagcccaaggcggagaagcggatccccgctggcaagtccgccggcaaggagggcggcgagggcaagcgtggcaagaagaagggcaagaagagcgtggagacgtacaagatctacatcttcaaggtgctgaagcaggtgcacccggacatcggcatctcctccaaggccatgtccatcatgaactccttcatcaacgacatcttcgagaagctggccggcgaggccgccaagctcgcgcgctacaacaagaagcccaccatcacgtcccgcgagatccagacctccgtgcgcctcgtgctccccggcgagctcgccaagcacgccgtctctgagggcaccaaggccgtcaccaagttcacctcctcctag

SEQ ID NO: 2596 - protein, 150 aa, Zea mays
MAPKAEKKPAAKKPAEEEPAAEKTTAGKKPKAEKRIPAGKSAGKEGGEGKRGKKKGKKSVETYKIYIFKVLKQVHPDIGISSKAMSIMNSFINDIFEKLAGEAAKLARYNKKPTITSREIQTSVRLVLPGELAKHAVSEGTKAVTKFTSS

SEQ ID NO: 2597 - DNA, 2493 bp, Zea mays
  CDS (1)..(2493)
atggaggcgttcggcgggttcttcgtggacgagaaggcagcgcgggtggagaacatcttcctcgagttcctgaagcgattcaaggagtctgatggcgcgggggagccgttctacgaggcggagatggaggtgatgcggtcgcgggagtccactaccatgtacgtagactttgcgcacgtcatgcgcttcaacgacgtcctccagaaggccatctctgaggagtacctcaggtttgaaccgtacttgaggaatgcatgcaagaggtttgcgttggagcaccgggctggcgagaaccgtgccccgctcatctcagatgatagccccaacaaagatatcaacattgctttctataacatcccgatgctgaaaaaactgagagagcttgggacagccgaaattggtaagctcacatcagtaatgggtgttgtgacacggacaagtgaagtgcggcctgaactattgcaaggaaccttcaaatgcctcgactgtgggaatgttgtaaagaatgtggagcagcagttcaagtacactgagccgataatatgcgttaatgcaacatgccagaaccgaacaaaatgggcccttctccgccaggaaagcaaattcacagattggcagcgggtcagaatgcaggagacatcaaaagagatacctgctggatcacttcctcgttcccttgatgtcattctgcggcatgagattgttgagaaggctagagctggggacacggttatatttactggaactgttgttgcagttcctgatgttatggcactaacttcacctggcgaacgagcagagtgtcgcagggaagctcctcagcgaaaaatgggaggtgttcaagaaggtgtaaagggcttgaagtcccttggagttagggatctctcttatcgccttgcttttgtagcaaattcagtgcaggtcgcagatggcaggagagaaggggacatcagggatcgggacacagatggtgatgacagcgagagacagaaattcacagaagaagaggaagatgaggttgttaggatgaggaacactcctgatttctttaataagatagttgatagcatatgtcctaccgtctttggtcatcaagaaattaagagggcagtgcttcttatgcttttgggtggtgttcataagataacacatgaagggatcaaccttagaggtgacatcaatgtctgtattgttggtgacccaagctgcgcaaagtctcagttcctaaaatatactgctggtattgttccaagatctgtttacacgtcagggaagtcatcatctgctgctggtctgacagcaactgttgctaaagaaccggagactggtgaattctgtattgaggctggcgccctgatgttagctgataatggcatttgttgtatcgatgaatttgataaaatggacatcaaggatcaggtcgctatacatgaagcaatggaacagcaaacaattagcataaccaaagcaggaatacaggcaactttgaatgcacgaacatcaattttagctgcagcaaatccgaccggaggccgttatgacaagtcaaaaccacttaagtacaacgtggcattgcccccagctattctttcaagatttgatctcgtctacatcatgattgatgaacctgatgaaaacaccgactaccacattgctcatcacattgtaagagtccatcagaaacgtgaagaagcacttgcccctgcatttagcactgcacaactgaagcgttatatatcttttgcgaagtctttgaaacctcagctgagttcagaagcaaagaaagttctggtggagtcgtatgttaccctccgtagaggggacagtactcctggaactagggttgcttacaggatgacagttcggcaattggaagcattgattcggctgtcagaagctattgctcgaagccatttagaaagagttgttctcccagctcatgtccgcctggcagttaaattgctcaagacatcaatcatcagtgttgaatcaagtgaagttgatctctctgactttcaagatgctgaagatggaacaaacgtaccttctgagaatgatgctggacagccagctgaagaaggtgctgctcctcaacagcaggatgcagaaaatgaccaagcagcggataacggtaagaagaaattggtaataactgaagaacacttccagagagttactcaagctttggttatgagactaaggcagcatgaagagtcagtcaagaaagatggagatggtatggctggcatgaaacaaggggatcttatcatttggtatgttgagcagcagaatgccaaaggcgcatatagttctaccgcggaggtgaaggaagaagtgaagtgtatcaaggccattatagagagactcatacagcgggaaggccatcttatagtcattgacgaaggcacagcggctactgccgaagatggcagtcgctcaagaacatcagagagcagaatattggcagttaacccgaactatgttattgattag

SEQ ID NO: 2598 - protein, 830 aa, Zea mays
MEAFGGFFVDEKAARVENIFLEFLKRFKESDGAGEPFYEAEMEVMRSRESTTMYVDFAHVMRFNDVLQKAISEEYLRFEPYLRNACKRFALEHRAGENRAPLISDDSPNKDINIAFYNIPMLKKLRELGTAEIGKLTSVMGVVTRTSEVRPELLQGTFKCLDCGNVVKNVEQQFKYTEPIICVNATCQNRTKWALLRQESKFTDWQRVRMQETSKEIPAGSLPRSLDVILRHEIVEKARAGDTVIFTGTVVAVPDVMALTSPGERAECRREAPQRKMGGVQEGVKGLKSLGVRDLSYRLAFVANSVQVADGRREGDIRDRDTDGDDSERQKFTEEEEDEVVRMRNTPDFFNKIVDSICPTVFGHQEIKRAVLLMLLGGVHKITHEGINLRGDINVCIVGDPSCAKSQFLKYTAGIVPRSVYTSGKSSSAAGLTATVAKEPETGEFCIEAGALMLADNGICCIDEFDKMDIKDQVAIHEAMEQQTISITKAGIQATLNARTSILAAANPTGGRYDKSKPLKYNVALPPAILSRFDLVYIMIDEPDENTDYHIAHHIVRVHQKREEALAPAFSTAQLKRYISFAKSLKPQLSSEAKKVLVESYVTLRRGDSTPGTRVAYRMTVRQLEALIRLSEAIARSHLERVVLPAHVRLAVKLLKTSIISVESSEVDLSDFQDAEDGTNVPSENDAGQPAEEGAAPQQQDAENDQAADNGKKKLVITEEHFQRVTQALVMRLRQHEESVKKDGDGMAGMKQGDLIIWYVEQQNAKGAYSSTAEVKEEVKCIKAIIERLIQREGHLIVIDEGTAATAEDGSRSRTSESRILAVNPNYVID

SEQ ID NO: 2599 - DNA, 903 bp, Zea mays
  CDS (66)..(617)
cgcgcactcgtagtcttgactcttgcgtgcttccctcgtcttctcggacgttccgttccatcgccatggcggaccagcttagcgaggagcagattgccgagttcaaggaagctttcagcctcttcgacaaggacggcgacggttgcatcacaaccaaggagctcggaaccgtgatgcggtctctcgggcagaaccccaccgaggcggagctgcaggacatgatcgccgaggtggacagcaacggcagcggcaccatcgacgagcaggagttcctgggcctgatggcgcgcaagatgagggacgcggagtcggaggaggagctcagggaggcgttccgcgtgttcgacaaggaccagaacggggtgatctccgcggccgagctccggcacttgatgaccaacctcggggagaagctgagcgagcaggaggtggccgagatggtccgtgaggccgacgtggaccgcgacggccacatcaactacgacgagttcgtcaaggtcatgacggccaagcgaaggagcaagaggacggaggagaaggcgacgcgcggcaagaagaaaccggcggcggcgccgtccgacgccggcaagcgtggccagaaatgcgtgatcctgtgagccggagcttcggttgtccagtacatgctggtgcagtggtgctgcgtgcgtgtcacccgctcgacctctgcttccggcacaccagctgcgggaagctccacttgttctgcaggtgaatgtagctgtttgtaaacttatcagagcgtgtttgggagcatgattgaatgggaaaatccacttgagtaagggattttagtcatctagatctcctctaatctccttgctcccaaacaagccattaaataagaaaaacggaggaagtaactgtttgaaaaaaaaaaaaaaa

SEQ ID NO: 2600 - protein, 183 aa, Zea mays
MADQLSEEQIAEFKEAFSLFDKDGDGCITTKELGTVMRSLGQNPTEAELQDMIAEVDSNGSGTIDEQEFLGLMARKMRDAESEEELREAFRVFDKDQNGVISAAELRHLMTNLGEKLSEQEVAEMVREADVDRDGHINYDEFVKVMTAKRRSKRTEEKATRGKKKPAAAPSDAGKRGQKCVIL

SEQ ID NO: 2601 - DNA, 1324 bp, Zea mays
  CDS (108)..(866)
ttgcgaacaaaaaagaatcagcagcccttaaggccattgattttggcctgtctgtatttttcactccaggcgaacggtttacagagattgttgggagtccttattacatggccccagaggtactaaagagaaattatggcccagaggttgatgtttggagtgcaggggtgattctgtacattcttctctgtggtgtccctccattctgggcagaatcggagcaaggtgttgctcaggcaattatccgatctgtcattgatttcaaaagagatccatggccaagggtgtctgataatgccaaagaccttgtaagaggaatgctcaacccagatccaaagcgacgattgacagctcagcaagtgcttgatcacccatggttgcagaacattaagaaggctccaaatgtcaatttgggcgaaactgttaaggccagactccaacaattctctgtgatgaacaagttcaagaagcatgcacttagggtcatagctgagcacctttcagtagaagaggctgctgacataaaggatatgtttgagaagatggatcttaacaaggatcaaatgctgaatttcgatgagctgaagcttggtctgcataaatttggtcaccaaatccctgatgcagatgttcaaatactaatggaagctgcggatgctgatggaaacgggtccttggattatggagaatttgtcacactatctgttcatctaagaaagattggaaatgatgagcatctgcataaggcatttgcatactttgaccggaatcagagtggttatattgaaattgatgaactccgtgagtcattagctgatgaccttggacagaatcatgaagaggttatcaatgccattatccgttgacgtagacaccgataaggatggcaagataagctacgatgagtttgcagcgatgatgaaggccggaacagactggaggaaagcgtcaagacagtattcgagagagcggttcaccagcctgagccttaagctgcaaaaggatggatcgttgcagatggagagtacgcagtagtcgataacacccataggcaagttgtgaattacagaaggaaaccctgtgtagattttctggttgtttgttgacagctcttctgctcgtcctgatcttctattgctttctattcttcactcgtctgtttgaagcattggggggattgttgatgccgtgattgtatttagactgcatgatccatgcctcactgatttccacaccttagggcaaagtgtactgtacaagggaaagaggggaaaatgattaggagtttgtacgcatttcttaaaaaaataaaaaaaaaaaaaaa

SEQ ID NO: 2602 - protein, 252 aa, Zea mays
MAPEVLKRNYGPEVDVWSAGVILYILLCGVPPFWAESEQGVAQAIIRSVIDFKRDPWPRVSDNAKDLVRGMLNPDPKRRLTAQQVLDHPWLQNIKKAPNVNLGETVKARLQQFSVMNKFKKHALRVIAEHLSVEEAADIKDMFEKMDLNKDQMLNFDELKLGLHKFGHQIPDADVQILMEAADADGNGSLDYGEFVTLSVHLRKIGNDEHLHKAFAYFDRNQSGYIEIDELRESLADDLGQNHEEVINAIIR

SEQ ID NO: 2603 - DNA, 450 bp, Zea mays
  CDS (1)..(450)
atggcgcccaaggccgagaagaagcccgccgccaagaagcctgcggaggaggagccggcggcggagaaggccacggcggggaagaagcccaaggctgagaagcggctccccgcgggcaagtccgcaggcaaggagggtggcgagaagaaggggaagaagaaggcaaagaagtcggtggagacgtacaagatctacatcttcaaggtgctgaagcaggtgcacccggacattggcatctcgtccaaggccatgtccatcatgaactccttcatcaacgacatcttcgagaagctggcggcggaggcggccaagctggcgcggtacaacaagaagcctaccattacgtcccgcgagatccagacctccgttcgcctcgtcctccccggcgagctcgccaagcacgccgtctccgagggcaccaaagccgtcaccaagttcaccagctcctag

SEQ ID NO: 2604 - protein, 149 aa, Zea mays
MAPKAEKKPAAKKPAEEEPAAEKATAGKKPKAEKRLPAGKSAGKEGGEKKGKKKAKKSVETYKIYIFKVLKQVHPDIGISSKAMSIMNSFINDIFEKLAAEAAKLARYNKKPTITSREIQTSVRLVLPGELAKHAVSEGTKAVTKFTSS

SEQ ID NO: 2605 - DNA, 450 bp, Zea mays
  CDS (1)..(450)
atggcgcccaaggcggagaagaagccagcggagaagaagccggcggccgaggagaaggcggagaagacgaccgcagggaagaagcccaaggccgagaagcggctgcccgcgtccaagtcctccggcaaggagggcggcgagaagaaggggaagaagaaggccaagaagagcgtggagacctacaagatctacatcttcaaggtgctgaagcaggtgcaccccgacatcggcatatcctccaaggccatgtccatcatgaactccttcatcaacgacatctttgagaagctggccggcgaggccgccaagctggcgcggtacaacaagaagcccaccatcacgtcccgcgagatccagacctccgtgcgcctagtcctccccggagagctcgccaagcacgccgtctccgagggaaccaagcacgccgtcaccaagttcaccagcaactga

SEQ ID NO: 2606 - protein, 149 aa, Zea mays
MAPKAEKKPAEKKPAAEEKAEKTTAGKKPKAEKRLPASKSSGKEGGEKKGKKKAKKSVETYKIYIFKVLKQVHPDIGISSKAMSIMNSFINDIFEKLAGEAAKLARYNKKPTITSREIQTSVRLVLPGELAKHAVSEGTKHAVTKFTSN

SEQ ID NO: 2607 - DNA, 921 bp, Zea mays
  CDS (1)..(921)
atgatcccctacgcgactgcggcggaggcggagggagcactggggcgcaccatgacgtgggctgagacagcatggtacgagtactcggcggtgatgccagattcctggctgcactgccacaccacatttatcctgttcgtcatctacagcatcgccccgctgcccctgctactcctagagcagttcgctccgtccgtcgtgctgccgtacaagctgcagccccgggtacggctgcccccggcagcctccctcagctgctacatggacgcggcctgcatctttccgctcgccgttggccttcagttcgtctcctatcctgcggtcgccaagatactaaggacccgaatgggactgccgttgccgtcggtgagggagaccatcgcgcagctagtcgtatactctctagtggaggattacctcagctactggatgcaccgtctgctgcacacccagtggtgctacgagaagatccaccgcgtccaccacgagttcacggctcctacaggcttcgccatgtcgtacagccactgggccgagaacgtcgtcctttctatcccggccttggccggcccagtgctcgtgccatgccatgtcaccacgcagtggctatggttctccatccgcctaattgagggcattaacacgcacagcggttaccatttcccgttcagcccttgcaggctgattccattctacggaggggctgcataccatgactaccatcactatgcaggaggccgtagccaaagcaactttgcacccctgttcacctactgtgattatttatataggacagacaaaggctacagataccacaagctaaagcaagagaagctgaagagtctagcagaaaatagtgcggataaaggaggcaactactcattcgacgaagggaaaaagaacagatatttttgtgcctga

SEQ ID NO: 2608 - protein, 306 aa, Zea mays
MIPYATAAEAEGALGRTMTWAETAWYEYSAVMPDSWLHCHTTFILFVIYSIAPLPLLLLEQFAPSVVLPYKLQPRVRLPPAASLSCYMDAACIFPLAVGLQFVSYPAVAKILRTRMGLPLPSVRETIAQLVVYSLVEDYLSYWMHRLLHTQWCYEKIHRVHHEFTAPTGFAMSYSHWAENVVLSIPALAGPVLVPCHVTTQWLWFSIRLIEGINTHSGYHFPFSPCRLIPFYGGAAYHDYHHYAGGRSQSNFAPLFTYCDYLYRTDKGYRYHKLKQEKLKSLAENSADKGGNYSFDEGKKNRYFCA

SEQ ID NO: 2609 - DNA, 23 bp, Artificial sequence
  primer
atgtcctctgccgccgaaaagaa

SEQ ID NO: 2610 - DNA, 24 bp, Artificial sequence
  primer
ttaggcttgagtagaggaggagta

SEQ ID NO: 2611 - protein, 148 aa, Artificial sequence
  consensus sequence
  Variant (2)..(2): Xaa in position 2 is any amino acid
  Variant (4)..(13): Xaa in position 4 to 13 is any amino acid
  Variant (14)..(29): Xaa in position 14 to 29 is any or no amino acid
  Variant (31)..(51): Xaa in position 31 to 51 is any or no amino acid
  Variant (54)..(54): Xaa in position 54 is any amino acid
  Variant (56)..(58): Xaa in position 56 to 58 is any amino acid
  Variant (62)..(62): Xaa in position 62 is any amino acid
  Variant (76)..(76): Xaa in position 76 is any amino acid
  Variant (84)..(84): Xaa in position 84 is any amino acid
  Variant (99)..(99): Xaa in position 99 is any amino acid
  Variant (106)..(106): Xaa in position 106 is any amino acid
  Variant (111)..(111): Xaa in position 111 is any amino acid
AXKXXXXXXXXXXXXXXXXXXXXXXXXXXKXXXXXXXXXXXXXXXXXXXXXKRXKXXXESYXIYIYKVLKQVHPDXGISSKAMXIMNSFVNDIFERIAXEASRLAXYNKRXTITSREIQTAVRLLLPGELAKHAVSEGTKAVTKYTSS

SEQ ID NO: 2612 - protein, 36 aa, Artificial sequence
  Consensus sequence
  Variant (2)..(2): Xaa in position 2 is Ser or Thr
  Variant (4)..(5): Xaa in position 4 to 5 is any amino acid
  Variant (7)..(7): Xaa in position 7 is Ile, Leu or Val
  Variant (8)..(8): Xaa in position 8 is Phe or Tyr
  Variant (18)..(18): Xaa in position 18 is any amino acid
  Variant (22)..(23): Xaa in position 22 to 23 is any amino acid
  Variant (24)..(24): Xaa in position 24 is Ala or Ser
  Variant (26)..(26): Xaa in position 26 is any amino acid
  Variant (28)..(28): Xaa in position 28 is Leu or Met
  Variant (32)..(32): Xaa in position 32 is Ile or Val
  Variant (33)..(33): Xaa in position 33 is Asn or Thr
  Variant (35)..(35): Xaa in position 35 is any amino acid
EXYXXYXXKVLKQVHPDXGISXXXMXIXNSFXXDXF

SEQ ID NO: 2613 - protein, 40 aa, Artificial sequence
  Consensus sequence
  Variant (2)..(3): Xaa in position 2 to 3 is any amino acid
  Variant (7)..(7): Xaa in position 7 is Lys or Arg
  Variant (8)..(8): Xaa in position 8 is Ala, Pro or Ser
  Variant (11)..(11): Xaa in position 11 is Ser or Thr
  Variant (15)..(15): Xaa in position 15 is Ile or Val
  Variant (18)..(18): Xaa in position 18 is Ala, Ser or Val
  Variant (22)..(22): Xaa in position 22 is Ile, Leu or Val
  Variant (28)..(28): Xaa in position 28 is Ala or Ser
LXXYNKXXTIXSREXQTXVRLXLPGELXKHAVSEGTKAVT

SEQ ID NO: 2614 - DNA, 861 bp, Saccharomyces cerevisiae
  CDS (1)..(861)
atggaaacggatagtggtatacctggtcattcatttgtgttaaagtggacaaaaaacatcttttcgcgcacattgcgtgcatctaactgtgtacctagacatgttgggttcatcatggatgggaacaggagattcgctagaaagaaagagatggacgtaaaggagggccacgaggcaggatttgttagtatgagtagaatcttagaactgtgttatgaagcaggagtcgatacggctaccgtgtttgccttttcaattgaaaatttcaagaggagctcacgggaagttgaatcactgatgactttagcgcgcgaaaggatacgacaaatcacagaacgtggagagctggcctgtaagtatggggtacgcattaaaattatcggcgatctctctttgttggataagtctctattagaagatgttcgggttgctgtggaaactacaaagaacaacaaaagggccacgttaaatatctgctttccatatacaggcagggaagaaatcttgcatgccatgaaagaaacaattgttcaacataagaagggcgccgctatagacgaaagcacgttagaatcgcatctctacacggcgggggtaccccctttagatttattgattaggacaagtggcgtttccagattaagtgactttttgatatggcaggcatcgagtaagggcgtacgcatcgaattgctggattgtttatggccagagtttggacctatacggatggcatggattttattaaaattttcgtttcacaaatcctttttaaacaaagagtacagattagaggaaggtgattatgacgaggaaaccaatggggaccccatcgatttgaaagaaaaaaagttgaattaa

SEQ ID NO: 2615 - protein, 286 aa, Saccharomyces cerevisiae
METDSGIPGHSFVLKWTKNIFSRTLRASNCVPRHVGFIMDGNRRFARKKEMDVKEGHEAGFVSMSRILELCYEAGVDTATVFAFSIENFKRSSREVESLMTLARERIRQITERGELACKYGVRIKIIGDLSLLDKSLLEDVRVAVETTKNNKRATLNICFPYTGREEILHAMKETIVQHKKGAAIDESTLESHLYTAGVPPLDLLIRTSGVSRLSDFLIWQASSKGVRIELLDCLWPEFGPIRMAWILLKFSFHKSFLNKEYRLEEGDYDEETNGDPIDLKEKKLN

SEQ ID NO: 2616 - DNA, 900 bp, Caenorhabditis elegans
  CDS (1)..(900)
atggcggcaaacttgacagccgatgaagaggacggctggtttgtggctcaacaggagcaaccgtggtggcaatggttgctacgtcgattcatcgcttcaggaccaatcccgagacacgtggcattcgtgatggacggaaaccgacgttttgcaaagacaaaacatttgggaaatgttatcaaggggcacgaaaagggattcacacaacttgcgaaaattcttgattggtgcaaccgtttcggtattcgagaaatcacagtttacgctttcagtattgaaaatttcaaacgaagtgaagaagaggtcagcgggcttatgcgactggcagaagagaaattccaaaaattgctcaacgactctgagaaactggatgaaaaacgaatttgtttccgattttacggaaatcgatcgcttctctcgtcacgccttcagaaattaatgagtgatattgaacatcgaacagagaatttcgatggaggaagattaaatgtttgtatgccatatacttcaagagatgaaattgcaagaagctttgaaactattcgaaaacacgtaaaagatgggaaagtcaatgtggatgagatcaacgaatcaatgattgatgcgtgtttggatagtggatgtggtggaacttctccagatttatttattcgaacatccggtgaacatcgactttcggactttttgatgtggcaagcatcagaaactcatgtctactttgatgatgttctttggcctgaatttggatattttaatctgtgtaaagcaattctaaattatcaatattatagaactactgtaacaaaaatgacatcttcgaaagtatctgatgataatgctacatcgtggaaaatgaatttcagtggaaatgatcgagatttgatttccgtcaaatcgtga

SEQ ID NO: 2617 - protein, 299 aa, Caenorhabditis elegans
MAANLTADEEDGWFVAQQEQPWWQWLLRRFIASGPIPRHVAFVMDGNRRFAKTKHLGNVIKGHEKGFTQLAKILDWCNRFGIREITVYAFSIENFKRSEEEVSGLMRLAEEKFQKLLNDSEKLDEKRICFRFYGNRSLLSSRLQKLMSDIEHRTENFDGGRLNVCMPYTSRDEIARSFETIRKHVKDGKVNVDEINESMIDACLDSGCGGTSPDLFIRTSGEHRLSDFLMWQASETHVYFDDVLWPEFGYFNLCKAILNYQYYRTTVTKMTSSKVSDDNATSWKMNFSGNDRDLISVKS

SEQ ID NO: 2618 - DNA, 1005 bp, Homo sapiens
  CDS (1)..(1005)
atgtcatggatcaaggaaggagagctgtcactttgggagcggttctgtgccaacatcataaaggcaggcccaatgccgaaacacattgcattcataatggacgggaaccgtcgctatgccaagaagtgccaggtggagcggcaggaaggccactcacagggcttcaacaagctagctgagactctgcggtggtgtttgaacctgggcatcctagaggtgacagtctacgcattcagcattgagaacttcaaacgctccaagagtgaggtagacgggcttatggatctggcccggcagaagttcagccgcttgatggaagaaaaggagaaactgcagaagcatggggtgtgtatccgggtcctgggcgatctgcacttgttgcccttggatctccaggagctgattgcacaagctgtacaggccacgaagaactacaacaagtgtttcctgaatgtctgttttgcatacacatcccgtcatgagatcagcaatgctgtgagagagatggcctggggggtggagcaaggcctgttggatcccagtgatatctctgagtctctgcttgataagtgcctctataccaaccgctctcctcatcctgacatcttgatacggacttctggagaagtgcggctgagtgacttcttgctatggcagacctctcactcctgcctggtgttccaacccgttctgtggccagagtatacattttggaacctcttcgaggccatcctgcagttccagatgaaccatagcgtgcttcagcagaaggcccgagacatgtatgcagaggagcggaagaggcagcagctggagagggaccaggctacagtgacagagcagctgctgcgagaggggctccaagccagtggggacgcccagctccgaaggacacgcttgcacaaactctcggccagacgggaagagcgagtccaaggcttcctgcaggccttggaactcaagcgagctgactggctggcccgtctgggcactgcatcagcctga

SEQ ID NO: 2619 - protein, 334 aa, Homo sapiens
MSWIKEGELSLWERFCANIIKAGPMPKHIAFIMDGNRRYAKKCQVERQEGHSQGFNKLAETLRWCLNLGILEVTVYAFSIENFKRSKSEVDGLMDLARQKFSRLMEEKEKLQKHGVCIRVLGDLHLLPLDLQELIAQAVQATKNYNKCFLNVCFAYTSRHEISNAVREMAWGVEQGLLDPSDISESLLDKCLYTNRSPHPDILIRTSGEVRLSDFLLWQTSHSCLVFQPVLWPEYTFWNLFEAILQFQMNHSVLQQKARDMYAEERKRQQLERDQATVTEQLLREGLQASGDAQLRRTRLHKLSARREERVQGFLQALELKRADWLARLGTASA

SEQ ID NO: 2620 - DNA, 762 bp, Arabidopsis thaliana
  CDS (1)..(762)
atgatgacaacgagaaacggtagtttacggttttttaatcatacttttagtttttatgatgaggcaacttgtgttgtccgagaggaggagctacaaagagagctgatgccgagacacgtgtcattcatactagatgggaaccggagatgggccaaacgagacggattgacgacggcacaaggccacgaggctggaactaaacgaattatagagatagccgaggtctgcttcgagttgggtattcatacagtctcagcttttgctttctccacagagaattggggaagagacaagtttgaggttaagtgcttaatgtctttgttcaaccactacctcaagtccaacattcaatactttcaaagaaaggaagttcgcgtttctgttatcgggaataaaacgaagatccctgaatctctcctcaaagaaatccatgagatagaggaagctaccaaggctacaagaataagcatctcatcatggcatcttgtgaagaaatcagaaaaagggttgatccgagaggaagatgtagacgaggcattgatcgagagagagcttctaacgaattgtagtgacttcccaagtcctgatttaatgattaggacaagtggagaacaaaggattagtaacttcttcttgtggcaacttgcttataccgagcttttctactcgccggtattgtggcctgatttcgataaggataagcttctagaggccctcgcttcgtatcagggcagggaaagacgatttggttgtcgcgtgtga

SEQ ID NO: 2621 - protein, 253 aa, Arabidopsis thaliana
MMTTRNGSLRFFNHTFSFYDEATCVVREEELQRELMPRHVSFILDGNRRWAKRDGLTTAQGHEAGTKRIIEIAEVCFELGIHTVSAFAFSTENWGRDKFEVKCLMSLFNHYLKSNIQYFQRKEVRVSVIGNKTKIPESLLKEIHEIEEATKATRISISSWHLVKKSEKGLIREEDVDEALIERELLTNCSDFPSPDLMIRTSGEQRISNFFLWQLAYTELFYSPVLWPDFDKDKLLEALASYQGRERRFGCRV

SEQ ID NO: 2622 - DNA, 771 bp, Vibrio cholerae O1 biovar eltor str. N16961
  CDS (1)..(771): transl_table=11
ttgttcgttgtgtttcttatgcaaaatctatctctttcccaagatgtattgcctaaacatattgccgtcattatggatggtaatggtcgttgggcgaaagcgcagggaaaaccgcgtgttttcggccataaaaatggtgtggctgcggtacgaaaaaccatctctacttctgctcgccttggcattaaagccgtaactctgtttgcttttagcagcgagaactggcgtcgtccggaagaagaagtgggcgtgttgatggaactttttatgacggttctttcaaccgaaattaagaaattgcataaaaacaatctgcgtttgcgagtgatcggtgataaaagccgctttagtgagcgtctgcaaacgaaaatcgcgcaagcggagcagttaaccgccagcaataccggcatggtggtcaacatcgctgcgaactacggtggacagtgggatatcttgcaagctactcaagcattggctgaaaaggttacccaaggtgaactgcaaccgtcggacatcgatgaagacgtatttaagcagcatttgactatggctgatctgccggatgtggatttgttgatccgcaccagtggagagtgccgcattagtaattttatgctttggcaacttgcctatgcagaaatgtatttcactccagtcttctggcctgagttcgatgaaaactgcctgattgaagcagtgacttggtttgttaatcgtgagcgccgttttggctgtactggtgaacaagtcaaggcattgatggaaaactga

SEQ ID NO: 2623 - protein, 256 aa, Vibrio cholerae O1 biovar eltor str. N16961
MFVVFLMQNLSLSQDVLPKHIAVIMDGNGRWAKAQGKPRVFGHKNGVAAVRKTISTSARLGIKAVTLFAFSSENWRRPEEEVGVLMELFMTVLSTEIKKLHKNNLRLRVIGDKSRFSERLQTKIAQAEQLTASNTGMVVNIAANYGGQWDILQATQALAEKVTQGELQPSDIDEDVFKQHLTMADLPDVDLLIRTSGECRISNFMLWQLAYAEMYFTPVFWPEFDENCLIEAVTWFVNRERRFGCTGEQVKALMEN

SEQ ID NO: 2624 - DNA, 1020 bp, Deinococcus radiodurans R1
  CDS (1)..(1020): transl_table=11
gtgggccgtgtgagggggatcagggtcagtcatgggcggtcatcctccggaggtgcccccagcctgagggcggccccaggggacgagtcaagccgtgaacgggtcaggacaggggggagcgtgaagggagcgccccctttctccaccttttgtccgacgctcttttgctggccccgcgctacactccctgacgttatggcgtccctgaactccgccctccgcaccgcccagcacgtccgcacggcgacccggggggcactcctgtggggctacgagcagaaactggcccgcgaggtcaaggcgaacggcaaattgccccggcacctggggctgattctggacggcaaccgccgctttgcccgcgccgccggtttgcagcgcgaaatgggccactcgttcggggccgacaaggcgcacgaggtcttgcagtggtgcctggaactcggcattccctcggcgaccatctgggtgctgagcaccgacaacggcagccgcgagcccgcagaactcgcccacatcctgagcctgctggagcgcgaagcccggcaactggcggtggacccgcgcatacacgccaatcgggtgcgggtgcgcgccatcgggcagcacgacaactttcccccgcaggtgctcgccgcgctgaacaatctggaagaaagcaccgccgggtacgaggggatgcgcctgaacatcgccgtgggctacggcgggcgcgaggaaattgtggacgccgtgcaaagttacctgcggacgcaggccgcgcagggggccacactggaacaggccgccgagaacctgacccccgacgccatcggcgcgcacctctacgccgccgaccagcccgaccccgacttcatcatccgcaccagcggcgaaatccggctctcgggcttcatgctgtggcaaagcgtctactccgagtactacttctgcgacgtgtactggccgggctttcgccgggtggacttcctgcgggcgctgcgcgactttcagggccgggacaggcgcttcgggaaataa

SEQ ID NO: 2625 - protein, 339 aa, Deinococcus radiodurans R1
MGRVRGIRVSHGRSSSGGAPSLRAAPGDESSRERVRTGGSVKGAPPFSTFCPTLFCWPRATLPDVMASLNSALRTAQHVRTATRGALLWGYEQKLAREVKANGKLPRHLGLILDGNRRFARAAGLQREMGHSFGADKAHEVLQWCLELGIPSATIWVLSTDNGSREPAELAHILSLLEREARQLAVDPRIHANRVRVRAIGQHDNFPPQVLAALNNLEESTAGYEGMRLNIAVGYGGREEIVDAVQSYLRTQAAQGATLEQAAENLTPDAIGAHLYAADQPDPDFIIRTSGEIRLSGFMLWQSVYSEYYFCDVYWPGFRRVDFLRALRDFQGRDRRFGK

SEQ ID NO: 2626 - DNA, 777 bp, Streptococcus pneumoniae R6
  CDS (1)..(777): transl_table=11
ttgaataggaataagatcatgtttggattttttaagaaagataaggctgtggaagtagaggttccgacacaggttcctgctcatatcggcatcatcatggatggcaatggccgttgggctaaaaaacgtatgcaaccgcgagtttttggacacaaggcgggcatggaagcattgcaaaccgtgaccaaggcagccaacaaactgggcgtcaaggttattacggtctatgctttttctacggaaaactggacccgtccagatcaggaagtcaagtttatcatgaacttgccagtagagttttatgataattatgtcccggaactacatgcgaataatgttaagattcaaatgattggggagacagaccgcctgcctaagcaaacctttgaagctttaaccaaggctgaggaattgactaagaacaacacaggattgattcttaattttgctcttaactatggtggacgtgctgagattacacaggcgcttaagttgatttcccaggatgttttagatgccaaaatcaacccaggtgacatcacagaggaattgattggtaactatctctttactcagcatttgcctaaggacttacgagacccagacttgattatccgtactagtggagaattacgtttgagcaatttccttccatggcagggagcctatagtgagctttattttacggacaccttatggcctgattttgacgaagcggccttgcaggaagctattcttgcctataatcgtcgtcatcgccgatttggaggagtttag

SEQ ID NO: 2627 - protein, 258 aa, Streptococcus pneumoniae R6
MNRNKIMFGFFKKDKAVEVEVPTQVPAHIGIIMDGNGRWAKKRMQPRVFGHKAGMEALQTVTKAANKLGVKVITVYAFSTENWTRPDQEVKFIMNLPVEFYDNYVPELHANNVKIQMIGETDRLPKQTFEALTKAEELTKNNTGLILNFALNYGGRAEITQALKLISQDVLDAKINPGDITEELIGNYLFTQHLPKDLRDPDLIIRTSGELRLSNFLPWQGAYSELYFTDTLWPDFDEAALQEAILAYNRRHRRFGGV

SEQ ID NO: 2628 - DNA, 786 bp, Chlamydophila pneumoniae AR39
  CDS (1)..(786): transl_table=11
gtgacttacgccctaataaatgatcctgtagacttgtctttagctaccaacaatgctgaatccaagttcccctctctacagcgccttcccaaccatgttgctatcattatggacggcaatcgccgatggtacaaaaagcatagggaggagtgcggccacacacacacgtcaggtcattattatggcgctaaagtccttccaaatattttaaatgcggttcttgatttaggaattaaagttcttactctctatacgttttcaacagaaaattttgggagaccaaaagaggaaattcaagaaatatttaatattttctatactcagttagacaagcaacttccttatctaatggaaaatgaaatctgcttacgttgtataggagacctttccaagctccctaaaggcatccaaacgaaaatcaaccatgtgagtcgcatgacggcatcgttctcgcgtttagagctcgtattagctgtcaactacggtggcaaagatgagttagtccgtgcatttaaaaaattacatgttgatattctaaataaaaaaatatcttctgacgacctttcagaatctttgattagctcatacttagatacttcaggacttacggaccccgacttacttatccgtacagggggtgaaatgcgtgtcagtaatttcttattgtggcaaatagcatatacagaactatatatcacggataccttgtggccagattttacgcctcaagatttgtttgaagcgattaacgtataccagcaaagatcaagacgaggggggaaatag

SEQ ID NO: 2629 - protein, 261 aa, Chlamydophila pneumoniae AR39
MTYALINDPVDLSLATNNAESKFPSLQRLPNHVAIIMDGNRRWYKKHREECGHTHTSGHYYGAKVLPNILNAVLDLGIKVLTLYTFSTENFGRPKEEIQEIFNIFYTQLDKQLPYLMENEICLRCIGDLSKLPKGIQTKINHVSRMTASFSRLELVLAVNYGGKDELVRAFKKLHVDILNKKISSDDLSESLISSYLDTSGLTDPDLLIRTGGEMRVSNFLLWQIAYTELYITDTLWPDFTPQDLFEAINVYQQRSRRGGK

SEQ ID NO: 2630 - DNA, 735 bp, Arabidopsis thaliana
  CDS (1)..(735)
atgggagagaaacagaaacgagggagaaatataatgccaaagcatgtggcggttatattggacggaaacagacgttgggctgaaaaacgaggactcgggacatcggaaggccacgaggccggagcgagaaggctcatggagaatgctaaggattgtttcgctatggggacaaacactatctcactctttgctttctccaccgaaaattgggaaagaccagaggatgaagttaagtgcttgatggccttgtttgagaaatacttagcgtctgatatgccttacctccgaagtgataagatcaagatctcggttatcgggaaccgtacaaaactccccgagtcgcttctaggtttgatagaagaggtagaggaagctacaaagagttacgaagggaagaatctcattatagcaatagactatagtggaagatatgatatcttacaagcatgcaaaagtcttgcaaataaagtgaaagacgggctgattcaagtggaggacattaacgagaaggcgatggagaaagagttgttgacaaagtgtagcgaattcccaaaccctgacctgttgatcagaacaagcggagagcaaaggatcagtaacttctttttatggcaatctgcttacactgagctttactttccaactgttttgtggcctgattttggcgaagctgagtatcttgaggccttgacttggtatcagcaaaggcagaggcgattcggtcgacgagtttaa

SEQ ID NO: 2631 - protein, 244 aa, Arabidopsis thaliana
MGEKQKRGRNIMPKHVAVILDGNRRWAEKRGLGTSEGHEAGARRLMENAKDCFAMGTNTISLFAFSTENWERPEDEVKCLMALFEKYLASDMPYLRSDKIKISVIGNRTKLPESLLGLIEEVEEATKSYEGKNLIIAIDYSGRYDILQACKSLANKVKDGLIQVEDINEKAMEKELLTKCSEFPNPDLLIRTSGEQRISNFFLWQSAYTELYFPTVLWPDFGEAEYLEALTWYQQRQRRFGRRV

SEQ ID NO: 2632 - DNA, 903 bp, Drosophila melanogaster
  CDS (1)..(903)
atgtcgtgggtctccgactacaagtacacatggacggagcggatagcgatgcgaacgctgcgcgcctgtggctacattccgcaccacgtcgccttcgtgatggacggtaatcggaggttcgcccgctcacagcagattgataagatcgagggtcattcgcggggattcgagaagcttgcggactgcctgcgctggtgcctggacgttggcgtccgcgaggtgaccacctttgccttcagcatcgagaacttcaagcgttccaacgaggaggtggagggtctgttcaatttggccagagagaagtttgcccgcctgctggaggagactgctcgactggacgaacatggcatccgcattcgggtgattggtaacatcgagctactgccacacgacttgcagaaactagtggcttcggctatgcttagcacggagcgcaatgacaagctcttcctgaacgtcgcctttgcgtacacgtcgcgggatgagattacgcaggcggtggaaacgatactgcggcatggcagccaggatttggcgggcgaggacatcagtgagcggttgctggaagaatgcctctacacgcgacactcgccgccaccggatctggtgttccgcacctccggcgagactaggctaagcgacttcatgatgtggcagttaagcacatccgtgttgtacttcagcaacgtcctgtggccgcagatcactttctggcatttcctggccagcattctggcctaccagcgtgatcgctggcagctggacgactttcggcgagcggagaggatgcagagctgccagctggccaaggcgactgacttctacagcgaacgcgtccagaatttcctgaccaccatcgatgaggatcggcggaagctgcttgtgcgactggccgccaactaa

SEQ ID NO: 2633 - protein, 300 aa, Drosophila melanogaster
MSWVSDYKYTWTERIAMRTLRACGYIPHHVAFVMDGNRRFARSQQIDKIEGHSRGFEKLADCLRWCLDVGVREVTTFAFSIENFKRSNEEVEGLFNLAREKFARLLEETARLDEHGIRIRVIGNIELLPHDLQKLVASAMLSTERNDKLFLNVAFAYTSRDEITQAVETILRHGSQDLAGEDISERLLEECLYTRHSPPPDLVFRTSGETRLSDFMMWQLSTSVLYFSNVLWPQITFWHFLASILAYQRDRWQLDDFRRAERMQSCQLAKATDFYSERVQNFLTTIDEDRRKLLVRLAAN

SEQ ID NO: 2634 - DNA, 813 bp, Encephalitozoon cuniculi GB-M1
  CDS (1)..(813)
atgatagaaggtctaaaagtgaaagccctaatatgtgtggtggagatcattgaaaacggaatcaatagcatacatgccatggggattctactctttgcattgaatattcttaaaaaggcctctgtccttgtaagcagaattctgtgtgcgtggaatgggaaactatcttctgagtatcccagggacccaagaagcaggcttggtattttcaaaaacatgaacattgcatttatctgcgatggaaacagaaggtatgcaagaaagcttgggcttgaagatagcttcatcaaggacaagggactccagaagatatatgagttcatcgaatttggatgtttctacggcattaaggagatctcttttttctgctttgcactgagcaacttcaaaagaagtccggaggaggtgaataaactgatgggacttgtcaagcagaaaatagaaagacctaaggagataggcatcagaccaaagttccgggtttatggaaggctggatcttctcgaggaagatgtcaggaagagactcatggatattgaggaggaatctaagaacaacacaagtataattgtgaacatattttttgcatattctgcagaggatgaaatcaccaggggaattcaattcaacagccatgttgacatactcataaggactagtaacacaaaaagactcagcaacttcatgatccgccaagttgcaaaggggacatctgtgttctttgcaaaggcactctggcctgagctgacaacagcacatctcttcctgatacttctgaagcatcgactggaaaataaatatttattgggttga

SEQ ID NO: 2635 - protein, 270 aa, Encephalitozoon cuniculi GB-M1
MIEGLKVKALICVVEIIENGINSIHAMGILLFALNILKKASVLVSRILCAWNGKLSSEYPRDPRSRLGIFKNMNIAFICDGNRRYARKLGLEDSFIKDKGLQKIYEFIEFGCFYGIKEISFFCFALSNFKRSPEEVNKLMGLVKQKIERPKEIGIRPKFRVYGRLDLLEEDVRKRLMDIEEESKNNTSIIVNIFFAYSAEDEITRGIQFNSHVDILIRTSNTKRLSNFMIRQVAKGTSVFFAKALWPELTTAHLFLILLKHRLENKYLLG

SEQ ID NO: 2636 - DNA, 975 bp, Methanosarcina mazei Go1
  CDS (1)..(975): transl_table=11
ttgccagggggaaaagaaataattaaccttaaaatgggatcattgaataaaggagcctttcaggcagggcttcgcttcatgaaaaatcggactttcagtgtgttctaccggaaatacgagcagatcctggaaaaggagattctgagttctgaaattcccgagcacatagctgtaattatggacggaaaccgcagatacgccggacagctgggaaaagcccgaattttcggacacgctatgggagcagaagttactgagcaggttattgaatggtgctatgagataggagtaaaacagcttactctctatgccttttccacggaaaatttccagcgttcggaagaagaggtcggtgggctctttaaccttatcaatgagaaatttttgaagcttcatactgataagagaacttatgaaaaagagatgcaggtcagagttataggggacagaacaaaactgcctgcatacctgaacgaatccattgacagaattgagaaagccacggagcatcacaggaaattcagcctgaatgtggctattgcttatggtggaaggcaggatataatgcaggctgtaagggatatcgcaacctgtgtatccagcgggaaactttctctggaagatgttaacgaaagcctgatctcaaaacacctctatcctgcccccggagtccctgtccccaatgtggacctgatcatccgcaccggaggggatgagagaatatcaaacttccttccctggcaggctaacggcagtgaatgtgcaacttatttctgcgctcctttctggcccgagttccgaaaaatcgacctccttcgttctgtcagagtttatcaggccagaaaagaagaaaagaaacgtgagcattcgtatcgcatctcaaaagttaagaactttctcagggtagggaaatatgagaataaaagtgaagacctgggacagctccttcctttaaaaaagcagggagtctcctga

SEQ ID NO: 2637 - protein, 324 aa, Methanosarcina mazei Go1
MPGGKEIINLKMGSLNKGAFQAGLRFMKNRTFSVFYRKYEQILEKEILSSEIPEHIAVIMDGNRRYAGQLGKARIFGHAMGAEVTEQVIEWCYEIGVKQLTLYAFSTENFQRSEEEVGGLFNLINEKFLKLHTDKRTYEKEMQVRVIGDRTKLPAYLNESIDRIEKATEHHRKFSLNVAIAYGGRQDIMQAVRDIATCVSSGKLSLEDVNESLISKHLYPAPGVPVPNVDLIIRTGGDERISNFLPWQANGSECATYFCAPFWPEFRKIDLLRSVRVYQARKEEKKREHSYRISKVKNFLRVGKYENKSEDLGQLLPLKKQGVS

SEQ ID NO: 2638 - DNA, 915 bp, Corynebacterium efficiens YS-314
  CDS (1)..(915): transl_table=11
atgcatccggggtggacatgcaactattccgacacaccaggggtccccggccaggactgtgtagcaatagtcgaacaacgcccagacgggaatcgcggtgcgggggtgcgcgatatcccggtggtggggactagactgttaaacgtgttgaacctgcccagactgctctatcccctctatgaacgccggctcctcaaggagctcaacggcgcgaggcagcctgggcacgttgccatcatgtgtgatggcaaccgccgctgggccagggaggccggtttcgttgatctcagccacggacaccgcgtgggcgctaagaagatcggggagctggtccgctggtgtgatgacgtggatgtggatctggtcaccgtctacctgctgtccacggagaatctcggccgggatgaggctgaactgcagctgctctatgacatcatcggtgatgttgtcgcggagctctccctcccggagaccaactgccgggtgcggctggtcggccacctggatctgctgcccaaggagttcgccgaacgactgcgtggaaccgtgtgcgaaaccgtggatcacaccggcgtggccgtgaacatcgcggtcgggtacggcggacgccaggagatcgtcgacgcggtgcgtgatctgctcacctccgcccgggatgagggcaaaaccctcgatgaggtcattgagtcggtggatgcccaggccatctccacccacctgtacacctccgggcagccggatccggatctggtgatccgcacctccggtgagcagcgactgtccgggttcatgctgtggcagtcggcgtactcggagatctggttcactgatacctactggcctgcattccgcagaatcgacttcctccgggcactgcgtgactattcgcagcgcagcaggcggtttggaaaatag

SEQ ID NO: 2639 - protein, 304 aa, Corynebacterium efficiens YS-314
MHPGWTCNYSDTPGVPGQDCVAIVEQRPDGNRGAGVRDIPVVGTRLLNVLNLPRLLYPLYERRLLKELNGARQPGHVAIMCDGNRRWAREAGFVDLSHGHRVGAKKIGELVRWCDDVDVDLVTVYLLSTENLGRDEAELQLLYDIIGDVVAELSLPETNCRVRLVGHLDLLPKEFAERLRGTVCETVDHTGVAVNIAVGYGGRQEIVDAVRDLLTSARDEGKTLDEVIESVDAQAISTHLYTSGQPDPDLVIRTSGEQRLSGFMLWQSAYSEIWFTDTYWPAFRRIDFLRALRDYSQRSRRFGK

SEQ ID NO: 2640 - DNA, 678 bp, Mycoplasma penetrans HF-2
  CDS (1)..(678): transl_table=4
atgaataaactaaaacatattgcattcataatggatggaaatggtagatgagcaaaagttagaaataagtctagaacttatggtcactcccaaggaattaaaaacttattagaaattgtgcaatgttgtatagaaaaggagattgaacaagtttccttttttgctttcagcatggaaaattgaaaaagaggaaaagaagaagttaattttttattaaatttactattaaaaaatttaaatggtaaattactaaataaaatggaagatttagggattgttggtaagtgaatagggtttgaaaataatttacctagaactttagttaccacactaaaaaagatagaatcacaatcttcaaaatttgaaaagaaaatccaagttaatttattttttaattacagtggtactcttgaaattttagaagctcttaaagatgcacaattagataaagaaaaaatgaagccagttgaagaatatttaattacacattctttacttccaatagatttgttaattagaacaagtggagaacaaagactaagtaacttttgtttatttaatttagcttatagtgaaattatttttgaaccaaaatattgacctgattacaatagagaaacattattagataatatagagcaatactatcaaagagatagaagatttggtaaagcataa

SEQ ID NO: 2641 - protein, 225 aa, Mycoplasma penetrans HF-2
MNKLKHIAFIMDGNGRWAKVRNKSRTYGHSQGIKNLLEIVQCCIEKEIEQVSFFAFSMENWKRGKEEVNFLLNLLLKNLNGKLLNKMEDLGIVGKWIGFENNLPRTLVTTLKKIESQSSKFEKKIQVNLFFNYSGTLEILEALKDAQLDKEKMKPVEEYLITHSLLPIDLLIRTSGEQRLSNFCLFNLAYSEIIFEPKYWPDYNRETLLDNIEQYYQRDRRFGKA

SEQ ID NO: 2642 - DNA, 894 bp, Bordetella bronchiseptica RB50
  CDS (1)..(894): transl_table=11
gtgtcgatatcggaatctgttccgtacgcgccgtcccggccgcgctggtcctgtcggatttggcgcaggcgcgacggcgcaggcttttgcaatacctttttgcttgccgccttgcgccaagctccagccatggcactcagttcgactcaggcgattccggaaacgggggacatccccaggcacgtagccatcatcatggatggcaacggccgctgggcgacgcgccgccacctgccgcgcacggcagggcacgccaagggcgtgcacgcggtgcgccgcgtggtcgaggcctgcggccggcgcggcgtgcgctacctgaccctgttcgcattcagttccgagaactggcgccgtccggccgacgaggtgtcgctgttgatgcggctgttcgtgcaggcgctcgagcgcgaagtcgacaaattgcaggaccagggcgtgcgcctgcacgtggtgggagacctgagcgcgttcgagcccaagctgcaggaactgatcgcccaggcgcaggaacgcaccgagcacaacgaccggctgcacctgacggtggcggccaattacggcggccgctgggacatcctgcaggccacgcgcgccatgctgcgcgccgatccgggcctggcccaggatcccgaccgcatcgacgaggcgcggctggccgagcatctttcgatggcctgggcgccggaaccggacctgttcatccgcaccggcggcgaacagcgcatttcgaacttcctggtctggcaactggcctacgccgaattctatttcaccgaacaattctggcccgatttcggcgccgacgagctcgatgccgccttcgagtggtatcgcacgcgcgagcggcgcttcggccgcaccagcgcgcaattgcgcggcggcgccaagcgctga

SEQ ID NO: 2643 - protein, 297 aa, Bordetella bronchiseptica RB50
MSISESVPYAPSRPRWSCRIWRRRDGAGFCNTFLLAALRQAPAMALSSTQAIPETGDIPRHVAIIMDGNGRWATRRHLPRTAGHAKGVHAVRRVVEACGRRGVRYLTLFAFSSENWRRPADEVSLLMRLFVQALEREVDKLQDQGVRLHVVGDLSAFEPKLQELIAQAQERTEHNDRLHLTVAANYGGRWDILQATRAMLRADPGLAQDPDRIDEARLAEHLSMAWAPEPDLFIRTGGEQRISNFLVWQLAYAEFYFTEQFWPDFGADELDAAFEWYRTRERRFGRTSAQLRGGAKR

SEQ ID NO: 2644 - DNA, 900 bp, Oryza sativa (japonica cultivar-group)
  CDS (1)..(900)
atgcttggctcacttatgtcttactcaccttcagtggattcaaagacggagaacactgatgagttaattgcgactggtgttcttgctagtctgcagaatttcatccgcaaatgcattgtagctgtcctctcgtatggcccaatgcctaagcatattgcatttattatggatggtaaccgtagatatgctaaattcaggagtatccaggaaggctctggtcacagggtgggcttctctgctctcattgccagcctgctctactgctatgaaatgggcgtgaagtatatcacggtgtatgcatttagcatcgataattttaagcgagatccgactgaggtgaaatccttgatggagttaatggaggaaaagatcaatgaactgctagaaaacagaaatgtcatcaacaaggttaactgtaagatcaacttctgggggaacttggacatgttgagcaaatcagtgagggtagcagctgagaaactgatggctaccactgctgaaaacacgggactggtcttctctgtttgcatgccatacaactccacttctgagattgtcaatgcggtcaataaggtctgtgcagaaaggagggatatactgcagagggaggatgctgacagtgttgcgaataatggtgtgtattcagacatttcagtggcagatctggaccgccatatgtacagcgctggttgccccgatcctgacattgtgatccggacctcaggtgagactcgcctgagcaatttccttctgtggcagacgacgttcagtcatttgcagaatccagaccctctttggccggagttctctttcaagcaccttgtctgggccatactccagtaccaaagagttcacccttctattgagcaaagcagaaatctggctaagaagcagctgtaa

SEQ ID NO: 2645 - protein, 299 aa, Oryza sativa (japonica cultivar-group)
MLGSLMSYSPSVDSKTENTDELIATGVLASLQNFIRKCIVAVLSYGPMPKHIAFIMDGNRRYAKFRSIQEGSGHRVGFSALIASLLYCYEMGVKYITVYAFSIDNFKRDPTEVKSLMELMEEKINELLENRNVINKVNCKINFWGNLDMLSKSVRVAAEKLMATTAENTGLVFSVCMPYNSTSEIVNAVNKVCAERRDILQREDADSVANNGVYSDISVADLDRHMYSAGCPDPDIVIRTSGETRLSNFLLWQTTFSHLQNPDPLWPEFSFKHLVWAILQYQRVHPSIEQSRNLAKKQL

SEQ ID NO: 2646 - DNA, 888 bp, Oryza sativa (japonica cultivar-group)
  CDS (1)..(888)
atgcgccaagccgccaacaccatgctgccctcccactctccagctgctacccatcagctacccacctcccctcgccgcagcacgcgccccgcgccgccaccaccatgcccatgcccgcgcgccggcgcagccccggcggccgagtctctcctccctggatgccttcgggcggagtcgctgccccggcacgtggcggtggtgatggacgggaacgcgcggtgggcgcgggcgcgggggctcccgtcggcggccgggcacgaggccgggcggcgcgcgctggaggagacggtgcgtctctcccgcgcctggggcatccgcgcgctcactgccttcgccttctccaacgagaactggagccgccccaaggtggaggtggacttcttgatgaggctgttcgagcgggtgatccacgatagcgtcgccgagtttctgagggaaggaattcggctacgtgtaatcggtgacagctcaaggctaccggtttctctacagaagattgcgagagaagccgaggagaccacgaggaacaattcacagcttgatctgacactggcaatcagctacagcgggaggagggacatcgtgcaggcgtgccggaagcttgcccagaaggtgcagagcaaggcgctcgcggcggaggacatcgacgaggcgctgttcgccgacgagctcgagacgagctgcgcggccgacgagttcccgtaccccgaccttctcatcaggaccagcggcgagctgaggctgagcaacttcttgctgtggcagtcagcgtactcggagctcttcttcaccaacacgctgtggcctgatttcggggaggctgattacctcgaagcgctttgctccttccagagcagagacaggcgatttggtgtaagaaaattgtag

SEQ ID NO: 2647 - protein, 295 aa, Oryza sativa (japonica cultivar-group)
MRQAANTMLPSHSPAATHQLPTSPRRSTRPAPPPPCPCPRAGAAPAAESLLPGCLRAESLPRHVAVVMDGNARWARARGLPSAAGHEAGRRALEETVRLSRAWGIRALTAFAFSNENWSRPKVEVDFLMRLFERVIHDSVAEFLREGIRLRVIGDSSRLPVSLQKIAREAEETTRNNSQLDLTLAISYSGRRDIVQACRKLAQKVQSKALAAEDIDEALFADELETSCAADEFPYPDLLIRTSGELRLSNFLLWQSAYSELFFTNTLWPDFGEADYLEALCSFQSRDRRFGVRKL

SEQ ID NO: 2648 - DNA, 759 bp, Rhodopseudomonas palustris CGA009
  CDS (1)..(759): transl_table=11
atgtcgaaagctgccgcgcctctgcctgatccgtccgacccaccgagcgcgcccgcgcacgtggcgattatcatggacggcaacggccgctgggccgccgctcgcgggctaccccgtgccgaaggccatcgccgcggcgtcgaagcgctccgccgcgtggtccgcgcgtccagcgaactcggcatccagtatctgaccatcttctcgttcagctcggaaaactgggcgcgcccggcgactgaaatcgtcgacctgttcgggctgctgcgccgcttcatccgcaacgatctcgcatcccttcaccgcgacggcgtccgcattcgggtgatcggcgagcgcgaccggctcgaccgcgacctgtgcgcgatgctcgacgaggcgcaggagctgacccgcaacaacaccaagctcaatttggtggtggctttcaactacggctcccgccaggagatcgccaatgcggcgcagcgcctggcgcgcgaagtcgccgagggcaagcgcgacccggcgacgatcgatatcgagactctcggtcgctatctcgatgcccccgacattcccgatcccgacctgatcatccgcaccagcggagaacaacgattgtcgaatttcctgatgtggcaggcggcgtacagtgaattggtattcgtgcccattcactggccggatttcgacaaggccgcgctggaaggcgcgatcgccgaatattcgcggcgcgagcgccggttcggcgggttggccgccaagacaggatcgtga

SEQ ID NO: 2649 - protein, 252 aa, Rhodopseudomonas palustris CGA009
MSKAAAPLPDPSDPPSAPAHVAIIMDGNGRWAAARGLPRAEGHRRGVEALRRVVRASSELGIQYLTIFSFSSENWARPATEIVDLFGLLRRFIRNDLASLHRDGVRIRVIGERDRLDRDLCAMLDEAQELTRNNTKLNLVVAFNYGSRQEIANAAQRLAREVAEGKRDPATIDIETLGRYLDAPDIPDPDLIIRTSGEQRLSNFLMWQAAYSELVFVPIHWPDFDKAALEGAIAEYSRRERRFGGLAAKTGS

SEQ ID NO: 2650 - DNA, 891 bp, Mycobacterium avium subsp. paratuberculosis K-10
  CDS (1)..(891): transl_table=11
gtggttagagccgagcgcgccccgacgtcgaccggctttccgcagctgcccccggcgcccgacgactacccggtgttcccggacaagtcgacgtggccggtggtcttccccgagttgccgccgtcgcccggcggcgggccgagccggccgccgcagcacatctccaaggcggccgcgccgcgcatccccgcggaccgactgcccaaccacgtggccatcgtgatggacggcaacggccgctgggccaccgaacggggcatgtcacgcaccgacggccacaaggccggcgaggcggtggtcatcgacatcgtctgcggcgcaatcgaaatcggcatcaagtggctcagcctgtacgccttttccaccgagaactggaagcggtcccccgaagaggtccggtttttgatgggcttcaaccgcgacgtggtgcggatgcgacgggtgaacctgaacacgataggggtcaagatccgctgggtgggttcgcggccccggctgtggcgcagcgtgatcaacgaattggcgatcgccgaggagatgaccaagcgcaacgacgtcatcaccgtcaactactgcgtcaactacgggggcagggccgaaattgccgaggccacaaaggaaatcgcccggctggccgccgccggccggttgaaccccgagcgcatcaccgagtccaccgtggcgcatcacctgcaacggcccgacatccccgatgtggacctgttcttgcggacctcgggggagcagcggtccagcaacttcatgttgtggcaggccgcctacgccgaatacatcttccaggacaagttgtggcccgactacgaccgccgcgatctgtgggccgcctgccaggaatacgcttcccgcaaccgcagattcgggagcgcataa

SEQ ID NO: 2651 - protein, 296 aa, Mycobacterium avium subsp. paratuberculosis K-10
MVRAERAPTSTGFPQLPPAPDDYPVFPDKSTWPVVFPELPPSPGGGPSRPPQHISKAAAPRIPADRLPNHVAIVMDGNGRWATERGMSRTDGHKAGEAVVIDIVCGAIEIGIKWLSLYAFSTENWKRSPEEVRFLMGFNRDVVRMRRVNLNTIGVKIRWVGSRPRLWRSVINELAIAEEMTKRNDVITVNYCVNYGGRAEIAEATKEIARLAAAGRLNPERITESTVAHHLQRPDIPDVDLFLRTSGEQRSSNFMLWQAAYAEYIFQDKLWPDYDRRDLWAACQEYASRNRRFGSA

SEQ ID NO: 2652 - DNA, 795 bp, Mycobacterium avium subsp. paratuberculosis K-10
  CDS (1)..(795): transl_table=11
gtgttcgtggaaatcattccgccgcgactcaaggagccgttgtaccgcatctatgagatgcggttgcgccaggagctcggtgccgcgaaggccgacctgccccgccacatcgcggtgctgtgtgacggcaaccggcgctgggcgcgcgacgccgggtacgacgacgtcagctacggctaccggatgggcgcggtcaagatcgccgagatgctgcgctggtgtcaggcagccggcatcgagatgaccacggtgtacctgctttccacggagaacctgcagcgcgaccccgacgagctggccgggctgatcgaaatcatcaccgacgtcgtcgaggagatctgcgcgccggccaaccggtggagcgtgcgcaccgtcggcgacctcgagctgctcggcgaggagccggcccgccggctgcgcggcgccgtggagtccaccccggtcgaggcgtccttccacgtcaacgtcgccgtcggctacggcggccggagggagatcgtcgacgccgtgcgctcgctgctgagcaaggaactggccaacggggcgacggccgaagagctgatcgacgcggtcaccgtcgatgcgatctcggaaaacctgtacacctcgggccaacccgatccggacctggtgatccgcacctccggtgagcaacggctgtcgggttttctgctgtggcaaagcgcctactccgagatgtggttcaccgaggcgcactggccggccttccgccgggtcgacttcctgcgggcgctgcgcgactacagccagcggcaccgccgctacggcaaataa

SEQ ID NO: 2653 - protein, 264 aa, Mycobacterium avium subsp. paratuberculosis K-10
MFVEIIPPRLKEPLYRIYEMRLRQELGAAKADLPRHIAVLCDGNRRWARDAGYDDVSYGYRMGAVKIAEMLRWCQAAGIEMTTVYLLSTENLQRDPDELAGLIEIITDVVEEICAPANRWSVRTVGDLELLGEEPARRLRGAVESTPVEASFHVNVAVGYGGRREIVDAVRSLLSKELANGATAEELIDAVTVDAISENLYTSGQPDPDLVIRTSGEQRLSGFLLWQSAYSEMWFTEAHWPAFRRVDFLRALRDYSQRHRRYGK

SEQ ID NO: 2654 - DNA, 696 bp, Wolbachia endosymbiont of Drosophila melanogaster
  CDS (1)..(696): transl_table=11
atgttgaatcaagaatctttaccgaaacatttagcaattattatggatggtaatggtagatgggcgaacaatcaaggaagggtaaaaattgatggttataaaaagggcagtgaagttgcatacgatattgccaagtattgtacggacttaactataccctacttaactttgtatgcattctctatggagaattggcttagacctaaaaacgaaactgactgtctatttgatttattttactccgttttaactaatgaagataaagtcaatttcatttacaattgtaacattaagttgaattttattggcaatttaagtctgttacccagtaaaatattggatcaaattaaaaaagcagaagaaatgacacataagaacgatggtttattactcactgtggcagtcagttacggagcaaagcaagaaattacacaagctataagcaatattataaaagaaaatattgcttatgtatcagaagaggaatttgaaaaatttctgtatactaaagatttgccaaaattggatttattaattcgcactggcggcgaaaaaaggttaagcaactttttattatggcaagcagcttatgctgaattgtatttttgtgatactttatggcctgatttttcttgtcaagatttgagtaaagcattagaagattatacaaaaagagagaaaaaatatggtagataa

SEQ ID NO: 2655 - protein, 231 aa, Wolbachia endosymbiont of Drosophila melanogaster
MLNQESLPKHLAIIMDGNGRWANNQGRVKIDGYKKGSEVAYDIAKYCTDLTIPYLTLYAFSMENWLRPKNETDCLFDLFYSVLTNEDKVNFIYNCNIKLNFIGNLSLLPSKILDQIKKAEEMTHKNDGLLLTVAVSYGAKQEITQAISNIIKENIAYVSEEEFEKFLYTKDLPKLDLLIRTGGEKRLSNFLLWQAAYAELYFCDTLWPDFSCQDLSKALEDYTKREKKYGR

SEQ ID NO: 2656 - DNA, 735 bp, Bdellovibrio bacteriovorus HD100
  CDS (1)..(735): transl_table=11
atgggaatgccaaaacatattgccatcattatggacgggaacggtcgttgggctcagctcaaacgccgtcctcgcacgttcgggcatatcaaaggcacccgtgtcgcaaaaaagatcatcacggcgtgttcacgccgtgggatcaaaaacctgaccctgtacgctttcagcacggaaaactggttccgccctcaagaggaagtaagccttttgatgctgatcctgagccgttacctgaaacgcgaaaccgaaaatctggtcaaagaaaacatccgcttctcggtgatcggcgatctgtcccgccttcctctagatgttgccaatgccatcgaaaaatccatcgaagccacatctcaatgcacaggcctgaatctggtctttgccttgagctatggttctcgccaggaaatcacccaggccgtgcgtgatatcgcggaaaaagtcgccgccggggaaatctcccctgcggaaatcgacgaatccgtgatcaactccgccctgagcactttcccgacgccggatccggatctgatcatccgcaccagcggcgagcagcgactttcgaacttccttctgtggcaggctgcgtactctgaattctattttacagaagtactgtggcccaacttcaccgagtctcacctcgacgaagcccttcaggcttttgcgatgagacaacgccgttatggcaaggtctcatccaatgacaacaaccatgaaaagcttcctaactag

SEQ ID NO: 2657 - protein, 244 aa, Bdellovibrio bacteriovorus HD100
MGMPKHIAIIMDGNGRWAQLKRRPRTFGHIKGTRVAKKIITACSRRGIKNLTLYAFSTENWFRPQEEVSLLMLILSRYLKRETENLVKENIRFSVIGDLSRLPLDVANAIEKSIEATSQCTGLNLVFALSYGSRQEITQAVRDIAEKVAAGEISPAEIDESVINSALSTFPTPDPDLIIRTSGEQRLSNFLLWQAAYSEFYFTEVLWPNFTESHLDEALQAFAMRQRRYGKVSSNDNNHEKLPN

SEQ ID NO: 2658 - DNA, 1302 bp, Eremothecium gossypii
  CDS (1)..(1302)
atgcacacgacgctgccgcatgctggcccacgagctggccctctgccgggtccccctgtggctactggcgtgctcggcggctcccagatcagaccaatggtacaaaagggcacacacaaaaacaatgactcgtttccgtctacagcgcacaccagcatggtggaggtgaagaatacggaggcagcgaccgccgctggcggcgcgcagaagcaggcggaccaggtgatccaactggagtggcacgatcccatcgaagaggcggcgcaagagctagatgcggcgcgagttgcagctaactcggaaccgacgctccgcgcgcgcgtcaagaggctggtacgcggggagtggaagcagacttatcgcaaccgacccaaaatttcgcatatcctgttccagttcgggctgctacggatggtggtgaactttgtgcagaacctgctgctgaaaatcctccagatgggcccgctgccgcagcatgtgtcgttcatcatggacggcaaccggcgctacgcgaagtccatgaatctgccgctgaagctggggcacgaggcgggcagtgtggcgctgatgcggacgctgcacacgtgcaagcgcgcggggatcgaggcggtgagcgcgtacgcattctccatcgagaacttcaaccggcctaaggaggagatagacacgctgacggaaatgctgagccggcgcctgcaggactttgccaaccgcgcaaccaacctcaaggaccgcatgtacggcgcgcggctgctggtcgtgggcgaccgtgccctgctcagcccggaactcaacgacaagataacgtacatcgaggacatgacaaagcacaacaccgcgttcaccgtgtacatctgcctcccgtacacgacgcgcaacgacatctatcacgcgatgttcgatctggtgcgcctgtgccaggccggcgcgctggacagtaaggacatctccacggaaatgctcaccaacgctatgtaccttggcgccaactcgaaccgtgccgacattctcgtgcgcaccagcgggcacacccgcctctctgactacatgctctggcaggtccacgagcagtcctacatcgagttttccaactgcatgtggcctgatttcacgttccgcacattcttcacgatcctgctcaagtggagtttcgtcactgcgctgcacgaggcccgcaaacaggaacgtctgcgccggaagcttggcacgtacgcgcggtccttgttggcccgccgcgcgcgccccgtgcgcctcgaagcgctgccgccccccccacaggccatttctgtgacagacagatag

SEQ ID NO: 2659 - protein, 433 aa, Eremothecium gossypii
MHTTLPHAGPRAGPLPGPPVATGVLGGSQIRPMVQKGTHKNNDSFPSTAHTSMVEVKNTEAATAAGGAQKQADQVIQLEWHDPIEEAAQELDAARVAANSEPTLRARVKRLVRGEWKQTYRNRPKISHILFQFGLLRMVVNFVQNLLLKILQMGPLPQHVSFIMDGNRRYAKSMNLPLKLGHEAGSVALMRTLHTCKRAGIEAVSAYAFSIENFNRPKEEIDTLTEMLSRRLQDFANRATNLKDRMYGARLLVVGDRALLSPELNDKITYIEDMTKHNTAFTVYICLPYTTRNDIYHAMFDLVRLCQAGALDSKDISTEMLTNAMYLGANSNRADILVRTSGHTRLSDYMLWQVHEQSYIEFSNCMWPDFTFRTFFTILLKWSFVTALHEARKQERLRRKLGTYARSLLARRARPVRLEALPPPPQAISVTDR

SEQ ID NO: 2660 - DNA, 825 bp, Eremothecium gossypii
  CDS (1)..(825)
atgaacgattctagggactttactcagaactcttggttaatcagccggttgaaggatgtcttcgtgagcgtcctccggtcatcaggcagggtccctaagcatgtaggattcataatggatgggaacagaagatacgctaagaaacacaacatcgaagtccgtgagggacatagtgctggcttcatgagtatgaacaaggtccttgagctgtgttatgagtcgggtgtcacaaccgccacagtattcgccttttctgtggataactttcgcagaagtgcattcgaggtggattcgctgatggagctggccaaggagcgcgtcatgcaaatcacccagcatggggagctcgcagagcaatatggcatccacgtccgcattatcggcgaccgatctctgttgccggcagatgtgcaagaagaaatggcacgagcagagaaagctaccgaagcaaataccagagctgtactcaatgtctgtattccttacacggcaaggggggaaatcttgcatgcgatgaaagggacgatagctgatgcgcagtcagacggcgctcccatcacagaagcagatttggacgctcatatgtacaccgggggccttccgccattggatttgttgatcagaaccagtggggtgagccgcctcagcgatttcttgctgtggcaggtctgccagaagggcgttgtaatagagcttctgagttgcctgtggcccgactttggccccctcaccatggcgtggatactcctgagatacgcgttcaaaaagtctgacgaattctctggcggcgacgaagacgtcgccgacagcaaaaagagcaagtag

SEQ ID NO: 2661 - protein, 274 aa, Eremothecium gossypii
MNDSRDFTQNSWLISRLKDVFVSVLRSSGRVPKHVGFIMDGNRRYAKKHNIEVREGHSAGFMSMNKVLELCYESGVTTATVFAFSVDNFRRSAFEVDSLMELAKERVMQITQHGELAEQYGIHVRIIGDRSLLPADVQEEMARAEKATEANTRAVLNVCIPYTARGEILHAMKGTIADAQSDGAPITEADLDAHMYTGGLPPLDLLIRTSGVSRLSDFLLWQVCQKGVVIELLSCLWPDFGPLTMAWILLRYAFKKSDEFSGGDEDVADSKKSK

SEQ ID NO: 2662 - DNA, 795 bp, Methanococcus maripaludis S2
  CDS (1)..(795): transl_table=11
ttgccgttatttaaattttatgaatatttgagcaagtttggagcattaaagctatacgaacgggaattggaatcaaaaatttccaaatatcctcccccaaaacacgttggaattataatggatggtaacaggaggcttgcaaaaaaattgggcgaaaatccagaacttggccataatttaggcgcttcaaaggttcacgaagttatagattggtgtgtttccttgaaaatacccactattactctttatgcattttctttggaaaattttaaccggccagaaaaagaagtaaaagttttgatggatctttttgaaagagaatttattgaaattgcagatcaccccgatgttcataaagataaaatacgtgtaagcgttattggaagaagagaaatgcttccagaatatgttcaaaaagcaattaattacgcagaagataaaacaaaggggtattctgattattttgtcaattttgcaatcgcatatgggggacagcaggaaataattgacagtgttaaaaaaattgcaaaacaggtaaaaaatggtgaaatagatattgaagatataaatatagagttaatatctaaaaatctatacacgagtaatcttccatcaccaaatcctgatttaattattcgaacgtcaggagaagaacgtataagtaattttttgacatggcaatcatgttattcggaactatatttttgtgaaacatactggccgacatttagaaaagttgatttattgaggtccattagggaatatcaaaaacgtgaaaggagatacgggaagtga

SEQ ID NO: 2663 - protein, 264 aa, Methanococcus maripaludis S2
MPLFKFYEYLSKFGALKLYERELESKISKYPPPKHVGIIMDGNRRLAKKLGENPELGHNLGASKVHEVIDWCVSLKIPTITLYAFSLENFNRPEKEVKVLMDLFEREFIEIADHPDVHKDKIRVSVIGRREMLPEYVQKAINYAEDKTKGYSDYFVNFAIAYGGQQEIIDSVKKIAKQVKNGEIDIEDINIELISKNLYTSNLPSPNPDLIIRTSGEERISNFLTWQSCYSELYFCETYWPTFRKVDLLRSIREYQKRERRYGK

SEQ ID NO: 2664 - DNA, 1002 bp, Homo sapiens
  CDS (1)..(1002)
atgtcatggatcaaggaaggagagctgtcactttgggagcggttctgtgccaacatcataaaggcaggcccaatgccgaaacacattgcattcataatggacgggaaccgtcgctatgccaagaagtgccaggtggagcggcaggaaggccactcacagggcttcaacaagctagctgagactctgcggtggtgtttgaacctgggcatcctagaggtgacagtctacgcattcagcattgagaacttcaaacgctccaagagtgaggtagacgggcttatggatctggcccggcagaagttcagccgcttgatggaagaaaaggagaaactgcagaagcatggggtgtgtatccgggtcctgggcgatctgcacttgttgcccttggatctccaggagctgattgcacaagctgtacaggccacgaagaactacaacaagtgtttcctgaatgtctgttttgcatacacatcccgtcatgagatcagcaatgctgtgagagagatggcctggggggtggagcaaggcctgttggatcccagtgatatctctgagtctctgcttgataagtgcctctataccaaccgctctcctcatcctgacatcttgatacggacttctggagaagtgcggctgagtgacttcttgctatggcagacctctcactcctgcctggtgttccaacccgttctgtggccagagtatacattttggaacctcttcgaggccatcctgcagttccagatgaaccatagcgtgcttcagaaggcccgagacatgtatgcagaggagcggaagaggcagcagctggagagggaccaggctacagtgacagagcagctgctgcgagaggggctccaagccagtggggacgcccagctccgaaggacacgcttgcacaaactctcggccagacgggaagagcgagtccaaggcttcctgcaggccttggaactcaagcgagctgactggctggcccgtctgggcactgcatcagcctga

SEQ ID NO: 2665 - protein, 333 aa, Homo sapiens
MSWIKEGELSLWERFCANIIKAGPMPKHIAFIMDGNRRYAKKCQVERQEGHSQGFNKLAETLRWCLNLGILEVTVYAFSIENFKRSKSEVDGLMDLARQKFSRLMEEKEKLQKHGVCIRVLGDLHLLPLDLQELIAQAVQATKNYNKCFLNVCFAYTSRHEISNAVREMAWGVEQGLLDPSDISESLLDKCLYTNRSPHPDILIRTSGEVRLSDFLLWQTSHSCLVFQPVLWPEYTFWNLFEAILQFQMNHSVLQKARDMYAEERKRQQLERDQATVTEQLLREGLQASGDAQLRRTRLHKLSARREERVQGFLQALELKRADWLARLGTASA

SEQ ID NO: 2666 - DNA, 1008 bp, Danio rerio
  CDS (1)..(1008)
atgtcgtggattcgagaggagaaactgtcccttttagaaaggctcactgccaacatcttaaaggcagggccaatgcccaaacatgtggcgtttatcatggatgggaacaggcgttatgcccaaaaggagcataaggagaggcaggagggccacacacagggctttgagaaacttgcggagacgctgcgctggtgccttaacctgggcatccatgaggtgaccgtatatgcgttcagcatcgagaacttcaagcgatcaaaggaggaggtggacggcctgatggagctggccagacagaagttcagccgcctgctgacagagcaggagaatcttgagaagcacggtgtgtgtattcgtgtgctgggagatctgactctgctgcctgaagatctgcagacacttattgccaaagctgtcgtgtcaaccagagcgcacaacaagtgttttctgaatgtgtgttttgcttacacgtcgagacatgaaattgcaaatgcagtgaaggaaatggcatggggagtcgagcagggactgatcaaatccagcgacgtgtctgaagttctcctcagtgagtgtctgtatagcagtaattctccaaaccctgatctgctcatccgtacatctggagaagtgcgtctcagtgacttcttactgtggcagacctcgtattcgtgtctggtgttccagtcggtcctgtggcccgaatattccttctggaatctgtgtgaggctattttgcagttccagatgagtcatcgatctatccagaaagcccgggagctgcacagagaagagcaagtgcttcaacagatggagtcggatcgcacctgtgtggctgaaatcctccagcatcgcggcaatggaaagcctatggacggtcagagtcagcagaacgcactgctaaactacagcagcagccgtgaggagagggttcgaggctttctgaacaccctgcagcacaagagagacgctttctttgatgatttaagcagccaggctgttgtggcttag

SEQ ID NO: 2667 - protein, 335 aa, Danio rerio
MSWIREEKLSLLERLTANILKAGPMPKHVAFIMDGNRRYAQKEHKERQEGHTQGFEKLAETLRWCLNLGIHEVTVYAFSIENFKRSKEEVDGLMELARQKFSRLLTEQENLEKHGVCIRVLGDLTLLPEDLQTLIAKAVVSTRAHNKCFLNVCFAYTSRHEIANAVKEMAWGVEQGLIKSSDVSEVLLSECLYSSNSPNPDLLIRTSGEVRLSDFLLWQTSYSCLVFQSVLWPEYSFWNLCEAILQFQMSHRSIQKARELHREEQVLQQMESDRTCVAEILQHRGNGKPMDGQSQQNALLNYSSSREERVRGFLNTLQHKRDAFFDDLSSQAVVA

SEQ ID NO: 2668 - DNA, 825 bp, Candida glabrata CBS138
  CDS (1)..(825)
atggcggaagatggctataactatatggcagtgctagccaaaaacttaatctcgagaacactgagtgtgtccaattgtgttccgcgacacattggttttatcatggatggtaacagaagatatgccaagaaaaagcaaatggaaagtaaagagggtcacgaagcaggtttcagaagtatgagtaagatcctggagctatgttacgaggctggagtagatacagcaacagtatttgcgttctcgattgaaaacttcaaaagaagtgcatacgaagttgacgccattatgagccttgcacgggaacggatacgacaaataagagagcatggtgaactggcacaaaagtatggtgtcaggatcagagttattggcgatatatcgttactggataaagatctgttgaaggaaatcaaaaatacaatggaactaactagaaacaatacccgtgctacactaaatatatgtatgccatacacagggcgtgaagaaatttatcactctatgaagacagttttggatgatgattcgtattctagcaaaaacatatctgaagaaattattgatgaacatctgtatactgctggccagcctccattggacttactaattagaactagtggtgtaactaggctaagtgactttatgctatggcaaacatgcagtaatgatgtgatgatcgagtttatcgattgtctatggccagaatttggcccttttaggatggcgtggatccttttgaagtttgctttccataaaaacttttctagtggaaggaaaccttctgaagatgatgagttcgagaataagaataagaaagcggattag

SEQ ID NO: 2669 - protein, 274 aa, Candida glabrata CBS138
MAEDGYNYMAVLAKNLISRTLSVSNCVPRHIGFIMDGNRRYAKKKQMESKEGHEAGFRSMSKILELCYEAGVDTATVFAFSIENFKRSAYEVDAIMSLARERIRQIREHGELAQKYGVRIRVIGDISLLDKDLLKEIKNTMELTRNNTRATLNICMPYTGREEIYHSMKTVLDDDSYSSKNISEEIIDEHLYTAGQPPLDLLIRTSGVTRLSDFMLWQTCSNDVMIEFIDCLWPEFGPFRMAWILLKFAFHKNFSSGRKPSEDDEFENKNKKAD

SEQ ID NO: 2670 - DNA, 828 bp, Kluyveromyces lactis NRRL Y-1140
  CDS (1)..(828)
atgagtgattcgggcagttttcctggttataaccagtttttagagatggtgaagacaactttggcgaaagtgataagaagttcggacaaagtaccgcaacatgtagcgttcattatggatggtaaccgtaggtttgctaagaagaataacatggaggtcaatgagggacataatgctggatttgaaagtatgtgtcgtatccttgaattgtgttatgaatcagggatgaaagttgctacagtatttgcgttctcgatagagaattttaagaggagtacgtttgaagtgaactggctgatggaattggcaaaggataagattaagcagatatctcagcatggagaattagcggagcaatatggtattaaagttcaaatcattggagataggtcgttattaccggctgacgttttgaaagaagtggagttagcggaagaaattactatgaataattcaagggcagtattgaacatatgcttcccatatacagggagagaagagatcgtgcattcaatacagggaataatgaaagaaacggccatgggggaaattgattatagagacattgacgaacaaacgatagaggatcatttatatacacagggtcagccacctgtggagcttttgataagaacaagtggagtcaccaggctcagcgattttttgctatggcaactaagtaacagaggatgtaccattgagctggtagattgtctctggccggagttcacgccatttagcatgcttaaaatattgataaaatttgcatttaagaagacatactccccctctaatgaagaagacgatgagttaaaaaagaaaaaataa

SEQ ID NO: 2671 - protein, 275 aa, Kluyveromyces lactis NRRL Y-1140
MSDSGSFPGYNQFLEMVKTTLAKVIRSSDKVPQHVAFIMDGNRRFAKKNNMEVNEGHNAGFESMCRILELCYESGMKVATVFAFSIENFKRSTFEVNWLMELAKDKIKQISQHGELAEQYGIKVQIIGDRSLLPADVLKEVELAEEITMNNSRAVLNICFPYTGREEIVHSIQGIMKETAMGEIDYRDIDEQTIEDHLYTQGQPPVELLIRTSGVTRLSDFLLWQLSNRGCTIELVDCLWPEFTPFSMLKILIKFAFKKTYSPSNEEDDELKKKK

SEQ ID NO: 2672 - DNA, 804 bp, Yarrowia lipolytica CLIB99
  CDS (1)..(804)
atgttgagcactttaccgggcatccaggggtttctgtcgtggggaaaaacctgtgtggctcgcatccttgccacggggccggtgcctcggcatgtggcctttgtcatggatggcaaccgacgatatgcgcgagaacgacagctggaaactcgtgagggccactccaagggcttcgagtcactcgcccagattctcgagctgtgttatgatgcgggcgtggaagacgtgactgtttttgcattttcgatcgagaacttcaaacggactcctcgagaggtggaatcgctgatggagattgccaaggagcggctcacacagatctgcgaaagtggcgagctggcagagcagtacgggatccgaatccgggtgctgggcaaccgatccttgttgagaaaggatgttgcggagctctttgacaaggcacagaccatgaccaagggacacactcgagccaccctcaacatctgtttcccttacacgtcgcgagacgatatcgcccatggcatccgcggggtcgtcagagacgctgagaagggagaaatcgagcctgcagacatcaccgagcagactctggcatctcacatgtacacgggcaactctcctcctttggacattctcattcgaacgtccggggtgtgtcgattctccgactttatgctgtgggagagtcatcagggcgctcatatcgagtttgtggacacgctgtggcccgactttggtgtgtggagaatgctggcgattttgttgaagtggagttggagaaaagcatacctggctgaccaggccgaacagggaaattactag

SEQ ID NO: 2673 - protein, 267 aa, Yarrowia lipolytica CLIB99
MLSTLPGIQGFLSWGKTCVARILATGPVPRHVAFVMDGNRRYARERQLETREGHSKGFESLAQILELCYDAGVEDVTVFAFSIENFKRTPREVESLMEIAKERLTQICESGELAEQYGIRIRVLGNRSLLRKDVAELFDKAQTMTKGHTRATLNICFPYTSRDDIAHGIRGVVRDAEKGEIEPADITEQTLASHMYTGNSPPLDILIRTSGVCRFSDFMLWESHQGAHIEFVDTLWPDFGVWRMLAILLKWSWRKAYLADQAEQGNY

SEQ ID NO: 2674 - DNA, 804 bp, Theileria parva
  CDS (1)..(804)
atgaaacttactggattccaggaatacatggtgtttgtgatgaaaccaatgttgagggtggaacacatggctctgattatggacgggaacagaagatacgctaagaatctgaacctacaacaatcgcaaggacatctcaacggcttcaataaactcctcgaaatattggagtttagtagcttgtttggattgaaggtgataacgatattcgccttctctttgctgaactttagcagaactcggaaggagatttcagacctgcttaaccttttcgttgatctttcaggccctaaatcacaactagaggagttgtgtgaaagaattggatgtaaaataagattttgtggcgatttttcatttttaggtgaggatattaaacagattctgaacgatattcagtctaaaactaatcattacagcaagatgactttaaacgtatgtgcatcatacgggggtagaaatgaaattatcaacgctctcaacaaatttaactcaaatgttgaaaacaatactacttttaacactgataacaccaacaataatgctagggaggaatattatagaaatttgtacactggtgattttacaccaccaaacctacttattagaacttctggtgaatcgagattatctgattttctcatctatcaatgctctgaacatacttgcttttattttgttaaggagatgtggcctgagcttagtttcaatcggttaatttgcatattgatacactattccgttttccaaccaatactaaactgtgtaaactcattcaccaagttcataaatcacaaaaactaa

SEQ ID NO: 2675 - protein, 267 aa, Theileria parva
MKLTGFQEYMVFVMKPMLRVEHMALIMDGNRRYAKNLNLQQSQGHLNGFNKLLEILEFSSLFGLKVITIFAFSLLNFSRTRKEISDLLNLFVDLSGPKSQLEELCERIGCKIRFCGDFSFLGEDIKQILNDIQSKTNHYSKMTLNVCASYGGRNEIINALNKFNSNVENNTTFNTDNTNNNAREEYYRNLYTGDFTPPNLLIRTSGESRLSDFLIYQCSEHTCFYFVKEMWPELSFNRLICILIHYSVFQPILNCVNSFTKFINHKN

SEQ ID NO: 2676 - DNA, 777 bp, Parachlamydia sp. UWE25
  CDS (1)..(777): transl_table=11
ttgattgatcacgctgttataccattgcaagaaagttctagctatttcttgccatcgcaactagagagtttaaatttttctcgtatcccacaacacatcgccattattcctgacggcaatcgacgttgggcaagaaaacgattatccagctcaaatgaaggacaccgagaaggagctgatattttaatggaaaccgttaaagcagcaaaggaacttggaattaaagcaattacattctatacattttctactgaaaactggtctcgttcatttgatgaaatttctgctctcatgcttttatttgcctcttatctaagcgaacaatgtgattcaatgattcaaaatggaattaaattagaaaccatcggtgagcttgatcctcttcctgaatttttaaaagacactttgaaggaaacaaaaaaagctacttgtgcatgtgatcaaattgatttaattcttgctatgaactacggttctcgcaatgaactacaacgggcttttacgaggatattagatgaagtcgaacagggaaatttgaaaaaagaagaagtgaacgaaacaactatcgctcaatatttagacacccatcaatggccagatcctgagctattaattcgaacaagtggtgaaatgagaattagtaattttcttctttggcaaatttcttatacagaaatttatattgcacctgtcctttggccagattttactcctaatcatcttctggaagccattgtcgattatcaaaaaagagaaagaagatggggaggcgtataa

SEQ ID NO: 2677 - protein, 258 aa, Parachlamydia sp. UWE25
MIDHAVIPLQESSSYFLPSQLESLNFSRIPQHIAIIPDGNRRWARKRLSSSNEGHREGADILMETVKAAKELGIKAITFYTFSTENWSRSFDEISALMLLFASYLSEQCDSMIQNGIKLETIGELDPLPEFLKDTLKETKKATCACDQIDLILAMNYGSRNELQRAFTRILDEVEQGNLKKEEVNETTIAQYLDTHQWPDPELLIRTSGEMRISNFLLWQISYTEIYIAPVLWPDFTPNHLLEAIVDYQKRERRWGGV

SEQ ID NO: 2678 - DNA, 744 bp, Desulfovibrio vulgaris subsp. vulgaris str. Hildenborough
  CDS (1)..(744): transl_table=11
gtgagcgactcacgcaacgaacaggtatccgtgtcggcagcagccctgcccgcccatgtggccatcatcatggacggcaacggacgatgggccaccatgcgcggcctctcgcgcagcgaagggcacaaggcgggcaccgaagccgcccgtgccatcgtcacggaggcgcgcaccgtgggcatccgccacctgaccatgtacaccttctcacgcgaaaactggagccgccccaagagcgaggtcaagttcctgttcgaattgctggtggacttccttgggcgtgagcttgccaaccttgagagacagggcatacgcctcaacgttttcggtgcgcttgaagacctgcccatggcaacgcgcatggccctgcaacacgccataggccgcacggcccattgtgacgccatgatgctgaacctcgcgctcaactattccggtcgtgaagagatactccgcgcgtgccgcagtcttgtcacagagggcgtcgcccccgcggacatcacggaggaggccttcgccgcacgcctctatacggccgggcagcccgaccccgacctcgtcatccgcaccagcggcgagatacgcatcagcaactacctgttgttccagagtgcctacagcgaattctacttcactgacacgctctggcccgacttcacccccgccgaactgcataaggcactcgagacctatgcgggacgcagccgccgcttcggacgcactcaggagcagatcgaacaatga

SEQ ID NO: 2679 - protein, 247 aa, Desulfovibrio vulgaris subsp. vulgaris str. Hildenborough
MSDSRNEQVSVSAAALPAHVAIIMDGNGRWATMRGLSRSEGHKAGTEAARAIVTEARTVGIRHLTMYTFSRENWSRPKSEVKFLFELLVDFLGRELANLERQGIRLNVFGALEDLPMATRMALQHAIGRTAHCDAMMLNLALNYSGREEILRACRSLVTEGVAPADITEEAFAARLYTAGQPDPDLVIRTSGEIRISNYLLFQSAYSEFYFTDTLWPDFTPAELHKALETYAGRSRRFGRTQEQIEQ

SEQ ID NO: 2680 - DNA, 822 bp, Propionibacterium acnes KPA171202
  CDS (1)..(822): transl_table=11
atgagcagcctggaccaccgcctgtcgaaggtcagtgagaccctcgaccgcatgcacccgtccggtctgctgtacaccacctacgaggctcgtctcctcgaccaactcgaccgcagccgtctaccccagcacgtcgcagtcctggctgacggcaaccgtcgctgggcccgcctcaacgctccgggagaacccttggtggctggctacgaggcgggggcagatcgccttagagagttttgcacatggtgcgacgctgttggcatcccaatcatcaccttgtgggtgctgtcgactgacaacctacaacgagccgaaaccggcgagctcggaccactactcaaggtcatcgagtccctcgtcgactcgttagcagataattcacggtggcgggtccaggccgttggcgaccttgatcttctcccagacgacatggccgaatcgctgtgtcgggccggtcgcacctccatcgggcatgtcggtatgcatatcaacgtcgcggtagcttacggaggccgtcatgaactgcgtgacgccttccgttccctcctggccgaagaggcggagaaaggcaccagcctggctgacttagcccgaaccctggaaatcgaccagatcgaggaccacctgtacacgcggggccagcctgaccctgacctcattatccgcacctcaggagagcagcgtctttccggattcctcatgtggcaaagcgcccattcagagttctacttctgcgaggcgttgtggcccgattttcgcaaggttgacttcctgcgggcgctgcgctccttcacccagcgggagcggcgctatggtcgctaa

SEQ ID NO: 2681 - protein, 273 aa, Propionibacterium acnes KPA171202
MSSLDHRLSKVSETLDRMHPSGLLYTTYEARLLDQLDRSRLPQHVAVLADGNRRWARLNAPGEPLVAGYEAGADRLREFCTWCDAVGIPIITLWVLSTDNLQRAETGELGPLLKVIESLVDSLADNSRWRVQAVGDLDLLPDDMAESLCRAGRTSIGHVGMHINVAVAYGGRHELRDAFRSLLAEEAEKGTSLADLARTLEIDQIEDHLYTRGQPDPDLIIRTSGEQRLSGFLMWQSAHSEFYFCEALWPDFRKVDFLRALRSFTQRERRYGR

SEQ ID NO: 2682 - DNA, 807 bp, Propionibacterium acnes KPA171202
  CDS (1)..(807): transl_table=11
atggcccgaatcacaccgcgacccccgaagcgcggcccgctgccgcatccgtctggagctcgtccacccgagctgccaccggaactcatcccccaacacgtcgccatcgtcatggacggcaacggacgttgggccaggcaacgcggtcttaggcgcactgagggtcacgcacgtggcgaggatgctctcttcgatgttatcgagggcgccatcgagatgggtatcccctatttgagcgcctatgcgttttccaccgaaaactggaagcgctcgcccgacgaagttcggtggcttatgggcttcaatcgtgacgtcatccaccgtcgtcgcgatcaactcgacgccatgggagtacgcatccgttgggctggacgtcgtcccaagctgtggaagtcagtcatcaaggaattggaatcagccgagaaacagtcggctgataacaccgtcctcaccctccagttctgcgtcaattacggcggtcgggcagagatcgttgacgcggtgcgtgatattgcccggctaaccgctgagggcaagatcgaccccgaccacatcacggagaagaccttccgtactcaccttgacgagcccgaggtccccgacgtcgacctattctggcgctcctccggggaacagcgcacatcgaatttcctcctgtggcaatcggcctacgccgaaatggtgttctccgacgttttgtggcccgacgttgaccgccgcgacctctgggccgcagtgatggaatacgccaagcgggaccggagatttggtggggccgtccccaatgaggtcaaccccaccccatga

SEQ ID NO: 2683 - protein, 268 aa, Propionibacterium acnes KPA171202
MARITPRPPKRGPLPHPSGARPPELPPELIPQHVAIVMDGNGRWARQRGLRRTEGHARGEDALFDVIEGAIEMGIPYLSAYAFSTENWKRSPDEVRWLMGFNRDVIHRRRDQLDAMGVRIRWAGRRPKLWKSVIKELESAEKQSADNTVLTLQFCVNYGGRAEIVDAVRDIARLTAEGKIDPDHITEKTFRTHLDEPEVPDVDLFWRSSGEQRTSNFLLWQSAYAEMVFSDVLWPDVDRRDLWAAVMEYAKRDRRFGGAVPNEVNPTP

SEQ ID NO: 2684 - DNA, 807 bp, Leifsonia xyli subsp. xyli str. CTCB07
  CDS (1)..(807): transl_table=11
atgactccccggccctacacgcacaaggacgcggtcgagtaccgcccgctcgattggaccggcgtccacccgccggccttcccccggacggcgatccccgagcacgtcgcgatcgtgatggacggcaatggccgctgggcgaaccgtcagggcctcacccgcatcgaggggcaccgcgccggggaggcatcgttgctggacgtggtggccggcgccattcaggtcggcgtcaagcacctcagcgtctacgcgttctcgaccgagaattggaagcgctcgcccgacgaggtccgcttcctcatgggtttcaaccgcgaggtgctgcaccgccgccgcgaccagctgaacgagtggggtgtgcgcgtccgctgggccgggcgcaagccccggctgtggtcgtccgtgatcaaagagctgcagtacgccgagcagctcacggcgggcaacgatgtcctgacgctgaccatgtgcgtcaactacgggggccggaccgagatcgcggatgcggtgcgctccatcgccgaggaggtcgctgcgggcaggctgaagccctccgccgtgggggagaagaccatccagcgccacctctacctccccgacacgcccgacgtcgacctcttcgtgcgcagttcgggggagcagcggacgagtaacttcctgctctggcagagcgcgtacgctgagatggtgttcctcgacagactctggccggacttctcccgcaccgatctgtgggaggcgatcgagctgttcgcgaggcgcaaccggcgcttcggcggcgcggtcgacacaccgatgacggaatag

SEQ ID NO: 2685 - protein, 268 aa, Leifsonia xyli subsp. xyli str. CTCB07
MTPRPYTHKDAVEYRPLDWTGVHPPAFPRTAIPEHVAIVMDGNGRWANRQGLTRIEGHRAGEASLLDVVAGAIQVGVKHLSVYAFSTENWKRSPDEVRFLMGFNREVLHRRRDQLNEWGVRVRWAGRKPRLWSSVIKELQYAEQLTAGNDVLTLTMCVNYGGRTEIADAVRSIAEEVAAGRLKPSAVGEKTIQRHLYLPDTPDVDLFVRSSGEQRTSNFLLWQSAYAEMVFLDRLWPDFSRTDLWEAIELFARRNRRFGGAVDTPMTE

SEQ ID NO: 2686 - DNA, 795 bp, Leifsonia xyli subsp. xyli str. CTCB07
  CDS (1)..(795): transl_table=11
gtgagcagaagaagttctccccttgccagcggactgctctatgggttgtaccagaaaggcgttcgccgcgaactcgcggcgctcggcgtcgaagcgctcccgaagcatgtcgcgatgatcatcgacggtaaccgccgctgggcacgccaggccggtctcaccacggtcgcgcacggacaccgtgcgggcgccgccaaaatgcgcgagttcttgaagtggtgcgatgatctcggcatcgccgtcgtcacgctctacctcctctcctcggacaacctcaccaaccgcgagagcgccgagctggcagacctcatcgaaatcatcgcggaactcgccgaggacctctcccgctaccgccactggcgtgtcaagcacgtcggctccgccgccgggctgtccgatccgctcggcgccgcgctcaccggcgccgaggatcgtaccgcggcgaacgaggggatgcacatcaacctcgccgtcggctacggcggccgcaaggagatcactgacgccatccgcagcatcgtcgccgcgcaccaggccgagggcggaagcctggagaccctggccgacctgctgacaccggatttcatcggcgcccacctctacaccggggggcagcccgaccccgacctcgtcatccgcacctccggcgagcagcgtctcagcgacttcatgctctggcagagcgcccacagcgagttctacttcgtcgaagcgctcggccccgacctccgcgaagtcgacttcctccgcgccgtccgcgactactcccgccgacagcgccgcttcggctcctga

SEQ ID NO: 2687 - protein, 264 aa, Leifsonia xyli subsp. xyli str. CTCB07
MSRRSSPLASGLLYGLYQKGVRRELAALGVEALPKHVAMIIDGNRRWARQAGLTTVAHGHRAGAAKMREFLKWCDDLGIAVVTLYLLSSDNLTNRESAELADLIEIIAELAEDLSRYRHWRVKHVGSAAGLSDPLGAALTGAEDRTAANEGMHINLAVGYGGRKEITDAIRSIVAAHQAEGGSLETLADLLTPDFIGAHLYTGGQPDPDLVIRTSGEQRLSDFMLWQSAHSEFYFVEALGPDLREVDFLRAVRDYSRRQRRFGS

SEQ ID NO: 2688 - DNA, 786 bp, Desulfotalea psychrophila LSv54
  CDS (1)..(786): transl_table=11
atggacacaaatggagaatatatgagactggcagaattagctgagaagtatgggattgatcctctccaccttcctgctcatattgcaattattatggatggaaatggacgttgggctcaggctcgtaaacgtccacgtctctttggacataaggcaggggctgattcggttgaggagattgtctcaatctgttgccaactcggtatcccggcacttaccctctatgccttctcttctgaaaattggaagagaccgaaagcagaggtgagtggccttatgtctatcctgcagaaatatcttcgggcagagttgcccaagatgcaaaagaataatattcgtctccactgtatcggcgatattgagcgtctgccatctgctgtacgcgataccctgctccaggtaatgggcgagactgcaaaaaatacggggatgatactctcactggccctcagttatggggggcgggatgagatctgtcgtgccataaaaaaaatctctgctgaatgtgtcgcaggtgatcttgaggagacggatatcactccagatcttctctccgactatcttgacaccgctatcttgccggaaccagatctgttgatacggacgggcggtgagtctcggctttccaattttcttctctggcaactctcctatgcagagttgtacttcacagatattatgtggccagaatttcgtacagaacagctggcaactgctattgccagctttcaggaacgtgaacgccgttttggcaaaattggtgcacagttaaataagaataaatag

SEQ ID NO: 2689 - protein, 261 aa, Desulfotalea psychrophila LSv54
MDTNGEYMRLAELAEKYGIDPLHLPAHIAIIMDGNGRWAQARKRPRLFGHKAGADSVEEIVSICCQLGIPALTLYAFSSENWKRPKAEVSGLMSILQKYLRAELPKMQKNNIRLHCIGDIERLPSAVRDTLLQVMGETAKNTGMILSLALSYGGRDEICRAIKKISAECVAGDLEETDITPDLLSDYLDTAILPEPDLLIRTGGESRLSNFLLWQLSYAELYFTDIMWPEFRTEQLATAIASFQERERRFGKIGAQLNKNK

SEQ ID NO: 2690 - DNA, 693 bp, Borrelia garinii PBi
  CDS (1)..(693): transl_table=11
atgaataaaaggtctcttccaagtcatgttggaatcatcatggatggcaatagaaggtgggctttaggcaaaggattatcttctttggaaggttatgaagaggggcttaaaagagcaaaagaaatagttaagcattctttaaaggtaggtatcaaatatttatctttttatgtattctctactgaaaattggaaaagagatgattgtgagatagaaaagttaatgtttttaattacccactatttgagggccgaatttaatttttacaaaaaaaatggaataaaaataatagtttcaggagatgttgagtctttaggtgaagaagtaagaagttcaataaaagattctgttagcttttctaaaaattttaacaatcttgttttaaatttagcaatcaattatgggggccgcaatgaaatacttagagctgttaaaaaatttgtttcaagtaattttgatttagagtctttaaatgagaatgctttttccaattttttagataatccagagctgcccgatattgatcttttaatacgtacgggcgggaatattagaataagcaattttttcttatggaggattgcttattccgaattaattttttcaaatgttttgtggcccgaatattatgacaataggtacagtaaggatttggaatgttttcaacttagagggagaaattttgggagatga

SEQ ID NO: 2691 - protein, 230 aa, Borrelia garinii PBi
MNKRSLPSHVGIIMDGNRRWALGKGLSSLEGYEEGLKRAKEIVKHSLKVGIKYLSFYVFSTENWKRDDCEIEKLMFLITHYLRAEFNFYKKNGIKIIVSGDVESLGEEVRSSIKDSVSFSKNFNNLVLNLAINYGGRNEILRAVKKFVSSNFDLESLNENAFSNFLDNPELPDIDLLIRTGGNIRISNFFLWRIAYSELIFSNVLWPEYYDNRYSKDLECFQLRGRNFGR

SEQ ID NO: 2692 - DNA, 771 bp, Symbiobacterium thermophilum IAM 14863
  CDS (1)..(771): transl_table=11
gtgacggacgacttgcacggacgcgttgaaccggaccgggcggcgcccctgcacacggcaccgcgcggaccggactaccgtcctcgccacgtggcgatcatcatggatggcaacgggcggtgggcgctgaggcgcggcctgccccggacggtaggccattgcgccggggtggaggccctgcgcggggtggtgaaggccgcccccgatctggggatcaagatcctgacctgttacgcgttttcgacggagaactggaagcgcccgaaggacgaggttgacacgctgatgagcctgctgctggagtactgcaggctggaggcggagaacctgcaccgcaacggcgtgcggatcaacgccatcgggcggattcacgaactgcccccggcgcagcagcaggagatcgcccgggccgtggcgctgacgcgcggcaacgaccggctgatcctgaacctcgcggtcaactacggcgggcaggcggagctggtggacgccttccgcagcctggccgccgaggtccagtccgggcggctcgcgccggaggccatcgacgccgaggtcgtgcggcggcacctctatactgccgacctgcccgacccggacctgatcatccggaccgccggtgagatgcggctttcgaactttctcctgtggcagtcggcctatgccgagatctgggtgaccgatgtttactggcccgacttcacgcgggagcatctggaacaggcactgcgggattatgcccggcgtgagcggcgcttcggcgccctgtga

SEQ ID NO: 2693 - protein, 256 aa, Symbiobacterium thermophilum IAM 14863
MTDDLHGRVEPDRAAPLHTAPRGPDYRPRHVAIIMDGNGRWALRRGLPRTVGHCAGVEALRGVVKAAPDLGIKILTCYAFSTENWKRPKDEVDTLMSLLLEYCRLEAENLHRNGVRINAIGRIHELPPAQQQEIARAVALTRGNDRLILNLAVNYGGQAELVDAFRSLAAEVQSGRLAPEAIDAEVVRRHLYTADLPDPDLIIRTAGEMRLSNFLLWQSAYAEIWVTDVYWPDFTREHLEQALRDYARRERRFGAL

SEQ ID NO: 2694 - DNA, 783 bp, Bacillus licheniformis ATCC 14580
  CDS (1)..(783): transl_table=11
atgctcaatatactcaaaaattggaagaatcagcattcggctgcttccaacatggaatgttacacaaaagaaaatattttaaaaggagaaattcctgaacatatcgccattattatggacggaaacggccgctgggcaaagaagcgggcgatgccccgcatcgcgggtcatcacgaaggcatgaaagtggtcagacagacgacaaagcttgccaatgagctcggtgtcaaagcgttgacgctgtatgccttttcgacggaaaattggaagcgtccaaagcttgaggttgactttctgatgaagctgcctgaagagtttctgggaacgtatctcccggagctggtcgaagaaaatgtccgggtccgcatgacaggcgatagggaaggactgccgccccacacgatccgcgcggttgaaaaagccatccgtgatacggagaacaatgacggacttattcttaattttgcattgaattacgggggacgtgcagaaatcgtcagagccgcaaagaaaattgccgaagaagccaaaaaaggcacattgaataccgaggaaatcgacgaaaagctattttccgattatttaatgacagaaactttgcaggaccctgatttgctgattcgcacaagcggcgagatcaggctgagcaacttcatgctttggcagcttgcctacagcgaatttttatttaccgatgtattgtggcctgattttaaagacgttcacttgcttcaggctatcggagaatatcagcgtcgcgggagaaggtttggcggaatttag

SEQ ID NO: 2695 - protein, 260 aa, Bacillus licheniformis ATCC 14580
MLNILKNWKNQHSAASNMECYTKENILKGEIPEHIAIIMDGNGRWAKKRAMPRIAGHHEGMKVVRQTTKLANELGVKALTLYAFSTENWKRPKLEVDFLMKLPEEFLGTYLPELVEENVRVRMTGDREGLPPHTIRAVEKAIRDTENNDGLILNFALNYGGRAEIVRAAKKIAEEAKKGTLNTEEIDEKLFSDYLMTETLQDPDLLIRTSGEIRLSNFMLWQLAYSEFLFTDVLWPDFKDVHLLQAIGEYQRRGRRFGGI

SEQ ID NO: 2696 - DNA, 717 bp, Mannheimia succiniciproducens MBEL55E
  CDS (1)..(717): transl_table=11
atgaaagaactagatcttaataatattcctaagcatattgcgatcattatggacggcaatggacgttgggctaaacagcaagggaaaatgcgaattttcggacataaaagtggggtacgagcagtgcgtcgttcggtttcttacgcctgtcaaatcggggttcaggcgctcaccttatatgcgttcagcagtgaaaactggaatcgtccggaacaggaagtcaatgctttaatgaccttattcatgcaggctttggatctcgaagtgaaaaagctgcataaaaataatattaaactcaaagttcttggtgatatttccggctttagtcctaaattgcaggaaaaaatcgccagagcggaaactttaacggcaaataatgacagtttaacgctgaatatagccgccaattatggcgggtgttgggacattgttcaggcaaccagacagattgctcagcaagttaaagacggaagtttgacaatatcggagattacggaagaactttttcaacggaatctggtcacaaaagagcaacctcccgtggatttgttgattcgtaccagcggagaacaacgcattagtaatttcttattgtggcaaattgcctatgccgaattgtatttttcccatgtattatggcccgattttaacgaacaggaatttaatcgcgctatttatgtctatcaacaacgcgaacgccgcttcgggactagctaa

SEQ ID NO: 2697 - protein, 238 aa, Mannheimia succiniciproducens MBEL55E
MKELDLNNIPKHIAIIMDGNGRWAKQQGKMRIFGHKSGVRAVRRSVSYACQIGVQALTLYAFSSENWNRPEQEVNALMTLFMQALDLEVKKLHKNNIKLKVLGDISGFSPKLQEKIARAETLTANNDSLTLNIAANYGGCWDIVQATRQIAQQVKDGSLTISEITEELFQRNLVTKEQPPVDLLIRTSGEQRISNFLLWQIAYAELYFSHVLWPDFNEQEFNRAIYVYQQRERRFGTS

SEQ ID NO: 2698 - DNA, 783 bp, Burkholderia mallei ATCC 23344
  CDS (1)..(783): transl_table=11
atgacctataccagctctaccgttcgcgtgcctgacgtcgccgccgtgccgcgtcacatcgcgatcatcatggacggcaacggccgttgggcgaccgagcgccgcctgccgcgcgtcgcggggcacacgcgcggcgtcgacgcggtgcgctcggtcgtcgagggatgcgcacgcgcgggcgtcgaatatctgacgctcttcgcgttcagctccgagaactggcgccggccgaacgacgaagtgtcgttcctgatgcgcctgttcatcaccgcgctcgagcgcgaggtcggcaagctgcacgcgaacggcatccggctgcgcgtcgtcggcgatctgacgaagttcgagccgcgcatccaggcgctgattcgtcgcggcgagacgaagacggcgcgcaatacgcgcctcacgctcacgatcgccgcgaactacggcggccattgggacatcctgcaggcgacgcgcaagctcgtcgaagaggcggcgcgcgaagggcgcgcgcccgaaatcgacgaggacgcgttcgcccgccatctggcgatggcctatgcgcccgagccggatctcttcatccgcacgggcggcgagcagcgcatcagcaatttcctgctctggcagctcgcctataccgagttctacttcaccgacacgttctggccggatttcgacgccggcgcgctcgccgaagcgctcgcgtcgtacacgcaccgcgaacgccgcttcggccgcacgagcgcgcagctcgaaccccaggcccaggacgccgattccctttcatgctga

SEQ ID NO: 2699 - protein, 260 aa, Burkholderia mallei ATCC 23344
MTYTSSTVRVPDVAAVPRHIAIIMDGNGRWATERRLPRVAGHTRGVDAVRSVVEGCARAGVEYLTLFAFSSENWRRPNDEVSFLMRLFITALEREVGKLHANGIRLRVVGDLTKFEPRIQALIRRGETKTARNTRLTLTIAANYGGHWDILQATRKLVEEAAREGRAPEIDEDAFARHLAMAYAPEPDLFIRTGGEQRISNFLLWQLAYTEFYFTDTFWPDFDAGALAEALASYTHRERRFGRTSAQLEPQAQDADSLSC

SEQ ID NO: 2700 - DNA, 783 bp, Burkholderia pseudomallei K96243
  CDS (1)..(783): transl_table=11
atgacctataccagctctaccgttcgcgtgcctgacgtcgccgccgtgccgcgtcacatcgcgatcatcatggacggcaacggccgttgggcgaccgagcgccgcctgccgcgcgtcgcggggcacacgcgcggcgtcgacgcggtgcgctcggtcgtcgagggatgcgcacgcgcgggcgtcgaatatctgacgctcttcgcgttcagctccgagaactggcgccggccgaacgacgaagtgtcgttcctgatgcgcctgttcatcaccgcgctcgagcgcgaggtcggcaagctgcacgcgaacggcatccggctgcgcgtcgtcggcgatctgacgaagttcgagccgcgcatccaggcgctgattcgtcgcggcgagacgaagacggcgcgcaatacgcgcctcacgctcacgatcgccgcgaactacggcggccgttgggacatcctgcaggcgacgcgcaagctcgtcgaagaggcggcgcgcgaagggcgcgcgcccgaaatcgacgaggacgcgttcgcccgccatctggcgatggcctatgcgcccgagccggatctcttcatccgcacgggcggcgagcagcgcatcagcaatttcctgctctggcagctcgcctataccgagttctacttcaccgacacgttctggccggatttcgacgccggcgcgctcgccgaagcgctcgcgtcgtacacgcaccgcgaacgccgcttcggccgcacgagcgcgcagctcgaaccccaggcccaggacgccgattccctttcatgctga

SEQ ID NO: 2701 - protein, 260 aa, Burkholderia pseudomallei K96243
MTYTSSTVRVPDVAAVPRHIAIIMDGNGRWATERRLPRVAGHTRGVDAVRSVVEGCARAGVEYLTLFAFSSENWRRPNDEVSFLMRLFITALEREVGKLHANGIRLRVVGDLTKFEPRIQALIRRGETKTARNTRLTLTIAANYGGRWDILQATRKLVEEAAREGRAPEIDEDAFARHLAMAYAPEPDLFIRTGGEQRISNFLLWQLAYTEFYFTDTFWPDFDAGALAEALASYTHRERRFGRTSAQLEPQAQDADSLSC

SEQ ID NO: 2702 - DNA, 789 bp, Methylococcus capsulatus str. Bath
  CDS (1)..(789): transl_table=11
atggttttttcgccggacaatgtcaagccggtggcgtctgccccggaagatggcgccaggatgcgacgcattccccgccacgtcgccatcgttatggacggcaacggccgctgggcgcaagagcgctatctgcctcgcaccgccggccaccgagccggcgtcggggcggtccgcaaagtggtggagcactgcgcgaagcgcggcgtggaagcgctgacgctgttcgcgttcagcagcgagaactggcggcggcccgagcaggaagtctccgtgctgatggaattgttcctgtcgacgctggaacgggaaacggaaaagctgcaccagaacggcgtgcgactgcgcatcatcggcgaccgcgcggcctttggggaggcgctccgtgagcggatggacgccgccgagtcactgacccgcagcaataccggcttgcaactggccatcgcggcgaattacggcggacgctgggacatcgtccaggcggcccagaccctggcggagaaggtccgacgaggcgagctgtcgcccgagcagatcacggcggacagactgcagcaacagcttgcactggccgacctccccgagcccgacctctttatccgcaccggcggcgaacgccggatcagcaacttcctgctctggcagctggcctacacggagctgtatttcacgccggtgctgtggccggaattcgacgaggaggcgctggatctcgcgttcgaggactatgccggcaggcagcgccggttcggttttaccggcgatcaggtcgcgggccgcatgccctga

SEQ ID NO: 2703 - protein, 262 aa, Methylococcus capsulatus str. Bath
MVFSPDNVKPVASAPEDGARMRRIPRHVAIVMDGNGRWAQERYLPRTAGHRAGVGAVRKVVEHCAKRGVEALTLFAFSSENWRRPEQEVSVLMELFLSTLERETEKLHQNGVRLRIIGDRAAFGEALRERMDAAESLTRSNTGLQLAIAANYGGRWDIVQAAQTLAEKVRRGELSPEQITADRLQQQLALADLPEPDLFIRTGGERRISNFLLWQLAYTELYFTPVLWPEFDEEALDLAFEDYAGRQRRFGFTGDQVAGRMP

SEQ ID NO: 2704 - DNA, 804 bp, Nocardia farcinica IFM 10152
  CDS (1)..(804): transl_table=11
atggagcccgtgatcctccgtcgtgaccccgcctccgcgacccgcaccgtgcgcccgcccgccccgcatccctccggcgcgcgcccgccgcagctgccgccggagctggtgcccaatcacgtggccctggtgatggacggcaacggacgctgggcccaggagcgcggcctgccccgcaccgccgggcacgagcgcggcgaggcggtgctgatggacaccgtcgaggggtgcatcgagatcggcgtgaagtggctctcggcgtacgcgttctccaccgagaactggcggcgcagccccgaggaggtgcgcttcctcatgggcttcaaccgcgacgtgatccgccgccgccgcgacgagatgcacgagatgggcgtgcgggtgcgctgggcgggcaggcgtccgcggttgtggcgcagcgtgatcaaggaactcgaggtggccgaggaactcaccaaggacaacaccgtgctgacgctgaccatgtgcgtcaactacggcggtcgcgccgagatcgccgacgcggcacgggaaatcgcccgacgggtggccgcgggggagatcgatcccgaacgggtggacgagcgcaccgtcgcccggttcctcgacgaaccggacatgcccgacgtcgacctgttcctgcgcccctccggcgagttccgcacctccaatttcctgctgtggcagtcggcctacgccgaatacgtcttccaggagacgttgttccccgacttcgatcggcgcaacctgtgggaggcctgcctccagtacgcttcgcgtgaccgccgattcggcggcacgaagtag

SEQ ID NO: 2705 - protein, 267 aa, Nocardia farcinica IFM 10152
MEPVILRRDPASATRTVRPPAPHPSGARPPQLPPELVPNHVALVMDGNGRWAQERGLPRTAGHERGEAVLMDTVEGCIEIGVKWLSAYAFSTENWRRSPEEVRFLMGFNRDVIRRRRDEMHEMGVRVRWAGRRPRLWRSVIKELEVAEELTKDNTVLTLTMCVNYGGRAEIADAAREIARRVAAGEIDPERVDERTVARFLDEPDMPDVDLFLRPSGEFRTSNFLLWQSAYAEYVFQETLFPDFDRRNLWEACLQYASRDRRFGGTK

SEQ ID NO: 2706 - DNA, 789 bp, Nocardia farcinica IFM 10152
  CDS (1)..(789): transl_table=11
ttggtcgccgtggagtttcggaaccgggtgcgtggcctgccgtaccgcatctacgaggcccggctggtcaagcagctggccggcagacaacatccccgccatgtggcggtgatgtgcgacggtaaccgacgctgggcccgggagaacggtttcaccgacgtcagccacgggcaccgggtgggtgcgctgaagatcgccgaactggtcgaatggtgctcgcaggcgggcatcgagatggtcaccgtctacctgctctcgacggagaacctgcagcgcgacccggaggagctcgagaccctcttcgaggtcatcaccgacgtggtcgaggaactgtccgcacccgagcgcgactggagcgtgcgcatcgtcggctcgctcgacggcttccccgaactgatcgccaaacgcatgcgcaccgccgccgagcagaccgagggcaggcgcggcgtgcacgtcaacgtggcggtcggctacggcgggcgccaggagatcgccgacgcggtccgctcgctggtgcgccaggagatcgcggccggggagaccggcgaggacctggtgcagtcgatcaccgtcaacgccatcggccagcacctgtacacctccggccagcccgacccggacctggtcatccgcacctccggcgagcagcggctctcgggtttcctgctgtggcagagcgcctactccgagatctggttcaccgaggtgtactggccggagttccggcgcgtggacttcctgcgcgccctgcgcgactacgcggcacggcaccggcgattcggcgtgtga

SEQ ID NO: 2707 - protein, 262 aa, Nocardia farcinica IFM 10152
MVAVEFRNRVRGLPYRIYEARLVKQLAGRQHPRHVAVMCDGNRRWARENGFTDVSHGHRVGALKIAELVEWCSQAGIEMVTVYLLSTENLQRDPEELETLFEVITDVVEELSAPERDWSVRIVGSLDGFPELIAKRMRTAAEQTEGRRGVHVNVAVGYGGRQEIADAVRSLVRQEIAAGETGEDLVQSITVNAIGQHLYTSGQPDPDLVIRTSGEQRLSGFLLWQSAYSEIWFTEVYWPEFRRVDFLRALRDYAARHRRFGV

SEQ ID NO: 2708 - DNA, 927 bp, Haloarcula marismortui ATCC 43049
  CDS (1)..(927): transl_table=11
atgtatacaacgatgctatcgagggggaagcgactgggatatgcagcctacgagcgattgctccagtgggaactgtctggaacgccggaccacgtcgcagtcattatggacgggaaccgaagatacgctgaaaagcagggcacaaaaaaacaggagggccacaaagaaggagcccaaacgacggaggcactgttgaactggtgcgacgaactcggcattcgtgaggtgacgctgtacacgttctcgacggagaacttcgaccgcgaccccgaggaacgcgaacacatcttcgacctcgtcgaacagaagctccgaacatttgccgacgccgaccgggtccacgaggccggcgtgtgtatccgcgccatcggcgagacggagatgttacccgagcgggtccgagacgctatcgactacgctgagggacgaacggcgcagtacgaccagctcaatctcaacatcgcgctggcctatggcggccgggccgagttgctcggtgcggcccgcgacgttgccgctgctgtcgagaacgagacccttgacccgacggacgtctctgcggaaaccatcgaagagcggctttacgaggggccgacccgcgacgttgatctcatcgttcgaaccggcggtgacgaacgcacctcgaacttcctgccgtggcacgccaacggcaacgaggccgccacgttcttctgtacgccctactggcccgaattccggaaggtcgacttcctgcgagcgatccgaacgtaccagaaccgcgaggattcctggcggacgacccgtgccgagcggtcgctggcactggttcgtgccatcgagcaatcggagctaccgacggccaagcggatgctcgggcgattccgtgacgcgctcccgagtaccgaacgcgagcaactcgacgaagagtacgacctcgcggactga

SEQ ID NO: 2709 - protein, 308 aa, Haloarcula marismortui ATCC 43049
MYTTMLSRGKRLGYAAYERLLQWELSGTPDHVAVIMDGNRRYAEKQGTKKQEGHKEGAQTTEALLNWCDELGIREVTLYTFSTENFDRDPEEREHIFDLVEQKLRTFADADRVHEAGVCIRAIGETEMLPERVRDAIDYAEGRTAQYDQLNLNIALAYGGRAELLGAARDVAAAVENETLDPTDVSAETIEERLYEGPTRDVDLIVRTGGDERTSNFLPWHANGNEAATFFCTPYWPEFRKVDFLRAIRTYQNREDSWRTTRAERSLALVRAIEQSELPTAKRMLGRFRDALPSTEREQLDEEYDLAD

SEQ ID NO: 2710 - DNA, 699 bp, Anaplasma marginale str. St. Maries
  CDS (1)..(699): transl_table=11
atgtctgctatggcgcataagttgcctaaacacgttgccgtaataatggatggaaacggtagatgggcgaaaagtcggggcctaccgaagatagaggcgtacactcaaggtatgctggccgctaaaaaggttgtagaggcttgtgttcaccatgccattagacatctcactttgtacgcattctccctggaaaattggctcagaagcactgaggaagttagcgacattatgagcctgttcaccaactatctgtcctctccggagctccgcaaactttctgatgaccatggggtgagcatcaggtttgtgggcgatttaaaactcctgcgcgcggatctggtggagcgcatgtctgacattcaatctgtaacgcgcaacaacgatgccttatacttgaatgtcgcggtaagctacggcgcgaaacaggacataatacaggccgtgaacgcggcgttagattctggagttgagtctgttgatggggagacgcttcgcagttttatgtggaccaaggaccttccagacgttgatttactgataagagctgggggcgaaaaacgcattagcaactttttgctttggcagcttgcatatgccgagctctacttctgtgatattatgtggccagattttaccgctgcacatttttctgatgcgctggatagttatctggctagaaacaggaaatatggcaggtag

SEQ ID NO: 2711 - protein, 232 aa, Anaplasma marginale str. St. Maries
MSAMAHKLPKHVAVIMDGNGRWAKSRGLPKIEAYTQGMLAAKKVVEACVHHAIRHLTLYAFSLENWLRSTEEVSDIMSLFTNYLSSPELRKLSDDHGVSIRFVGDLKLLRADLVERMSDIQSVTRNNDALYLNVAVSYGAKQDIIQAVNAALDSGVESVDGETLRSFMWTKDLPDVDLLIRAGGEKRISNFLLWQLAYAELYFCDIMWPDFTAAHFSDALDSYLARNRKYGR

SEQ ID NO: 2712 - DNA, 774 bp, Idiomarina loihiensis L2TR
  CDS (1)..(774): transl_table=11
atgaaagaattaccgtcaattgagcagttagtccccaagcatgttgccattataatggatggtaacgggcgctgggcgaaacaacgcggtaaaataagaaccttcgggcataaagccggcgcggaagcagtgcgcaaggcagttgcttttgctcgccgtaacggtattgagtcactgactttgttcgcattcagtagtgaaaactggaagcgtccggcaactgaagtctcggtattgatggaattgtttatgtcagtactgaaaagcgaaattaaaaaattagatgacaacgatattcgcttgcgcatagttggtgacaaagaggctttttcaaagcgtttgcaaaagcgcatgagtgaagcagaagagcaaacgcgaagtaacagcggactcaatctaaacatagcggcgaactacggcggtcagtgggatattacacaagccagtcgtagattagctgagagagtgaaagcgggtgaaatagaaccggcggaaattactgaacagacaatagcaggcgaattgatgatggcagaccagcctttgccggatttacttattcgtacaggcggtgaacatcgtatcagtaactttcttttatggcagctggcttatgccgaactgtatttcacctcagtattatggcctgattttgacgatacggcctttgctcaggcaattacagattttgcgcaacgggaacgccgttttggtttaacgagcgaacaattaaccgtgctaatgcaaggcatagaaactcggatagaggaataa

SEQ ID NO: 2713 - protein, 257 aa, Idiomarina loihiensis L2TR
MKELPSIEQLVPKHVAIIMDGNGRWAKQRGKIRTFGHKAGAEAVRKAVAFARRNGIESLTLFAFSSENWKRPATEVSVLMELFMSVLKSEIKKLDDNDIRLRIVGDKEAFSKRLQKRMSEAEEQTRSNSGLNLNIAANYGGQWDITQASRRLAERVKAGEIEPAEITEQTIAGELMMADQPLPDLLIRTGGEHRISNFLLWQLAYAELYFTSVLWPDFDDTAFAQAITDFAQRERRFGLTSEQLTVLMQGIETRIEE

SEQ ID NO: 2714 - DNA, 792 bp, Azoarcus sp. EbN1
  CDS (1)..(792): transl_table=11
atgacggaatcatccttcatcagttcgactcgcgacgtccccgcggtgtcgggcgttccccggcacatcgcgatcatcatggacggcaatggccgctgggcgcgcaagcggttcctgccacgcgtcgccggccacagccgcggcgtcgaatcggtgcgcagcgtgatccgcgcgtgcatggaacgcggcgtgtcctacctcacgctgttcgcgttcagctccgagaactggcgccgcccggccgacgaggtgtcgttcctgatgcagctgttcatgcgttcgctgcagaaggaagtcgaccggctccacgacaacggcatccgttttcgcgtcatcggcgacctgtcgcgcttcgacccgaagctcgtcgacatgatccgtcgtgccgaggcgcgcaccgccgccaatgaaaagctgaccctgacgatcgccgcgaactacggcggccgctgggacatcctgcaggcgatgacgcggatgctggcgaagcaccccgagcggcgcgaagggttcactgaagaggacctgtccggtgagctgtcgctgaactacggcccggaaccggacctcttcatccgcaccggtggcgaacagcggatcagcaacttcctgctgtggcagctcgcctattccgagctttatttcaccgatacgttgtggcccgatttcgacgtcgcggcgctggacgaggcgatccgctcgtaccaggcgcgggagcgccgtttcgggcggaccagcgagcagcttcgtcaggccgaaggcgcggtctctccgtccagcggccatgcttag

SEQ ID NO: 2715 - protein, 263 aa, Azoarcus sp. EbN1
MTESSFISSTRDVPAVSGVPRHIAIIMDGNGRWARKRFLPRVAGHSRGVESVRSVIRACMERGVSYLTLFAFSSENWRRPADEVSFLMQLFMRSLQKEVDRLHDNGIRFRVIGDLSRFDPKLVDMIRRAEARTAANEKLTLTIAANYGGRWDILQAMTRMLAKHPERREGFTEEDLSGELSLNYGPEPDLFIRTGGEQRISNFLLWQLAYSELYFTDTLWPDFDVAALDEAIRSYQARERRFGRTSEQLRQAEGAVSPSSGHA

SEQ ID NO: 2716 - DNA, 732 bp, Silicibacter pomeroyi DSS-3
  CDS (1)..(732): transl_table=11
atggccaaggaccccgtctccgcgcccggctctggcccgcgccacgtcgccatcatcatggatggcaatggccgttgggcccaggcacgggggcgtccgcgcctgttcgggcaccatgccggtgcccgccgcgtgcgcgaggtggtcgaggcctgcccccagctgggcatcaaatacctgaccatattcgccttttcgaccgagaactggaaacggacccaggtcgaggtggccgggctgatgagcctgttccgtcgttatatcgccaaggaaacccgggcgctgcatgcgcgtggcgttcgcgtgcgcttcatcggcgaccgggtgcggctggatgccaagctgatcgcgttgatggacacgctcgaggaacagacccgcgagaacgatggcgtgcagctgaccatcgcgctcaactatggtggccgcgacgaggtggcccgtgccacccgccgcctggcccgcgatgtggccgaaggccggctgaaacccgaggacgtggacgaggagacgctgccgcgctacctcgacacgcgggtgctgcccgatcccgatctggtgatccgcaccagcggcgaggcgcgaatctcgaacttcctgctgtggcagtcggcctattccgaatacgaattcatcgacacgctgtggcccgatttcactgccgaggaactggcccggctgtgtcagagctatgggagccgcgaccgcaggttcggcgcggtcactgtatga

SEQ ID NO: 2717 - protein, 243 aa, Silicibacter pomeroyi DSS-3
MAKDPVSAPGSGPRHVAIIMDGNGRWAQARGRPRLFGHHAGARRVREVVEACPQLGIKYLTIFAFSTENWKRTQVEVAGLMSLFRRYIAKETRALHARGVRVRFIGDRVRLDAKLIALMDTLEEQTRENDGVQLTIALNYGGRDEVARATRRLARDVAEGRLKPEDVDEETLPRYLDTRVLPDPDLVIRTSGEARISNFLLWQSAYSEYEFIDTLWPDFTAEELARLCQSYGSRDRRFGAVTV

SEQ ID NO: 2718 - DNA, 756 bp, Synechococcus elongatus PCC 6301
  CDS (1)..(756): transl_table=11
atgacctctgtctctaattgcgatttacgtcagcgcccgcccgacctactccccgatcgcctgcctagccacgtcgcggtgattatggacggcaatggtcgttgggccaagcagcgtggcttgccacgaattatgggtcaccggcgcggggttgactccctcaagcagctgttgcgctgttgcgatgactggggtattggcgccctgactgcctacgcattctcaacagaaaactggggtagacctcacgaagaggttgactttctcatgactctgtttgagcgggtcttgcgccgcgaacttcaagagttaatggctgaaaacgttcgcattcggtttgtcggtgacctcgagaatctaccgacatcgctgcaacgagaaatcgatcgcgcgacctcagcgacagcccaaaatgacggaattcgcttcacggtcgcgacaaactacggcggccgtcaagaactcctcaaagcctgtcgtgagattgcggcccaagtgcagcaaggccagttggcgatcgatgccattgacgagtcgctcctctccagtcatctctacactgccggcgtcaccgatcccgatctcctgattcgaaccagtggcgaaaaacggctgagcaatttcttgctctggcaactggcctatgccgaaatctacgtgaccgatacactctggcctgatttcgatcgctacgagttttacctagccctgcgcgatttccaaagtcgccaacgccgctttggtcgcttgacctag

SEQ ID NO: 2719 - protein, 251 aa, Synechococcus elongatus PCC 6301
MTSVSNCDLRQRPPDLLPDRLPSHVAVIMDGNGRWAKQRGLPRIMGHRRGVDSLKQLLRCCDDWGIGALTAYAFSTENWGRPHEEVDFLMTLFERVLRRELQELMAENVRIRFVGDLENLPTSLQREIDRATSATAQNDGIRFTVATNYGGRQELLKACREIAAQVQQGQLAIDAIDESLLSSHLYTAGVTDPDLLIRTSGEKRLSNFLLWQLAYAEIYVTDTLWPDFDRYEFYLALRDFQSRQRRFGRLT

SEQ ID NO: 2720 - DNA, 711 bp, Dehalococcoides ethenogenes 195
  CDS (1)..(711): transl_table=11
ttggacacaacagttagaataaataatacccccccgaaccacatcgcaataataatggatggaaatggccgctgggcggaacgccgcggccttagccgtttagatgggcataaagccggccttgaaaacgccagacaaattatccgccacttaaattcgctgggggtcaaatacgttaccctctacagtttttccactgagaactggaaacgcccggataccgagataaaagggcttttcgggctgataaatgacattatgtcatcttatatcccggagctggtggaaaacaacgtccgtttaaaacatctggggcatctggataaactgccatctgtactaaaagataaactggcagacctgctgtcccgtaccagccggaataccggcctgaccctgtgtctggcctttgattacggcgggcgggatgaaattattcaggcggtaaaaaagctggttaaagacggattagccgctgataaaataaccgaaaatgtatttgacggctatttgtataccgcaggcataccggaagctgatttagtaatccgcaccggcggcgaaatgcggctttccaattttctcctgtggcagtcagcctacagcgagttgtatttttcggaagtaatgtggccggatttcggtgaaaaagaaattgataacgctatctctgcctttaatcagcggcagagacgttttggtggtttgtaa

SEQ ID NO: 2721 - protein, 236 aa, Dehalococcoides ethenogenes 195
MDTTVRINNTPPNHIAIIMDGNGRWAERRGLSRLDGHKAGLENARQIIRHLNSLGVKYVTLYSFSTENWKRPDTEIKGLFGLINDIMSSYIPELVENNVRLKHLGHLDKLPSVLKDKLADLLSRTSRNTGLTLCLAFDYGGRDEIIQAVKKLVKDGLAADKITENVFDGYLYTAGIPEADLVIRTGGEMRLSNFLLWQSAYSELYFSEVMWPDFGEKEIDNAISAFNQRQRRFGGL

SEQ ID NO: 2722 - DNA, 708 bp, Gluconobacter oxydans 621H
  CDS (1)..(708): transl_table=11
gtgagcgtcgttcccgtccatatcgccatgatcatggacgggaacggccgctgggcccgcgcgcgcaaactccctgtggccgcagggcaccgtcagggtgcggaatccgtacagcaatgcgtccgcacggccatccggcagggcgtgcgatacctgacgctctatgcgttctcttcggaaaactggcgtcgttccgcggaggaagtcggggatctgacatccctgctgcgcttctatctgcgtcacaagattaacgagcttcatgcccagggcgtgcgcctgcggatcatcggtgagcccgagcgtttcgagggttccctgcgcgaagaactgcgccgcgctgaagcgctgacgctccacaacacgaccctgaccctcacgctcgcgctgtcctatggtggccgcgcggatatcgtgcaggctgcccgcaggctggctgaagacgccgttgccggcaaaatcgcggccgagagcatcagcgaagccatgctcgacgatgcgctccagacttccgacatgcctgatcccgatctggtcatccgcaccagtggcgagtgtcgcctgtccaatttcctgctctggcagagcgcctatgcggagctggttttcatggatgtgctctggcccgattttggcgaagtcgagtttctcgaagccctctcgcgctttgcaagccgtcagcgcaggtttggtggccgccccgcatga

SEQ ID NO: 2723 - protein, 235 aa, Gluconobacter oxydans 621H
MSVVPVHIAMIMDGNGRWARARKLPVAAGHRQGAESVQQCVRTAIRQGVRYLTLYAFSSENWRRSAEEVGDLTSLLRFYLRHKINELHAQGVRLRIIGEPERFEGSLREELRRAEALTLHNTTLTLTLALSYGGRADIVQAARRLAEDAVAGKIAAESISEAMLDDALQTSDMPDPDLVIRTSGECRLSNFLLWQSAYAELVFMDVLWPDFGEVEFLEALSRFASRQRRFGGRPA

SEQ ID NO: 2724 - DNA, 696 bp, Wolbachia endosymbiont strain TRS of Brugia malayi
  CDS (1)..(696): transl_table=11
atgttgaacctcgaatctctaccgaaacatttagcaatcattatggatggtaacagtaggtgggcaaacagtcaaggaagggtaaaaattgatggttatagaaaaggtagtgaagttgcatatgatattgctaagcattgtatagccctagccataccctatttaactttgtacgcgttttccatggagaattggcttagacctaaagaagaaactgactgtctatttgacttattttactctattctaactgatagagataaagttaatttctttcacaactataacattaaattgaattttgttggtaatttaagtttattgcctggaaaaatacttaaccagattaaagaatcagaagaaatgacacgtaagaacgatggtctattgcttactgtagcagtcagctatggagcaaaacaagaaattatacacgctgtgagaaatatcacgagaaaaaatattgattgtgtatcagaagacgagtttgagaaatttctatatactaaagatctaccaaagttggatttattaattcgcactggtggtgagaaaaggttaagtaattttttgttgtggcaagcagcttacgctgaattgtatttttgtgatactttatggcctgatttttcttgtcaagatttgagcaaagcactagaggattatacgaaaagggagaaaaggtatggtagataa

SEQ ID NO: 2725 - protein, 231 aa, Wolbachia endosymbiont strain TRS of Brugia malayi
MLNLESLPKHLAIIMDGNSRWANSQGRVKIDGYRKGSEVAYDIAKHCIALAIPYLTLYAFSMENWLRPKEETDCLFDLFYSILTDRDKVNFFHNYNIKLNFVGNLSLLPGKILNQIKESEEMTRKNDGLLLTVAVSYGAKQEIIHAVRNITRKNIDCVSEDEFEKFLYTKDLPKLDLLIRTGGEKRLSNFLLWQAAYAELYFCDTLWPDFSCQDLSKALEDYTKREKRYGR

SEQ ID NO: 2726 - DNA, 735 bp, Bacteroides fragilis NCTC 9343
  CDS (1)..(735): transl_table=11
atgtcctataaagaacaaatagatttaaaccggatacctaagcatgtagcaattatcatggacggtaacggacggtgggccaaactacgcggacacgaacggagttttggacatcaggccggagccgagactgtgcatatcattactgaagaggcggccaggttaggaatcaaattccttactttatataccttttctacagaaaactggaaccggccttcggatgaagtcgctgcattgatgagcctccttttcgactctatcgaagaggaaacatttatgaaaaacaatatcagtttccgtatcatcggagacatcaacaaactacctgagaatgtacgggagcgcctgaatgcttgtgtagaacatacttccaagaatacaggtatgtgcctgatacttgccctcagttattctgccagatgggaaataaccgaagctacacggcagattgccacattggtacaaaatggagaaatgaaccctgaagaaattacttcagaaagcattcggacacatctgacaaccaactttatgcccgacccggatttgctgatccggacaggcggagaggttcgtttaagcaattatctgctttggcaatgtgcttattcggagctctatttctgtgaaactttctggcccgactttaaggaagaagaattgtgcaaggctatctgtgactaccagaaacgcgaacgcagattcggaaaaaccagcgaacaaatcagttaa

SEQ ID NO: 2727 - protein, 244 aa, Bacteroides fragilis NCTC 9343
MSYKEQIDLNRIPKHVAIIMDGNGRWAKLRGHERSFGHQAGAETVHIITEEAARLGIKFLTLYTFSTENWNRPSDEVAALMSLLFDSIEEETFMKNNISFRIIGDINKLPENVRERLNACVEHTSKNTGMCLILALSYSARWEITEATRQIATLVQNGEMNPEEITSESIRTHLTTNFMPDPDLLIRTGGEVRLSNYLLWQCAYSELYFCETFWPDFKEEELCKAICDYQKRERRFGKTSEQIS

SEQ ID NO: 2728 - DNA, 771 bp, Corynebacterium glutamicum ATCC 13032
  CDS (1)..(771): transl_table=11
gtgttaaacctgcccagactgctgtacccggtgtatgagcgccgtcttttaagagaactagacggcgccaaacagcccggtcacgttgccatcatgtgtgatggcaaccgacgctgggcccgggaagcgggcttcactgatgtcagccatgggcaccgagtgggtgccaaaaagatcggcgagatggtccgctggtgtgatgatgtagacgtcaatctcgtgaccgtttatttgctgtctatggaaaaccttgggcgatcctccgaagagctgcaattgctgttcgatatcatcgccgatgtcgctgatgaactcgcgcgtcctgaaaccaactgtcgagtccgcctcgttggtcatttagatctgctcccagacccagttgcttgtcgtttacgcaaagctgaagaagctaccgttaacaacacaggcatcgcagtcaacatggctgtcggttatggcggacgccaggaaatcgttgatgccgtgcaaaaacttctgaccatcggcaaggacgagggcctaagcgttgatgaactgatcgaatccgtcaaggtagatgcgatctccactcacctgtacacctctggccaaccagacccagacctggtgatccgcacctctggtgagcagcgactttccggattcatgctgtggcaatctgcctactccgaaatctggttcacagacacctactggccagccttccgacgcatcgacttcctccgcgccattcgcgactactcgcagcgcagcagaagattcggtaaataa

SEQ ID NO: 2729 - protein, 256 aa, Corynebacterium glutamicum ATCC 13032
MLNLPRLLYPVYERRLLRELDGAKQPGHVAIMCDGNRRWAREAGFTDVSHGHRVGAKKIGEMVRWCDDVDVNLVTVYLLSMENLGRSSEELQLLFDIIADVADELARPETNCRVRLVGHLDLLPDPVACRLRKAEEATVNNTGIAVNMAVGYGGRQEIVDAVQKLLTIGKDEGLSVDELIESVKVDAISTHLYTSGQPDPDLVIRTSGEQRLSGFMLWQSAYSEIWFTDTYWPAFRRIDFLRAIRDYSQRSRRFGK

SEQ ID NO: 2730 - DNA, 756 bp, Pseudomonas syringae pv. syringae B728a
  CDS (1)..(756): transl_table=11
atggaaaagataaaaccggccgtgccgtcttcggtgccgcgccatgtcgcgattatcatggatggtaataatcgctgggccaagaagcgcctgctgccaggcgttgcaggccataaggccggcgtcgatgccgtgcgggccgttatcgaggtctgcgccgaagcgcgggtcgaagtgctgacactgttcgcgttctccagtgaaaactggcagcgcccggccgaagaggtgggtgcgttgatggagctgtttttcacggcgctgcgccgtgaaaccaagcgcctgaacgaaaacgagatcagcctgcgaattatcggcgaccgctcacgctttcatcctgagcttcaggctgccatgcgcgaggcggaagtgcgcacctccggcaacagccgtttcgtgctgcagatcgctgccaactacggtgggcagtgggacatcgcgcaggctgcccagcggctggcgcgtgaggttcaggccgggcacttgcagccggaggacattactccccagttgttgcagacctgcctggccaccggcgacctgccgttgccggatctgtgcatccgcaccggcggcgaacaccgcatcagcaattttctgctttggcagctggcctacgccgagctgtacttctccgacctgttctggccggacttcaaacacgatgccatgcgcgccgcgctggcagatttcgcttctcgccaacgtcgcttcggtaaaaccagcgaacaggtagaagctggagcccgggcttaa

SEQ ID NO: 2731 - protein, 251 aa, Pseudomonas syringae pv. syringae B728a
MEKIKPAVPSSVPRHVAIIMDGNNRWAKKRLLPGVAGHKAGVDAVRAVIEVCAEARVEVLTLFAFSSENWQRPAEEVGALMELFFTALRRETKRLNENEISLRIIGDRSRFHPELQAAMREAEVRTSGNSRFVLQIAANYGGQWDIAQAAQRLAREVQAGHLQPEDITPQLLQTCLATGDLPLPDLCIRTGGEHRISNFLLWQLAYAELYFSDLFWPDFKHDAMRAALADFASRQRRFGKTSEQVEAGARA

SEQ ID NO: 2732 - DNA, 720 bp, Haemophilus influenzae 86-028NP
  CDS (1)..(720): transl_table=11
atgatagagttggatcaaacaaatataccaaaacacgttgccattattatggatggtaatggccgttgggcaaaacagaaaaataaaatgcgaattttcggacacgccaatggcgttactgcggtacgcaaagcagtggcttatgcacgacaaatcggtgtggaagtactcacactttatgcctttagtagcgaaaattggagtcgcccagaacaagaaatcagcgcgttaatgtcgctttttatgcaagccttggatcgcgaagtgaaaaaattacataaaaataatatttgtctgaaaattataggcgatgtatctcgttttagtgaaactttacaagaaaaaatcaaaaaagcggaaaatttaacagaaaaaaataccgcacttacactcaatattgcggcaaattacggcggttgttgggatattattcaagccgctaaacaaattgcagaaaaagttaaaaaagaagaaatgtcagtttcagatattaataactcgacttttcaacatcatcttgcaacccaaaatgcaccacctgtggatttattaattcgcaccagtggagaacagcgcataagcaactttttattatggcaaattgcctatgcggaattatatttttccgatgtgctttggcctgattttaatcaattagaatttaatcacgcgattgcaagttatcaacaacgtcatcgccgttttggcgggactgaatag

SEQ ID NO: 2733 - protein, 239 aa, Haemophilus influenzae 86-028NP
MIELDQTNIPKHVAIIMDGNGRWAKQKNKMRIFGHANGVTAVRKAVAYARQIGVEVLTLYAFSSENWSRPEQEISALMSLFMQALDREVKKLHKNNICLKIIGDVSRFSETLQEKIKKAENLTEKNTALTLNIAANYGGCWDIIQAAKQIAEKVKKEEMSVSDINNSTFQHHLATQNAPPVDLLIRTSGEQRISNFLLWQIAYAELYFSDVLWPDFNQLEFNHAIASYQQRHRRFGGTE

SEQ ID NO: 2734 - DNA, 750 bp, Corynebacterium jeikeium K411
  CDS (1)..(750): transl_table=11
gtgagtagcactgattatccgcacgtggaccgttccgagattccgccggagctccgcccgaagcacatcgcactggtgatggatggcaacgggcgctgggccaaggagcgcggcatggtccgcaccgaggggcaccgccgtggcgaggctgtgctgatgtctttggtggaggagtgcatcgagctgggcgtggattacctttccgcctatgcgttctccaccgagaactggcgccgctcggcggacgaggtgcgcttcctgatgggctttaaccgcgacgtattgcgcaggcagcgcgactacttgaacagcctgggcgtgcggatccgctgggtggggcgccgcccgcgcctgtggcgtagcgtgattgcggaactggaacaggccgaggagctgacgaagaacaacacgaccatgaccttgggcatgtgcgtgaactacggcggccgggcggagatcgcggacgcggcgcgttggatcgccgaggacgtgaaggccggtcggctgaagccccggcaggtgaacgagaagacgttcgcccgctacctggacgagccggacatgccggacgtggatctgttcctgcggccgtcgggcgagatgcgaacctcgaacttcctgccgtggcagtccacctacgcggagatggtgtaccaggatgtgctgttcccggattacacgccgaaccacctgcgggcggcggtgctggagtttgcgaagcgcgataggcgctttggaggtgtgaagtga

SEQ ID NO: 2735 - protein, 249 aa, Corynebacterium jeikeium K411
MSSTDYPHVDRSEIPPELRPKHIALVMDGNGRWAKERGMVRTEGHRRGEAVLMSLVEECIELGVDYLSAYAFSTENWRRSADEVRFLMGFNRDVLRRQRDYLNSLGVRIRWVGRRPRLWRSVIAELEQAEELTKNNTTMTLGMCVNYGGRAEIADAARWIAEDVKAGRLKPRQVNEKTFARYLDEPDMPDVDLFLRPSGEMRTSNFLPWQSTYAEMVYQDVLFPDYTPNHLRAAVLEFAKRDRRFGGVK

SEQ ID NO: 2736 - DNA, 771 bp, Corynebacterium jeikeium K411
  CDS (1)..(771): transl_table=11
gtgaaccgcatcccccagctgctatacccagcctacgaggcgagcctagcgcgctcgctgcgcgagaaaccacgcccgaagcacgttgccatcatggccgatggcaaccgccgctgggcgcgcgagaacgggttcacggatgtgtcgcacggccaccgggtgggcgctaggaagattgcggagatgtgtggttggtgtgatgagctggggatcgaaaccgttacggtgtacctgctcagcaccgaaaacctgaagcgctcgccagaggagctgtcgttgttgtgcagcatcatcggtgatgtcgcggaggaattggcagattctgacgccgggttccagctgcgtaccgttggccacctagagctgctgcctgaacagctgcgtactcgcctagaggaaaaccaggccaagacgaacgatcacacgggcgtgcgcgtgaatgtggccgtgggctatggcgggcgccaggagatcgtggatgcggtgcagaccctcgtggccgagctggcggagcaggggacggcgccggaggatatggcagaggcaatcaccgccgaggcgttggggaatcacatgtacacctcggggcagccggatccggacctggtgatccgcacgtcgggggagcagcgcctatctggttttctgctgtggcagtccgcgtactcggagatctggtttaccgatacctattggccggccttccggcgcgtggatttcctgcgagcactgcgcgactactcgcagcggcacaggcgcttcgggctataa

SEQ ID NO: 2737 - protein, 256 aa, Corynebacterium jeikeium K411
MNRIPQLLYPAYEASLARSLREKPRPKHVAIMADGNRRWARENGFTDVSHGHRVGARKIAEMCGWCDELGIETVTVYLLSTENLKRSPEELSLLCSIIGDVAEELADSDAGFQLRTVGHLELLPEQLRTRLEENQAKTNDHTGVRVNVAVGYGGRQEIVDAVQTLVAELAEQGTAPEDMAEAITAEALGNHMYTSGQPDPDLVIRTSGEQRLSGFLLWQSAYSEIWFTDTYWPAFRRVDFLRALRDYSQRHRRFGL

SEQ ID NO: 2738 - DNA, 771 bp, Staphylococcus haemolyticus JCSC1435
  CDS (1)..(771): transl_table=11
atgtttaaaaagctaataaaaagaaataagactaaaatcagtcataacgatgatttagatttacataatttacctgaacatgtagcgattatcatggacggaaatggacgttgggccaaaaagcgtaaaatgcctagaattaaaggacattacgaaggtatgcaaaccattaaaactgtaacgcgagaagcaagtgatttgggtattaaatacttaacactatacgctttttcaactgaaaattggtctagacctgaaaatgaagttaattatatcatgaatttgcctgttaattttttaaaaacatttttacccgaactcattgaaaaaaatgttcaaatagaaacgattggatttctagatgcagttcctaaatcgacgattgaagcaatagaacatgcaaaagaaaaaacaaaaaataatacaggtctgaaattaatatttgccatcaattatggtggacgagctgaaattgttcaaagtatgaaatcaatttatgatgaacttcaacgcaatggtcaagacagtaaagatattgatgaatcaatgattaacaagcatttaatgacacattcatacccagatcctgagttattaattcgcacttctggtgaacaacgtattagtaatttccttatttggcagtcttcttatagtgaatttatattcaatgagaaattgtggccagactttgacggtgaagaatttaaaaattgcttaaaaatatatcaatctcgccaaagacgctttggagggttaagtaaggagtag

SEQ ID NO: 2739 - protein, 256 aa, Staphylococcus haemolyticus JCSC1435
MFKKLIKRNKTKISHNDDLDLHNLPEHVAIIMDGNGRWAKKRKMPRIKGHYEGMQTIKTVTREASDLGIKYLTLYAFSTENWSRPENEVNYIMNLPVNFLKTFLPELIEKNVQIETIGFLDAVPKSTIEAIEHAKEKTKNNTGLKLIFAINYGGRAEIVQSMKSIYDELQRNGQDSKDIDESMINKHLMTHSYPDPELLIRTSGEQRISNFLIWQSSYSEFIFNEKLWPDFDGEEFKNCLKIYQSRQRRFGGLSKE

SEQ ID NO: 2740 - DNA, 756 bp, Pseudomonas fluorescens Pf-5
  CDS (1)..(756): transl_table=11
atggaaaagaccaagcagtccgtgttgtcctcggtgccgcgccatgtggcgatcatcatggacggtaataaccgctgggcaaaaaaacgctttatgccgggtgtcgccgggcataaggcgggtgtcgatgcggtacgtgcagtgatcgaagtgtgcgctgaggccaaggtcgaggtgctgaccctgtttgccttttccagtgaaaactggcagcggccggctgacgaagtcagtgccttgatggatctgttcttcaaggccctgcgtcgtgaagccaagcgcctcaacgagaacaacatcagcctgcggatcattggcgatcgttcacgcttccatcccgagttgcaggcggcgatgcgcgaagcggaggccattaccgcgggtagtgatcgtttcatcctgcagatcgccgccaactatggcggccagtgggatatcgctcaggccgcccagcgcctggcgcgcgaggtccaggccgggcatctgcggcctgaggacatcactccgggcctgctgcagacctgcctggcgaccggcgacctgccgctgccggacctgtgcatccggaccggtggcgagcatcgcatcagcaatttcctgttgtggcagctggcctatgccgagctgtatttctccgacctgttctggccggacttcaaacacgaagccatgcgtaacgcattggccgattacgcatctcgccagcgacgcttcggtaagacgagcgagcaggtcgaggctggagcccgggtttaa

SEQ ID NO: 2741 - protein, 251 aa, Pseudomonas fluorescens Pf-5
MEKTKQSVLSSVPRHVAIIMDGNNRWAKKRFMPGVAGHKAGVDAVRAVIEVCAEAKVEVLTLFAFSSENWQRPADEVSALMDLFFKALRREAKRLNENNISLRIIGDRSRFHPELQAAMREAEAITAGSDRFILQIAANYGGQWDIAQAAQRLAREVQAGHLRPEDITPGLLQTCLATGDLPLPDLCIRTGGEHRISNFLLWQLAYAELYFSDLFWPDFKHEAMRNALADYASRQRRFGKTSEQVEAGARV

SEQ ID NO: 2742 - DNA, 759 bp, Psychrobacter arcticum 273-4
  CDS (1)..(759): transl_table=11
atgtctatgttagataatttagctccagcccttcttccacgccatatcgctgtcatcatggacggcaataaccgttatggcaaagtccataatttaggcaaaggtcaaggacatatcgctggcaaagatgcgctagaccctattgttgagtattgcgtcagtacgggtattgaagttttgacggtatttgctttttcaagtgagaattggcagcgtccaccaagcgaggtggcattgctgatgcatttactgcgcttaaccatcagtgagcaaatgcctcgtatgctgaaatatcgcattcgtctgcgttttatcggcgaccgcagtcagcttagtgatgatttgcaaatattgatggcagatgctgaagcaaaaacggctaattttgatgccatgacattggtcatcgccatcagttacggtggacagtgggatatcgctcatgcagcaaaacagctggtacagcaagtacaggcaggtcatttagcaattgaggatattgataaagaaaagcttggagagtatgtgcaattggcggatgcgccagaagtagacatgctgatacgtaccggcggtgagtaccgtctctcgaattttttattgtggcaatccgcctatgcagagctattttttaccccaacattgtggccggattttagagtcgatgagctagcagcaatgctagaagattttgcccaacgtcaacgccgctttggtaaaaccagtgaacaagtagtgacgacgcaaaaaatatcttaa

SEQ ID NO: 2743 - protein, 252 aa, Psychrobacter arcticum 273-4
MSMLDNLAPALLPRHIAVIMDGNNRYGKVHNLGKGQGHIAGKDALDPIVEYCVSTGIEVLTVFAFSSENWQRPPSEVALLMHLLRLTISEQMPRMLKYRIRLRFIGDRSQLSDDLQILMADAEAKTANFDAMTLVIAISYGGQWDIAHAAKQLVQQVQAGHLAIEDIDKEKLGEYVQLADAPEVDMLIRTGGEYRLSNFLLWQSAYAELFFTPTLWPDFRVDELAAMLEDFAQRQRRFGKTSEQVVTTQKIS

SEQ ID NO: 2744 - DNA, 678 bp, Candidatus Pelagibacter ubique HTCC1062
  CDS (1)..(678): transl_table=11
atgaacccaattaaacatgttgccatcatcatggatggaaacggtagatggggcgttaagcataaacaatcaagaaatgcaggtcatagagctggtttaaacacagtcgatctaatcattaatcattgcattaaccataaaattaagtttttaactctttataccttctcttctgaaaattggaaaagacccaaaaatgaaattgtttttttatttaaattattagaaaactttttacaaaaaaagattagtaaaattattgaaaaagatattaagcttaagtttattggtgaattaaataaattacctacaaaacttcaaaaattaattaaattatcagaaaaaaaaacttttaataaaaaaacgttacaagttaatattgctttaaactatggttcgaaaattgaattaattaataccgtaaaaaaaattaaacgaaaaaaaattacaataaatgaaaaaaatatagataacaatttgtatacaaagcatctaccgaaccctgatattttaataagaactggaaataccaatagactaagcaactttttactttggcaactatcttacacagagatattttttgaaaaaaaattatggcctgattttaaaggtaaagattttgataaaattatgaataaatttaaaaatattaaaagaaatttcggatcaatttaa

SEQ ID NO: 2745 - protein, 225 aa, Candidatus Pelagibacter ubique HTCC1062
MNPIKHVAIIMDGNGRWGVKHKQSRNAGHRAGLNTVDLIINHCINHKIKFLTLYTFSSENWKRPKNEIVFLFKLLENFLQKKISKIIEKDIKLKFIGELNKLPTKLQKLIKLSEKKTFNKKTLQVNIALNYGSKIELINTVKKIKRKKITINEKNIDNNLYTKHLPNPDILIRTGNTNRLSNFLLWQLSYTEIFFEKKLWPDFKGKDFDKIMNKFKNIKRNFGSI

SEQ ID NO: 2746 - DNA, 765 bp, Colwellia psychrerythraea 34H
  CDS (1)..(765): transl_table=11
gtggataataccgacatattggttgaacaaactgataataaaagcatccctcaacatgttgctatcatcatggatggtaatggccgctgggcgcaactgcaaggcaagggacgagttgcaggacacaaggctggcgttgaatcagtacgacaggttgttgctacggcccgaaagtctaatgttaaagcgttaacactctttgcttttagtagtgaaaattggcagcgaccggcaaaagaagtcagtgtactgatggatttatttatgtatgtgctaactaaagaagttaagcgtttacataaacataatattcgctttcaagtggttggtgatttaagccgtttttctgataaattacaaaaaaacattgctaaatcagagcagcttactgcagataatactggattagtattatccatagcggcaaattatggtggtcgttgggatatcgctcaagcggctaaaaaattagctagtgacgtcaaacaaggtactatgtcccttgatgatattaatgaagaaacactcaatgaacatacctgtttagcaaacctacctacattagatctacttatccgtaccggtggtgattatcgcattagtaattttctcttgtggcaagctgcttatgcagagctttattttaccgatacgctgtggcctgactttaatgaagtacaatttttagaagccatgagctgctttgatcaccgagaacgtcgttttggcaaaacaggcgaacaagcaagaaacgaaaaaatatag

SEQ ID NO: 2747 - protein, 254 aa, Colwellia psychrerythraea 34H
MDNTDILVEQTDNKSIPQHVAIIMDGNGRWAQLQGKGRVAGHKAGVESVRQVVATARKSNVKALTLFAFSSENWQRPAKEVSVLMDLFMYVLTKEVKRLHKHNIRFQVVGDLSRFSDKLQKNIAKSEQLTADNTGLVLSIAANYGGRWDIAQAAKKLASDVKQGTMSLDDINEETLNEHTCLANLPTLDLLIRTGGDYRISNFLLWQAAYAELYFTDTLWPDFNEVQFLEAMSCFDHRERRFGKTGEQARNEKI

SEQ ID NO: 2748 - DNA, 756 bp, Pseudomonas syringae pv. phaseolicola 1448A
  CDS (1)..(756): transl_table=11
atggaaaagataaaaccggccgtgccgtcttcggtaccgcgccatgtcgcgattatcatggacggtaataatcgctgggccaagaagcgcctgctgccaggcgttgctggccataaggcgggcgtcgacgctgtgcgggccgttatcgaggtgtgtgccgaagccaaggtcgaggtgctgacactgttcgcgttctccagtgaaaactggcagcgcccggctgaagaggttggtgcgctgatggagcttttcttcacggcgctacgccgtgaaaccaagcgcctgaacgagaacgacatcagcctgcggatcattggcgaccgctcgcgctttcatcccgagctgcaggctgcaatgcgcgaggcggaagtgcgtacgtccggcaatagccgtttcgtgctgcagatcgctgccaactacggtgggcaatgggacatcgcacaggctgcccagcggttggctcgcgaggttcaggccgggcatctgcaaccggaggatataacccccgagctgctgcagacctgtctggcaacaggcgatctgccgttgccggacctgtgcatccgcaccggtggcgagcaccgcatcagtaacttcctgctttggcagctggcctacgccgagctgtacttctccgacctgttctggccggacttcaaacacgatgccatgcgcgccgcgctggcagatttcgcttctcgccaacgtcgcttcggtaaaaccagcgaacaggtagaagctggagcccgggcttaa

SEQ ID NO: 2749 - protein, 251 aa, Pseudomonas syringae pv. phaseolicola 1448A
MEKIKPAVPSSVPRHVAIIMDGNNRWAKKRLLPGVAGHKAGVDAVRAVIEVCAEAKVEVLTLFAFSSENWQRPAEEVGALMELFFTALRRETKRLNENDISLRIIGDRSRFHPELQAAMREAEVRTSGNSRFVLQIAANYGGQWDIAQAAQRLAREVQAGHLQPEDITPELLQTCLATGDLPLPDLCIRTGGEHRISNFLLWQLAYAELYFSDLFWPDFKHDAMRAALADFASRQRRFGKTSEQVEAGARA

SEQ ID NO: 2750 - DNA, 753 bp, Candidatus Blochmannia pennsylvanicus str. BPEN
  CDS (1)..(753): transl_table=11
gtgatattatctcaacgtaatcaagatcttagcactttttcatctaatttattaccacgccatgttgctattatcatggatggtaatgggcgttgggcaagaagacgaggaaaattacgtattgttgggcatcaagctggatttaatgcggtacggcgtgctgttcatttcgctgttaattatagattcgatgcattaactttatatgcgtttagcagtgaaaactggaaacgtcctgacaaagagattgattctttaatgcaattgttttctcatgctttaaataatgaaatagatgttctacataagaataatatcaaactaagaatcattggagatattaatcgattttccggtgaattacaaaaaaatatacaccgctctgaaaaattaacttccaacaatagtggacttacgcttaatattgctgcaaattatggaggacgatgggatattatccaaggagtaaaacaacttgccacgcaagtgcagcaaggaatattaacccctaatcaaattgacgaagatgctctatgtaaatgtatctgtatgcatgaattagctccagtagatttggtgattcgaacaggaggtgaacatcgcattagtaattttttgctttggcaaatagcatatgctgaattattttttacagatgtattatggcctgattttaatgacgtcatatttaaaagagcagtaaatacttttatgaaacgagagcgccgatttggaaacagcgcatctatttaa

SEQ ID NO: 2751 - protein, 250 aa, Candidatus Blochmannia pennsylvanicus str. BPEN
MILSQRNQDLSTFSSNLLPRHVAIIMDGNGRWARRRGKLRIVGHQAGFNAVRRAVHFAVNYRFDALTLYAFSSENWKRPDKEIDSLMQLFSHALNNEIDVLHKNNIKLRIIGDINRFSGELQKNIHRSEKLTSNNSGLTLNIAANYGGRWDIIQGVKQLATQVQQGILTPNQIDEDALCKCICMHELAPVDLVIRTGGEHRISNFLLWQIAYAELFFTDVLWPDFNDVIFKRAVNTFMKRERRFGNSASI

SEQ ID NO: 2752 - DNA, 762 bp, Dechloromonas aromatica RCB
  CDS (1)..(762): transl_table=11
atggccttcttttcaagttcaacgcgacaagttccggaggcggctgcggtgcctaagcacgtcgctgtcatcatggatggcaatggtcgctgggccaaaaagcgctttttgccgcgcgtggcggggcatgtcaaaggcgtagagctggtccgagagatggttcgtgcctgccttgagcgtggcgtccaatatctgactctttttgccttttcctccgagaattggcgccggcctcaggaagaggttacgttgctgatgcaactcttcgtcaaggcgcttgaacaggaagtcgagaagcttgaccggaatggcgttcgtctgcgcgtgatcggtgatcttgagcgcttcgagccacgtttgcaggagctgatccggcaggctgaggccaagacagccggtaatacccgtctcgatctgaccatcgcggccaactatggcgggcgctgggacatcatgcaggccacaaatcaaatgcttgccgcccacccggaaaaacgtgctggctggcaggagtgtgaccttgaaccccatttgtcgatgagcttcgcgccggagcctgatttgttcattcgcactggcggtgaggagcggatcagcaattttctcctttggcaactggcctataccgagctttatttcacaccgacgctgtggcccgatttcgataccaccgagtttgacaaggccattgtctcattccagcagcgcgagcgtcgttttggccggaccagcgagcaattggtggaaaaaaacaatgcttaa

SEQ ID NO: 2753 - protein, 253 aa, Dechloromonas aromatica RCB
MAFFSSSTRQVPEAAAVPKHVAVIMDGNGRWAKKRFLPRVAGHVKGVELVREMVRACLERGVQYLTLFAFSSENWRRPQEEVTLLMQLFVKALEQEVEKLDRNGVRLRVIGDLERFEPRLQELIRQAEAKTAGNTRLDLTIAANYGGRWDIMQATNQMLAAHPEKRAGWQECDLEPHLSMSFAPEPDLFIRTGGEERISNFLLWQLAYTELYFTPTLWPDFDTTEFDKAIVSFQQRERRFGRTSEQLVEKNNA

SEQ ID NO: 2754 - DNA, 765 bp, Thermobifida fusca YX
  CDS (1)..(765): transl_table=11
atggggctgttgcgcatccctctctaccggctgtacgaacggcgcttggagcgtgcgctgagcaacgctccaaagccccggcacgtgggagtgatcctcgacgggaatcgccggtgggccaggctcagcggactgtccagcccgaaagaagggcaccgggcgggcgccgagaagatcttcgaattactcgactggtgcgatgaagtcggggtgcaggtcgtcaccctgtggctgttgtccaccgacaacctcgcgcgtccccccgaagagctggaaccgctgttcgagatcatcgagaacacagtgcggcggctctgcaacgaagggcggcgggtcaaccccatgggcgccctcgacctgctgcccgcctccacagcccaggtgatgaaggaagcggggaccaccaccgagcgcaaccccgggctgctcgtcaacgtcgccgtgggatacggcgggcgccgcgagatcgccgacgcggtccgctcgctgctgctcgaagaggccgcgaaaggcaccacgctggaggagctggctgagcggctcgacctcgacgacatcgccaagcacctctacacccgcggtcagcccgaccccgacctcctcatccgcacctccggggagcagcggctctccggctttctgctgtggcagagcgcccactcggagttctacttctgcgaagtcttctggcccgcgttccgcaagatcgactttctgcgcgcgctgcgctcctacagtgtgcgccagcggcgtttcggctgctga

SEQ ID NO: 2755 - protein, 254 aa, Thermobifida fusca YX
MGLLRIPLYRLYERRLERALSNAPKPRHVGVILDGNRRWARLSGLSSPKEGHRAGAEKIFELLDWCDEVGVQVVTLWLLSTDNLARPPEELEPLFEIIENTVRRLCNEGRRVNPMGALDLLPASTAQVMKEAGTTTERNPGLLVNVAVGYGGRREIADAVRSLLLEEAAKGTTLEELAERLDLDDIAKHLYTRGQPDPDLLIRTSGEQRLSGFLLWQSAHSEFYFCEVFWPAFRKIDFLRALRSYSVRQRRFGC

SEQ ID NO: 2756 - DNA, 849 bp, Thermobifida fusca YX
  CDS (1)..(849): transl_table=11
gtgagtcccaagaccgtcttctcgaccgacacccaccgggagccgatacccccgcaaccgcaccccagcggggctcggccaccccagttaccccgagaactcattccccggcacgtggcaatcgtcatggacggcaacggccgctgggccaagcagcgcggcctgccccgtactgaagggcacaaggcgggcgagtcctccctgttcgacgtgatcgagggagcgctggagctcggcgtgccctacctgtccgcctacgcgttctccacggagaactggaagcgctccccggacgaggtgcgcttcctcatggggttcaaccgcgacgtgatccgacgccgccgtgacgagctgcacgcacgcggggtgcgggtgcgctgggcgggacggccgggacggctgtggaagagcgtcatcaaagagctcaccgaagccgaagagctgaccaagcacaacaccaagctcacgctgcagttctgcgtgaactacgggggccgtgccgagatcgcggacgcggccgcggccctggcccgggatgtggctgccggccgcctctcccccaaccgggtcaccgaggccacgctcgctcgctacctgtaccacccggacatccccgacgtggacctgttcatccgttcctccggggagcagcgcctctccaatttcctgctctggcagtcgtcgtacgcggaattcgtgttcctcgacacgctctggcccgacttcgaccggcggcacttctggcaggcctgcgagatctacgcccgccgggaccgtcgctacgggggagccgaacccaacccggtggggccgccgcagtccgctgccggagcgcaggggcaggactga

SEQ ID NO: 2757 - protein, 282 aa, Thermobifida fusca YX
MSPKTVFSTDTHREPIPPQPHPSGARPPQLPRELIPRHVAIVMDGNGRWAKQRGLPRTEGHKAGESSLFDVIEGALELGVPYLSAYAFSTENWKRSPDEVRFLMGFNRDVIRRRRDELHARGVRVRWAGRPGRLWKSVIKELTEAEELTKHNTKLTLQFCVNYGGRAEIADAAAALARDVAAGRLSPNRVTEATLARYLYHPDIPDVDLFIRSSGEQRLSNFLLWQSSYAEFVFLDTLWPDFDRRHFWQACEIYARRDRRYGGAEPNPVGPPQSAAGAQGQD

SEQ ID NO: 2758 - DNA, 771 bp, Prochlorococcus marinus str. NATL2A
  CDS (1)..(771): transl_table=11
ttgacttacccttctgtaataaccaccgataattctagaaaggtatcgccattacctaaagatttggaccgtcttcgtatgcctgagcatattgcggtaatcatggatggaaatggtagatgggcaaaagaaaagggtttaccaaggacgattggacatacagctggggttgaggctttaaaaactactttgcacttatgtagtaattggggaataggtgcattaactgtttatgccttctcaactgaaaattggtccagacctagtgaagaagtgaatttcttaatgacactttttgaaagtgttctcaagcgtgaattgactaatttaaaactcgaagaagtaaaaattaatttcatgggtgatcttgaccctttgcctattggcttaaaggacttaatcaaagaatctgttgaatcaacttctaatagtaaaggtattcattttaatgtttgcacaaattatggaggaagacgggaattagtacgagctgctcaaaagttggcagaacgttcggtaaaaggcgaattagatccttcattgatagatgaaaatgtatttgcttctgagttgtttacagctagtgaggttgatccagacttacttattagaactagtggagaaaaaaggataagtaattttcttttgtggcaattagcttatgctgaaatccatatcacagacgtattatggccagattttaatgccgatactcttgccaaggcactacttgactatcaatctagaagaaggagatttggtggtgtataa

SEQ ID NO: 2759 - protein, 256 aa, Prochlorococcus marinus str. NATL2A
MTYPSVITTDNSRKVSPLPKDLDRLRMPEHIAVIMDGNGRWAKEKGLPRTIGHTAGVEALKTTLHLCSNWGIGALTVYAFSTENWSRPSEEVNFLMTLFESVLKRELTNLKLEEVKINFMGDLDPLPIGLKDLIKESVESTSNSKGIHFNVCTNYGGRRELVRAAQKLAERSVKGELDPSLIDENVFASELFTASEVDPDLLIRTSGEKRISNFLLWQLAYAEIHITDVLWPDFNADTLAKALLDYQSRRRRFGGV

SEQ ID NO: 2760 - DNA, 765 bp, Staphylococcus saprophyticus subsp. saprophyticus ATCC 15305
  CDS (1)..(765): transl_table=11
atgtttaaaaagttaattaaaaaaaataaaaatcagccaatccaatcagagtttggcttggacttacataacatacctgaacatgttgctataatcatggacggtaatggtcgctgggcaaaacaaagaaaattgcctagaattaaaggtcactatcaaggtatgcaaacagttaaaaaaatcacaaaagttgctagtgatattggaattaaatatttaacattgtatgcattttctacagaaaattggactagacctgaaaatgaagtcaattatatcatgaacttgccagttaactttttaaaaacatttctaccagagttgatagaaaataatgtaaaagtcgagacaattggttttatggaatatttgccatcatctacactcaaagcaatcgctaaagccaaagaagatactaaagataatacaggtttaaaattaatcttcgcgattaattatggtggtcgtgctgaaatattaaacagtgtaaaaacaatctatgatgaactaactgctaaaggattaactagtgatgacattacagaacagatgattgatgatcatttgatgacacatgcatatcctgacccagatcttttgataagaacatcaggtgaacaaagaataagcaatttccttatttggcaagtatcttacagtgaatttattttcaatgaaaagctatggccagatttcgataaagaagaattaataaattgtattaaaatttatcaatcacggcagcgtcgatttggtggattataa

SEQ ID NO: 2761 - protein, 254 aa, Staphylococcus saprophyticus subsp. saprophyticus ATCC 15305
MFKKLIKKNKNQPIQSEFGLDLHNIPEHVAIIMDGNGRWAKQRKLPRIKGHYQGMQTVKKITKVASDIGIKYLTLYAFSTENWTRPENEVNYIMNLPVNFLKTFLPELIENNVKVETIGFMEYLPSSTLKAIAKAKEDTKDNTGLKLIFAINYGGRAEILNSVKTIYDELTAKGLTSDDITEQMIDDHLMTHAYPDPDLLIRTSGEQRISNFLIWQVSYSEFIFNEKLWPDFDKEELINCIKIYQSRQRRFGGL

SEQ ID NO: 2762 - DNA, 879 bp, Methanosarcina barkeri str. fusaro
  CDS (1)..(879): transl_table=11
ttgaaaaaccgtattttcagtatattttatcatgagtatgagcgaagactccagagaaagattctgaattcagaaattccgcatcatatagctgtgattatggatgggaaccgcaggtatgcagggcagtttggaaaggctcgaagtttcgggcatgcaatgggggcagaagttaccgaaaaggtaattgagtggtgttatgagatcggggtaaagcagcttaccctctatgctttttctacggaaaactttcagcgctccgaagaagaagtcgacggtctcttcaacctcattaatgataaattcctgaaactttactctgatccaagaacacacgaaaaagagacacaggttcgcgtcataggagataggtcaaaattacccgcttttctgaatgagtctattgaaaaaatagaaaaagcaacgaaaaattacgggaaattttacctgaatgttgccattgcttatggaggcaggcaggatattattcaggccgttcgcgatattgcaggctgtatttccaatgggaaactctctcttgaggaagtggacgaaagtcttatttcaaaacatctttatcctgccccagggttctcagttcctaatgtggatcttgtcatccgtactggaggcgatgaaagggtttcaaatttccttccctggcaggctaacggaagtgaatgtgcagcttacttctgtgctcctttctggccagagttccgaaaaatcgaccttcttcgctcggtcagggtatatcaggctagggaagccgaaaaaaagcaggaacaatcatatagagtttcaaaagttgtaaatttcctagaaatgggaactcgtgaagacaaaggcgaagagattggacaaccccagtacatttaa

SEQ ID NO: 2763 - protein, 292 aa, Methanosarcina barkeri str. fusaro
MKNRIFSIFYHEYERRLQRKILNSEIPHHIAVIMDGNRRYAGQFGKARSFGHAMGAEVTEKVIEWCYEIGVKQLTLYAFSTENFQRSEEEVDGLFNLINDKFLKLYSDPRTHEKETQVRVIGDRSKLPAFLNESIEKIEKATKNYGKFYLNVAIAYGGRQDIIQAVRDIAGCISNGKLSLEEVDESLISKHLYPAPGFSVPNVDLVIRTGGDERVSNFLPWQANGSECAAYFCAPFWPEFRKIDLLRSVRVYQAREAEKKQEQSYRVSKVVNFLEMGTREDKGEEIGQPQYI

SEQ ID NO: 2764 - DNA, 711 bp, Dehalococcoides sp. CBDB1
  CDS (1)..(711): transl_table=11
ttggacacaacagctacaataaataatactccccctgaccacatagccataataatggatggaaacggccgctgggcagaacgccgcggccttagccgtttagaggggcacaaagccggtctggaaaacgccagacgggttatccgccacttgagttcgctgggggtcaaatatgtcaccctctacagtttttccactgaaaactggaaacgccccgatgctgaaataaaagggcttttcggtctgataaatgatgttatttcatcttatatcccggagcttgcgggaaataacatccgtttgcggcatctgggacatctggataaactgcccgctatgctaaagcataaactggagagtttactctccgaaaccagccaaaatagcggcctgaccctctcgctggcttttgactacggcgggcgtgatgaaattattcaggcggtaaaaaagctggttaaagacaggatagaacctgataaaataagcgaagagctttttgctggatacctgtttaccacaggcatacctgaagcaggcctgattatccgcaccggcggcgaaatacggctttccaattttctcctgtggcaatctgcctacagcgagctgtatttttcggaagtaatgtggccagactttggcgagaaagaaattgaccgggctatctctgcttttaaccagaggcagagacgattcggtggtttataa

SEQ ID NO: 2765 - protein, 236 aa, Dehalococcoides sp. CBDB1
MDTTATINNTPPDHIAIIMDGNGRWAERRGLSRLEGHKAGLENARRVIRHLSSLGVKYVTLYSFSTENWKRPDAEIKGLFGLINDVISSYIPELAGNNIRLRHLGHLDKLPAMLKHKLESLLSETSQNSGLTLSLAFDYGGRDEIIQAVKKLVKDRIEPDKISEELFAGYLFTTGIPEAGLIIRTGGEIRLSNFLLWQSAYSELYFSEVMWPDFGEKEIDRAISAFNQRQRRFGGL

SEQ ID NO: 2766 - DNA, 762 bp, Shigella sonnei Ss046
  CDS (1)..(762): transl_table=11
gtgatgttgtctgctactcaaccacttagcgaaaaattgccagcgcatggctgccgtcatgttgcgatcattatggacggcaatggtcgctgggcaaaaaagcaagggaggattcgtgcctttgggcataaagccggggcaaaatccgtccgccgggctgtctcttttgcggccaacaacggtattgaggcgttaacgctgtatgcctttagtagtgaaaactggaaccgaccagcgcaggaagtcagtgcgttaatggaactgtttgtgtgggcgctcgatagcgaagtaaaaagtctgcaccgacataacgtgcgtctgcgtattattggcgataccagtcgctttaactcgcgtttgcaagaacgtattcgtaaatctgaagcgctaacagctgggaataccggtctgacgctgaatattgcggcgaactacggtggacgttgggatatagtccagggagtcaggcaactggctgaaaaggtgcagcaaggaaacctgcaaccagatcagatagatgaagagatgctaaaccagcatgtctgtatgcatgaactggcccctgtagatttagtaattaggactgggggggagcatcgcattagtaactttttgctttggcaaattgcctatgccgaactttactttacagatgttctctggcctgatttcgatgaacaagactttgaaggggcgttaaatgcctttgctaatcgagagcgtcgtttcggcggcaccgagcccggtgatgaaacagcctga

SEQ ID NO: 2767 - protein, 253 aa, Shigella sonnei Ss046
MMLSATQPLSEKLPAHGCRHVAIIMDGNGRWAKKQGRIRAFGHKAGAKSVRRAVSFAANNGIEALTLYAFSSENWNRPAQEVSALMELFVWALDSEVKSLHRHNVRLRIIGDTSRFNSRLQERIRKSEALTAGNTGLTLNIAANYGGRWDIVQGVRQLAEKVQQGNLQPDQIDEEMLNQHVCMHELAPVDLVIRTGGEHRISNFLLWQIAYAELYFTDVLWPDFDEQDFEGALNAFANRERRFGGTEPGDETA

SEQ ID NO: 2768 - DNA, 738 bp, Thiobacillus denitrificans ATCC 25259
  CDS (1)..(738): transl_table=11
gtgtctacccgcaccaagcaggcgatccccgtgacctcggacgtgccgcggcacattgccatcatcatggacggcaacgggcgatgggcgaagcgccgcttcatgccgcgcttcgccggacatcgcaagggagtcgaggcgctgcgcggcgtgatccgcgcctgcgccgagcgtggcgtgacgcatctgaccgtgttcgccttcagctcggaaaactggcggcgcccgcaggaagaagtgacgctgctgatggagctgttcctgcgcgcgctcgagaacgaagtggccaagctgcacgagaacggcattcgttttcgcgtcatcggcgacctgtcgggattttccgaacgcatccagacgttgatccgcgaggccgaaacgctgacacgggacaacagccgcctcacgttcacggtcgccgcgaattacggcggacgctgggacgtcgtgcaggccgtcaagaaactcgtcgcgtcgggcgaaccggtgagcgaagcggcgctggccgcgcacctgagcctcgccgatacacccgagcccgatctcttcatccgcaccggcggggagcaacgcatcagcaatttcctgctgtggcagcttgcctacactgaactctactttaccgacgccctctggcccgacttcgacgccgcggcgctcgacgccgcgatcgcttcgtatcgcacgcgcgaacgtcgattcggtcgcaccagcgaacagctgctgacggcgtcgtga

SEQ ID NO: 2769 - protein, 245 aa, Thiobacillus denitrificans ATCC 25259
MSTRTKQAIPVTSDVPRHIAIIMDGNGRWAKRRFMPRFAGHRKGVEALRGVIRACAERGVTHLTVFAFSSENWRRPQEEVTLLMELFLRALENEVAKLHENGIRFRVIGDLSGFSERIQTLIREAETLTRDNSRLTFTVAANYGGRWDVVQAVKKLVASGEPVSEAALAAHLSLADTPEPDLFIRTGGEQRISNFLLWQLAYTELYFTDALWPDFDAAALDAAIASYRTRERRFGRTSEQLLTAS

SEQ ID NO: 2770 - DNA, 852 bp, Crocosphaera watsonii WH 8501
  CDS (1)..(852): transl_table=11
atggggtcttctcagtcgtattatcggcccagagggaagacgcttcttacaaaccaccgttcgtacattgtcatcgaactcatcagaagagaagaaatgacgcagcctattgtgttaaaggacttaccaagcgatctcgatccaaaccgttttccccaacatatcgccgtcattatggacggtaatggccgttgggcaaaacgtcgtggcctgcctcgtattatgggacatcaaagaggggtggatactctcaaagatgtactccgttgttgtagcgattgggggatttcggctttgacagcttatgctttttcaacagaaaattggggacgacccctcgaagaagtggattttttgatgactttgtttgaaagggttctgcgccgtgaattagaagaaatgatgactgaaaacgtgagaattcgcttcgtgggggatttagatgtgttgagtccttccctacaggcagaaatatctcgttctatggaagatacggaaaataatactggggttcaatttaccgtggcgactaattatggtggccgtcaagaaattgtccaaagttgtcgggcgatcgctcaacaggtaaaacagggattattgaatttagatgatattaatgaaagtttatttgaaaatttcttgtataccaaaggtattcctgaccccgatcttttaattcgtaccagtggagaaatgcggattagtaattttctgttatggcagttggcctatgcagaaatttatgtgacacaaaccctttggcctgattttgatcgtcatactctccacgatgctttattaaattatcagcagcgagaacgacggtttgggaaggtgggaaaggcttaa

SEQ ID NO: 2771 - protein, 283 aa, Crocosphaera watsonii WH 8501
MGSSQSYYRPRGKTLLTNHRSYIVIELIRREEMTQPIVLKDLPSDLDPNRFPQHIAVIMDGNGRWAKRRGLPRIMGHQRGVDTLKDVLRCCSDWGISALTAYAFSTENWGRPLEEVDFLMTLFERVLRRELEEMMTENVRIRFVGDLDVLSPSLQAEISRSMEDTENNTGVQFTVATNYGGRQEIVQSCRAIAQQVKQGLLNLDDINESLFENFLYTKGIPDPDLLIRTSGEMRISNFLLWQLAYAEIYVTQTLWPDFDRHTLHDALLNYQQRERRFGKVGKA

SEQ ID NO: 2772 - DNA, 756 bp, Pelobacter propionicus DSM 2379
  CDS (1)..(756): transl_table=11
atgcgcgagctcgaccctgaacggctccccgtccatctggcaatcatcatggatggcaacggacgctgggcccagcagcgcatgctcaaacgcatcgtcggccaccagcggggcgccgagacggtcaacatggttgtggaacatgcctggcgcctgggcatacaatacctgaccctgttcgccttctcctccgagaactggtcccggccggcaatcgaggtgcgcgccctcatgtccctgctgaagaagtacatccgcaaggagacggcgcgcatgatgcgcaagaacatccgctacaatgtcatcggcaaccgcagcgaccttcccgtcgatgtcaacgagacactggatgaggccatcaagcagacctcggtcaataccggcatgacgctcaccctggcgctctcctacggcgggcgccaggaactgagcatggctgcccgccgcctcgcatgcgacgtccgtgacgggaaaataacccccgatgacatttcggtggaaaacttcggcacctatctggatacgggcggcctgccggacccggattttctgatccgcaccagcggcgagatgcgcatcagcaatttcctgctctggcaactggcctataccgagctctactttaccgaaacgaactggcccgacttcaccatcaacgagttcaacaaggccctgatcgattttcagtcccgtgaacgccgcttcggcaagaccagcgaccagatctccccgaggaacaagccatcaaacgcctga

SEQ ID NO: 2773 - protein, 251 aa, Pelobacter propionicus DSM 2379
MRELDPERLPVHLAIIMDGNGRWAQQRMLKRIVGHQRGAETVNMVVEHAWRLGIQYLTLFAFSSENWSRPAIEVRALMSLLKKYIRKETARMMRKNIRYNVIGNRSDLPVDVNETLDEAIKQTSVNTGMTLTLALSYGGRQELSMAARRLACDVRDGKITPDDISVENFGTYLDTGGLPDPDFLIRTSGEMRISNFLLWQLAYTELYFTETNWPDFTINEFNKALIDFQSRERRFGKTSDQISPRNKPSNA

SEQ ID NO: 2774 - DNA, 666 bp, Streptomyces fradiae
  CDS (1)..(666): transl_table=11
atgaatcccgagacaactccgcaatgccatcatgtcgctgtcattcccgacgggaataggcgatgggccaagcggcgcggcctcgattcgggagccggtcacgccgagggggcgcgccgtgccgtatctctggcagagtggtgtcgcgactgggggatatcccacctcactgtctttctcatgtcccgctcgaacttcaaccgtcccgatgaggaactcgcccctctgctggaggcagtggagggcgtcttcagccggttgtcggcagtgcctgctaccagtctgagcaccatcggtgatctcggcctgctgcctgcatcctcacggcagcggatcgagggagcagtcggcctcagccccgaccgcccggacctacacgtcaatttggccgtcgggtatgacagcgaggacgaaatacgtcatgccgtgcattcggtcatcacggatggcgcggatatcaaggacgccttggccctcgccggacagccggacgtcgacctcgtcatccgtacatccggtgaacgacgcctctccggctttctgccgctgcagaccgcaatggcggaacttcacttcactgacaccctttggcctgatttcgggagatccgacttcgagctcgccgtgaaagatttcttcacgcgacagcgcaggtatggtctctga

SEQ ID NO: 2775 - protein, 221 aa, Streptomyces fradiae
MNPETTPQCHHVAVIPDGNRRWAKRRGLDSGAGHAEGARRAVSLAEWCRDWGISHLTVFLMSRSNFNRPDEELAPLLEAVEGVFSRLSAVPATSLSTIGDLGLLPASSRQRIEGAVGLSPDRPDLHVNLAVGYDSEDEIRHAVHSVITDGADIKDALALAGQPDVDLVIRTSGERRLSGFLPLQTAMAELHFTDTLWPDFGRSDFELAVKDFFTRQRRYGL

SEQ ID NO: 2776 - DNA, 714 bp, Desulfovibrio vulgaris
  CDS (1)..(714): transl_table=11
atgcttttgccggaaaccctgccccgccacgtggccatcatcatggacggcaacgggcgctgggccacccagcgcggcctttcgcgcagcgacggccaccgcgcgggcaccgaggcggcacgggccatcgtcaccgaatgccgcaccctcggcatcccccacctgaccatgtacaccttctccaaggaaaactggggccgccccggtgccgaggtgaagttcctgttcgagctgctggtggatttcctgcgcgaggaattgcccaacctcatccagcgcgacatccggctttcggtgttcgggcaactgtccgacctgccgctggccgcgcgcaaggcgctggagcacgccatttcccgcaccgccgcctgcaccaccatgcgcctgaacctggccctcaactactccgcccgcgatgaaatcctcatggcctgccgcgccctggccgccgaaggcctggcgcccgaagccatcaccgaggaagcctttgccgcgcggctgtggagcgcgggccagcccgacccggacctggtcatccgcaccagcggcgaagtgcgtatcagcaatttcctgctctaccagagcgcctacagcgaattccacttcaccgacaccctctggccggactttaccccagagcatttccgcgccgccctgcgcgactatgccgggcggcaacgccgcttcggcaaaacggaggcaacccccgcgtga

SEQ ID NO: 2777 - protein, 237 aa, Desulfovibrio vulgaris
MLLPETLPRHVAIIMDGNGRWATQRGLSRSDGHRAGTEAARAIVTECRTLGIPHLTMYTFSKENWGRPGAEVKFLFELLVDFLREELPNLIQRDIRLSVFGQLSDLPLAARKALEHAISRTAACTTMRLNLALNYSARDEILMACRALAAEGLAPEAITEEAFAARLWSAGQPDPDLVIRTSGEVRISNFLLYQSAYSEFHFTDTLWPDFTPEHFRAALRDYAGRQRRFGKTEATPA

SEQ ID NO: 2778 - DNA, 951 bp, Bos taurus
  CDS (1)..(951)
atgtcatgggtcaaagaaggagagctgtcattttgggagcggttctgtgccaatatcataaaggcaggccccatgcccaaacacattgcgtttataatggatgggaaccgtcgttatgccaagaagtgccaagtggagcggcaggagggccactcacaaggcttcaacaaactggcagagactctgcgttggtgtttgaacttgggcatcctggaggtgacggtctatgcgttcagcatcgagaacttcaaacgctccaagagtgaagtagacgggctaatggatctggcccgggagaagtttagccgcctgatggaagaacaggagaaactgcagaagcatggggtatgtatccgggtcctgggtgatctgcatttgttgcccttggatctccaggagctggtcgcacaggctgtgcagaccaccaagaactacaacaagtgtttcctgaacgtctgttttgcttacacatcccgtcatgaaatcagcaatgctgtaagagagatggcctggggagtggaacaaggcctgctggatcccagcgatgtctctgagtctctgctcgataagtgcctctataccaaccactctcctcaccctgacatcttgatacggacttctggggaagtgaggctcagcgacttcctcctctggcagacctcccactcctgcctggtgttccagcctgttctgtggccagaatacacgttttggaacctctgtgaggccatcctgcagttccagatgaaccatagcatgcttcaggtaagagttcatggctggcctgactggatgggatggaagaaaatattagcattgattgacccccatgactgtatatgtcaggcacttgctactggcatgttaatgataatgatgagtagctaccacttaccgagtatttactgtgtgtcaggcactgtgaacagtgtatatcaccgtctcatttaa

SEQ ID NO: 2779 - protein, 316 aa, Bos taurus
MSWVKEGELSFWERFCANIIKAGPMPKHIAFIMDGNRRYAKKCQVERQEGHSQGFNKLAETLRWCLNLGILEVTVYAFSIENFKRSKSEVDGLMDLAREKFSRLMEEQEKLQKHGVCIRVLGDLHLLPLDLQELVAQAVQTTKNYNKCFLNVCFAYTSRHEISNAVREMAWGVEQGLLDPSDVSESLLDKCLYTNHSPHPDILIRTSGEVRLSDFLLWQTSHSCLVFQPVLWPEYTFWNLCEAILQFQMNHSMLQVRVHGWPDWMGWKKILALIDPHDCICQALATGMLMIMMSSYHLPSIYCVSGTVNSVYHRLI

SEQ ID NO: 2780 - DNA, 873 bp, Hevea brasiliensis
  CDS (1)..(873)
atggaattatacaacggtgagaggccaagtgtgttcagacttttagggaagtatatgagaaaagggttatatggcatcctaacccagggtcccatccctactcatcttgccttcatattggatggaaacaggaggtttgctaagaagcataaactgccagaaggaggtggtcataaggctggatttttagctcttctgaacgtactaacttattgctatgagttaggagtgaaatatgcgactatctatgcctttagcatcgataattttcgaaggaaacctcatgaggttcagtacgtaatggatctaatgctggagaagattgatgggatgatcaaggaagaaagtatcatcaatgcttatgatatttgcgtacgttttgtgggtaacctgaagcttttaagtgagccagtcaagaccgcagcagataagattatgagggctactgccaacaattccaaatgtgtgcttctccttgctgtgtgctatacttcaactgatgagatcgtgcatgctgttgaagaatcctctgaattgaactccaatgaagtttgtaacaatcaagaattggaggaggcaaatgcaactggaagcagtactgtgattcaaactgagaacatggagtcgtattctggaataaaacttgtagaccttgagaaaaacacctacataaatccttatcctgatgttctgattcgaacttctggggagacccgtctgagcaactacttactttggcagactactaattgcatactgtattctccttatgcactgtggccagagattggtcttcgacacgtggtgtggtcagtaattaacttccaacgtcattattcttacttggagaaacataaggaatacttaaaataa

SEQ ID NO: 2781 - protein, 290 aa, Hevea brasiliensis
MELYNGERPSVFRLLGKYMRKGLYGILTQGPIPTHLAFILDGNRRFAKKHKLPEGGGHKAGFLALLNVLTYCYELGVKYATIYAFSIDNFRRKPHEVQYVMDLMLEKIDGMIKEESIINAYDICVRFVGNLKLLSEPVKTAADKIMRATANNSKCVLLLAVCYTSTDEIVHAVEESSELNSNEVCNNQELEEANATGSSTVIQTENMESYSGIKLVDLEKNTYINPYPDVLIRTSGETRLSNYLLWQTTNCILYSPYALWPEIGLRHVVWSVINFQRHYSYLEKHKEYLK

SEQ ID NO: 2782 - DNA, 873 bp, Hevea brasiliensis
  CDS (1)..(873)
atgaaattatacaccggtgagaggccaagtgtgttcagacttttagggaagtatatgagaaaagggttatatggcatcctaacccagggtcccatccctactcatcttgccttcatattggatggaaacaggaggtttgctaagaagcataaactgccagaaggaggtggtcataaggctggatttttagctcttctgaacgtgctaacttattgctatgagttaggagtgaaatatgcgactatctatgcctttagcatcgataattttcgaaggaaacctcatgaggttcagtacgtaatgaatctaatgctggagaagattgaagggatgatcatggaagaaagtatcatcaatgcatatgatatttgcgtacgttttgtgggtaacctgaagcttttaagtgagccagtcaagaccgcagcagataagattatgagggctactgccaacaattccaaatgtgtgcttctccttgctgtatgctatacttcaactgatgagatcgtgcatgctgttgaagaatcctctgaattgaactccaatgaagtttgtaacaatcaagaattggaggaggcaaatgcaactggaagcggtactgtgattcaaactgagaacatggagtcgtattctggaataaaacttgtagaccttgagaaaaacacctacataaatccttatcctgatgttctgattcgaacttctggggagacccgtctgagcaactacttactttggcagactactaattgcatactgtattctccttatgcactgtggccagagattggtcttcgacacgtggtgtggtcagtaattaacttccaacgtcattattcttacttggagaaacataaggaatacttaaaataa

SEQ ID NO: 2783 - protein, 290 aa, Hevea brasiliensis
MKLYTGERPSVFRLLGKYMRKGLYGILTQGPIPTHLAFILDGNRRFAKKHKLPEGGGHKAGFLALLNVLTYCYELGVKYATIYAFSIDNFRRKPHEVQYVMNLMLEKIEGMIMEESIINAYDICVRFVGNLKLLSEPVKTAADKIMRATANNSKCVLLLAVCYTSTDEIVHAVEESSELNSNEVCNNQELEEANATGSGTVIQTENMESYSGIKLVDLEKNTYINPYPDVLIRTSGETRLSNYLLWQTTNCILYSPYALWPEIGLRHVVWSVINFQRHYSYLEKHKEYLK

SEQ ID NO: 2784 - DNA, 630 bp, Homo sapiens
  CDS (1)..(630)
atgtcatggatcaaggaaggagagctgtcactttgggagcggttctgtgccaacatcataaaggcaggcccaatgccgaaacacattgcattcataatggacgggaaccgtcgctatgccaagaagtgccaggtggagcggcaggaaggccactcacagggcttcaacaagctagctgagactctgcggtggtgtttgaacctgggcatcctagaggtgacagtctacgcattcagcattgagaacttcaaacgctccaagagtgaggtagacgggcttatggatctggcccggcagaagttcagccgcttgatggaagaaaaggagaaactgcagaagcatggggtgtgtatccgggtcctgggcgatctgcacttgttgcccttggatctccaggagctgattgcacaagctgtacaggccacgaagaactacaacaagtgtttcctgaatgtctgttttgcatacacatcccgtcatgagatcagcaatgctgtgagagagatggcctggggggtggagcaaggcctgttggatcccaggtatcccgagttgttttgcatggtaattgttaaggaaaacaggcctgggccagcatggcagctcacgcctgtaatcctagcacattag

SEQ ID NO: 2785 - protein, 209 aa, Homo sapiens
MSWIKEGELSLWERFCANIIKAGPMPKHIAFIMDGNRRYAKKCQVERQEGHSQGFNKLAETLRWCLNLGILEVTVYAFSIENFKRSKSEVDGLMDLARQKFSRLMEEKEKLQKHGVCIRVLGDLHLLPLDLQELIAQAVQATKNYNKCFLNVCFAYTSRHEISNAVREMAWGVEQGLLDPRYPELFCMVIVKENRPGPAWQLTPVILAH

SEQ ID NO: 2786 - DNA, 900 bp, Oryza sativa
  CDS (1)..(900)
atgcttggttcacttatctcttactcaccttcagtgaatccaaagacggagaaccctgatgagttaattgcgactggtgtccttgcgagtctgcaaaactttatccgcaaatgcatcgtagctgtcctctcatatggcccaatgcctaaacatattgcatttattatggacggtaaccgtagatatgctaaattcaggagtatccaggaaggctctggtcacaggatgggcttctctgctctcattgccagcctactctactgctatgaaatgggcgtgaagtatatcacagtgtatgcatttagcatcgataattttaagcgagatctgactgaggtgaaatccttgatggagttaatggaggaaaagatcaatgaactgctagaaaacagaaatgtcatcaacaaggttaactgtaagatcaacttctgggggaagttggacatgttgagcgaaccggtgagggtagcagctgagaaactgatggttagcactgctgaaaacaagggactggtcttctctgtttgcatgccatacaactccacttctgagattgtcattgcggtcaataaggtctgtgcagaaaggagggatatactgcagagggaggatgttgacagtgttgcgaataatggtgtgcattcagatatttcagtggcagatctggaccaccatatgtacagcgctggttgccccgatcctgatattgtgatccggacctcaggcgagactcgcctgagcaatttccttctgtggcagacgacgttcagtcatttgcagaatccagaccctctttggccggagttctctttcaagcaccttgtctgggccatactacagtaccaaagagttcacccttatattgagcaaagcagaaatctggctaagaagcagctgtaa

SEQ ID NO: 2787 - protein, 299 aa, Oryza sativa
MLGSLISYSPSVNPKTENPDELIATGVLASLQNFIRKCIVAVLSYGPMPKHIAFIMDGNRRYAKFRSIQEGSGHRMGFSALIASLLYCYEMGVKYITVYAFSIDNFKRDLTEVKSLMELMEEKINELLENRNVINKVNCKINFWGKLDMLSEPVRVAAEKLMVSTAENKGLVFSVCMPYNSTSEIVIAVNKVCAERRDILQREDVDSVANNGVHSDISVADLDHHMYSAGCPDPDIVIRTSGETRLSNFLLWQTTFSHLQNPDPLWPEFSFKHLVWAILQYQRVHPYIEQSRNLAKKQL

SEQ ID NO: 2788 - DNA, 999 bp, Xenopus laevis
  CDS (1)..(999)
atgtcgtggatacgagataaagaattgtctttgattgaacgtctgtgcgcgaatgtgctaaaggctggtccaatacctaagcatgttgctttcattatggatgggaacagacgctatgcccagaagtgccatgtggaaagacaggaaggtcactcacaaggctttgaaaaacttgctgagactctccgctggtgtttaaacttgggcatatgcgaagtgacagtgtatgcattcagcattgagaactttaagcgttcagcagaggaagtggagggtttgatggagctggctcgtcaaaaatttacccgtctactggaggagagggagaagttggaaaagcatggtgtatgtatcagagtgctgggtgatttgaccttacttcccctggacattcagaagctgatagcacaagccatgctggagaccaaggcctactctaagtgtttcctaaatgtttgcttttcttatacgtcccgacatgagatcagtaatgctatacgagaggcagcctggggagtgcaggagggactactggatccaagggatgtaacagagtctcttctggaccagtgcctttacacttctaaatctccagaaccagaccttctaatccgtacctctggagaggttcgtctgagtgacttccttctgtggcagacgtcctattcctgcttggtatttcaatctgtactgtggccagaatatacattttggaacctttgtgaagctgttttgcgttaccaatacaactacagtaacatccagaaggccaaggagctgcatcatcgacagagagcaaggcttcagctagaaagtgaccaatcctgggtgcaggaaactctatggaataaagagtactctaatgcagaagaagacttaattctcttccaaaagctactgcagaaatgtaaagctgggagggagaaaaggatgcaggattttatatgtgctctggagaaaaaaagaactgatctccttcaaactctctgtgcatcttaa

SEQ ID NO: 2789 - protein, 332 aa, Xenopus laevis
MSWIRDKELSLIERLCANVLKAGPIPKHVAFIMDGNRRYAQKCHVERQEGHSQGFEKLAETLRWCLNLGICEVTVYAFSIENFKRSAEEVEGLMELARQKFTRLLEEREKLEKHGVCIRVLGDLTLLPLDIQKLIAQAMLETKAYSKCFLNVCFSYTSRHEISNAIREAAWGVQEGLLDPRDVTESLLDQCLYTSKSPEPDLLIRTSGEVRLSDFLLWQTSYSCLVFQSVLWPEYTFWNLCEAVLRYQYNYSNIQKAKELHHRQRARLQLESDQSWVQETLWNKEYSNAEEDLILFQKLLQKCKAGREKRMQDFICALEKKRTDLLQTLCAS

SEQ ID NO: 2790 - DNA, 999 bp, Xenopus laevis
  CDS (1)..(999)
atgtcgtggatacgagataaagaattgtctttgattgaacgtctgtgcgcgaatgtactcaaggctggtccaatacctaagcatgttgctttcattatggatgggaaccgacgctatgccaagaagtgccatgtagaaagacaggagggacactcacaaggttttgaaaaacttgctgagaccctgcgctggtgtttaaacttggggatatgcgaagtgacagtgtatgcattcagcattgagaactttaagcgttcagctgaggaagtggagggtctgctggagctggctcgtcaaaaatttacccgtctattggaggagaaggataagttggaaaaacatggagtacgtatcagagtgcttggtgatttgaccttacttcccctggacattcagaagctgatagcacaagcagtactggagaccagagcctactctaagtgtttcctaaatgtttgctttgcttatacatcacgacatgagatcactaatgctatacgagaggcagcctggggagttcaggagggactgctggatccaagggatgtaacagagtctcttttggaccagtgtttgtatactgctaaatctccagaaccagaccttctaatccgtacatctggagaggttcgtctgagtgatttccttctgtggcagacatcctattcctgcttggtatttcaatctgtactgtggccagagtatacattttggaacctttgtgaagctattttgcgttaccaatataactacagtaacatccagaaggccaaggagatacatcatcaacagagagcaaggcttcagctagaaagcgaccgatcctgggtgcaggataatctatgcaataaagagtactctactgcagaagaagacctaattctcttccaaaagctactgcagaaatgtaaagctgggagggagaaaaggacacagacttttatatgtgcacttgagaagaaaagaactgatttccttcaagcgctctgtgaatcttaa

SEQ ID NO: 2791 - protein, 332 aa, Xenopus laevis
MSWIRDKELSLIERLCANVLKAGPIPKHVAFIMDGNRRYAKKCHVERQEGHSQGFEKLAETLRWCLNLGICEVTVYAFSIENFKRSAEEVEGLLELARQKFTRLLEEKDKLEKHGVRIRVLGDLTLLPLDIQKLIAQAVLETRAYSKCFLNVCFAYTSRHEITNAIREAAWGVQEGLLDPRDVTESLLDQCLYTAKSPEPDLLIRTSGEVRLSDFLLWQTSYSCLVFQSVLWPEYTFWNLCEAILRYQYNYSNIQKAKEIHHQQRARLQLESDRSWVQDNLCNKEYSTAEEDLILFQKLLQKCKAGREKRTQTFICALEKKRTDFLQALCES

SEQ ID NO: 2792 - DNA, 996 bp, Periploca sepium
  CDS (1)..(996)
atggagaaaagaagtgatcaaacaagcatattagagaatcttggaaggttttgtcgagcatgtatagtttcaattgtttcagttggacctattcctgtgcatattgcgtttatcatggatggaaatcgaagatatgcaaagaaaaagaatttgttagaagggactggtcataggtttggatatttggctctcatcaacatgctgaagtgctgttatgagcttggtataaaatatgtaactatttatgccttcagcattgacaattttaaaaggcgccccgaagaagttgaatccaccatgaaattgattcaggaaaaaattgaagaattgattaaagaggagagtttgctcaatatttatggagttagagtctactttttaggtaatcttaaacttttgaacaagtctgtcaggttgactgcagagagggcgatggcagctactgctggaaattcgaaagctgtgttgtccatttgtgttggttatacttccacagatgagattgtgcatgctgttcaagagtgttgtgaaaggaaatgggatgaaattagagaacttgactcaagtggagctggatatggtttaatttcaattggaacaaatgaagaaagcaaaggcgagaatattgttggtgtagctgatatcgaaaaacacatgtacgcagcagttgtacctgatcctgatatcataatacgaacttctggtgagactcgcttgagtaatttccttctctggcaaagtgctgattcccttttgtactctccctctatattatggccagagattggttttcgccatttggtttgggcagttttggattttcaaaggaatttccattatttgaaaaagaaagggaaggaatcagaagtctcctggtggaaatctatccctcgaattctcaaatactgtttgttttggatggtaggaatactaattcttttccagttccatagtttatctcaaaaaaatgtggaaatagtctggggcttcttttag

SEQ ID NO: 2793 - protein, 331 aa, Periploca sepium
MEKRSDQTSILENLGRFCRACIVSIVSVGPIPVHIAFIMDGNRRYAKKKNLLEGTGHRFGYLALINMLKCCYELGIKYVTIYAFSIDNFKRRPEEVESTMKLIQEKIEELIKEESLLNIYGVRVYFLGNLKLLNKSVRLTAERAMAATAGNSKAVLSICVGYTSTDEIVHAVQECCERKWDEIRELDSSGAGYGLISIGTNEESKGENIVGVADIEKHMYAAVVPDPDIIIRTSGETRLSNFLLWQSADSLLYSPSILWPEIGFRHLVWAVLDFQRNFHYLKKKGKESEVSWWKSIPRILKYCLFWMVGILILFQFHSLSQKNVEIVWGFF

SEQ ID NO: 2794 - DNA, 738 bp, Paracoccus zeaxanthinifaciens
  CDS (1)..(738)
atgatccctggcttctcggcagcgaccgcgatttcggatgggggtgcagcgcgcccccgtcatgtcgccatcatcatggacggcaacggccgttgggcgaccgaacgcggctggccgcgcctggtcggccatcgtcgcggcgccgagcgcgtgaagcagatcgtccgcgcctgccccgagctgggcgtggactggctgaccatctatgccttctcgaccgagaactggaagcgttcgaccgaagaggtcctgggcctgatgaagatcttccgccgctatatcgagcgcgaggccgtcggcatggcgtccgaaggcgtgcgcatgcgcttcatcggcgggcgcgagcggctggaccgcaagctgcaggacctgatggcctcgatcgaggcgcggacggcgggcaacacgcgcctgaacctgacggtcgcgatcaactatggcggccgggacgagctgacgcgcgcctcgacccgccttgcgcgcaagatcgccgccggagagatcgagaccccgaccgaggccgatctggccgattgcatggataccgccggacatcccgatccggacctggtgatccgcacctcgggcgagacgcggacctcgaacttcctgccctggcaggccgcctattcggaatacgaattcacgccgaccctgtggcccgatttcacgccgcagcacctgtccgacatcctcgggaattacggaatgcgcgaccgccgcttcgggggcgcatga

SEQ ID NO: 2795 - protein, 245 aa, Paracoccus zeaxanthinifaciens
MIPGFSAATAISDGGAARPRHVAIIMDGNGRWATERGWPRLVGHRRGAERVKQIVRACPELGVDWLTIYAFSTENWKRSTEEVLGLMKIFRRYIEREAVGMASEGVRMRFIGGRERLDRKLQDLMASIEARTAGNTRLNLTVAINYGGRDELTRASTRLARKIAAGEIETPTEADLADCMDTAGHPDPDLVIRTSGETRTSNFLPWQAAYSEYEFTPTLWPDFTPQHLSDILGNYGMRDRRFGGA

SEQ ID NO: 2796 - DNA, 891 bp, Hevea brasiliensis
  CDS (1)..(891)
atggaaatatatacgggtcagaggccaagtgtgtttagaatttttgggaaatacatgagaaaagggttatatagcatcctaacccaaggtcccatccctactcatcttgccttcataatggatggaaaccggaggtttgctaagaagcacaaaatgaaagaagcagaaggttataaggcaggatatttagctcttctgagaacactaacttattgctatgagttgggagtgaggtatgtaaccatttatgcctttagcattgataattttcgaaggcaacctcgtgaggttcagtgcgtaatgaatctaatgatggagaagattgaagagattatcgtggaagaaagtatcatgaatgcatatgatgttggcgtacgtattgtgggtaacctgaatcttttagatgagccaatcaggatcgcagcagaaaagattatgagggctactgccaataattccaggtttgtgcttctcattgctgtagcctatagttcaactgatgagatcgtgcatgctgttgaagaatcctctaaagacaaattgaactccaatgaagtttgcaacaatgggattgaagctgaacaagaatttaaggaggcaaacggaactggaaacagtgtgattccagttcagaagacggagtcatattctggaataaatcttgcagaccttgagaaaaacacctacgtaaatcctcatcctgatgtcttgattcgaacttctgggttgagccgtctaagtaactacctactttggcagactagtaattgcatactgtattctccttttgcactgtggccagagattggtctcaggcacttggtatggacagtaatgaacttccaacgtcatcattcttatttggagaagcataaggaatatttaaaataa

SEQ ID NO: 2797 - protein, 296 aa, Hevea brasiliensis
MEIYTGQRPSVFRIFGKYMRKGLYSILTQGPIPTHLAFIMDGNRRFAKKHKMKEAEGYKAGYLALLRTLTYCYELGVRYVTIYAFSIDNFRRQPREVQCVMNLMMEKIEEIIVEESIMNAYDVGVRIVGNLNLLDEPIRIAAEKIMRATANNSRFVLLIAVAYSSTDEIVHAVEESSKDKLNSNEVCNNGIEAEQEFKEANGTGNSVIPVQKTESYSGINLADLEKNTYVNPHPDVLIRTSGLSRLSNYLLWQTSNCILYSPFALWPEIGLRHLVWTVMNFQRHHSYLEKHKEYLK

SEQ ID NO: 2798 - DNA, 873 bp, Hevea brasiliensis
  CDS (1)..(873)
atggaattatacaacggtgagaggccaagtgtgttcagacttttagggaagtatatgagaaaagggttatatagcatcctaacccagggtcccatccctactcatattgccttcatattggatggaaacaggaggtttgctaagaagcataaactgccagaaggaggtggtcataaggctggatttttagctcttctgaacgtactaacttattgctatgagttaggagtgaaatatgcgactatctatgcctttagcatcgataattttcgaaggaaacctcatgaggttcagtacgtaatggatctaatgctggagaagattgaagggatgatcatggaagaaagtatcatcaatgcatatgatatttgcgtacgttttgtgggtaacctgaagcttttaagtgagccagtcaagaccgcagcagataagattatgagggctactgccaacaattccaaatgtgtgcttctcattgctgtatgctatacttcaactgatgagatcgtgcatgctgttgaagaatcctctgaattgaactccaatgaagtttgtaacaatcaagaattggaggaggcaaatgcaactggaagcagtactgtgattcaaactgagaacatggagtcgtattctggaataaaacttgtagaccttgagaaaaacacctacataaatccttatcctgatgttctgattcgaacttctggggagacccgtctgagcaactacttactttggcagactactaattgcatactgtattctccttatgcactgtggccagagattggtcttcgacacgtggtgtggtcagtaattaacttccaacgtcattattcttacttggagaaacataaggaatacttaaaataa

SEQ ID NO: 2799 - protein, 290 aa, Hevea brasiliensis
MELYNGERPSVFRLLGKYMRKGLYSILTQGPIPTHIAFILDGNRRFAKKHKLPEGGGHKAGFLALLNVLTYCYELGVKYATIYAFSIDNFRRKPHEVQYVMDLMLEKIEGMIMEESIINAYDICVRFVGNLKLLSEPVKTAADKIMRATANNSKCVLLIAVCYTSTDEIVHAVEESSELNSNEVCNNQELEEANATGSSTVIQTENMESYSGIKLVDLEKNTYINPYPDVLIRTSGETRLSNYLLWQTTNCILYSPYALWPEIGLRHVVWSVINFQRHYSYLEKHKEYLK

SEQ ID NO: 2800 - DNA, 873 bp, Hevea brasiliensis
  CDS (1)..(873)
atggaattatacaacggtgagaggccaagtgtgttcagacttttagggaagtatatgagaaaagggttatatagcatcctaacccagggtcccatccctactcatattgccttcatattggatggaaacaggaggtttgctaagaagcataaactgccagaaggaggtggtcataaggctggatttttagctcttctgaacgtactaacttattgctatgagttaggagtgaaatatgcgactatctatgcctttagcatcgataattttcgaaggaaacctcatgaggttcagtacgtaatggatctaatgctggagaagattgaagggatgatcatggaagaaagtatcatcaatgcatatgatatttgcgtacgttttgtgggtaacctgaagcttttaagtgagccagtcaagaccgcagcagataagattatgagggctactgccaacaattccaaatgtgtgcttctcattgctgtatgctatacttcaactgatgagatcgtgcatgctgttgaagaatcctctgaattgaactccaatgaagtttgtaacaatcaagaattggaggaggcaaatgcaactggaagcggtactgtgattcaaattgagaacatggagtcgtattctggaataaaacttgtagaccttgagaaaaacacctacataaatccttatcctgatgttctgattcgaacttctggggagacccgtctgagcaactacttactttggcagactactaattgcatactgtattctcctcatgcactgtggccagagattggtcttcgacacgtggtgtgggcagtaattaactgccaacgtcattattcttacttggagaaacataaggaatacttaaaataa

SEQ ID NO: 2801 - protein, 290 aa, Hevea brasiliensis
MELYNGERPSVFRLLGKYMRKGLYSILTQGPIPTHIAFILDGNRRFAKKHKLPEGGGHKAGFLALLNVLTYCYELGVKYATIYAFSIDNFRRKPHEVQYVMDLMLEKIEGMIMEESIINAYDICVRFVGNLKLLSEPVKTAADKIMRATANNSKCVLLIAVCYTSTDEIVHAVEESSELNSNEVCNNQELEEANATGSGTVIQIENMESYSGIKLVDLEKNTYINPYPDVLIRTSGETRLSNYLLWQTTNCILYSPHALWPEIGLRHVVWAVINCQRHYSYLEKHKEYLK

SEQ ID NO: 2802 - DNA, 873 bp, Hevea brasiliensis
  CDS (1)..(873)
atggaattatacaacggtgagaggccaagtgtgttcagacttttagagaagtatatgagaaaagggttatatagcatcctaacccagggtcccatccctactcatattgccttcatattggatggaaacaggaggtttgctaagaagcataaactgccagaaggaggtggtcataaggctggatttttagctcttctgaacgtactaacttattgctatgagttaggagtgaaatatgcgactatctatgcctttagcatcgataattttcgaaggaaacctcatgaggttcagtacgtaatggatctaatgctggagaagattgaagggatgatcatggaagaaagtatcatcaatgcatatgatatttgcgtacgttttgtgggtaacctgaagcttttaagtgagccagtcaagaccgcagcagataagattatgagggctactgccaacaattccaaatgtgtgcttctcattgctgtatgctatacttcaactgatgagatcgtgcatgctgttgaagaatcctctgaattgaactccaatgaagtttgtaacaatcaagaattggaggaggcaaatgcaactggaagcagtactgtgattcaaactgagaacatggagtcgtattctggaataaaacttgtagaccttgagaaaaacacctacataaatccttatcctgatgttctgattcgaacttctggggagacccgtctgagcaactacttactttggcagactactaattgcatactgtattctccttatgcactgtggccagagattggtcttcgacacgtggtgtggtcagtaattaacttccaacgtcattattcttacttggagaaacataaggaatacttaaaataa

SEQ ID NO: 2803 - protein, 290 aa, Hevea brasiliensis
MELYNGERPSVFRLLEKYMRKGLYSILTQGPIPTHIAFILDGNRRFAKKHKLPEGGGHKAGFLALLNVLTYCYELGVKYATIYAFSIDNFRRKPHEVQYVMDLMLEKIEGMIMEESIINAYDICVRFVGNLKLLSEPVKTAADKIMRATANNSKCVLLIAVCYTSTDEIVHAVEESSELNSNEVCNNQELEEANATGSSTVIQTENMESYSGIKLVDLEKNTYINPYPDVLIRTSGETRLSNYLLWQTTNCILYSPYALWPEIGLRHVVWSVINFQRHYSYLEKHKEYLK

SEQ ID NO: 2804 - DNA, 873 bp, Hevea brasiliensis
  CDS (1)..(873)
atggaattatacaacggtgagaggccaagtgtgttcagacttttagggaagtatatgagaaaagggttatatagcatcctaacccagggtcccatccctactcatattgccttcatattggatggaaacaggaggtttgctaagaagcataaactgccagaaggaggtggtcataaggctggatttttagctcttctgaacgtactaacttattgctatgagttaggagtgaaatatgcgactatctatgcctttagcatcgataattttcgaaggaaacctcatgaggttcagtacgtaatggatctaatgctggagaagattgaagggatgatcatggaagaaagtatcatcaatgcatatgatatttgcgtacgttttgtgggtaacctgaagcttttaagtgagccagtcaagaccgcagcagataagattatgagggctactgccaacaattccaaatgtgtgcttctcattgctgtatgctatacttcaactgatgagatcgtgcatgctgttgaagaatcctctgaattgaactccaatgaagtttgtgccaatcaagaattggaggaggcaaatgcaactggaagcggtactgtgattcaaattgagaacatggagtcgtattctggaataaaacttgtagaccttgagaaaaacacctacataaatccttatcctgatgttctgattcgaacttctggggagacccgtctgagcaactacttactttggcagactactaattgcatacttgattctcctcatgcactgtggccagagattggtcttcgacacgtggtgtgggcagtaattaactgccaacgtcattattcttacttggagaaacataaggaatacttaaaataa

SEQ ID NO: 2805 - protein, 290 aa, Hevea brasiliensis
MELYNGERPSVFRLLGKYMRKGLYSILTQGPIPTHIAFILDGNRRFAKKHKLPEGGGHKAGFLALLNVLTYCYELGVKYATIYAFSIDNFRRKPHEVQYVMDLMLEKIEGMIMEESIINAYDICVRFVGNLKLLSEPVKTAADKIMRATANNSKCVLLIAVCYTSTDEIVHAVEESSELNSNEVCANQELEEANATGSGTVIQIENMESYSGIKLVDLEKNTYINPYPDVLIRTSGETRLSNYLLWQTTNCILDSPHALWPEIGLRHVVWAVINCQRHYSYLEKHKEYLK

SEQ ID NO: 2806 - DNA, 855 bp, Hevea brasiliensis
  CDS (1)..(855)
atggaattatacaacggtgagaggccaagtgtgttcagacttttagggaagtatatgagaaaagggttatatagcatcctaacccagggtcccatccctactcatattgccttcatattggatggaaacgggaggtttgctaagaagcataaactgccagaaggaggtggtcataaggctggatttttagctcttctgaacgtactaacttattgctatgagttaggagtgaaatatgcgactatctatgcctttagcatcgataattttcgaaggaaacctcatgaggttcagtacgtaatgaatctaatgctggagaagattgaagggatgatcatggaagaaagtatcatcaatgcatatgatatttgcgtgcgttttgttggtaatctgaagcttttagatgagccactcaagaccgcagcagataagataatgagggctactgccaaaaattccaaatttgtgcttctccttgctgtatgctacacttcaactgatgagatcgtgcatgctgttgaagaatcctctaaggataaattgaaatccgatgaaatttgcaacgatggaaacggagattgtgtgattaaaattgaggagatggagccatattctgaaataaaacttgtagagcttgagagaaacacttacataaatccttatcctgatgtcttgattcgaacttctggggagacccgtctgagcaactacctactttggcagactactaattgcatactgtattctcctcatgcactgtggccagagattggtcttcgacacgtggtgtgggcagtaattaactgccaacgtcattattcttacttggagaaacataaggaatacttaaaataa

SEQ ID NO: 2807 - protein, 284 aa, Hevea brasiliensis
MELYNGERPSVFRLLGKYMRKGLYSILTQGPIPTHIAFILDGNGRFAKKHKLPEGGGHKAGFLALLNVLTYCYELGVKYATIYAFSIDNFRRKPHEVQYVMNLMLEKIEGMIMEESIINAYDICVRFVGNLKLLDEPLKTAADKIMRATAKNSKFVLLLAVCYTSTDEIVHAVEESSKDKLKSDEICNDGNGDCVIKIEEMEPYSEIKLVELERNTYINPYPDVLIRTSGETRLSNYLLWQTTNCILYSPHALWPEIGLRHVVWAVINCQRHYSYLEKHKEYLK

SEQ ID NO: 2808 - DNA, 852 bp, Neurospora crassa
  CDS (1)..(852)
atgtctgatctctatctctcccgcatccgtaactggttcctcagttcgcccccggcagaatgggctatcaggggactccgcgagacccttatcggcgccttgaagcagggtcccgtccctcgccatgtggcttttgttatggacggcaatcggaggtatgcccggagccacaaaattgagactatcgagggccaccatctcggcttcgaggctcttgcgagggtcctcgagatatgctacaagtgcggtgtcgaggttgtgacagtgtacgctttcagtatcgagaacttcaaccgcccgaaatacgaggtcgatggcctgatgcagcttgccaaggtcaagctggagcaactgattcaacacggagaactactcgagcgatacggcgccagtgttcgcgtgctgggtgagcgtgatcttctgagcgatgatgtgctcgaggtgattgaccgagctgtttctacaactaagaacaacaaaaagtgcatcttgaacatttgcttcccatacacgtcacgagaggaaatgacgaccgccatccgttccacggacggctccaaccacgttaccatataccccaatgtcgaaaacatcacgaccgaaacgatcgacaaacacatgtacacggccgactgcccaccgctagacatctttgtgcggactagtggggtggagagattgagcgactttatgctgtggcagtgccaccaagatacccaaatgtttttcctcaagtgtttctggcccgagtttgacctgcgccatttcctccctgtcttgctggaatggcaatggcggcagaagaagaaggcgatggaggaggggcctcgacagcgggtcaaggcggcctga

SEQ ID NO: 2809 - protein, 283 aa, Neurospora crassa
MSDLYLSRIRNWFLSSPPAEWAIRGLRETLIGALKQGPVPRHVAFVMDGNRRYARSHKIETIEGHHLGFEALARVLEICYKCGVEVVTVYAFSIENFNRPKYEVDGLMQLAKVKLEQLIQHGELLERYGASVRVLGERDLLSDDVLEVIDRAVSTTKNNKKCILNICFPYTSREEMTTAIRSTDGSNHVTIYPNVENITTETIDKHMYTADCPPLDIFVRTSGVERLSDFMLWQCHQDTQMFFLKCFWPEFDLRHFLPVLLEWQWRQKKKAMEEGPRQRVKAA

SEQ ID NO: 2810 - DNA, 855 bp, Hevea brasiliensis
  CDS (1)..(855)
atggaattatacaacggtgagaggccaagtgtgttcagacttttagggaagtatatgagaaaagggttatatagcatcctaacccagggtcccatccctactcatattgccttcatattggatggaaacaggaggtttgctaagaagcataaactgccagaaggaggtggtcataaggctggatttttagctcttctgaacgtactaacttattgctatgagttaggagtgaaatatgcgactatctatgcctttagcatcgataattttcgaaggaaacctcatgaggttcagtacgtaatggatctaatgctggagaagattgaagggatgatcatggaagaaagtatcatcaatgcatatgatatttgcgtacgttttgtgggtaacctgaagcttttaagtgagccagtcaagaccgcagcagataagattatgagggctactgccaacaattccaaatttgtgcttctccttgctgtatgctacacttcaactgatgagatcgtgcatgctgttgaagaatcctctaaggataaattgaaatccaatgaaatttgcaacgatggaaacggagattgtgtgattaaaattgaggagatggagccatattctgaaataaaacttgtagagcttgagagaaacacttacataaatccttatcctgatgtcttgattcgaacttctggggagacccgtctgagcaactacctactttggcagactactaattgcatactgtattctcctcatgcactgtggccagagattggtctccgacacgtggtgtggtcagtaattaacttccagcgtcattattcttacttagagaagcataaggaatacttaaaataa

SEQ ID NO: 2811 - protein, 284 aa, Hevea brasiliensis
MELYNGERPSVFRLLGKYMRKGLYSILTQGPIPTHIAFILDGNRRFAKKHKLPEGGGHKAGFLALLNVLTYCYELGVKYATIYAFSIDNFRRKPHEVQYVMDLMLEKIEGMIMEESIINAYDICVRFVGNLKLLSEPVKTAADKIMRATANNSKFVLLLAVCYTSTDEIVHAVEESSKDKLKSNEICNDGNGDCVIKIEEMEPYSEIKLVELERNTYINPYPDVLIRTSGETRLSNYLLWQTTNCILYSPHALWPEIGLRHVVWSVINFQRHYSYLEKHKEYLK

SEQ ID NO: 2812 - DNA, 873 bp, Hevea brasiliensis
  CDS (1)..(873)
atggaattatacaacggtgagaggccaagtgtgttcagacttttagggaagtatatgagaaaagggttatatagcatcctaacccagggtcccatccctactcatattgccttcatattggatggaaacaggaggtttgctaagaagcataaactgccagaaggaggtggtcataaggctggatttttagctcttctgaacgtactaacttattgctatgagttaggagtgaaatatgcgactatctatgcctttagcatcgataattttcgaaggaaacctcatgaggttcagtacgtaatggatctaatgctggagaagattgaagggatgatcatggaagaaagtatcatcaatgcatatgatatttgcgtacgttttgtgggtaacctgaagcttttaagtgagccagtcaagaccgcagcagataagattatgagggctactgccaacaattccaaatgtgtgcttctcattgctgtatgctatacttcaactgatgagatcgtgcatgctgttgaagaatcctctgaattgaactccaatgaagtttgtaacaatcaagaattggaggaggcaaatgcaactggaagcggtactgtgattcaaattgagaacatggagtcgtattctggaataaaacttgtagaccttgagaaaaacacctacataaatccttatcctgatgttctgattcgaacttctggggagacccgtctgagcaactacttactttggcagactactaattgcatactgtattctcctcatgcactgtggccagagattggtcttcgacacgtggtgtgggcagtaattaacttccaacgtcattattcttacttggagaaacataaggaatacttaaaataa

SEQ ID NO: 2813 - protein, 290 aa, Hevea brasiliensis
MELYNGERPSVFRLLGKYMRKGLYSILTQGPIPTHIAFILDGNRRFAKKHKLPEGGGHKAGFLALLNVLTYCYELGVKYATIYAFSIDNFRRKPHEVQYVMDLMLEKIEGMIMEESIINAYDICVRFVGNLKLLSEPVKTAADKIMRATANNSKCVLLIAVCYTSTDEIVHAVEESSELNSNEVCNNQELEEANATGSGTVIQIENMESYSGIKLVDLEKNTYINPYPDVLIRTSGETRLSNYLLWQTTNCILYSPHALWPEIGLRHVVWAVINFQRHYSYLEKHKEYLK

SEQ ID NO: 2814 - DNA, 1695 bp, Streptomyces coelicolor
  CDS (1)..(1695): transl_table=11
gtggttcgcgactggagcgcctgtgggtcgttattgctggtgatgactgtggcgaaagacaggggtggtccggcagtggctgggagcggtggtggtgtggagtcgcccgagttgcgtgctgcgtacgaggtgtgtgaggccgaggcccggcagttcgctgtggagttgtgggcggcggctgagacgctgcccgtggagacgaggccgtccttgtacgcgattgccagttggtctgcgtacacggaccggatcatcgatgagggcccgctggagggccgtgaggagcggctcgcacagtggtcggccgacactctggccgatctgcgcgccgggcacagctcgcatccgctgcgcagggccctggtggacacggtgcgcaggtggggtctggctgaggcgctgatcgaggagcacctggactcggcgcgcgccgattgtgcggctgttccggtgttcgagaccttcaaggatcagcggcgctatctgcgggggtgttcgggggctctggcggagctgtgggtgcccctgttggagccgcgtgggccggaggcgttccggctgatgtcggtgctgggcgaggcgtgccaggtggcggatctgttcgaggatctgccggatgatctcgcggccggccgctgctacctgccccggcaggacctgcgcggactggggttggacgtcgatgaccttcgacgcggtgagcgggaggaggcattgaatgcgttcgtggacgcgcagcttgcgcactggcgtgggctgcttgaggagactgtcctggccccctcgacggtgggagcccgataccagatcttcgtgcatacgttgctgctcggcgcgcagatgcactttgacgaggtgacgctgctgcggtcccgggtgctgacacaggggctggagtcgttggtgacgggggacggccggatgtcccgccgtgcggcccggccgggcccggggccggtacccgggcacatcgcggtgatcgcggacggcaatcggcgctgggccgaggcgcgcggtctgctggcggaccaggggcaccgtgcgggtatccgcgcggtgttgagactggtcaatgcggcgcagcggacgggcattcggcatgtgaccgtgtacatgttctccacggagaactggtatcgctcgcagggcgaagtggcggccctgttcggtgcttttgccgactggttcgcccggggtgcgcagacggtgcacgagctgggtgtgagggtgcgctggagcgggcgccgggaccggctcgaggagtcgctcgcgtcctcgttcgagctgctggagagcatgacggcgaacaatgacaagctcaccctcaccatctgcctcgactacggcggccgggaggaactggccgccgccgcccgcgcgctggccgccgaggcggtggcgggaacgatccgccccgagcagatcgggatggccgaggttgcccggcatctgtacgtgccggagatgcccgacgtcgacctgctggtccgcacctgcgaacagcggatcagcaacttcctgccctggcatctcgcctacgcggagctcgtgttcgaccctgcgccctggcccgacttcgacctggcccggctgcgggatgccgtggacagctacgcgggccgcgagcgccgtttcggcggggatgccgagctgcctgctcaggccggcaacctggagccggcccggaacggatga

SEQ ID NO: 2815 - protein, 564 aa, Streptomyces coelicolor
MVRDWSACGSLLLVMTVAKDRGGPAVAGSGGGVESPELRAAYEVCEAEARQFAVELWAAAETLPVETRPSLYAIASWSAYTDRIIDEGPLEGREERLAQWSADTLADLRAGHSSHPLRRALVDTVRRWGLAEALIEEHLDSARADCAAVPVFETFKDQRRYLRGCSGALAELWVPLLEPRGPEAFRLMSVLGEACQVADLFEDLPDDLAAGRCYLPRQDLRGLGLDVDDLRRGEREEALNAFVDAQLAHWRGLLEETVLAPSTVGARYQIFVHTLLLGAQMHFDEVTLLRSRVLTQGLESLVTGDGRMSRRAARPGPGPVPGHIAVIADGNRRWAEARGLLADQGHRAGIRAVLRLVNAAQRTGIRHVTVYMFSTENWYRSQGEVAALFGAFADWFARGAQTVHELGVRVRWSGRRDRLEESLASSFELLESMTANNDKLTLTICLDYGGREELAAAARALAAEAVAGTIRPEQIGMAEVARHLYVPEMPDVDLLVRTCEQRISNFLPWHLAYAELVFDPAPWPDFDLARLRDAVDSYAGRERRFGGDAELPAQAGNLEPARNG

SEQ ID NO: 2816 - DNA, 912 bp, Arabidopsis thaliana
  CDS (1)..(912)
atgttgtctcttctttcttctgattcttctctattatcactcctctttctctttctcatcccttgtctctttatcacaagctatataggcttccctgtgttcttgctaaaactcatcggactcatcaaaatcaaagctgctcgagacaacgagaaacgtgatgagggaacttatgttgtccgcgaggatgggttacaaagagaactaatgccgagacacgtggcattcatactggatgggaaccggagatgggccaaacgggccggattgacgacgtcacaaggccacgaggcgggagctaaacggcttatagatatcgccgagctctgcttcgagttgggggttcatacagtctcagcttttgctttctccacagagaattggggaagagacaagattgagattgataacttgatgtctttgatccaacactaccgcaataagtccaacatcaaattcttccacagatcggaagttcgcgtttctgttatcgggaataaaacgaagatccctgaatctctcctcaaagaaatccatgagatagaggaagctaccaaaggctacaagaataaacatctcatcatggcagtagattacagcgggaaatttgatatcatgcatgcttgcaagagtcttgtgaagaaatcagaaaaagggttgatccgagaggaagatgtagacgaggcattgatcgagagagagcttttgacaaattgtagtgacttcccaagtcctgatttaatgattaggacaagtggagaacagaggattagtaacttcttcttgtggcaacttgcttattccgagcttttcttctcgccggtattttggcctgatttcgataaggataagcttctagaggctcttgcttcgtatcagcgtagggaaagacgatttggttgtcgggtttga

SEQ ID NO: 2817 - protein, 303 aa, Arabidopsis thaliana
MLSLLSSDSSLLSLLFLFLIPCLFITSYIGFPVFLLKLIGLIKIKAARDNEKRDEGTYVVREDGLQRELMPRHVAFILDGNRRWAKRAGLTTSQGHEAGAKRLIDIAELCFELGVHTVSAFAFSTENWGRDKIEIDNLMSLIQHYRNKSNIKFFHRSEVRVSVIGNKTKIPESLLKEIHEIEEATKGYKNKHLIMAVDYSGKFDIMHACKSLVKKSEKGLIREEDVDEALIERELLTNCSDFPSPDLMIRTSGEQRISNFFLWQLAYSELFFSPVFWPDFDKDKLLEALASYQRRERRFGCRV

SEQ ID NO: 2818 - DNA, 933 bp, Arabidopsis thaliana
  CDS (1)..(933)
atgttatctctacgagttcctactcccacttccttcgatttccggcgatatcaagccggagatttagagcggcgatggcggttaagtagagatagctttctctctttctcgccaaaattcgaggaaaacagaggattccgattcggagtcaaatcttccaaatcggatgtttcgtttacggcggcggaggaagaagaaactctgccggaagagctacatgcagagctgatgccgaaacatgtggcgattataatggacggaaacggaagatgggcgaagaatcgtggtcttcaaccttgggatggtcacagagctggcgttgaagctttgaaagagatcgttgagctttgtggtaaatggggaattcaagtccttacagttttcgctttctctactgataattggattagaccaagaattgagattgatttcttgtttagtttatttgagagatcactcaaaacagaatttcagaacttagccaagaacaatgttcggatatcgatcattggagattcctcgaaacttccgaaatctcttttaagagtgattaacgaagttgaggaagttacaaagaacaacacgaggcttcagctaatcgtagcggttggttacagtgggaaatacgatgttttacaagcgtgtagaggtatcgcgaggagagtgaaagatggcgaaatcgaagttgaggagatagacgagagactgattgaggaagaattggagacgaattgtactgagtttccttacccggatttacttataagaacgagtggtgagcttagagtgagtaacttcttgttgtggcaattggcttatacagagcttttctttgctcaagaactttggcctgattttgggagaagcggttttatcgaagctttgatgtcgtttcagcagagacaacgacgctttggtggtcgtaaatcttga

SEQ ID NO: 2819 - protein, 310 aa, Arabidopsis thaliana
MLSLRVPTPTSFDFRRYQAGDLERRWRLSRDSFLSFSPKFEENRGFRFGVKSSKSDVSFTAAEEEETLPEELHAELMPKHVAIIMDGNGRWAKNRGLQPWDGHRAGVEALKEIVELCGKWGIQVLTVFAFSTDNWIRPRIEIDFLFSLFERSLKTEFQNLAKNNVRISIIGDSSKLPKSLLRVINEVEEVTKNNTRLQLIVAVGYSGKYDVLQACRGIARRVKDGEIEVEEIDERLIEEELETNCTEFPYPDLLIRTSGELRVSNFLLWQLAYTELFFAQELWPDFGRSGFIEALMSFQQRQRRFGGRKS

SEQ ID NO: 2820 - DNA, 909 bp, Arabidopsis thaliana
  CDS (1)..(909)
atgttgtctattctctcttctcttttatctctcctttttctgtttatcatctcttgtttcttcatcacaagccatttttggttccctctttccttgccaaaaatactcggattcatcaaaatcacatcttcgagagacgattatgacaacgagcaacgtgacgagggaacttatgtggtaggagtggaggagctacaaagagagctgatgccaagacatgtggcagtgataatggacggaaaccggagatgggccaaacgggccggattgctgacgtcacaaggccacgaggccggagctaaacggcttatagagttctccgagctttgctttaaattggggattcatacagtttcagcttttgccttctccacagagaattggggaagacacaagattgaggttaagtgcttgatgtctttgatccaacattacctcaagtccaagatccaatatttccaaagagaggaaactcgagtttctgttatcgggaacctaacgaagatccctgagtctctcctccgaacagtccaagagatagaggaagctacgagaagctataagaagaagcatctcatattggcaatagattacagcgggagattagacatcttgcgagcttgcaagagtattgtgaagaaatcagaaaaagggttgatccgagaggaagatgtagacgaggcattgatcgaaagagagcttctgacaaattgtactgagttcccaagtcctgatctattgattaggacaagtggagaacagaggattagtaacttcttcttgtggcaacttgcttatacagagctcttcttctcgccggtcctttggcctgatttcgataaggataagcttctagaggccctggtttcgtatcagcgccgggaaagacgatttggctgtcgggtttga

SEQ ID NO: 2821 - protein, 302 aa, Arabidopsis thaliana
MLSILSSLLSLLFLFIISCFFITSHFWFPLSLPKILGFIKITSSRDDYDNEQRDEGTYVVGVEELQRELMPRHVAVIMDGNRRWAKRAGLLTSQGHEAGAKRLIEFSELCFKLGIHTVSAFAFSTENWGRHKIEVKCLMSLIQHYLKSKIQYFQREETRVSVIGNLTKIPESLLRTVQEIEEATRSYKKKHLILAIDYSGRLDILRACKSIVKKSEKGLIREEDVDEALIERELLTNCTEFPSPDLLIRTSGEQRISNFFLWQLAYTELFFSPVLWPDFDKDKLLEALVSYQRRERRFGCRV

SEQ ID NO: 2822 - DNA, 870 bp, Arabidopsis thaliana
  CDS (1)..(870)
atgttgtctatgctctggttccttctatctcttctctctcttcttctacttccttgtctccgaccttgctttcctgctaaaggatctctgaaaaacaaaaagaagattgacaagggaacttatgtggtcggagaggaggagacacctaaagagcttcagagagagctgatgccgagacacgtggcagtgataatggacggaaaccggagatgggctaaacagaccggattgttgacgtcacaaggctacgaggctggagctaaacggcttctcgagttcgctgacctctgcttcaaactagggataaatactgtctcagcttttgctttctccactgagaattggggaagacacaagattgaagtcaaatgcttgatgtatttgttccaacgttacctcaagtcaaagatccaatttttccagagcaaggaaatccgagtttctgttatcgggaatcttgcgaagatccctgagtctctcctccgaacagttcacgagttagaggaagctacaaagagttacaagaagaagcatctcatcttggccatagattacagcgggagattcgacatcttgggtgcttgcaagaacattgtgaagaaatcagaacaaggtttgatccgagaggaagacgtggacgagacgttgttcgagagagagcttcagactcggtgtaccgagttcccaagtcctgatctcttgattaggactagtggggaacagaggattagtaacttcttcttgtggcagctcgcttataccgagtttttcttttcgcctgtactttggcctgatttcgataagcagaagtttatagaggccctggtttcgtatcagcgcagggatagacgatttggctcccggctttga

SEQ ID NO: 2823 - protein, 289 aa, Arabidopsis thaliana
MLSMLWFLLSLLSLLLLPCLRPCFPAKGSLKNKKKIDKGTYVVGEEETPKELQRELMPRHVAVIMDGNRRWAKQTGLLTSQGYEAGAKRLLEFADLCFKLGINTVSAFAFSTENWGRHKIEVKCLMYLFQRYLKSKIQFFQSKEIRVSVIGNLAKIPESLLRTVHELEEATKSYKKKHLILAIDYSGRFDILGACKNIVKKSEQGLIREEDVDETLFERELQTRCTEFPSPDLLIRTSGEQRISNFFLWQLAYTEFFFSPVLWPDFDKQKFIEALVSYQRRDRRFGSRL

SEQ ID NO: 2824 - DNA, 909 bp, Arabidopsis thaliana
  CDS (1)..(909)
atgttgtctttattctctgttgtttttacttttctagctctttttctcatccctggtctcttcatctctcggcgactaaatgttcctttgtcgttgacaaatatcctcagattcatcaaaatcatagcttctaaatacgatgatgaggaagaaaggaacgagaaacgtggtacaatgggagagaaacagaaacgagggagaaatataatgccaaagcatgtggcggttatattggacggaaacagacgttgggctgaaaaacgaggactcgggacatcggaaggccacgaggccggagcgagaaggctcatggagaatgctaaggattgtttcgctatggggacaaacactatctcactctttgctttctccaccgaaaattgggaaagaccagaggatgaagttaagtgcttgatggccttgtttgagaaatacttagcgtctgatatgccttacctccgaagtgataagatcaagatctcggttatcgggaaccgtacaaaactccccgagtcgcttctaggtttgatagaagaggtagaggaagctacaaagagttacgaagggaagaatctcattatagcaatagactatagtggaagatatgatatcttacaagcatgcaaaagtcttgcaaataaagtgaaagacgggctgattcaagtggaggacattaacgagaaggcgatggagaaagagttgttgacaaagtgtagcgaattcccaaaccctgacctgttgatcagaacaagcggagagcaaaggatcagtaacttctttttatggcaatctgcttacactgagctttactttccaactgttttgtggcctgattttggcgaagctgagtatcttgaggccttgacttggtatcagcaaaggcagaggcgattcggtcgacgagtttaa

SEQ ID NO: 2825 - protein, 302 aa, Arabidopsis thaliana
MLSLFSVVFTFLALFLIPGLFISRRLNVPLSLTNILRFIKIIASKYDDEEERNEKRGTMGEKQKRGRNIMPKHVAVILDGNRRWAEKRGLGTSEGHEAGARRLMENAKDCFAMGTNTISLFAFSTENWERPEDEVKCLMALFEKYLASDMPYLRSDKIKISVIGNRTKLPESLLGLIEEVEEATKSYEGKNLIIAIDYSGRYDILQACKSLANKVKDGLIQVEDINEKAMEKELLTKCSEFPNPDLLIRTSGEQRISNFFLWQSAYTELYFPTVLWPDFGEAEYLEALTWYQQRQRRFGRRV

SEQ ID NO: 2826 - DNA, 888 bp, Arabidopsis thaliana
  CDS (1)..(888)
atggctgaacttcctggtcaaataagacatataggcggtcgaatgagtcaactgctagagcagatatatgggttttcgagaagatctttgtttcgggtcatatctatgggtcctataccttgtcatattgcctttatcatggatggaaatcggagatatgcaaagaagtgtggtcttttagatgggtctggtcacaaagcggggttttctgcgcttatgtcgatgctgcaatactgctacgagctgggtatcaagtatgtaacgatatacgcatttagcatagataattttagaagaaaacctgaggaggttgagtctgtaatggatttgatgctggaaaagataaagtctttgcttgaaaaagagagtattgtgcatcagtatgggattcgggtctattttatcggtaacttagcgcttctaaatgaccaagtgagagctgctgcagaaaaagtcatgaaagccacagctaagaatagtcgggtagtgcttctcatttgcattgcctataactcgacagatgagatcgtacaagctgtcaagaaatcttgtattaacaagtcagacaatattgaagcatctaattataaacacgaggatagcgatagtgatatagaaggaacagatatggagaaccaagagaagaagatacagttggtggatattgaggagaatatgcagatgagcgtggcgccgaatcctgatatactcatcaggagttcaggagagacgaggctgagcaattttctcttatggcaaacaggtaatacccagctctgctctccggctgctctgtggcctgagattggtttgaggcatctgctctgggctatattgaacttccaaagaaatcattcatacttggaaaagaggaagaaacaattatga

SEQ ID NO: 2827 - protein, 295 aa, Arabidopsis thaliana
MAELPGQIRHIGGRMSQLLEQIYGFSRRSLFRVISMGPIPCHIAFIMDGNRRYAKKCGLLDGSGHKAGFSALMSMLQYCYELGIKYVTIYAFSIDNFRRKPEEVESVMDLMLEKIKSLLEKESIVHQYGIRVYFIGNLALLNDQVRAAAEKVMKATAKNSRVVLLICIAYNSTDEIVQAVKKSCINKSDNIEASNYKHEDSDSDIEGTDMENQEKKIQLVDIEENMQMSVAPNPDILIRSSGETRLSNFLLWQTGNTQLCSPAALWPEIGLRHLLWAILNFQRNHSYLEKRKKQL

SEQ ID NO: 2828 - DNA, 816 bp, Arabidopsis thaliana
  CDS (1)..(816)
atgaataccctagaagaagtagatgaatccactcatatcttcaacgctttgatgagtctaatgaggaaatttttgttcagagttctatgcgtcggtccaatccctactaacatttcattcatcatggatggaaaccgcaggttcgctaagaaacacaatcttataggcctagatgcaggacatagagctggtttcatatccgtgaaatatattcttcaatactgcaaagagattggtgtaccgtacgtcacactccacgcgtttggtatggataatttcaagagaggacctgaagaagtcaagtgtgtgatggatctaatgcttgagaaagtcgagctcgcgatcgatcaagctgtatcagggaatatgaacggcgtgagaataatctttgccggtgatttggattcgttaaacgagcattttagagctgcgacaaagaaactgatggagcttacggaggagaatagagatctgattgtggtggtttgcgttgcttacagcacaagtctcgagattgttcacgctgttcgaaaatcttgtgttagaaaatgtacgaatggagatgatcttgtacttttggagttgagtgatgttgaagagtgtatgtatacatcgattgtgccggttccggatcttgtgataagaaccggaggaggagatcggctgagtaacttcatgacgtggcaaacttcgaggtctcttcttcacagaacggaggctctttggccggagttagggctctggcatttggtttgggcaattcttaaattccaaagaatgcaagattacttgacgaagaagaaaaagctcgattag

SEQ ID NO: 2829 - protein, 271 aa, Arabidopsis thaliana
MNTLEEVDESTHIFNALMSLMRKFLFRVLCVGPIPTNISFIMDGNRRFAKKHNLIGLDAGHRAGFISVKYILQYCKEIGVPYVTLHAFGMDNFKRGPEEVKCVMDLMLEKVELAIDQAVSGNMNGVRIIFAGDLDSLNEHFRAATKKLMELTEENRDLIVVVCVAYSTSLEIVHAVRKSCVRKCTNGDDLVLLELSDVEECMYTSIVPVPDLVIRTGGGDRLSNFMTWQTSRSLLHRTEALWPELGLWHLVWAILKFQRMQDYLTKKKKLD

SEQ ID NO: 2830 - DNA, 1002 bp, Homo sapiens
  CDS (1)..(1002)
atgtcatggatcaaggaaggagagctgtcactttgggagcggttctgtgccaacatcataaaggcaggcccaatgccgaaacacattgcattcataatggacgggaaccgtcgctatgccaagaagtgccaggtggagcggcaggaaggccactcacagggcttcaacaagctagctgagactctgcggtggtgtttgaacctgggcatcctagaggtgacagtctacgcattcagcattgagaacttcaaacgctccaagagtgaggtagacgggcttatggatctggcccggcagaagttcagccgcttgatggaagaaaaggagaaactgcagaagcatggggtgtgtatccgggtcctgggcgatctgcacttgttgcccttggatctccaggagctgattgcacaagctgtacaggccacgaagaactacaacaagtgtttcctgaatgtctgttttgcatacacatcccgtcatgagatcagcaatgctgtgagagagatggcctggggggtggagcaaggcctgttggatcccagtgatatctctgagtctctgcttgataagtgcctctataccaaccgctctcctcatcctgacatcttgatacggacttctggagaagtgcggctgagtgacttcttgctatggcagacctctcactcctgcctggtgttccaacccgttctgtggccagagtatacattttggaacctcttcgaggccatcctgcagttccagatgaaccatagcatgcttcagaaggcccgagacatgtatgcagaggagcggaagaggcagcagctggagagggaccaggctacagtgacagagcagctgctgcgagaggggctccaagccagtggggacgcccagctccgaaggacacgcttgcacaaactctcggccagacgggaagagcgagtccaaggcttcctgcaggccttggaactcaagcgagctgactggctggcccgtctgggcactgcatcagcctga

SEQ ID NO: 2831 - protein, 333 aa, Homo sapiens [sequence omitted]

SEQ ID NO: 2832 - DNA, 1002 bp, Mus musculus
  CDS (1)..(1002)
atgtcatggatcaaagaaggagagctgtcactgtgggaacggttctgtgctaacatcataaaggctggcccagtacccaaacatatcgcgttcataatggacggcaaccgtcgctatgccaagaagtgtcaggtggagcgccaggagggccacacacagggcttcaataagcttgctgagactctccgctggtgtttgaacctgggcatcctagaagtgactgtctacgcattcagcattgagaacttcaaacgttccaagagtgaggttgacggactcctggatctagccagacagaagttcagctgcttgatggaagaacaggagaagttgcagaagcacggggtgtgcatccgcgtcctgggtgatctgcatctgctgcccttggacctccaggagaagattgcgcatgccatccaggctactaagaactacaataagtgtttcctcaatgtctgctttgcatacacatcacgtcatgagattgccaatgctgtgagagagatggcctggggcgtggaacaaggtctgctggaacccagtgatgtctccgagtctctgctcgataagtgcctctatagcaaccactctcctcatcccgacatcctgatccggacttctggggaggtgcggctgagtgacttcttgctctggcagacgtcccattcctgcctcgtgttccagcctgtcctgtggccagaatacacattttggaacctgtgtgaggcaattctgcagtttcagaggaaccatggtgcacttcagaaggcccgagacatgtacgctgaggagcggaagaggcgccagctggagagggaccaggccgcagtgacagagcagctgcttcgagaggggctccaggccagtggggatgcccaactccgacggacacgcttgcacaaactctccaccaaacgggaagagcgagtccaaggcttcctgaaggccttggaacttaaacgggccaactggctggcactttggggcactgcatctgcctaa

SEQ ID NO: 2833 - protein, 333 aa, Mus musculus
MSWIKEGELSLWERFCANIIKAGPVPKHIAFIMDGNRRYAKKCQVERQEGHTQGFNKLAETLRWCLNLGILEVTVYAFSIENFKRSKSEVDGLLDLARQKFSCLMEEQEKLQKHGVCIRVLGDLHLLPLDLQEKIAHAIQATKNYNKCFLNVCFAYTSRHEIANAVREMAWGVEQGLLEPSDVSESLLDKCLYSNHSPHPDILIRTSGEVRLSDFLLWQTSHSCLVFQPVLWPEYTFWNLCEAILQFQRNHGALQKARDMYAEERKRRQLERDQAAVTEQLLREGLQASGDAQLRRTRLHKLSTKREERVQGFLKALELKRANWLALWGTASA

SEQ ID NO: 2834 - DNA, 1032 bp, Saccharomyces cerevisiae
  CDS (1)..(1032)
atgaaaatgcccagtattattcagattcagtttgtagccctaaaaaggcttttggtagaaaccaaagaacagatgtgcttcgcagtgaaaagtatatttcagagagtatttgcgtgggttatgtcattaagcttgttttcatggttttatgtaaatcttcagaatattttgataaaagcattaagggtagggccagtgcctgaacatgtctcctttatcatggatggtaaccggagatatgccaagtcaagaaggctaccagtaaaaaaaggccatgaagctggtgggttaacgttactaacactactgtatatctgcaaaagattgggtgtaaaatgtgtttccgcctatgcattttctattgaaaattttaatagaccaaaagaagaagtagatacgctaatgaatttgtttacggtaaagcttgatgaattcgcaaaaagagccaaggactataaggatcccttatacggatctaaaataagaatagtaggtgatcaatctttactatctccagaaatgagaaaaaaaattaaaaaagtggaagaaatcacacaggatggagacgatttcactttatttatatgttttccttacacttcaagaaatgatatgttacatactattcgtgattcagttgaagaccatttggaaaataaatcaccaaggattaatataagaaaatttactaataaaatgtacatgggtttccattccaataaatgtgaattattaatcagaacaagtgggcataggaggctctcagactatatgctatggcaagtacatgaaaatgccaccattgaatttagtgatacgttgtggccaaattttagcttctttgctatgtacctgatgattctcaaatggtccttcttttccaccattcaaaaatataatgagaagaatcactcattgtttgaaaaaatacatgaaagcgttccttcaatatttaaaaaaaagaaaacagctatgtctttgtacaactttccaaacccccccatttcagtttcggttacaggagatgaataa

SEQ ID NO: 2835 - protein, 343 aa, Saccharomyces cerevisiae
MKMPSIIQIQFVALKRLLVETKEQMCFAVKSIFQRVFAWVMSLSLFSWFYVNLQNILIKALRVGPVPEHVSFIMDGNRRYAKSRRLPVKKGHEAGGLTLLTLLYICKRLGVKCVSAYAFSIENFNRPKEEVDTLMNLFTVKLDEFAKRAKDYKDPLYGSKIRIVGDQSLLSPEMRKKIKKVEEITQDGDDFTLFICFPYTSRNDMLHTIRDSVEDHLENKSPRINIRKFTNKMYMGFHSNKCELLIRTSGHRRLSDYMLWQVHENATIEFSDTLWPNFSFFAMYLMILKWSFFSTIQKYNEKNHSLFEKIHESVPSIFKKKKTAMSLYNFPNPPISVSVTGDE

SEQ ID NO: 2836 - DNA, 750 bp, Anabaena sp
  CDS (1)..(750): transl_table=11
atgacaatacaacaaactgaactgcaagaattgcccctggatttaaaacgagaactactgcccaaacacgttgcagtaattatggatggcaatggtcgatgggctaaacgtcaaggtctaccccgaattatgggtcataagcgaggagtagatgccctcaaggatttactacgttgctgtagagactgggggattcaggcgctgactgcttatgctttttccacagagaactggaaaagaccacaggaagaagtagagtttctgatgactctgtttcaaagagttttacgtcaagaactgcgggaaatggtcgaagagaatgtgcagattcagtttgtaggaaatttaacagctttgccgcgatcgctgcaagcggaaatttcccgctctatggaagaaactaaaaataatcgcggtattcggttttctgtcgccaccaattatggaggaaggcaggagattttacaagcttgccgggcgatcgcccaaaaagttcagcaaggtctactacaaccagatgaaattaacgaagaagtatttgaacgccacttatacacagccggaatttccgacccagacttattaatccgtaccagtggcgaaatgcgcctctcaaatttcttactatggcaaatggcttatggggaaatctatattactgatactctctggccagattttgaccgtacagagtttcatcgcgccttatgtgcatatcagcaaagagaacggcgatttgggaaagtttag

SEQ ID NO: 2837 - protein, 249 aa, Anabaena sp
MTIQQTELQELPLDLKRELLPKHVAVIMDGNGRWAKRQGLPRIMGHKRGVDALKDLLRCCRDWGIQALTAYAFSTENWKRPQEEVEFLMTLFQRVLRQELREMVEENVQIQFVGNLTALPRSLQAEISRSMEETKNNRGIRFSVATNYGGRQEILQACRAIAQKVQQGLLQPDEINEEVFERHLYTAGISDPDLLIRTSGEMRLSNFLLWQMAYGEIYITDTLWPDFDRTEFHRALCAYQQRERRFGKV

SEQ ID NO: 2838 - DNA, 741 bp, Bradyrhizobium japonicum
  CDS (1)..(741): transl_table=11
atgcaaagtgacatgacctctcgcagcgagaagcttcacgtcggcatcatcatggacggcaacggcagatgggcgacgcggcgcggcctgtcgcggctgcgcggccacgaggccggcgtcgagacgatccgccgcatcgtcgaggcggcgcccaagcagggcatcggcacgctgacgctctatgcgttctcgaccgacaattggcgaaggccgaaggccgaggtcgcagcgctgatgaccctgctgcgcttctatctcgccaacgaggtgcagagcctggtgaagaacggggtgcgtctcaccgtgatcggccgccgcgaccggctgcctgacggcatcgcgaatgcgatcgcgcgggccgaagcggccaccgcccacggcagcacgcttcacctgcgcatcgccgtcgattattccgcgcgcgatgccatcctcaacgcggcggcgaaggcggcggcgctgaccagcctcacccgcgaagcgttctcgcagctcgtcaccggcgaggccggtttgcgcgacgtcgatctcatcatccgcacctcgggcgagaagcggctgtcggacttcctgctgtgggaaggcgcctatgccgagctgcacttcaccgagcggatgtggccggaattcgatgcgggcgatctcgccgaggcgctcgccgcgttccacggccgtgagcggcgcttcggcggcctccaggcgatcatgcccgaggaggtgccgtcactctcgcgggtatga

SEQ ID NO: 2839 - protein, 246 aa, Bradyrhizobium japonicum
MQSDMTSRSEKLHVGIIMDGNGRWATRRGLSRLRGHEAGVETIRRIVEAAPKQGIGTLTLYAFSTDNWRRPKAEVAALMTLLRFYLANEVQSLVKNGVRLTVIGRRDRLPDGIANAIARAEAATAHGSTLHLRIAVDYSARDAILNAAAKAAALTSLTREAFSQLVTGEAGLRDVDLIIRTSGEKRLSDFLLWEGAYAELHFTERMWPEFDAGDLAEALAAFHGRERRFGGLQAIMPEEVPSLSRV

SEQ ID NO: 2840 - DNA, 798 bp, Corynebacterium diphtheriae
  CDS (1)..(798): transl_table=11
atgcgcacactaaaaaagttctctctccgcgaccttgcttataacgctgcatatcctttctacgagaaacgactgatgcgagaaattcaaggggtgcggcagcctgagcacgttgccatcatgtgtgatggcaatcgccggtgggctcgtgaggccggatttgccgatgttacccatgggcatcgcgtaggtgctaagaaaattggcgaaatggtgcggtggtgtgcgcatactgatgttgaactcgtaaccgtctacctgctatcgacggaaaacctaggtcgagcctccgacgaactacaaatgttgttcgacatcattggcgacgtcgtagatgagctcgcctccccagaaaccaattgtcgtctgcggcttgtcggacaccttgatttactgcctgacgacgtctcccggcgtctcacccaagcccaagacagcaccaacgacaacaccggagtcttcgtcaacgttgccgttggctatggcggccgccaagaaatcgtcgatgcggtgcgcgagcttatcgacgccgaagctgcagcaggaacaacagctacagaaatggccgagaaaatctccgtcgattccatttccaagcatctgtatacatcgggtcaaccagacccagatcttgtgattcgtacctcaggcgaacaacgcctctctggctttttgttgtggcaggctgcgtattcagaaatctggttcaccgatacctactggccagctttccgacgcgttgattttttgcgagcattgcgagaatactcaaagcgaagccgacgcttcggtaaataa

SEQ ID NO: 2841 - protein, 265 aa, Corynebacterium diphtheriae
MRTLKKFSLRDLAYNAAYPFYEKRLMREIQGVRQPEHVAIMCDGNRRWAREAGFADVTHGHRVGAKKIGEMVRWCAHTDVELVTVYLLSTENLGRASDELQMLFDIIGDVVDELASPETNCRLRLVGHLDLLPDDVSRRLTQAQDSTNDNTGVFVNVAVGYGGRQEIVDAVRELIDAEAAAGTTATEMAEKISVDSISKHLYTSGQPDPDLVIRTSGEQRLSGFLLWQAAYSEIWFTDTYWPAFRRVDFLRALREYSKRSRRFGK

SEQ ID NO: 2842 - DNA, 678 bp, Corynebacterium glutamicum
  CDS (1)..(678): transl_table=11
atgtgtgatggcaaccgacgctgggcccgggaagcgggcttcactgatgtcagccatgggcaccgagtgggtgccaaaaagatcggcgagatggtccgctggtgtgatgatgtagacgtcaatctcgtgaccgtttatttgctgtctatggaaaaccttgggcgatcctccgaagagctgcaattgctgttcgatatcatcgccgatgtcgctgatgaactcgcgcgtcctgaaaccaactgtcgagtccgcctcgttggtcatttagatctgctcccagacccagttgcttgtcgtttacgcaaagctgaagaagctaccgttaacaacacaggcatcgcagtcaacatggctgtcggttatggcggacgccaggaaatcgttgatgccgtgcaaaaacttctgaccatcggcaaggacgagggcctaagcgttgatgaactgatcgaatccgtcaaggtagatgcgatctccactcacctgtacacctctggccaaccagacccagacctggtgatccgcacctctggtgagcagcgactttccggattcatgctgtggcaatctgcctactccgaaatctggttcacagacacctactggccagccttccgacgcatcgacttcctccgcgccattcgcgactactcgcagcgcagcagaagattcggtaaataa

SEQ ID NO: 2843 - protein, 225 aa, Corynebacterium glutamicum
MCDGNRRWAREAGFTDVSHGHRVGAKKIGEMVRWCDDVDVNLVTVYLLSMENLGRSSEELQLLFDIIADVADELARPETNCRVRLVGHLDLLPDPVACRLRKAEEATVNNTGIAVNMAVGYGGRQEIVDAVQKLLTIGKDEGLSVDELIESVKVDAISTHLYTSGQPDPDLVIRTSGEQRLSGFMLWQSAYSEIWFTDTYWPAFRRIDFLRAIRDYSQRSRRFGK

SEQ ID NO: 2844 - DNA, 774 bp, Streptomyces avermitilis
  CDS (1)..(774): transl_table=11
gtgaacctgcgggacaacctgcgccgcctgctggtcaggttctatgcacgcagggtggaaggccatctcgaccacgaccaggtgcccaagcacatcggggtcatcatggacggcaaccgccgctgggcgaaggcggcgggctccaccaccgcccagggacaccgggccggggccgacaagatcgaggaattcctcggctggtgctcggagaccgatgtcggggtcgtcaccctgtggctcctgtcgacggacaacttcgaccgtccgcaggaagaactcggcccgctgctcgggatcatcgagggggtcgtacgcaccctcgccgccgacggccgctggcgcgtgcaccacgtgggcacgccggacatcctgccctcccagatgcagaacgcgctcaaggaggccgaggagaccaccgcgcacgtcgacgggatactcgtcaacgtcgccatcggctacggcggccgccaggagatcgccgacgccgtgcgctcgatgctcctcgacgcccacgagaagggcacgtcgatcccggacctcgccgacgccgtcgacgtcgacctcatcggcaagcacctctacaccggcgcccagcccgacccggacctggtgatccggacgagcggcgagcagcggctgtccggtttcatgctgtggcagaccgctcactccgagtactacttctgtgaggtcttctggccggccttccgcaaggtcgacttcttgcgcgccctgcgcgactacgcggcgcgacaccggcggtacgggaactga

SEQ ID NO: 2845 - protein, 257 aa, Streptomyces avermitilis
MNLRDNLRRLLVRFYARRVEGHLDHDQVPKHIGVIMDGNRRWAKAAGSTTAQGHRAGADKIEEFLGWCSETDVGVVTLWLLSTDNFDRPQEELGPLLGIIEGVVRTLAADGRWRVHHVGTPDILPSQMQNALKEAEETTAHVDGILVNVAIGYGGRQEIADAVRSMLLDAHEKGTSIPDLADAVDVDLIGKHLYTGAQPDPDLVIRTSGEQRLSGFMLWQTAHSEYYFCEVFWPAFRKVDFLRALRDYAARHRRYGN

SEQ ID NO: 2846 - DNA, 834 bp, Streptomyces coelicolor
  CDS (1)..(834): transl_table=11
atggccgtacgcgggattctggggcgccagcgccgggagtacaggacgccggagccgcacccctccggcgcgcggccgccgaagctcggcgacctggtgccggagcacgtggcgatcgtcatggacggcaacgggcgctgggccaaggagcgcgggctgccgcgcaccgaggggcacaaggtcggtgccgagcaggtcatggacgtgctccagggcgcgatcgagatgggcgtcgggaacatctccctgtacgccttctccaccgagaactggaagcgctcgcccgaagaggtgcgcttcctgatgaacttcaaccgcgacttcatccgcaagtcccgcgacaccctcgacgagctgggcgtgcgggtgcgctgggcggggcggatgccccggctgtggaagtcggtggccaaggagctccaggtcgcgcaggagcagaccaaggacaacgaccggctcacgctgtacttctgcatgaactacggcgggcgggcggagatcgccgacgcggcgcaggccctcgccgaggacgtgcgggccgggaagctcgacccggccaaggtcaacgagaagacgctcgcgaagtacctgtactacccggacatgccggacgtggacctgttcctgcggccgagcggggagcagcggacgtcgaactacctgctgtggcagagcgcgtacgcggagatggtcttccaggacgtcctgtggcccgacttcgaccggcgcgacctgtggcgggcctgcctggagttcgcctcccgggaccgccgcttcggcggcgccatccccaacgaggagcttctggccatggaaggccgcagtacccggtaa

SEQ ID NO: 2847 - protein, 277 aa, Streptomyces coelicolor
MAVRGILGRQRREYRTPEPHPSGARPPKLGDLVPEHVAIVMDGNGRWAKERGLPRTEGHKVGAEQVMDVLQGAIEMGVGNISLYAFSTENWKRSPEEVRFLMNFNRDFIRKSRDTLDELGVRVRWAGRMPRLWKSVAKELQVAQEQTKDNDRLTLYFCMNYGGRAEIADAAQALAEDVRAGKLDPAKVNEKTLAKYLYYPDMPDVDLFLRPSGEQRTSNYLLWQSAYAEMVFQDVLWPDFDRRDLWRACLEFASRDRRFGGAIPNEELLAMEGRSTR

SEQ ID NO: 2848 - DNA, 777 bp, Tropheryma whipplei
  CDS (1)..(777): transl_table=11
ttgggcgggaaaatgcttagatctgtttctgaacttatttacaaggtgtacgcacggtatcttttaggacagattaacctaaataacctgccagggcatgttgcactaattgttgatgggaacaggcgatgggcacgtaaagagaagcgtgatcgaatttccgacgggcacagggcgggggctggtaaagctgttgattttctgcattggtgcgatgagctcgatataaatatcgtaacgctatacttattgtctaatgacaacctaaaaaacaggaaccgccaggagctaaatgacctggtgcaggttatatgcaacctaattgcacaagtttccaagagatggaaagtaaatcatgtcggatcctgcgaaaatctaccggagttgctaggtaacagcctagagggcgtaaaatctagtaccaaaaccaacaggtattcagaaaggtctatgactgtaaatctcgcaattggatacagtggtagagcggaaattaccgaggctgttagaaaaatagtcaatacgtatccaattggagatctgccagagaagataaccgaagaggttatatcagcaaatctgtatactgggggattatctgacccagacttgataataagaacaagcggagaacaaagactgtcagacttcatgccatggcagagcacacacagcgaattctattttctcgaggctctaggcccggaccttaggaaagtagacttccttagggcaatacgggatttttcaataaggagaaggagtttcggcgcgtga

SEQ ID NO: 2849 - protein, 258 aa, Tropheryma whipplei
MGGKMLRSVSELIYKVYARYLLGQINLNNLPGHVALIVDGNRRWARKEKRDRISDGHRAGAGKAVDFLHWCDELDINIVTLYLLSNDNLKNRNRQELNDLVQVICNLIAQVSKRWKVNHVGSCENLPELLGNSLEGVKSSTKTNRYSERSMTVNLAIGYSGRAEITEAVRKIVNTYPIGDLPEKITEEVISANLYTGGLSDPDLIIRTSGEQRLSDFMPWQSTHSEFYFLEALGPDLRKVDFLRAIRDFSIRRRSFGA

SEQ ID NO: 2850 - DNA, 750 bp, Tropheryma whipplei
  CDS (1)..(750): transl_table=11
gtggagatattttcagtcgactggacgggtcaaactccgccgcatatcccgaggaaatctttgccaagacatgttgcggttgttatggatggaaatgggcgctgggctaatcagcgtaatttgccgcgtattgaggggcataaagccggcgaaagcgctttgattgatgttgtggccggggctgttcaggttggtgtaccgtatttatctctgtatgtattttcaacagaaaactggcttagggcacctgatgaagttcggtttctgttaagatttacgcgcgatgtaattgctcggcgtcgtgaactttttgctcattggggtgttagggtgcgctggtctggcgtaccaaataggcttggtaaagttcttgtcaaagaattgagggatacggaggaaattaccaagaaaaacactgctatgaatctgaatgtgtgcctcaattacggttcgagacaggaaattgtaaatgctataaaaagcattgtaagtgatgtaaatagtggtctcatctctgctaagtcagttaacgaaaaaatcatctctaggagaatgtacatgcctgattttccagatgttgatttattcctgcgatcttccggtgaaaataggatgagtaactttatgctctggcagtctgcatatgcagagcttatctttatgtcaaaactttggccagattttagacgtgacgatttctgggctgcattgcgtgcctactcgggcagaagtcgtaggtttggcagatag

SEQ ID NO: 2851 - protein, 249 aa, Tropheryma whipplei
MEIFSVDWTGQTPPHIPRKSLPRHVAVVMDGNGRWANQRNLPRIEGHKAGESALIDVVAGAVQVGVPYLSLYVFSTENWLRAPDEVRFLLRFTRDVIARRRELFAHWGVRVRWSGVPNRLGKVLVKELRDTEEITKKNTAMNLNVCLNYGSRQEIVNAIKSIVSDVNSGLISAKSVNEKIISRRMYMPDFPDVDLFLRSSGENRMSNFMLWQSAYAELIFMSKLWPDFRRDDFWAALRAYSGRSRRFGR

SEQ ID NO: 2852 - DNA, 777 bp, Anabaena sp
  CDS (1)..(777): transl_table=11
gtgaactttcccccaatccacccatcaacaccaaaaatgacccccccagacttagatccccaaaaaatcccccaacacatagccgtcatcatggatggtaacggcagatgggcaactagccgaggattaccacgcatagccggacatcgccaaggcgcaagaacactcaaagaactcttgcgctgctgtaaagattggggaatcaaagccctcaccgcctacgccttctctacggaaaattggcagcgtcccatcgaagaagtagattttctgatgcttttatttgagcgattactgcgccgggaattatcgcaaatgcaccgagaaggagtgagaatttcctttattggcgatttgacagcattacccaagtcactacaaacggaaatggaacgctccatgacagagacattaaataatcaagcaattcactttactgttgcagtcaactatggcagtcgcaacgaaattactagagcctgtcgtcaagtagcggaactggtgcaacaaggcaaactcagtgctgatgcagtaaacgaaggtattgtagaacaacatctttacacaacagatactcaaccaccagatttattgattcggactagcggagagatgcgattgagtaactttctgttgtggcagatggcatatacagagatgtatttcacagatattctgtggcctgattttgacagagaagcatttcatcaggctttgttgagttaccaaaaacgcgatcgccgttttggtcaagttaaagctttaatctcagcctaa

SEQ ID NO: 2853 - protein, 258 aa, Anabaena sp
MNFPPIHPSTPKMTPPDLDPQKIPQHIAVIMDGNGRWATSRGLPRIAGHRQGARTLKELLRCCKDWGIKALTAYAFSTENWQRPIEEVDFLMLLFERLLRRELSQMHREGVRISFIGDLTALPKSLQTEMERSMTETLNNQAIHFTVAVNYGSRNEITRACRQVAELVQQGKLSADAVNEGIVEQHLYTTDTQPPDLLIRTSGEMRLSNFLLWQMAYTEMYFTDILWPDFDREAFHQALLSYQKRDRRFGQVKALISA

SEQ ID NO: 2854 - DNA, 759 bp, Bradyrhizobium japonicum
  CDS (1)..(759): transl_table=11
atgtccaacgccgccgcgcccgcaacggaaggacccgatcggtccgacgcgcctgcgcatgtcgccatcatcatggatggcaacgggcgttgggccgccgcgcgcggtttgccgcgggccgaaggtcatcgccgcggcgtggaggccttgcgccgcgtggtgcgcgcctcgcacgagctcggcatccgctatctcaccatcttctcgttctcgtcggagaactggtcgcgtccggcgagcgagatcggcgatctgttcggcctgctcaggcggttcatccgcaacgatctcgcgagcctgcatcgcgacggcgtcaaggtccgcatcatcggcgagcgcgacgggctcgagagcgacatctgcgcgctgctcaacgaggccgaggaactgacgcgcgacaattcgcgtctcacgctcgtcgtcgccttcaactacggctcgcggcaggagatcgcgaaggcggcacagaagctcgcgcgcgaggtcgcggagggcaggcgcgatcctgccacgatcgacgccgagacgcttggggcgcatctcgatgcgcccgacattcccgatcccgatctcatcatccgcaccagcggcgagcagcgcctgtccaacttcctgatgtggcaggcggcctatagcgagctcgtgttcgtgccgatccactggccggatttcgacaaggcggcgctggaaggcgcgatcgccgaattcgccaggcgcgagcgccgtttcggcggcctggtcgcgaaaaccgcctcgtga

SEQ ID NO: 2855 - protein, 252 aa, Bradyrhizobium japonicum
MSNAAAPATEGPDRSDAPAHVAIIMDGNGRWAAARGLPRAEGHRRGVEALRRVVRASHELGIRYLTIFSFSSENWSRPASEIGDLFGLLRRFIRNDLASLHRDGVKVRIIGERDGLESDICALLNEAEELTRDNSRLTLVVAFNYGSRQEIAKAAQKLAREVAEGRRDPATIDAETLGAHLDAPDIPDPDLIIRTSGEQRLSNFLMWQAAYSELVFVPIHWPDFDKAALEGAIAEFARRERRFGGLVAKTAS

SEQ ID NO: 2856 - DNA, 738 bp, Corynebacterium diphtheriae
  CDS (1)..(738): transl_table=11
gtgaccaagcaactcgtacctccacagattccgcaagagttcctcccgcggcacatcgcgctcgtcatggacggcaacggacgatgggcaactaatcgaggactcaagcgcaccgaaggccataagcgcggtgaagctgttctcctcgatatggttgacgcttgtatcgctatgggtattccgtatctgtctgcctacgccttttccaccgaaaattggcggcgctctaccgacgaagtccgcttcctcatgggatttaaccgcgacgtcctgcggcgccaacgtgatgcccttaacgcaaaaggagtgcgagttcgttgggtaggacggcgcccacgactgtggcgcagcgttattagagaattggaagctgcagaagagctcaccaaggacaacaccaccatgacgcttgctatgtgcgttaactacggtggccgcgcagaaatcgtcgatgccgcccgtgagatcgctcgtcgatcagcagtcggaacactacgccccgaggagatcactgaagattccttcacgcagttcctcgacgagcctgatatgcccgatgttgatttgttcttgcgcccatcaggggaaaagcgcacatctaatttcttgttgtggcagtctgcttatgcggaaatggtgtatcaaaacaaattgttccctgattacacacctgaggatttgtttgcagcagtcgaagaatatgctctacgtgatcgccggtttgggggtaccaaatga

SEQ ID NO: 2857 - protein, 245 aa, Corynebacterium diphtheriae
MTKQLVPPQIPQEFLPRHIALVMDGNGRWATNRGLKRTEGHKRGEAVLLDMVDACIAMGIPYLSAYAFSTENWRRSTDEVRFLMGFNRDVLRRQRDALNAKGVRVRWVGRRPRLWRSVIRELEAAEELTKDNTTMTLAMCVNYGGRAEIVDAAREIARRSAVGTLRPEEITEDSFTQFLDEPDMPDVDLFLRPSGEKRTSNFLLWQSAYAEMVYQNKLFPDYTPEDLFAAVEEYALRDRRFGGTK

SEQ ID NO: 2858 - DNA, 732 bp, Corynebacterium efficiens
  CDS (1)..(732): transl_table=11
gtgagtgaacttgtaccccccaacatccctgctgaattcctgccccggcatatcgcgctggtcatggatggaaacggccgctgggccacggagaagggcatgaaacgcaccgagggccaccggcgtggtgaggcggtgctgctcgacgtggtggatgcctgcctggcactcggtgttccgtacctgtccgcctatgccttctccacggagaactggcgccgctccaccgaggaggtccgtttcctcatggggttcaaccgggatgtgctgcgtcgacagcgtgatggcctgcatgagaagggcgtccgtgtccggtgggtggggcgtcgtccccgtctgtggcgttcggtgatccgtgagctggaggccgcggaggaactgaccaaagacaacaccaacatgaccctggcgatgtgtgtgaactacggtggccgcgccgagattatcgatgccgcccgcgagatcgcccggcaggcggctgccggccagctgcggcctgagcagatcaatgagaagaccttcccggatttcctcgatgagccggacatgccggatgtcgatctcttcctgcgtccctcgggggagaagcgcacctccaacttcctgctgtggcagtcggcctatgctgagatggtgtaccaggacaagctctttcctgatttcaccccgcaggatctcttcgacgcggtcgaggagtacgcccgtcgcgaccgtcgcttcggcaccgcctga

SEQ ID NO: 2859 - protein, 243 aa, Corynebacterium efficiens
MSELVPPNIPAEFLPRHIALVMDGNGRWATEKGMKRTEGHRRGEAVLLDVVDACLALGVPYLSAYAFSTENWRRSTEEVRFLMGFNRDVLRRQRDGLHEKGVRVRWVGRRPRLWRSVIRELEAAEELTKDNTNMTLAMCVNYGGRAEIIDAAREIARQAAAGQLRPEQINEKTFPDFLDEPDMPDVDLFLRPSGEKRTSNFLLWQSAYAEMVYQDKLFPDFTPQDLFDAVEEYARRDRRFGTA

SEQ ID NO: 2860 - DNA, 732 bp, Corynebacterium glutamicum
  CDS (1)..(732): transl_table=11
gtgagtgaattccaagtacccgaaatccctgcccaattcctacccaagcatattgcgcttgtcatggatggaaatggacgctgggctaccgagcgtggcatgaagcgcaccgaaggccataagcgtggcgaggcagtcctgcttgatgttgttgatgcatgcattgaacttggtgttccgtacctttctgcttatgccttctctactgaaaactggcgtcgttccaccgatgaggtccgtttcctcatgggattcaaccgagatgtgctgcgacgacaacgcgatgacctacatgaaaagggcgttcgtgtgcgttgggttggccgtcgtccccgcctgtggcgttcggttatccgtgagctggaaactgcggaagagctaaccaaagacaacaccaccatgaccttggccatgtgtgtgaactatggtggacgcgccgaaatcatcgacgcagcccgcgacatcgcccgccttgcagctgaaggcaaactgcgcccggaacaaatcactgagaagaccttcccgaacttcctcgacgaacctgacatgccagacgtcgacctgttcctgcgcccatccggtgagaagcgcacgtcaaacttcctgctgtggcagtctgcctacgcggaaatggtctaccaagacaagctgttccctgatttcacgcagcaagatctgtacgacgcggtcctggaatacgccaagcgggatcgcagattcggaagcgcataa

SEQ ID NO: 2861 - protein, 243 aa, Corynebacterium glutamicum
MSEFQVPEIPAQFLPKHIALVMDGNGRWATERGMKRTEGHKRGEAVLLDVVDACIELGVPYLSAYAFSTENWRRSTDEVRFLMGFNRDVLRRQRDDLHEKGVRVRWVGRRPRLWRSVIRELETAEELTKDNTTMTLAMCVNYGGRAEIIDAARDIARLAAEGKLRPEQITEKTFPNFLDEPDMPDVDLFLRPSGEKRTSNFLLWQSAYAEMVYQDKLFPDFTQQDLYDAVLEYAKRDRRFGSA

SEQ ID NO: 2862 - DNA, 858 bp, Streptomyces avermitilis
  CDS (1)..(858): transl_table=11
atggtcgtacgcgggatcctgggacgccagcgccgcgagtacagggcgccggagccgcacccgtccggtgcccgcgcgcccaaactccccggcgagctgatcccgaaccatgtcgcgtgtgtcatggacgggaacggccggtgggccaaggagcgcgggctgccgcgcaccgaggggcacaaggtcggcgagggcgtcgtcatggacgtcctcaagggctgtatcgagctgggcgtgaagaacctgtccctgtacgccttctcgacggagaactggaagcggtcgcccgaggaggtccgcttcctgatgaacttcaaccgggacgtcatccggcgccggcgggacgagatggacgcgctcgggatccggatccgctgggtaggccgcatgccgaagctctggaagtccgtcgtccaggaacttcagatcgcccaggagcagaccaaggacaacgacgccatgacgctgtacttctgcgtcaactacggcggccgtgcggagctcgccgacgcggcgaaggcgatggccgaggatgtcgcggccggccgtctcgaccccgccaaggtcagcgagaagaccatccagaagtacctgtactacccggacatgccggacgtcgacctcttcctgcgccccagcggcgagcagcgcacctcgaactacctgctctggcagtcgagttacgcggagatggtcttccaggacgtgctgtggcccgacttcgaccggcgtgacctgtggcgcgcctgcgtcgagtacgcctcccgtgaccgccgcttcggcggcgccgttccgaacgagcagctgctcgagatggagcgggacatgaaggggagcgaaggcgtccaggacgcctga

SEQ ID NO: 2863 - protein, 285 aa, Streptomyces avermitilis
MVVRGILGRQRREYRAPEPHPSGARAPKLPGELIPNHVACVMDGNGRWAKERGLPRTEGHKVGEGVVMDVLKGCIELGVKNLSLYAFSTENWKRSPEEVRFLMNFNRDVIRRRRDEMDALGIRIRWVGRMPKLWKSVVQELQIAQEQTKDNDAMTLYFCVNYGGRAELADAAKAMAEDVAAGRLDPAKVSEKTIQKYLYYPDMPDVDLFLRPSGEQRTSNYLLWQSSYAEMVFQDVLWPDFDRRDLWRACVEYASRDRRFGGAVPNEQLLEMERDMKGSEGVQDA

SEQ ID NO: 2864 - DNA, 777 bp, Streptomyces coelicolor
  CDS (1)..(777): transl_table=11
atgcgggcgaaggtacgggccgctctcgacgcgctctatatgaagcgtctggtccgagagttggaaggacgcccacgcccccagcacatcggcatcatgctcgacggcaaccgccggtgggccaagatgtcgggcatcgacgacccccgcgagggctaccgggccggcggcgccaaggtgctggacttcctgcgctggtgcgactccgcgcagatcgagcacgtcaccctcttcatgctctccgacgacaacctcgcccggcccgaagagcagctgaaccccctcatcgacatcatcgccgaggtcgtcgagcagctggccgcgccgggcaacccctggcccgtcgaggccgtcggcgccctggacctgctgcccgcggagtccgcgagccgcctcaagaccgccaccgccgccacccagggccgcaagggcggcaccaaggtcgacgtcgccgtgggctacggcggcagacgcgagatcgtcgacgccgtgcgctccgccctgaccgagcacagctcccagggcggcgacatcgacgagttcatcgagaccttcaccatggagcacatctccaagcacctgtactccaagacccggtccgagtccgacctcatcatccgtacctccggcgagcagcggctctccggattcctgctctggcagtccgcctacgccgaggtccacttctgcgagacgtactggccggacttccgggagatcgacttcctgcgcgccctgcgctcctactccctgcgggaacgccgctacggccgctga

SEQ ID NO: 2865 - protein, 258 aa, Streptomyces coelicolor
MRAKVRAALDALYMKRLVRELEGRPRPQHIGIMLDGNRRWAKMSGIDDPREGYRAGGAKVLDFLRWCDSAQIEHVTLFMLSDDNLARPEEQLNPLIDIIAEVVEQLAAPGNPWPVEAVGALDLLPAESASRLKTATAATQGRKGGTKVDVAVGYGGRREIVDAVRSALTEHSSQGGDIDEFIETFTMEHISKHLYSKTRSESDLIIRTSGEQRLSGFLLWQSAYAEVHFCETYWPDFREIDFLRALRSYSLRERRYGR

SEQ ID NO: 2866 - DNA, 777 bp, Tropheryma whipplei
  CDS (1)..(777): transl_table=11
ttgggcgggaaaatgcttagatctgtttctgaacttatttacaaggtgtacgcacggtatcttttaggacagattaacctaaataacctgccagggcatgttgcactaattgttgatgggaacaggcgatgggcacgtaaagagaagcgtgatcgaatttccgacgggcacagggcgggggctggtaaagctgttgattttctgcattggtgcgatgagctcgatataaatatcgtaacgctatacttattgtctaatgacaacctaaaaaacaggaaccgccaggagctaaatgacctggtgcaggttatatgcgacctaattgcacaagtttccaagagatggaaagtaaatcatgtcggatcctgcgaaaatctaccggagttgctaggtaacagcctagagggcgtaaaatctagtaccaaaaccaacaggtattcagaaaggtctatgactgtaaatctcgcaattggatacagtggtagagcggaaattaccgaggctgttagaaaaatagtcaatacgtatccaattggagatctgccagagaagataaccgaagaggttatatcagcaaatctgtatactgggggattatctgacccagacttgataataagaacaagcggagaacaaagactgtcagacttcatgccatggcagagcacacacagcgaattctattttctcgaggctctaggcccggaccttaggaaagtagacttccttagggcaatacgggatttttcaataaggagaaggagtttcggcgcgtga

SEQ ID NO: 2867 - protein, 258 aa, Tropheryma whipplei
MGGKMLRSVSELIYKVYARYLLGQINLNNLPGHVALIVDGNRRWARKEKRDRISDGHRAGAGKAVDFLHWCDELDINIVTLYLLSNDNLKNRNRQELNDLVQVICDLIAQVSKRWKVNHVGSCENLPELLGNSLEGVKSSTKTNRYSERSMTVNLAIGYSGRAEITEAVRKIVNTYPIGDLPEKITEEVISANLYTGGLSDPDLIIRTSGEQRLSDFMPWQSTHSEFYFLEALGPDLRKVDFLRAIRDFSIRRRSFGA

SEQ ID NO: 2868 - DNA, 750 bp, Acinetobacter sp
  CDS (1)..(750): transl_table=11
atgaccctgtctgaagaaagtcatcttccaaaacatgttgccatcattatggatggcaacaatcgttttgctaaaaaaaatcagatgcaaaaaggagatgggcaccgtgaagggaaaaacagcttagatccgattgttgaacattgttgtactcgaggtgttcaggcgcttacagtttttgctttttccagtgaaaattggaatcgtccagcttttgaggttgatctattaatgaaattgcttgaagaggcaattcatgaacaattacctcgaatgagaaagttcaatattgccctgcgtttcattggtgatcgttcaaaattgtcagaacatctaacagatttgatgactcacgccgaaaatgaaactgctcatttcacaagtatgactttaactatcgcaatcagttatggtggcatgtgggatatcactgatgctgcgaagcaaatcgcgaaagatgtcagtgatggaattgtagatatagagcaaatcgatacacatttatttggccgatatgtaagtttgaatcaacttcctcccgtcgatctgttaattcgtacaggtggtgattatcgcttatctaactttttgctttggcaagcagcttatgctgagctgtattttactgaaactttgtggcctgagttttcaatagatgagtttgaccatgctttagcagtgtttgctggacgcgaacgccgttttggaaaaacttcagagcaaatccaacaagataaaattgagaattaa

SEQ ID NO: 2869 - protein, 249 aa, Acinetobacter sp
MTLSEESHLPKHVAIIMDGNNRFAKKNQMQKGDGHREGKNSLDPIVEHCCTRGVQALTVFAFSSENWNRPAFEVDLLMKLLEEAIHEQLPRMRKFNIALRFIGDRSKLSEHLTDLMTHAENETAHFTSMTLTIAISYGGMWDITDAAKQIAKDVSDGIVDIEQIDTHLFGRYVSLNQLPPVDLLIRTGGDYRLSNFLLWQAAYAELYFTETLWPEFSIDEFDHALAVFAGRERRFGKTSEQIQQDKIEN

SEQ ID NO: 2870 - DNA, 744 bp, Agrobacterium tumefaciens
  CDS (1)..(744): transl_table=11
atgccgacgacgacacgttcctccatacccgagcacgtcgccatcatcatggatggcaatggccgctgggcaaagcagcgcggacttccgcgcgtgatggggcatcgccgtggggttgaggccgtgcgcgagactgtgcgtgcggcaggcgactgcggtatcagctatctcacgctgttcgctttctcctcggaaaactggcgcagacccgaatccgaggtgagcgatctgatgggccttctgaaggccttcatccgtcgcgaccttgcggaacttcatcgcgaaaatgtccgcgtgcggatcatcggcgaccggcaggggctgaagaccgatatacgctctctcctcgaagaggcggagcagatgacggctggcaataccaagctgacgctggtgatcgcctttaattacggcagccgtgacgagattacccgcgcgacagcgtcaatcgcccgtgatgtcgccgaaggccggctcagtgctgacgccattacgcctgagatgatttcgtcgaggctcgatacatcgggaatgccggatccggatctcatcatccgcaccagcggcgaggagcgcctgtcgaacttcctgctctggcaggcagcctattccgagttcctgttcgtgccggaatattggcccgacttcgaccgccagcggttcttctccgcaattgagcaatatgcaacgcgtgaccgccgcttcggtgctctggccgagcaggttgccgtggcaggcgcctga

SEQ ID NO: 2871 - protein, 247 aa, Agrobacterium tumefaciens
MPTTTRSSIPEHVAIIMDGNGRWAKQRGLPRVMGHRRGVEAVRETVRAAGDCGISYLTLFAFSSENWRRPESEVSDLMGLLKAFIRRDLAELHRENVRVRIIGDRQGLKTDIRSLLEEAEQMTAGNTKLTLVIAFNYGSRDEITRATASIARDVAEGRLSADAITPEMISSRLDTSGMPDPDLIIRTSGEERLSNFLLWQAAYSEFLFVPEYWPDFDRQRFFSAIEQYATRDRRFGALAEQVAVAGA

SEQ ID NO: 2872 - DNA, 756 bp, Anabaena variabilis
  CDS (1)..(756): transl_table=11
atgacaatacaacaaactgaactgcaagaattgcccctgagatttaaaacgagaactactgacccaaacacgttgacagtaattatggatggcaatggtcgggatgggctaaacgtccaaggtctaccccgaattatgggtcataaacgaggagtagatgccctcaaggatctgctacgttgctgtagagactgggggattcaggcgctgacggcttatgctttttccacagaaaattggaaaagaccacaagaagaagtagagtttctgatgactctgtttcagagagttttacgtcaagaactgcgggaaatggtcgaagagaatgtgcagattcagtttgtgggtaatttagcagctttgccgcgatcgctgcaagcagaaatttcccgttctatggaagcaactaaaaataatcgcggtattcggttttctgtcgccaccaattatgggggacgacaggagattttacaagcttgccgggcgatcgctcaaaaagtccagcaaggtctgctacaaccagatgaaatcgatgaagaagtatttgaacgccacttatacacagctggtattgctgacccagacttattaattcgtaccagtggcgaaatgcgcctctcaaatttcttactatggcaaatggcttatggggaaatctatatcactgatactctctggccggattttgaccgtacagagtttcaccgcgccttatgtgcatatcagcaaagagaaagacggtttgggaaggtttag

SEQ ID NO: 2873 - protein, 251 aa, Anabaena variabilis
MTIQQTELQELPLRFKTRTTDPNTLTVIMDGNGRDGLNVQGLPRIMGHKRGVDALKDLLRCCRDWGIQALTAYAFSTENWKRPQEEVEFLMTLFQRVLRQELREMVEENVQIQFVGNLAALPRSLQAEISRSMEATKNNRGIRFSVATNYGGRQEILQACRAIAQKVQQGLLQPDEIDEEVFERHLYTAGIADPDLLIRTSGEMRLSNFLLWQMAYGEIYITDTLWPDFDRTEFHRALCAYQQRERRFGKV

SEQ ID NO: 2874 - DNA, 696 bp, Aquifex aeolicus
  CDS (1)..(696): transl_table=11
atgagcttaaaacttccagagcacgttgcgataataatggacggaaacgggcggtgggcaagacagaggggtctacccagagttgcgggacattacagaggtgcagaggtagccgaagacataatagagtactgtatagagctgggaataaaacacctgactttgtttgccttctctacggaaaactggaacagacctaaagaagaagttaaagccctgtttgagcttatggaaaactacataaggagtaagagggaaaaactttactccttaggtgtaagggtaaggttaataggaaggagggacagactcagtagaggcttagtaaacttaatggaagaactggaaagtgattcaaaggatttcaaaaatctctttttaaacgttgccatagactacggcggaagggatgacatactgagggctgtgaaaaaaataatggaagttcaaccgagcaaacttgatgaggagactttttctcagtttctggatctctcctgctctcctgaccctgaccttctaataagaaccgcgggagagaagaggatttccaacttcctcctatggaacctggcgtacacggagctttactttactgatacactctggcccgatttcacgagagaagaatttatgaaagcccttgaggattactcaaggagaaagagaaagttcgggagagttcttgatgagtag

SEQ ID NO: 2875 - protein, 231 aa, Aquifex aeolicus
MSLKLPEHVAIIMDGNGRWARQRGLPRVAGHYRGAEVAEDIIEYCIELGIKHLTLFAFSTENWNRPKEEVKALFELMENYIRSKREKLYSLGVRVRLIGRRDRLSRGLVNLMEELESDSKDFKNLFLNVAIDYGGRDDILRAVKKIMEVQPSKLDEETFSQFLDLSCSPDPDLLIRTAGEKRISNFLLWNLAYTELYFTDTLWPDFTREEFMKALEDYSRRKRKFGRVLDE

SEQ ID NO: 2876 - DNA, 696 bp, Aquifex pyrophilus
  CDS (1)..(696): transl_table=11
atgagtcttaaaattcccgagcacgtagctataataatggacggaaacggaaggtgggcaaggaaaagggggctcccccgtatagccgggcattacaaaggtgcggaagttgcggaggatatagttgagtttgcaattgagctcggtataaaacatctaacgctcttcgccttctcaacggaaaactggaatagaccgaaaggggaagttgaagctttatttgagcttttgaggagatacctccagacaaagaaggataagctttataaactcgggataagagttcgcttcatcgggaggagggacaggataaacaaggaacttgtgaagctaatgcaggagatagaggaagaatcaaagaagtttaaaaatttgtttctgaacctcgctgttgattacgggggaagggacgacatactgagggcggtaaaaaaagctgtaaagctccagagggaggagataactgaagagctattctctagccttcttgatctctcctgttcccccgaccccgacctcctcataagaactgcgggtgaaaaaaggatatcaaacttcctcctttggaatctcgcttacacagagctgtacttttccgaaacactttggccagacttcagcagggaggagttcttaaaagccctcgaggacttctcaaggagaaagaggaagttcggaagggtgcttgatgagtag

SEQ ID NO: 2877 - protein, 231 aa, Aquifex pyrophilus
MSLKIPEHVAIIMDGNGRWARKRGLPRIAGHYKGAEVAEDIVEFAIELGIKHLTLFAFSTENWNRPKGEVEALFELLRRYLQTKKDKLYKLGIRVRFIGRRDRINKELVKLMQEIEEESKKFKNLFLNLAVDYGGRDDILRAVKKAVKLQREEITEELFSSLLDLSCSPDPDLLIRTAGEKRISNFLLWNLAYTELYFSETLWPDFSREEFLKALEDFSRRKRKFGRVLDE

SEQ ID NO: 2878 - DNA, 756 bp, Archaeoglobus fulgidus
  CDS (1)..(756): transl_table=11
atgatatttcacaaaatttatgagaacaagctgctgaggagtgtaaggaagggggcgattccccatcatatagccatcattatggatggaaacagaagatttgcgaggaaaaaaggtttagagccacatgaagggcatttttttggttctaaaaaagccgaagaggttcttgagtggtgctgggacctgggggttaagatgctaaccctctacgccttctcaaccgaaaatttcaggagaagtgagaaggaaaagaaaaacattttccagctgctcgaaagcgagctcaggagacttctaaaggacaggaggacctacgagagggagctcagagttaaggtggtcggcaagagggagcttttgcccgaaaaccttcgagagaccataaaggaggttgaggaaagaaccaaaaagcacagaaggcactacctcaacgttgccgtggcctacggcgggaggcaggaaatcatagatgccgtcagagccatcttaagaaaggtgagaaaaggggaggtcaggccggaggagattgacgagaaaatgcttgaggaacatttatatggtgaggggaggtattctaaggttgacctgataataaggacgggtggtgagcagaggctctcgaatttcctcccttggcaggctgcgaacagcgtcgcatacttctgcgatgtttactggcctgagttcagaaagatagacctgctcagggcgataagagcctggcagtacaggaagagtcacgaggtggtgtga

SEQ ID NO: 2879 - protein, 251 aa, Archaeoglobus fulgidus
MIFHKIYENKLLRSVRKGAIPHHIAIIMDGNRRFARKKGLEPHEGHFFGSKKAEEVLEWCWDLGVKMLTLYAFSTENFRRSEKEKKNIFQLLESELRRLLKDRRTYERELRVKVVGKRELLPENLRETIKEVEERTKKHRRHYLNVAVAYGGRQEIIDAVRAILRKVRKGEVRPEEIDEKMLEEHLYGEGRYSKVDLIIRTGGEQRLSNFLPWQAANSVAYFCDVYWPEFRKIDLLRAIRAWQYRKSHEVV

SEQ ID NO: 2880 - DNA, 777 bp, Bacillus anthracis
  CDS (1)..(777): transl_table=11
atgatgtttaaaaactttcctttttttaaaggtaaaaaggacacatcgtttgatcatctcgttgaagaagtaaaaaaaggatatatcccagaacatattgcgatcattatggatggtaatggaagatgggcgaagaggagagcaatgcctcgtattgcgggacatcatgaaggtatgcaagttgtaaagaaaattacaaaatttgcaagtaaacttaatgtgaaagtgttaactctctatgctttttcgactgagaactggaaaagaccgaaaaaggaagttgattatttaatgcagcttccagaagaatttttaggtacatttttaccagaattgattgaagaaaacgtacaagtccgagtaatagggcaacaagatcgtcttcctacgcatacacgcagagcgatggagaaggccatggaagaaacgaaagagaatacgggattaattcttaatttcgcgttaaactatggaagtcgagatgaaatcgtttctgctgtgcaacatatgatgaaagatagtgaggaaggaaaagttcgtgttgaagatgtaagtgaagaaatgctttcttcctacttaatgacgagttctttacctgacccagagttgttaatccgtacgagcggagagctacgtattagtaatttcatgttatggcaaattgcatattcggaattttggtttacagatgtgtattggccagattttaccgaggaacatttgctaaatgcgattacagactttcaacatagagggcgcagattcggaggcgtgtag

SEQ ID NO: 2881 - protein, 258 aa, Bacillus anthracis
MMFKNFPFFKGKKDTSFDHLVEEVKKGYIPEHIAIIMDGNGRWAKRRAMPRIAGHHEGMQVVKKITKFASKLNVKVLTLYAFSTENWKRPKKEVDYLMQLPEEFLGTFLPELIEENVQVRVIGQQDRLPTHTRRAMEKAMEETKENTGLILNFALNYGSRDEIVSAVQHMMKDSEEGKVRVEDVSEEMLSSYLMTSSLPDPELLIRTSGELRISNFMLWQIAYSEFWFTDVYWPDFTEEHLLNAITDFQHRGRRFGGV

SEQ ID NO: 2882 - DNA, 777 bp, Bacillus cereus
  CDS (1)..(777): transl_table=11
atgatgtttaaaaactttcctttttttaaaggtaaaaaggacacatcgtttgatcatctcgttgaagaagtgaaaaaaggatacatcccagaacatattgccatcattatggatggtaatggaaggtgggcaaagaggagagcgatgcctcgtattgcgggacatcatgaaggcatgcaagttgtaaagaaaatcacaaaatttgcaagcaaacttaatgtgaaagtattaactctttatgctttttcaactgagaactggaaaagaccgaaaaaggaagttgattatttaatgaagcttccagaagaatttttaggtacatttttaccagaattgattgaagagaacgtacaagtccgtgtaatagggcaacaagatcgtcttcctacgcatacacgcagagcgatggagaaggccatggaagagacgaaagagaatacgggattaattctgaatttcgcgttaaactatggaagtcgagatgaaatcgtttctgctgtgcaacatatgatgaaagatcgtgaggaaggaaaagttcgtgttgaagatgtaagcgaagaaatgctttcttcctacttaatgacgagttctttacctgacccagagttgttaatccgtacgagcggagagctacgtattagtaatttcatgttatggcaaattgcatattcggaattttggtttacagatgtgtattggccagattttaccgaggaacatttgctaaatgcgattacagactttcagcatagagggcgcagattcggaggcgtgtag

SEQ ID NO: 2883 - protein, 258 aa, Bacillus cereus
MMFKNFPFFKGKKDTSFDHLVEEVKKGYIPEHIAIIMDGNGRWAKRRAMPRIAGHHEGMQVVKKITKFASKLNVKVLTLYAFSTENWKRPKKEVDYLMKLPEEFLGTFLPELIEENVQVRVIGQQDRLPTHTRRAMEKAMEETKENTGLILNFALNYGSRDEIVSAVQHMMKDREEGKVRVEDVSEEMLSSYLMTSSLPDPELLIRTSGELRISNFMLWQIAYSEFWFTDVYWPDFTEEHLLNAITDFQHRGRRFGGV

SEQ ID NO: 2884 - DNA, 777 bp, Bacillus cereus
  CDS (1)..(777): transl_table=11
atgatgtttaaaaactttcctttttttaaaggtaaaaaggacacatcgtttgatcatctcgttgaagaagtgaaaaaaggatatatcccagaacatattgccatcattatggatgggaatggaagatgggcaaagaggagagcaatgcctcgtattgcgggacatcatgaaggtatgcaagttgtaaagaaaattacaaaatttgcaagtaaacttaatgtgaaagtgttaactctctatgctttttcaactgagaactggaaaagaccgaaaaaggaagttgattatttaatgaagcttccagaagaatttctaggtacatttttaccagaattgattgaagaaaacgtacaagtccgagtaatagggcaaaaagatcgtcttcctacgcatacacgcagagcgatggagaaagccatggaagatacgaaagagaatacgggattaattcttaatttcgcgttaaactatggaagtcgagatgaaatcgtttctgctgtgcaacatatgatgaaagataatgaggaaggaaaaattcgttctgaagaggtaagtgaagaaatgctttcctcctacttaatgacgagttctttacctgatccagagttgttaatccgaacaagcggagagctacgtattagtaatttcatgttatggcaaattgcatattcggagttttggtttacagacgtgtattggccagacttcaaagaagaacatttgctaaatgcgattactgactttcaacatagagggcgcagattcggaggcgtgtag

SEQ ID NO: 2885 - protein, 258 aa, Bacillus cereus
MMFKNFPFFKGKKDTSFDHLVEEVKKGYIPEHIAIIMDGNGRWAKRRAMPRIAGHHEGMQVVKKITKFASKLNVKVLTLYAFSTENWKRPKKEVDYLMKLPEEFLGTFLPELIEENVQVRVIGQKDRLPTHTRRAMEKAMEDTKENTGLILNFALNYGSRDEIVSAVQHMMKDNEEGKIRSEEVSEEMLSSYLMTSSLPDPELLIRTSGELRISNFMLWQIAYSEFWFTDVYWPDFKEEHLLNAITDFQHRGRRFGGV

SEQ ID NO: 2886 - DNA, 771 bp, Bacillus halodurans
  CDS (1)..(771): transl_table=11
atgcttgaaaagttttcaaagtggaagggaaatcgttcaaatcatacgacaccttcccattcgcttgatgaatcagcaattccaaaacatgtggccattattatggatggaaatggccgttgggccaagaaaaaaggtcttcctcgcatagcaggacaccgcgaggggatgaaagtcattaataaaattgtccgaaaagccattgatttaaagattgaagtgctgtccctatacgcattttctacggaaaattggaagcgtccaagaacagaagtagattatttgcttaagcttcccgaacgtttcttaaagctcgagctgccaaacttgatggaagaaaatgtacaagtgcgaatcatggggggattggacaccttaccggagcatacagcgaaggctgtcacaaaagcaatggaggaaacgaaagataacacgggccttatattaaactttgcgctaaattacggcagtcgatatgaaatggtggaagcgatgaaacaggttgccaaagaagtagagacgggaaccctttcgagcgatgccattacagaagacgtgattagccgccatttaatgacggctgacctccgcgacccagatttgctgatccgaacgagtggagaaatacgcttgagcaattttatgctatggcaattagcttacagtgaattttggtttaccgatgtgctttggccggattttacagaacaccatttgacggaagcgatcgctgtctatcaaaaacgggcacggcgctatggaggcgtttaa

SEQ ID NO: 2887 - protein, 256 aa, Bacillus halodurans
MLEKFSKWKGNRSNHTTPSHSLDESAIPKHVAIIMDGNGRWAKKKGLPRIAGHREGMKVINKIVRKAIDLKIEVLSLYAFSTENWKRPRTEVDYLLKLPERFLKLELPNLMEENVQVRIMGGLDTLPEHTAKAVTKAMEETKDNTGLILNFALNYGSRYEMVEAMKQVAKEVETGTLSSDAITEDVISRHLMTADLRDPDLLIRTSGEIRLSNFMLWQLAYSEFWFTDVLWPDFTEHHLTEAIAVYQKRARRYGGV

SEQ ID NO: 2888 - DNA, 777 bp, Bacillus thuringiensis subsp
  CDS (1)..(777): transl_table=11
atgatgtttaaaaactttcctttttttaaaggtaaaaaggacacatcgtttgatcatctcgttgaagaagtaaaaaaaggatatatcccagaacatattgcgatcattatggatggtaatggaagatgggcgaagaggagagcaatgcctcgtattgcgggacatcatgaaggtatgcaagttgtaaagaaaattacaaaatttgcaagtaaacttaatgtgaaagtgttaactctctatgctttttcgactgagaactggaaaagaccgaaaaaggaagttgattatttaatgaagcttccagaagaatttttaggtacatttttaccagaattgattgaagaaaacgtacaagtccgagtaatagggcaacaagatcgtcttcctacgcatacacgcagagcgatggagaaggccatggaagaaacgaaagagaatacgggattaattcttaatttcgcgttaaactatggaagtcgagatgaaatcgtttctgctgtgcaacatatgatgaaagatagtgaggaaggaaaggttcgtgttgaagatgtaagtgaagaaatgctttcttcctacttaatgacgagttctttacctgacccagagttgttaatccgtacgagcggagagctacgtattagtaatttcatgttatggcaaattgcatattcggaattttggtttacagatgtgtattggccagattttaccgaggaacatttgctaaatgcgattacagactttcaacatagagggcgcagattcggaggcgtgtag

SEQ ID NO: 2889 - protein, 258 aa, Bacillus thuringiensis subsp
MMFKNFPFFKGKKDTSFDHLVEEVKKGYIPEHIAIIMDGNGRWAKRRAMPRIAGHHEGMQVVKKITKFASKLNVKVLTLYAFSTENWKRPKKEVDYLMKLPEEFLGTFLPELIEENVQVRVIGQQDRLPTHTRRAMEKAMEETKENTGLILNFALNYGSRDEIVSAVQHMMKDSEEGKVRVEDVSEEMLSSYLMTSSLPDPELLIRTSGELRISNFMLWQIAYSEFWFTDVYWPDFTEEHLLNAITDFQHRGRRFGGV

SEQ ID NO: 2890 - DNA, 774 bp, Bacillus clausii
  CDS (1)..(774): transl_table=11
atgcttgagagattttcaaaatggaggcaagcctttacggatacagaagatgaggagcctacatcaatagatccgcaaaatataccgaggcatgtcgccattattatggatggaaatggccgttgggccaaagagaaagggctaccgcgtattgctgggcatagggaaggcatgaagacggttaataagattgttcgtgctgccaataccctcaatattgaaatattgacgctttatgctttttcaacagaaaactggaaacgcccgaaagcggaggtcgaatttctgctaaaattgccagaacgctatttgaaaagcgaattgccgacgctaatagaggaaaatgtgcaagtgcgtttaatgggttcaaaggacggtttgccttcgtatacactccatgcagtggatgaagcaattgaaaagacaaagcataatacgggactgattttaaattttgctttaaactatggaagcaggttcgaacttacgagtgccatgcaacaaattgccaaaaaggtacagcaaggcgagttgatgccagagcacattacagaagaaacgattagcgcccacttaatgagcaaccatttgcgtgatccagacttgcttattcgcacgagcggggagttgcggctaagcaactttatgttatggcagatcgcatacagcgaatttttgtttatggatgtgtattggccaaactttactgagcaccacttctataaagcggtcttaacgtatcagaatagggggcggcgctatggcggcgtgtag

SEQ ID NO: 2891 - protein, 257 aa, Bacillus clausii
MLERFSKWRQAFTDTEDEEPTSIDPQNIPRHVAIIMDGNGRWAKEKGLPRIAGHREGMKTVNKIVRAANTLNIEILTLYAFSTENWKRPKAEVEFLLKLPERYLKSELPTLIEENVQVRLMGSKDGLPSYTLHAVDEAIEKTKHNTGLILNFALNYGSRFELTSAMQQIAKKVQQGELMPEHITEETISAHLMSNHLRDPDLLIRTSGELRLSNFMLWQIAYSEFLFMDVYWPNFTEHHFYKAVLTYQNRGRRYGGV

SEQ ID NO: 2892 - DNA, 783 bp, Bacillus subtilis
  CDS (1)..(783): transl_table=11
atgctcaacatactcaaaaattggaagaatcagcaaactgcggcttccaacttagaacgttatacaaaagaagacatacttaagggagaaattcccgaacacatcgccattatcatggatggaaatggccgttgggctaaaaaacgctctcttcccagaattgcaggccaccatgaagggatgaaggtggtaaaaaggaccacgaagctcgcaaacgaattaggtgtcaaagtactgacattgtatgcattttcaacagaaaactggaaaagaccgaaaatggaggtcgattttttaatgaagcttccggaagaatttttgaatacgtatcttccagagcttgttgaggaaaatgtacaggttcggatcattggggatgaaacggctttgccggcgcacacattacgtgcgattgaaaaagctgtacaggacacggcgcaaaacgacggaatgatccttaattttgctcttaactatggaggccgtactgaaattgtcagtgctgcaaaatcactcgcggaaaaagtgaaggaaggctctttgaatattgaagacattgatgaatcgcttttttctacttatttgatgactgaatctttgcaggatcctgaacttttaattcgaacgagcggcgagataaggctgagtaattttatgctatggcaggttgcctacagtgaatttgtctttactgacgtcttgtggcctgactttaaagaagatcacttcttgcaggcgttaggagagtttcagcagagaggccggaggtttggcggaatttag

SEQ ID NO: 2893 - protein, 260 aa, Bacillus subtilis
MLNILKNWKNQQTAASNLERYTKEDILKGEIPEHIAIIMDGNGRWAKKRSLPRIAGHHEGMKVVKRTTKLANELGVKVLTLYAFSTENWKRPKMEVDFLMKLPEEFLNTYLPELVEENVQVRIIGDETALPAHTLRAIEKAVQDTAQNDGMILNFALNYGGRTEIVSAAKSLAEKVKEGSLNIEDIDESLFSTYLMTESLQDPELLIRTSGEIRLSNFMLWQVAYSEFVFTDVLWPDFKEDHFLQALGEFQQRGRRFGGI

SEQ ID NO: 2894 - DNA, 735 bp, Bacteroides thetaiotaomicron
  CDS (1)..(735): transl_table=11
atgtcctatatagagaaaatagacaaaaatcggattccccagcacatagccatcattatggatgggaatgggagatgggctaaacagcggggaaaagaacgaacttacggtcaccaggcaggcgcagaaacggtacataaaattatcgaggatgctgcacgtctgggggttaaatatctgactttatatactttctccaccgagaattggaatcgtccgcaggaagaagtagcagctttaatgaatctattggtggattctatcgaagaagaaacgttgatgaagaacaatattcgtttccgcattattggtgatattaagaaattacctgcagaagtgcaggaaggtctgtcaagatgtatagaacacacagctaataatacaggaacctgcctggtactggcactcagctactcttcccgctgggaaatgactgaagcagtccgacagattgcaacgcttgcaaaaacgggagaaatatctcccgaacaaataacagatgaatacataactgctcatctgaccacaaactttatgcccgatccggatttactgatccgcacgggaggagaaatccgactaagcaactacctgctatggcaatgtgcttattcggagctttatttttgtgatacattctggccggacttcgataaagaagaattctgtaaagccatttatgagtatcagcaaagagagcgccggttcggcaaaacgagtgaacaaatcagctaa

SEQ ID NO: 2895 - protein, 244 aa, Bacteroides thetaiotaomicron
MSYIEKIDKNRIPQHIAIIMDGNGRWAKQRGKERTYGHQAGAETVHKIIEDAARLGVKYLTLYTFSTENWNRPQEEVAALMNLLVDSIEEETLMKNNIRFRIIGDIKKLPAEVQEGLSRCIEHTANNTGTCLVLALSYSSRWEMTEAVRQIATLAKTGEISPEQITDEYITAHLTTNFMPDPDLLIRTGGEIRLSNYLLWQCAYSELYFCDTFWPDFDKEEFCKAIYEYQQRERRFGKTSEQIS

SEQ ID NO: 2896 - DNA, 795 bp, Bifidobacterium longum
  CDS (1)..(795): transl_table=11
atgagtatggcttttgagaacgttgattacacgtcgttggacattcccgcagctccgttcagcgaccccgctcgtattcccgacttccccaagaacaaggtaccccgccatatcggtgtgattatggacggtaatggtcgttgggccaagcagcgcggcatggtccgcaccaatggccatcaggccgccgaaccggtggtgttcgacactatcgccggtgccatcgaagccggtgtacggtatttgagcctgtacacgttctccactgaaaactggaagcgctcgccacaggaagtgcgcttcctcatgggtttctcgcgtgaaatcatccaccgtcgtgtggaacagatggacgagtggggtgtgcgcgtgcgctggtccggccgtcgccccaagctgtggaagtcggtgatcgacgagcttgaagccgccgaggagcgcaccaagaacaacaaggtcatcgatgtggtgttctgcatcaactatggtggccgtgctgaaatcgccgacgcctgcgccgccatcgctcgcgaagtgcgcgatggcaagatttccggcgaccgtgtgactgagaagatgattgccgaccatctgtacaatccggacattcccgattgcgacttggtgatccgtacttccggcgaacagcgcacctccaacttcctgccgtgggaggccgcctacgccgagctcgacttcgtgcccgaacttttcccggactgcggccgtgacgtgctatggcgctccatcgaccattacatccaccgcgatcgccgattcggcggtgtgaaatag

SEQ ID NO: 2897 - protein, 264 aa, Bifidobacterium longum
MSMAFENVDYTSLDIPAAPFSDPARIPDFPKNKVPRHIGVIMDGNGRWAKQRGMVRTNGHQAAEPVVFDTIAGAIEAGVRYLSLYTFSTENWKRSPQEVRFLMGFSREIIHRRVEQMDEWGVRVRWSGRRPKLWKSVIDELEAAEERTKNNKVIDVVFCINYGGRAEIADACAAIAREVRDGKISGDRVTEKMIADHLYNPDIPDCDLVIRTSGEQRTSNFLPWEAAYAELDFVPELFPDCGRDVLWRSIDHYIHRDRRFGGVK

SEQ ID NO: 2898 - DNA, 753 bp, Blochmannia floridanus
  CDS (1)..(753): transl_table=11
gtgatattatctcaatttgatcaaaacatacaacccttgtcttctgctatattaccaaggcatatagctattattatggatggtaatgggcgttgggctcgaggtagaggtaaattacgtattgtaggtcatcaggcaggatttcaggcggctcgtcgggcggtacgttttgctgtgcattgccgatttaatgctcttacattatatgcttttagtagtgaaaattggacacgatctaatacagaaattagttctttgatgcaattatttatttatgcattaaatagtgaaataaataatttaaataaaaataatattaaattaagaattattggagatgtgaatagattcactcaggagctgcaggattgtatttatcgttctgaacaattaacatctaataataatggtcttaatttaaatattgctgcaaattatggaggaaggtgggatatagtgcaaggagtaaaaaagattattgcacaaatacaaaaaggtgtattaaaacctaatcaaattaatgaaaatattttatgcaaatatgtttgtatgaatgaattgtctccagtggatttagtgatcagaacaggaggcgaacatcgtattagtaattttttattatggcagatagcatatgctgaattattttttacggatgtattatggcctgattttaatgatattgtttttagaagagcattgcattcttttatgaaacgcgatcgacgttttggaaaaagtgcatttatttaa

SEQ ID NO: 2899 - protein, 250 aa, Blochmannia floridanus
MILSQFDQNIQPLSSAILPRHIAIIMDGNGRWARGRGKLRIVGHQAGFQAARRAVRFAVHCRFNALTLYAFSSENWTRSNTEISSLMQLFIYALNSEINNLNKNNIKLRIIGDVNRFTQELQDCIYRSEQLTSNNNGLNLNIAANYGGRWDIVQGVKKIIAQIQKGVLKPNQINENILCKYVCMNELSPVDLVIRTGGEHRISNFLLWQIAYAELFFTDVLWPDFNDIVFRRALHSFMKRDRRFGKSAFI

SEQ ID NO: 2900 - DNA, 693 bp, Borrelia burgdorferi
  CDS (1)..(693): transl_table=11
atgaataaaggttctcttccaagtcatgttggaattattatggatggcaatagaaggtgggctttaggtaaaagattgtcttctttagaaggttataaagaaggtcttaaaagagcaaaagaaatagttaagtattctttaagggtaggtattaaatgtttatccttttatgtattttctactgagaattggagaagggatgattgtgagatagaaaatttaatgtttttaattgctaattatttgagagccgaatttgatttttacgaaaaaaatggaataaaaataatagtttcaggagatgttgagtctttaagtggggaagtaaaaagttctataaaagactctattagcttttctaaaaatttcaacaaccttattttaaatttagcaatcaattatgggggtcgtaatgaaatacttagagctgttaaaaaatttgtttcaagtgattttgatttagagtctttgaatgagaatattttttccagttttttagacaatccagaactacccgatcttgatcttttaatacgtacaggcggaaatattagaataagtaattttttcttatggaggattgcttattctgaattaattttttcaaatgttttgtggcctgaatattatgacactagatatagtaaggatttggaatgtttccaatttagaagaagaaattttgggagatga

SEQ ID NO: 2901 - protein, 230 aa, Borrelia burgdorferi
MNKGSLPSHVGIIMDGNRRWALGKRLSSLEGYKEGLKRAKEIVKYSLRVGIKCLSFYVFSTENWRRDDCEIENLMFLIANYLRAEFDFYEKNGIKIIVSGDVESLSGEVKSSIKDSISFSKNFNNLILNLAINYGGRNEILRAVKKFVSSDFDLESLNENIFSSFLDNPELPDLDLLIRTGGNIRISNFFLWRIAYSELIFSNVLWPEYYDTRYSKDLECFQFRRRNFGR

SEQ ID NO: 2902 - DNA, 765 bp, Brucella abortus
  CDS (1)..(765): transl_table=11
atgtccgatccgcgccacatagccattatcatggatggcaacggccgttgggctaaggcgcgcggcttgccgcgcagcgcggggcaccgcgcgggcgtggaggccttgcgggagatcgtgcgggccgcgggagatcgcggcctcggctatcttacgctttttgctttctcttccgaaaactggacccgtccgagcggcgaggtcagcgatcttctggggcttttgaagctcttcatccggcgcgatctggcagagcttcaccgcaacaatgtgcgtgtcaatattatcggcgagcgggcggagctcgcagccaatatccgtgcactgttgaacgaagcggaatcgcttacccatcgcaataccggcctcaatctcgtgattgccttcaattacggttcacgcgatgagattgttcgtgcggtcagaagccttgcgcgcgatgtcgccgccgggcttcttgatccatcctcgatctcggcggagcttgtttccgctaatcttgatacggcgggaatacctgatcccgacctcatcatccgcaccagtggcgagatgcggctttccaactttcttctctggcaggctgcctattccgagtttctctttctgccatgtcactggccggatttccggccggccgaccttgatgcggcctatgaaacgttccggcagcgcgagcgtcgttttggcggtgtggagccgcgcgccagtgcggatgccgaagaagaaatattatgcccttcgaccaagggagcggcagtctag

SEQ ID NO: 2903 - protein, 254 aa, Brucella abortus
MSDPRHIAIIMDGNGRWAKARGLPRSAGHRAGVEALREIVRAAGDRGLGYLTLFAFSSENWTRPSGEVSDLLGLLKLFIRRDLAELHRNNVRVNIIGERAELAANIRALLNEAESLTHRNTGLNLVIAFNYGSRDEIVRAVRSLARDVAAGLLDPSSISAELVSANLDTAGIPDPDLIIRTSGEMRLSNFLLWQAAYSEFLFLPCHWPDFRPADLDAAYETFRQRERRFGGVEPRASADAEEEILCPSTKGAAV

SEQ ID NO: 2904 - DNA, 756 bp, Buchnera aphidicola subsp
  CDS (1)..(756): transl_table=11
atgcagtataaatatttattagaatacaacaaaaaaaatcatgaatgtaatccttgtcatgtagcaattattatggatggaaatgggcgatgggctactagacaaggaaaaattcgtattatgggtcataaagaaggttttagagcagtaaaagaagcaatcaaattttctattgcaaataatttaaaaatattaactttatatgcttttagtagtgaaaactggaatcgtccattatttgaaattaaagcactaatggaattatttttatttgcgttagatactgaaattaaaaatttaaaaaaacataatatcagatttaaagttattggtgatataacatgtttcgataaaaaattacaaaatagtattcattatgcagaacaaattacttttgacaataccggtttaattttaaatatagcagcaaattatggtggaagatgggacataattgaaagcgttaaaaaaattattaatcgagtgcagagaggaatcttagatgtaaataaaattcacgaaaatactatttctcaatatttatctactagtgaacttcttccagtagatttagttattagaacaggaggagaaaaaagaatcagtaattttttattatggcaaatagcttattctgaactatattttactgatgttttatggcctgattttaattgtcatatttttcaacatgctatagattcttttgtatctcgtgaacgtcgtttcggaggatttaaaaaaaataaaaaatag

SEQ ID NO: 2905 - protein, 251 aa, Buchnera aphidicola subsp
MQYKYLLEYNKKNHECNPCHVAIIMDGNGRWATRQGKIRIMGHKEGFRAVKEAIKFSIANNLKILTLYAFSSENWNRPLFEIKALMELFLFALDTEIKNLKKHNIRFKVIGDITCFDKKLQNSIHYAEQITFDNTGLILNIAANYGGRWDIIESVKKIINRVQRGILDVNKIHENTISQYLSTSELLPVDLVIRTGGEKRISNFLLWQIAYSELYFTDVLWPDFNCHIFQHAIDSFVSRERRFGGFKKNKK

SEQ ID NO: 2906 - DNA, 750 bp, Buchnera aphidicola subsp
  CDS (1)..(750): transl_table=11
atgttatataaatcctcgttaaaaaataaaaaaagaattcaaaaagaaaatcttcgtcatatagcaattattatggatggaaatggaagatgggctgaaaaaagaggaaaaatacgtaccttaggtcataaagaaggttttaaaacagctagaaaaataataaagtatgccgttgaaaataacataaaaatattaacattatatgtttttagtcgagaaaattggagacgtcccaagttagaaattacagcgttgatgaaattatttttttttgcattaaaaagtgaaataaaaaatttaaataaatataatattcgtttaaaaataattggagatacaagtccttttaatgaaaatttaaaaaattatattcacaaagtagaaaaacaaacttttaataatactggtttaattttaaatattgctgcaaattatagtggtagatgggatattatacgaggtataaagaaaatcatcaaagatgttcaaaaagatgtgttagatattgatcaaattcaagaacgaaatttctctcaatatttatctacaagtgaattactaccagtagatttagtgattagaacaggaggagaaaaaagaattagtaattttttgttatggcaaatagcatattctgaattatattttactgatattttatggcctgattttaactggcgcgattttcagcatgcaattgattatttttttactcgtgaacgtcgttttggaggaatttcaattagttaa

SEQ ID NO: 2907 - protein, 249 aa, Buchnera aphidicola subsp
MLYKSSLKNKKRIQKENLRHIAIIMDGNGRWAEKRGKIRTLGHKEGFKTARKIIKYAVENNIKILTLYVFSRENWRRPKLEITALMKLFFFALKSEIKNLNKYNIRLKIIGDTSPFNENLKNYIHKVEKQTFNNTGLILNIAANYSGRWDIIRGIKKIIKDVQKDVLDIDQIQERNFSQYLSTSELLPVDLVIRTGGEKRISNFLLWQIAYSELYFTDILWPDFNWRDFQHAIDYFFTRERRFGGISIS

SEQ ID NO: 2908 - DNA, 756 bp, Buchnera aphidicola subsp
  CDS (1)..(756): transl_table=11
atgagttattccaaaaataatatgttatttaaaaatgtattaaatttcaaaaaaaatataccttcgcatgtagctattataatggacggaaatgggaaatgggcacgaaaaagaggaaaatctcgattttttggacatttttcaggattttatgctgcacgaagagcaatatcttttgcattatttcataaattaaaaattcttactctatacgcttttagtagtgacaattggaatcgttctccacgggaaataaaagtattaatggaattatttttttatgctttatctaatgaaactaacaatttaaataaatataatattcgtttaaaagttattggaaataaagaaaagtttaataccgtattaaaaaacaaaattcgtgttgtagaaaaagaaactttaaagaataccggtttattactaaacattgcagcgaattatagcggtcgttgggaaattcttgaagcgataaaaaaaattgttgtagctattaaatgtaaaaatttatctttaaatgcaattactgaatctacggtttctgattttcttttaattaatgaaaagattcctgtagatttggttattagaacaggaggagagtgtcgcttaagtaattttttagtttggcagatatcatattcagaattatattttactaatacactttggcctgattttgatagaaaagagtttaaaaaagctattgatgaattttctaacagagaacgtagatttggtcgtgtatcacattaa

SEQ ID NO: 2909 - protein, 251 aa, Buchnera aphidicola subsp
MSYSKNNMLFKNVLNFKKNIPSHVAIIMDGNGKWARKRGKSRFFGHFSGFYAARRAISFALFHKLKILTLYAFSSDNWNRSPREIKVLMELFFYALSNETNNLNKYNIRLKVIGNKEKFNTVLKNKIRVVEKETLKNTGLLLNIAANYSGRWEILEAIKKIVVAIKCKNLSLNAITESTVSDFLLINEKIPVDLVIRTGGECRLSNFLVWQISYSELYFTNTLWPDFDRKEFKKAIDEFSNRERRFGRVSH

SEQ ID NO: 2910 - DNA, 669 bp, Campylobacter jejuni
  CDS (1)..(669): transl_table=11
atgaatgaattaaaacaccttgctgttgttatggatggcaataggcggtgggctagagctaagggttttttggcaaagcttggatattcccaaggagtcaaaactatgcaaaaattgatggaagtttgcatggaagaaaatatttcaaatttaagcctttttgcttttagtacggaaaattggaagcgtcctaaagatgaaattgattttatctttgaacttttagatcgttgtttagatgaagctttagaaaaatttgaaaaaaataatgtgcgtttaagagctataggtgatttatcgcgcttggaagataaagtaagagaaaaaattaccttagttgaagaaaaaacaaagcattgtgacgcactttgtgttaatttggctataagttatggtgcaagagatgagattataagagctgctaagcgtgtgattgaaaaaaaacttgagctaaatgaagaaaatttaacgcaaaatttagatttacctttagatgtggatttgatgcttcgcgttggaaacgctaaaagactttcaaatttcttactttggcagtgttcatatgctgaaatttattttagtgaaactttatttccatctcttaccaagagagaatttaaaaggattattaaagaatttagaaatagagaaagaacttttggaaaatga

SEQ ID NO: 2911 - protein, 222 aa, Campylobacter jejuni
MNELKHLAVVMDGNRRWARAKGFLAKLGYSQGVKTMQKLMEVCMEENISNLSLFAFSTENWKRPKDEIDFIFELLDRCLDEALEKFEKNNVRLRAIGDLSRLEDKVREKITLVEEKTKHCDALCVNLAISYGARDEIIRAAKRVIEKKLELNEENLTQNLDLPLDVDLMLRVGNAKRLSNFLLWQCSYAEIYFSETLFPSLTKREFKRIIKEFRNRERTFGK

SEQ ID NO: 2912 - DNA, 780 bp, Caulobacter crescentus
  CDS (1)..(780): transl_table=11
atgccggcgaccaccggtccgcaggacgtttcgggacgcgccggggggccggcgtccacggagcgcctgcacgtggccattatcatggatggcaacggccgctgggcgaagcagcggggcatgccgcgcgtgctcgggcatcgcgcgggcgtcaacgccctcaagcgcaccgtcgagggcgctcagagtcagaatgtcggtgttctgacggttttcggcttctcgaccgagaactggagtcgtcctccgcaggaggtctccgagttgatgggcctgctgaaggcctatgtcgaatcggacctggagcgactggccaaggccggcgtgcgcgtccgcatcatcgggcgtcgcacgggcctctccccggatatcgccgaggtgatcgaacgcgccgagcggcgtacggcgcagaactccgagttcgtcctgcaggtcgcgttcaattacggcgggcaagccgatatcaccgacgccgcgcgcgccttcgccgagcgggttgaacgaggcgaagcaaaggcttcggacctgaacgagaaaacgttcgagcagttcctctccaccgcatctgcgccgccgccggatttgattgttcgcaccagcggcgagcgtcggatttcgaacttccttctttgggactgcgcctacgccgagctcgtcttccaggacgttctatggccggactatggccccgaggctcttgcggcggcgatcgccgagtatcgcggtcgcgaccgccggtatggaggggtcgctgccgatgacgtcgccgtcgccggctaa

SEQ ID NO: 2913 - protein, 259 aa, Caulobacter crescentus
MPATTGPQDVSGRAGGPASTERLHVAIIMDGNGRWAKQRGMPRVLGHRAGVNALKRTVEGAQSQNVGVLTVFGFSTENWSRPPQEVSELMGLLKAYVESDLERLAKAGVRVRIIGRRTGLSPDIAEVIERAERRTAQNSEFVLQVAFNYGGQADITDAARAFAERVERGEAKASDLNEKTFEQFLSTASAPPPDLIVRTSGERRISNFLLWDCAYAELVFQDVLWPDYGPEALAAAIAEYRGRDRRYGGVAADDVAVAG

SEQ ID NO: 2914 - DNA, 753 bp, Chlamydophila abortus
  CDS (1)..(753): transl_table=11
atgtctctcaccttaaaacaggcggatcaagctagtctatccatgcagtctctaccgaagcatgttgccatcattatggacggaaatcggcgttggtatcggcaacatcaagcgcagtgctctatcaagagctcttctgggcattactacggcgctaaagttttacctaacattattgagtctgctttttccttgggtatagaggtcctcacattatttgccttctctaccgagaattttctacgctcggcggaagaagttgcagaactattttcactcttccatgctcaactagatgagcagcttccctaccttattgaaaataagatccggctacgttgcataggaaatttgttagccctacctcctgacttgcagcaacaaattgctaaagtagcatcggaaacccagagacatgggatgagggagcttgttttagctattaactatggtgggaaagatgagttggtacgcgcatttaaaaaactgcatcatgatctagtaaataaaaaaatatctttagattcggtttctgaagagttaatccgcttatatttagacacttcggaaattcctgacccagatttattaattcgcacgggtggcgaaatgcgtgtcagtaatttcctcttatggcaaatagcatatacagagctctatgtaaccgatgttttatggccggattttaaaccttatcatcttctagatgccattaaagcttaccaacacagatcacgacgaggaggcaaatag

SEQ ID NO: 2915 - protein, 250 aa, Chlamydophila abortus
MSLTLKQADQASLSMQSLPKHVAIIMDGNRRWYRQHQAQCSIKSSSGHYYGAKVLPNIIESAFSLGIEVLTLFAFSTENFLRSAEEVAELFSLFHAQLDEQLPYLIENKIRLRCIGNLLALPPDLQQQIAKVASETQRHGMRELVLAINYGGKDELVRAFKKLHHDLVNKKISLDSVSEELIRLYLDTSEIPDPDLLIRTGGEMRVSNFLLWQIAYTELYVTDVLWPDFKPYHLLDAIKAYQHRSRRGGK

SEQ ID NO: 2916 - DNA, 753 bp, Chlamydophila caviae
  CDS (1)..(753): transl_table=11
atgcctcttaccttaaaacaggaagatcaagttaatgtatccctacagtctctaccgagacatgttgccatcattatggatggcaatcgccgttggcatcagcaacatcaaacacaatgtacgctcaaacaaacctcagggcattactacggagctaaagctcttcctagtattattgaatctgctttttctttaggtattgaggttcttacactctttgccttctctacagagaattttctaagatcaaccgaagaagtcgaggaacttttttctcttttccactcgcaactggacgaacagtttccttatcttattgaaaataagattcgcctacgttgtatagggaacttatcggctctccctttacagttacaacaaaaaatttctgaaatctccttaaaaacccaccaaaactcgcatagagatcttgtgttagcaattaattatggaggaaaggatgaactggtacgtgcatttaaaaaactccatcaagatttggtagagcaaaaaatatcttctgactctatttctgaagagttaatccgcttgtatttagatacttcggagatgccggatcctgatttattaatccgcactggcggtgaaatgcgtgtcagtaatttcctcttatggcaaatagcgtatacagagctatacgtaactgatattttatggccagattttaaacccaatcattttctagatgccattaaagcttaccaacacagatcacgacgaggaggcagatag

SEQ ID NO: 2917 - protein, 250 aa, Chlamydophila caviae
MPLTLKQEDQVNVSLQSLPRHVAIIMDGNRRWHQQHQTQCTLKQTSGHYYGAKALPSIIESAFSLGIEVLTLFAFSTENFLRSTEEVEELFSLFHSQLDEQFPYLIENKIRLRCIGNLSALPLQLQQKISEISLKTHQNSHRDLVLAINYGGKDELVRAFKKLHQDLVEQKISSDSISEELIRLYLDTSEMPDPDLLIRTGGEMRVSNFLLWQIAYTELYVTDILWPDFKPNHFLDAIKAYQHRSRRGGR

SEQ ID NO: 2918 - DNA, 762 bp, Chlamydia muridarum
  CDS (1)..(762): transl_table=11
atgtctctagctttagaacaggcgaacccaattcaagaaaattttctacgagagccccctctccctaagcatatcgccatcatcatggatggaaaccgtcgatggcaaaagaaacatgaacaattttgtaaaagcaatgccatctccggtcaccgtcgaggagctgacagcatcccgcaaattgttgatacagctgcactcctaggagtagaagctctcaccttgttcgcgttctctacagaaaacttttctagatcaaaaacagaagtcgctgaattattttccttatttaactcacagttgcatagtaaactctcttttctgcacgatcgggaaatccggctacgatgtatcggagacttatccaaactccctcaagaattgcaaaataacattgcaaaagcagtctccgccacaacacactactcccatatggaattaatttttgcgattaactatggaagtaaaaacgaattagttcgtgcgttcaaggaattgcatcaggaccttacaaacaaaaaaatctctatcaatgaaatttctgaagagcttatcagctcttacttagacacatctggcctccctgacccggatttgcttattcgtacaggaggtgaaatgcgtgtcagtaattttctcttatggcaaatagcttatacagaactttacgtaacagatgtgttatggcctgatttcacggcccacgacttgttagaagcaattaaaacataccaacaacgatcaaggcgcggagggaaataa

SEQ ID NO: 2919 - protein, 253 aa, Chlamydia muridarum
MSLALEQANPIQENFLREPPLPKHIAIIMDGNRRWQKKHEQFCKSNAISGHRRGADSIPQIVDTAALLGVEALTLFAFSTENFSRSKTEVAELFSLFNSQLHSKLSFLHDREIRLRCIGDLSKLPQELQNNIAKAVSATTHYSHMELIFAINYGSKNELVRAFKELHQDLTNKKISINEISEELISSYLDTSGLPDPDLLIRTGGEMRVSNFLLWQIAYTELYVTDVLWPDFTAHDLLEAIKTYQQRSRRGGK

SEQ ID NO: 2920 - DNA, 753 bp, Chlamydia pneumoniae
  CDS (1)..(753): transl_table=11
ttgtctttagctaccaacaatgctgaatccaagttcccctctctacagcgccttcccaaccatgttgctatcattatggacggcaatcgccgatggtacaaaaagcatagggaggagtgcggccacacacacacgtcaggtcattattatggcgctaaagtccttccaaatattttaaatgcggttcttgatttaggaattaaagttcttactctctatacgttttcaacagaaaattttgggagaccaaaagaggaaattcaagaaatatttaatattttctatactcagttagacaagcaacttccttatctaatggaaaatgaaatctgcttacgttgtataggagacctttccaagctccctaaaggcatccaaacgaaaatcaaccatgtgagtcgcatgacggcatcgttctcgcgtttagagctcgtattagctgtcaactacggtggcaaagatgagttagtccgtgcatttaaaaaattacatgttgatattctaaataaaaaaatatcttctgacgacctttcagaatctttgattagctcatacttagatacttcaggacttacggaccccgacttacttatccgtacagggggtgaaatgcgtgtcagtaatttcttattgtggcaaatagcatatacagaactatatatcacggataccttgtggccagattttacgcctcaagatttgtttgaagcgattaacgtataccagcaaagatcaagacgaggggggaaatag

SEQ ID NO: 2921 - protein, 250 aa, Chlamydia pneumoniae
MSLATNNAESKFPSLQRLPNHVAIIMDGNRRWYKKHREECGHTHTSGHYYGAKVLPNILNAVLDLGIKVLTLYTFSTENFGRPKEEIQEIFNIFYTQLDKQLPYLMENEICLRCIGDLSKLPKGIQTKINHVSRMTASFSRLELVLAVNYGGKDELVRAFKKLHVDILNKKISSDDLSESLISSYLDTSGLTDPDLLIRTGGEMRVSNFLLWQIAYTELYITDTLWPDFTPQDLFEAINVYQQRSRRGGK

SEQ ID NO: 2922 - DNA, 798 bp, Chlorobium tepidum
  CDS (1)..(798): transl_table=11
atgccccagtggttcacatcgaaatctgatcctgaagatacccgaatccaggaaacgctgaaatcatcctgcgtgcttccccgacatatcggcatcatcatggacggaaacggccggtgggcgaaaatcaaaggcaagtcgcgcattgcaggccatgtggctggtgttgaatcggtgagagatgtggtcgaggcatcctcgcaactcggcatcgaaaacctgacgctgttcaccttttcgatcgagaactggaaaagaccgaaacctgaaatttcggccctgatgaagctgctcatcaaggtgctcagaaaagaggccgtgaaactgcttgaaaacgatatccgattggaggtcatcggagatatggagatgatccccgatgacgtgcgcaagacactcgatgaaaccatagagctgaccagaaaaaaccgaggcatggccatgaccatcgccctgagctatagcggaaaatgggacatcacccaggcttgtcggcacatcgcccttcaggtaaaacagggtttgctcgatcccgaaaccatagatgaaaatctatttgcttcgtatctttcaaccgcatcaatgcctgatcctgatctgctgatacgaaccagcggcgagtaccgcatcagcaattttatgctctggcaaaacgcctattccgaaatcattttcagtaacaccctttggcccgatttccggcgcaacgaattgtatgaagccatccgggagtttcaaaaacgcgaacggcggtttggcaaaaccagcgagcaactgaagaccaatgaagtagaataa

SEQ ID NO: 2923 - protein, 265 aa, Chlorobium tepidum
MPQWFTSKSDPEDTRIQETLKSSCVLPRHIGIIMDGNGRWAKIKGKSRIAGHVAGVESVRDVVEASSQLGIENLTLFTFSIENWKRPKPEISALMKLLIKVLRKEAVKLLENDIRLEVIGDMEMIPDDVRKTLDETIELTRKNRGMAMTIALSYSGKWDITQACRHIALQVKQGLLDPETIDENLFASYLSTASMPDPDLLIRTSGEYRISNFMLWQNAYSEIIFSNTLWPDFRRNELYEAIREFQKRERRFGKTSEQLKTNEVE

SEQ ID NO: 2924 - DNA, 762 bp, Chlamydia trachomatis
  CDS (1)..(762): transl_table=11
atgtctttagctttagaacaggcgaccctaattcaagaaaatcttccgcaagggaattccctccctagacatatcgccatcatcatggatgggaatcgtcgttggcaaagaaaacatgaacaattttgtcaaaaacgtgctatatctggccaccgtcagggagctgatagcattccacaaattgttgacacggctttacacctaggggtggaggctcttacgctatttgctttctctacagaaaatttctctagatcgaaatcggaagtcgcagaattattttctttattcaactcgcagttgcgcagcaagctctctttcctgcatgatcgggagatccgattacggtgtattggcgacttatcgaaacttcctcaagaattacaaaacaacattgagcaagcctcctccgcgacagctcattactcccgcatggagttaatttttgcgattaattacggaagtaaagacgaacttgttcgcgcattcaaagaattacatcaggatcttgcaagtaaaaaaatctcggtcaacgacatttctgaagagcttatcagctcctacttagacacttctggccttcctgacccagatttgcttattcgtacgggaggtgaaatgcgtgtcagtaattttctcttatggcaaatagcctatacagaactttatgtaacagacgtgttatggcctgatttcacagccaatgacttgctagaagcgattaaaacataccaacaacgatcaaggcgcggaggtaaataa

SEQ ID NO: 2925 - protein, 253 aa, Chlamydia trachomatis
MSLALEQATLIQENLPQGNSLPRHIAIIMDGNRRWQRKHEQFCQKRAISGHRQGADSIPQIVDTALHLGVEALTLFAFSTENFSRSKSEVAELFSLFNSQLRSKLSFLHDREIRLRCIGDLSKLPQELQNNIEQASSATAHYSRMELIFAINYGSKDELVRAFKELHQDLASKKISVNDISEELISSYLDTSGLPDPDLLIRTGGEMRVSNFLLWQIAYTELYVTDVLWPDFTANDLLEAIKTYQQRSRRGGK

SEQ ID NO: 2926 - DNA, 756 bp, Chromobacterium violaceum
  CDS (1)..(756): transl_table=11
ttgttttccggttcttcgaatgcagtgccggaggggcgcgagccgccccggcatatcgccatcatcatggatggcaacggccgctgggccaagaaacgcttcctgccgcgcgtagccggccacaagcgcggactggacgcggtgcgcgaggtggtgaaggcctgcaaggaaatgggcgtcggctatctgacgctgttcgccttctccaccgaaaactggcggcgtccgcaggaggaagtgtcctttctgatggacctgttcctgcgcgcgctcgagcatgaggtggccaagcttcacaacaacaatatccgcctgaaggtgctgggttcgcgcgagcgtttcagcgcggagttgtccgagcgcatagaccgcgccgaggccaagaccgccggcaacgacgggctggtgctgaccatcgccgccgactacggcggccgctgggatatcgtgcacgcggtgaatcggctgatcgccgaaggccggtccgagatcaccgaggagatggtcaccgatcgcctgggcatggcatgggcgccggagccggacctgttcatccgcaccggcggcgagcagcgcatcagcaatttcctgctgtggcagctggcgtattccgagctgtatttcaccgacctgctgtggcccgatttcgaccgagcggcgctgcaggaggcgatccactcctactggcagcgtgagcgccgctttggccgcaccagcgagcaattgcccgaacacctgcgtcgagacaagctctga

SEQ ID NO: 2927 - protein, 251 aa, Chromobacterium violaceum
MFSGSSNAVPEGREPPRHIAIIMDGNGRWAKKRFLPRVAGHKRGLDAVREVVKACKEMGVGYLTLFAFSTENWRRPQEEVSFLMDLFLRALEHEVAKLHNNNIRLKVLGSRERFSAELSERIDRAEAKTAGNDGLVLTIAADYGGRWDIVHAVNRLIAEGRSEITEEMVTDRLGMAWAPEPDLFIRTGGEQRISNFLLWQLAYSELYFTDLLWPDFDRAALQEAIHSYWQRERRFGRTSEQLPEHLRRDKL

SEQ ID NO: 2928 - DNA, 774 bp, Clostridium acetobutylicum
  CDS (1)..(774): transl_table=11
atgctaaattttataaggtctgataaagacaaaggtaaaggcaatgataatgatattaatttttctaatataccaaaacatattgcaattataatggatggtaatggtagatgggcaaaaaaaagaaatctccctagaactatgggacataaagctggtggtgaagctttaaaaagaatagtaagagaatgcagtgatataggtgtgaaatatttaactgtgtatggattttcaactgaaaattggataagacctaaggaagaagttaacgcaattatgagacttattgttgaatttttaaaaagagaatttaatgaacttaataaaaataatgttattataaatccaataggcaatattttaggattgccagaggcttgtattacagcattaaatgatgcaaaaaataaaactaaaaataacactggtcttatgcttaatctagcacttaattatggtggcagagatgaaatattaaatgcagtaaagaatatatttgcgagttatgaggaaaataagatatctaaagatgagatatttaacttaagtgatgaagaattctcttcgtatttatatacaggttgtattccggatccagatataataatacgtccaagtggggagaaaagattaagtaattttcttctttggcaatgtgcatattctgaattttggtattctaatataaattggcctgatttttctatagaagatcttcatacagctataaaagattatcagaatagggatagaagatttggaggcgtaaaataa

SEQ ID NO: 2929 - protein, 257 aa, Clostridium acetobutylicum
MLNFIRSDKDKGKGNDNDINFSNIPKHIAIIMDGNGRWAKKRNLPRTMGHKAGGEALKRIVRECSDIGVKYLTVYGFSTENWIRPKEEVNAIMRLIVEFLKREFNELNKNNVIINPIGNILGLPEACITALNDAKNKTKNNTGLMLNLALNYGGRDEILNAVKNIFASYEENKISKDEIFNLSDEEFSSYLYTGCIPDPDIIIRPSGEKRLSNFLLWQCAYSEFWYSNINWPDFSIEDLHTAIKDYQNRDRRFGGVK

SEQ ID NO: 2930 - DNA, 762 bp, Clostridium perfringens
  CDS (1)..(762): transl_table=11
atgttagatttttttagtaaaaaaggaaatgaagattcagaagaaatagttctaattgaagataaaatgccaaagcatattgccataataatggatggtaatggaagatgggcaaaaaaaagaggtcttccaagaactatgggacatagagctggggttaagactataaaaactattgtaaaagaatgcgataaattaggagtgaaatatttaactttatatgctttctctactgaaaactggaaaagaccagaagatgaagttaatgctcttatgaagttagttgttgaatttataaaaaatgaaattgatgaacttcatcaaaacggagtaagggtacaaactataggtgatttatcaagattcccagaagaacctaaaaaagctatactttgggctatggaaaaaactaaagataacactggagtagttttaagcttagcattaaattatggtggaagaaatgaaatagttagaggtataaaatctgtaatagaagatgttaaagcgggcaaaataagtatagatgatataaacgaagatatgtttaatgactatctttatactaaaggaatgccagatccagatcttataataagaccaagtggagaacaaagacttagcaacttcttattatggcaatgtgcatactcagaattttggtattctcaaataaactggccagattttaatggtgaagatttaagaaaagctatttttgattatcaaaatagagatagaagatttggtggaattaaataa

SEQ ID NO: 2931 - protein, 253 aa, Clostridium perfringens
MLDFFSKKGNEDSEEIVLIEDKMPKHIAIIMDGNGRWAKKRGLPRTMGHRAGVKTIKTIVKECDKLGVKYLTLYAFSTENWKRPEDEVNALMKLVVEFIKNEIDELHQNGVRVQTIGDLSRFPEEPKKAILWAMEKTKDNTGVVLSLALNYGGRNEIVRGIKSVIEDVKAGKISIDDINEDMFNDYLYTKGMPDPDLIIRPSGEQRLSNFLLWQCAYSEFWYSQINWPDFNGEDLRKAIFDYQNRDRRFGGIK

SEQ ID NO: 2932 - DNA, 768 bp, Clostridium tetani
  CDS (1)..(768): transl_table=11
atgtggaatatatttaaaaataaaagtggacaaagccataaagtgaaggacaaattccaattagatttagataatataccaaaacatatagccattataatggatggaaatggtagatgggctaaagaaagaaaactacctcgtagtttaggacataaagcaggggtagaaactataagggatatagttaaagaatgtaacaatataggtgttagatatcttactctatatgctttttccacagaaaattggaaaagaccaaaggaagaaattaatgctcttatggaattattagtaaattatctaagaaaagaagtagctgaattacatcaaaataatgtagttgtaaatactataggagacgtatctaaattacctaaagcttgtgaagatgaacttatgaaagcatacaataaaactaaaaataatacaggacttgtattaaatttagctcttaattatggtggaagagatgaaattattagagctataaaactaatgtataaggatatagagaaaaaaggactagacatagaaaatgtaaatgaagatttattaaaaaactatttatatactaaaggtatgccagaccctgatttaattataaggcctagcggagaacaaagaataagtaattttcttttatggcaatgtgcttattcagaattttggtattctaatataaaatggccagattttaaaaaacatcatttacataaggctataaaggattatcaaaatagaaatagaagatttggtggagtataa

SEQ ID NO: 2933 - protein, 255 aa, Clostridium tetani
MWNIFKNKSGQSHKVKDKFQLDLDNIPKHIAIIMDGNGRWAKERKLPRSLGHKAGVETIRDIVKECNNIGVRYLTLYAFSTENWKRPKEEINALMELLVNYLRKEVAELHQNNVVVNTIGDVSKLPKACEDELMKAYNKTKNNTGLVLNLALNYGGRDEIIRAIKLMYKDIEKKGLDIENVNEDLLKNYLYTKGMPDPDLIIRPSGEQRISNFLLWQCAYSEFWYSNIKWPDFKKHHLHKAIKDYQNRNRRFGGV

SEQ ID NO: 2934 - DNA, 762 bp, Escherichia coli O157
  CDS (1)..(762): transl_table=11
gtgatgttgtctgctactcaaccacttagcgaaaaattgccagcgcatggctgccgtcatgttgcgatcattatggacggcaatggtcgctgggcaaaaaagcaagggaagattcgtgcctttgggcataaagccggagcaaaatccgtccgccgggctgtctcttttgcggccaacaacggtattgaggcgttaacgctgtatgcctttagtagtgaaaactggaaccgaccagcgcaggaagtcagtgcgttaatggaactgtttgtgtgggcgctcgatagcgaagtaaaaagtctgcaccgacataacgtgcgtctgcgtattattggcgataccagtcgctttaactcgcgtttgcaagaacgtattcgtaaatctgaagcgctaacagccgggaataccggtctgacgctgaatattgcggcgaactacggtggacgttgggatatagtccagggagtcaggcaactggctgaaaaggtgcagcaaggaaacctgcaaccagatcagatagatgaagagatgctaaaccagcatgtctgtatgcatgaactggcccctgtagatttagtaattaggactgggggggagcatcgcattagtaactttttgctttggcaaattgcctatgccgaactttactttacagatgttctctggcccgatttcgatgaacaagactttgaaggggcgttaaatgcctttgctaatcgagagcgtcgtttcggcggcaccgagcccggtgatgaaacagcctga

SEQ ID NO: 2935 - protein, 253 aa, Escherichia coli O157
MMLSATQPLSEKLPAHGCRHVAIIMDGNGRWAKKQGKIRAFGHKAGAKSVRRAVSFAANNGIEALTLYAFSSENWNRPAQEVSALMELFVWALDSEVKSLHRHNVRLRIIGDTSRFNSRLQERIRKSEALTAGNTGLTLNIAANYGGRWDIVQGVRQLAEKVQQGNLQPDQIDEEMLNQHVCMHELAPVDLVIRTGGEHRISNFLLWQIAYAELYFTDVLWPDFDEQDFEGALNAFANRERRFGGTEPGDETA

SEQ ID NO: 2936 - DNA, 816 bp, Enterococcus faecalis
  CDS (1)..(816): transl_table=11
atgttacgtttttttccgcaaaaaaataaatatgtagaagaagcaagccagtacgcctttgataaagaaggccaaattccgcagcacattgccattattatggacggaaatggccggtgggcacagaatcgaagactgccgagaattgctggacataaagaaggcatggatacggtcaaaaaaataacgaagcatgctagtcatttaggcgttaaagttttaacactttatgcattttcaacggaaaattggaagagaccaacagatgaagtcaatttcttaatgcaattgcctgttgatttttttgatacattcgtgcctgaattaattaaggaaaatgttaaagtcaatgtaatgggctaccaagagtttctaccaagccatacgcaagatgctgttaagcgcgccattgagcaaaccaaggacaatacgggcatggttttgaactttgctttgaattatggggcgcgtgcggagctactaactgccatgaaacagattgctgcagaggtttcagaaaaagcatatacggcagatgagattacagaagaaacgatcgcagatcacttaatgactggctttttacccacggaacttcgtgatccagaattgttgattcgaacaagtggggaagagagaattagtaatttcttgctatggcaaattgcttatagcgagttgttttttacaaaagcattatggcctgatttttcaggagacactttagaaaccgcgattgcttctttccaaaatcgtaatcgtcgttttggtggtctaaaagaaactacagaaacagaagggagcgatccgcagtga

SEQ ID NO: 2937 - protein, 271 aa, Enterococcus faecalis
MLRFFPQKNKYVEEASQYAFDKEGQIPQHIAIIMDGNGRWAQNRRLPRIAGHKEGMDTVKKITKHASHLGVKVLTLYAFSTENWKRPTDEVNFLMQLPVDFFDTFVPELIKENVKVNVMGYQEFLPSHTQDAVKRAIEQTKDNTGMVLNFALNYGARAELLTAMKQIAAEVSEKAYTADEITEETIADHLMTGFLPTELRDPELLIRTSGEERISNFLLWQIAYSELFFTKALWPDFSGDTLETAIASFQNRNRRFGGLKETTETEGSDPQ

SEQ ID NO: 2938 - DNA, 762 bp, Erwinia carotovora subsp
  CDS (1)..(762): transl_table=11
atgccgtccgataatcaaaagaatactaacgatctgccactcgccgggccgcggcatgttgccattatcatggatggcaatggtcgctgggcgaaaagccgggggaagatgcggatttttggccatcaggctggtgtaaaggctgtgcgacgttcagtcagtttcgcagtgaaccacggattggatgctctgacactttacgcatttagcagtgaaaactggaaccgtccggcgcaggaagtttccgcactcatggagctgtttgttcgagcactggacagcgaagtgaaaagcctgcacaagcacaatgttcgcttgcgggtgattggcgatatcggccgcttcagtccgcgtttacaagagagaatccgtcgttcagaagtgctgacagaaaagaatcaggggctcacactgaatattgccgcgaattatggcggccgttgggatattattcagggagtacggcaacttgcagagcaggtgcaggaaggtattctgcgccctgatagcattaatgaagcgtcattgtgtcagtatatctgtctgaatgatctggctccggttgatttggtgatcagaaccggtggagaacaccgcatcagtaattttcttctgtggcaaattgcttatgctgaactttactttactgatgtcctctggcctgatttcgatgaacaagtctttgaaggtgcgctgaatgcttttgcacaacgcgagcgccgcttcgggggaacaacacctatcgatgctgatgcatcctag

SEQ ID NO: 2939 - protein, 253 aa, Erwinia carotovora subsp
MPSDNQKNTNDLPLAGPRHVAIIMDGNGRWAKSRGKMRIFGHQAGVKAVRRSVSFAVNHGLDALTLYAFSSENWNRPAQEVSALMELFVRALDSEVKSLHKHNVRLRVIGDIGRFSPRLQERIRRSEVLTEKNQGLTLNIAANYGGRWDIIQGVRQLAEQVQEGILRPDSINEASLCQYICLNDLAPVDLVIRTGGEHRISNFLLWQIAYAELYFTDVLWPDFDEQVFEGALNAFAQRERRFGGTTPIDADAS

SEQ ID NO: 2940 - DNA, 774 bp, Francisella tularensis subsp
  CDS (1)..(774): transl_table=11
ttgtttattctttcttatcatttagctaacttaatttttttcataatatttatgacatcggctaaagaaaatattctaaggcatcttgctattattatggatggtaatggtcggtgggcaaagagtagattaaagccgagaatatttggtcatagaaattcggtctcgagtgttgatgcaactatagagtactgtgttgagaataatatagaaatgcttactctttttgcatttggtcgagataattggttaagaccagctcaagaagtcagtgatcttatggatcttttttataaaactctaaaagataaaactccaaagctacatgataataatattgttgttactgttgttggagatcgctcacgcttgtctaataagcttattggtatgattgaatatagtgagtcattaactaagtcaaatacaggactaaagcttagattggctgttgattatgctggtcgatgggatatagttgaggctactagagctattgctagagaagttgatattggtaagcttagtgttgatgagattgatcagaacagtttcgctaaatatttggttgggggtaatatgcctgtcgatttacttattcgtacaagtggagaagtgcgtctgagtgattttatgttgtggcagttagcctatgcggagatgtattttacagatattatgtggccagatttttctaagcaagaattaactagagctgttgagtatttttattctcgtcaaagaagatttggcaaaagtggtgaacaaatttaa

SEQ ID NO: 2941 - protein, 257 aa, Francisella tularensis subsp
MFILSYHLANLIFFIIFMTSAKENILRHLAIIMDGNGRWAKSRLKPRIFGHRNSVSSVDATIEYCVENNIEMLTLFAFGRDNWLRPAQEVSDLMDLFYKTLKDKTPKLHDNNIVVTVVGDRSRLSNKLIGMIEYSESLTKSNTGLKLRLAVDYAGRWDIVEATRAIAREVDIGKLSVDEIDQNSFAKYLVGGNMPVDLLIRTSGEVRLSDFMLWQLAYAEMYFTDIMWPDFSKQELTRAVEYFYSRQRRFGKSGEQI

SEQ ID NO: 2942 - DNA, 693 bp, Fusobacterium nucleatum subsp
  CDS (1)..(693): transl_table=11
atggaaaaaaatatacccaaacatattgcaataattatggatggtaatggaagatgggcaaaaaagagagggcttgccagaagctttgggcatatggaaggagcaaaaacattaagaaaagctcttgaatatttaacagaaattggagttaaatatttaactgtttatgctttctcaacagaaaattggaatagaccacaagatgaagtttcaacacttatgaaactatttttaaaatatataaaaaatgaaagaaaaaacatgatgaaaaataagattcgtttttttgtttcaggtagaaaaaacaatgttccagaaaaattacaaaaagaaattgaaaagttggaagaagaaactaaaaataatgataaaataacattaaatatagcatttaactatggtagcagagcagaaatagttgatgcagtgaatagaataataaaagatggaaaagaaaatataacagaagaagatttttctaaatatttatataatgattttccagatccagacttagttataagaacaagtggagagatgagaatatcaaatttcttattatggcaaatagcttattcagagctttatattacagatgttttatggccagattttgatgaaaaagaaatagataaggctattgaaagttataatcagagagaaagaagatttggaggagtaaaaaatgtttaa

SEQ ID NO: 2943 - protein, 230 aa, Fusobacterium nucleatum subsp
MEKNIPKHIAIIMDGNGRWAKKRGLARSFGHMEGAKTLRKALEYLTEIGVKYLTVYAFSTENWNRPQDEVSTLMKLFLKYIKNERKNMMKNKIRFFVSGRKNNVPEKLQKEIEKLEEETKNNDKITLNIAFNYGSRAEIVDAVNRIIKDGKENITEEDFSKYLYNDFPDPDLVIRTSGEMRISNFLLWQIAYSELYITDVLWPDFDEKEIDKAIESYNQRERRFGGVKNV

SEQ ID NO: 2944 - DNA, 774 bp, Geobacillus kaustophilus
  CDS (1)..(774): transl_table=11
atgttcaataaaatgcgaaaaacaaaagagaaagacgtcccggtgacgaaagaagaggtgctcaggcatccgatgccgaaccacgtcgccatcattatggacggaaacgggagatgggcgaaaaagcgggcgctgccgagggcggccggccattacgaaggcatgcaagttgtgcgcaaaatcactcgttttgcgaatgagctggggattcagattttgtcgctttacgcgttttcgacagaaaactggaaacgtccgaaaagtgaagtcgattatttgatgaagctgccggaacagtttttgacgacgtttcttcccgagctcgtcgccgaaaatgtcaaagtccaagtgatcggtcatacggaggcgctgcccgatcatacgcgccgggcggtcgagaaagccgtgaaggaaacaagcggcaacaccggccttgtgttaaactttgcccttaattatggaagccgggcggaaatcgctgccgccgtaaagcagatcgccaaagacgtcgaacgcgggatgctcgcgccggaagacatcaccgagccgctcatttcctcgtacttgatgacgagcgggctcgctgaccctgacttgctcatccgtacgagcggggagattcgcttgagcaatttcatgctttggcagttggcgtatacggaactttggtttacggatgtcttatggccggattttacggagcaacatttcttagaggcgattgccgcttaccagcggcgcgaccgccgatttggaggagtgtcagcgcgatga

SEQ ID NO: 2945 - protein, 257 aa, Geobacillus kaustophilus
MFNKMRKTKEKDVPVTKEEVLRHPMPNHVAIIMDGNGRWAKKRALPRAAGHYEGMQVVRKITRFANELGIQILSLYAFSTENWKRPKSEVDYLMKLPEQFLTTFLPELVAENVKVQVIGHTEALPDHTRRAVEKAVKETSGNTGLVLNFALNYGSRAEIAAAVKQIAKDVERGMLAPEDITEPLISSYLMTSGLADPDLLIRTSGEIRLSNFMLWQLAYTELWFTDVLWPDFTEQHFLEAIAAYQRRDRRFGGVSAR

SEQ ID NO: 2946 - DNA, 741 bp, Geobacter sulfurreducens
  CDS (1)..(741): transl_table=11
atgcacggcctcatacccgataaactccccaggcacttggccattatcatggacggtaacggccgctgggctcaggaacggatgctcacgcggatcatcggccaccagaaaggggtggaaacggtcaggatcatcgtcgaggagtgttcccggctcggtatcggatatctgacgctattcgctttttcagctgagaactggcttcggccaaaaaccgaggtcaaggcgctgatggccctgctgaagaagtacattgcatctgaggctgcgcggatggatgcgaacaatatccggtttaatgtcatcggcaaccgtgatgaactgccgccggatgtgaataaagccgttcagggagcaatcgaccggaccagcggcaataccggtatgatccttactctggcactttcctacggcgcgcgccaggagatcatgacggcggctacgcggatagcctccgatattgcttccggcgtgctcaaggccgatgatctcagtgagactgcctttgcctcgtatctgttcaccagcgggctccctgatcccgattttctcatccgcacgagcggagagatgaggatcagcaattttcttctttggcagctggcctatacggagttctacttctcctcggtcaactggccagaattcacgccggaggaactgtaccgggcattgagcgattaccaggcccgcgagcggcgtttcggtcgcacaagcgcccagatcaacacgaggagctag

SEQ ID NO: 2947 - protein, 246 aa, Geobacter sulfurreducens
MHGLIPDKLPRHLAIIMDGNGRWAQERMLTRIIGHQKGVETVRIIVEECSRLGIGYLTLFAFSAENWLRPKTEVKALMALLKKYIASEAARMDANNIRFNVIGNRDELPPDVNKAVQGAIDRTSGNTGMILTLALSYGARQEIMTAATRIASDIASGVLKADDLSETAFASYLFTSGLPDPDFLIRTSGEMRISNFLLWQLAYTEFYFSSVNWPEFTPEELYRALSDYQARERRFGRTSAQINTRS

SEQ ID NO: 2948 - DNA, 750 bp, Gloeobacter violaceus
  CDS (1)..(750): transl_table=11
atgaccaccccgcatacgctcctgcgcagcctgccctccgatcttgatcccaatcgcctgccgcgccatgtcgccgccatcatggacggcaacggccgctgggcgtcaaagcgcaaccttccccgagtgatgggccatcaggctggggtgagtgccctcaaagagctgttgcgctgttgcaaagactggggcatcggtgctctcacggtctatgccttctcgacggagaactggaagcggccgcaatacgaggtcgaatttttgatggccctttttgagaaagtgctcaaccacgagctttcggagatggtggatgagggggtgcgcattcgcttcgtcggggcactcgcccatctgcccggagctctgcagagtgccatcgagggagcgatggcggccacagaggcgaacacggcggtcgagttcaccgtcgccaccaactacggtggccggcaagagatcgtcaatgcctgccgcgaactggccgagcaggtacggtcaggccgtctcctgcccgagcagatcgacgagaagctttttgcccagcacctctacacccgcgagcttagcgatcccgacttactgatccgcaccagcggcgagcagcgcctgagcaactatttgctctggcagatggcctataccgaaatttatgtagccgacgtgttatggcccgactttgaccgagcggccttccacgctgcgctgcaatcctaccaaggtcgccagcgtcgctttggtaaggtgtga

SEQ ID NO: 2949 - protein, 249 aa, Gloeobacter violaceus
MTTPHTLLRSLPSDLDPNRLPRHVAAIMDGNGRWASKRNLPRVMGHQAGVSALKELLRCCKDWGIGALTVYAFSTENWKRPQYEVEFLMALFEKVLNHELSEMVDEGVRIRFVGALAHLPGALQSAIEGAMAATEANTAVEFTVATNYGGRQEIVNACRELAEQVRSGRLLPEQIDEKLFAQHLYTRELSDPDLLIRTSGEQRLSNYLLWQMAYTEIYVADVLWPDFDRAAFHAALQSYQGRQRRFGKV

SEQ ID NO: 2950 - DNA, 729 bp, Haemophilus ducreyi
  CDS (1)..(729): transl_table=11
gtggaaacttctgtgaattttgatccttcaaatatgcctcaacacgttgcaatcattatggatggtaatgggcgttgggcaaaaaaacaaggtaagttacgtgtttttggtcaccaaaatggtgttaatgctgttcgtgctgctgtacactttgcggctaaatacggtataaaagtacttacattgtatgcctttagcagtgaaaactggaaccgccccgctacagaagtatccgcattaatgtcgctttttatacaggcattaaatactgaagtgagtaaactacacaaacataatatccgcttaaatattttaggcgataaaactcgatttagtgatagtttacaaaaacgtatcattgaatcggaaacgttaactgctcacaatacaaggctaacacttaatattgcggctaattatggtagtcactgggatatcacagaagcaacaaaaaaactcgcagaaaaagtcaaattaggtaaaatatccgtgacagatattacccctgaaaaagttcaacgtgcattagtaaccgctgaacaaccacctgtcgatttactcattagaacaagtggtgaacaacgcatcagcaattttttactttggcaaattgcctatgcagaactattttttagcgatgtattatggcctgattttgatgaaacaagcttcagcgaagctatttacgcttatcaacaaagagaacgccgttttggtggctgtgaataa

SEQ ID NO: 2951 - protein, 242 aa, Haemophilus ducreyi
METSVNFDPSNMPQHVAIIMDGNGRWAKKQGKLRVFGHQNGVNAVRAAVHFAAKYGIKVLTLYAFSSENWNRPATEVSALMSLFIQALNTEVSKLHKHNIRLNILGDKTRFSDSLQKRIIESETLTAHNTRLTLNIAANYGSHWDITEATKKLAEKVKLGKISVTDITPEKVQRALVTAEQPPVDLLIRTSGEQRISNFLLWQIAYAELFFSDVLWPDFDETSFSEAIYAYQQRERRFGGCE

SEQ ID NO: 2952 - DNA, 720 bp, Haemophilus influenzae
  CDS (1)..(720): transl_table=11
atgatagagttggatcaaacaaatataccaaaacacgttgccattattatggatggtaatggccgttgggcaaaacagaaaaataaaatgcgaattttcggacacaccaatggcgttactgcggtacgcaaagcagtggcttatgcacgacaaatcggtgtggaagtactcacactttatgcctttagtagcgaaaattggagtcgcccagaacaagaaatcagcgcgttaatgtcgctttttatgcaagccttggatcgcgaagtgaaaaaattacataaaaataatatttgtctgaaaattataggcgatgtatctcgttttagtgaaactttacaagaaaaaatcaaaaaagcggaaaatttaacagaaaaaaataccgcacttacactcaatattgcggcaaattacggcggttgttgggatattattcaagccgctaaacaaattgcagaaaaagttaaaaaagaagaaatgtcagtttcagatattaataactcgacttttcaacatcatcttgcaacccaaaatgcaccacctgtggatttattaattcgcaccagtggagaacagcgcataagcaactttttattatggcaaattgcctatgcggaattatatttttccgatgtgctttggcctgattttaatcaattagaatttaatcgcgcgattgcaagttatcaacaacgtcatcgccgttttggcgggactgaatag

SEQ ID NO: 2953 - protein, 239 aa, Haemophilus influenzae
MIELDQTNIPKHVAIIMDGNGRWAKQKNKMRIFGHTNGVTAVRKAVAYARQIGVEVLTLYAFSSENWSRPEQEISALMSLFMQALDREVKKLHKNNICLKIIGDVSRFSETLQEKIKKAENLTEKNTALTLNIAANYGGCWDIIQAAKQIAEKVKKEEMSVSDINNSTFQHHLATQNAPPVDLLIRTSGEQRISNFLLWQIAYAELYFSDVLWPDFNQLEFNRAIASYQQRHRRFGGTE

SEQ ID NO: 2954 - DNA, 909 bp, Halobacterium salinarium
  CDS (1)..(909): transl_table=11
atgcgaactcggctgtgggacgccgccagcgccgtctacgagcgtctcctgaccagagagatcgacggcgcgccggcccacgtcgcggtcatccaggacgggaaccggcggtacgcccgcgagcacggcgacgacccgaccgacggctaccagtcgggcgcgcggacgaccgagcgcgtcctggagtggtgttcggacctgggcgtcgaggagctcacgctgtacgcgttctccacggagaacttcgagcgcccgcccgaccagcaacaacacctgttcgacctgctcgaatcgaagctccgggagttcgcggacgccgaccgcgtccacgccgaccgcgtgcggatccgtgccatcggcgacaccggtcgcctcccccagcgcgtccgggacgccatcacgtacgcggaatcccggacggcgggctacgacgggttcacgctgaacgtcgcgctggcgtacggcggccgcgacgagctgctcaccgccgcccgcggtgtcgccgacgcggtcgccgccggcgacctcgaccccgcggacatcgacgcccaggccatcgaatcccggctgcacaccagccccgtccgggacgtcgacctcatcattcgcaccggcggcgacgagcgcacgtcgaatttcctgccgtggcacgccaacggcagcgaggccgccgtcttcttctgtacgccgtactggccggagttctcgaaagtcgatctgctgcgcgcgatccgcacgtacgaatcccgggcggcgtcctggcggcagaccagagcgaaacgcgcgctcgcactggttcgcgcgctcggcagtgaggtgggtgaggcgcgccgggtcctcgaccggttcaagggcgcgctcccggatccgcccgaggatgtcgaggcggagacgcagtcggcggactga

SEQ ID NO: 2955 - protein, 302 aa, Halobacterium salinarium
MRTRLWDAASAVYERLLTREIDGAPAHVAVIQDGNRRYAREHGDDPTDGYQSGARTTERVLEWCSDLGVEELTLYAFSTENFERPPDQQQHLFDLLESKLREFADADRVHADRVRIRAIGDTGRLPQRVRDAITYAESRTAGYDGFTLNVALAYGGRDELLTAARGVADAVAAGDLDPADIDAQAIESRLHTSPVRDVDLIIRTGGDERTSNFLPWHANGSEAAVFFCTPYWPEFSKVDLLRAIRTYESRAASWRQTRAKRALALVRALGSEVGEARRVLDRFKGALPDPPEDVEAETQSAD

SEQ ID NO: 2956 - DNA, 714 bp, Helicobacter hepaticus
  CDS (1)..(714): transl_table=11
atgaagccctcttatccacagcatattgcagtgattatggacggcaatggacgttgggcaaaaaaacagggtaaaaaacgcacacaagggcacaaagaaggtgcaaaaattgtccgagatataacgcaatggtgtgcagaaaaagggattccatatctcacgctctatgcgttttctaccgaaaattggaaacgccccaaaattgaggtggattttttaatgaaacttttagaaaaatatttgcacgatgaaaaaccagtgtatatgaaaaatcatatccgattccgggtcattggagatattagcgtttttaacacacgccttaaaaatgctattttagagcttgaacacgccacgcaaaaccacacaaaactcacgcaaattctcgctcttaattatggctctcgcgatgaaattgcgcgcacttttattaaacttgctcatacgctcaccccgcacactcttgcatcgcttagtagtcaagatataatttctatgattaatgccaaccttgatacagccacgctgcccgatgtagatatgctaatacgaacaggtggcgaaaaacgtatctcaaattttatgctttggcaggcaagctatgccgaactttttttcacacctactttatttcctagctttggtaaaaatgaacttaatgctatgcttgaagaattcttgcaacgacagagacgatttgggggcgtagaataa

SEQ ID NO: 2957 - protein, 237 aa, Helicobacter hepaticus
MKPSYPQHIAVIMDGNGRWAKKQGKKRTQGHKEGAKIVRDITQWCAEKGIPYLTLYAFSTENWKRPKIEVDFLMKLLEKYLHDEKPVYMKNHIRFRVIGDISVFNTRLKNAILELEHATQNHTKLTQILALNYGSRDEIARTFIKLAHTLTPHTLASLSSQDIISMINANLDTATLPDVDMLIRTGGEKRISNFMLWQASYAELFFTPTLFPSFGKNELNAMLEEFLQRQRRFGGVE

SEQ ID NO: 2958 - DNA, 705 bp, Helicobacter pylori J99
  CDS (1)..(705): transl_table=11
ttggatagcactctcaaacatcttgccattattatggatggtaatggcaggtgggctaaattaaagaataaagctagggcttatgggcataaaaagggcgtaaaaacccttaaagacattacgatctggtgcgctaaccataagttagaatgcttgactttatacgctttttctacggaaaattggaaacgccccaaaagtgaagtggattttttaatgaaaatgcttaaaaaataccttaaagatgagcgatccacttacttggataataacatacgcttcagggcgataggggatttagagggcttttctaaagaactaagggacacgattttacggcttgaaaacgataccaggtattttaaggattttacgcaagttttagcccttaattacggatctaaaaacgagctttcaagggcttttaaaagcttgctagaaaacccgcctaaccatatcaataatatagaaagcttagaaaatgaaatctctcatcgtttagacacgcatgatttaccggaagtggatttgttgttgcgaacagggggggaaatgcgcttgtctaattttttattgtggcagtccagttatgcggaattgtttttcacgccgattttatggcctgatttcacccctaaagatttagaaaacatcattagcgatttttacaaaagagtgcgcaaatttggggaattaaaatgctag

SEQ ID NO: 2959 - protein, 234 aa, Helicobacter pylori J99
MDSTLKHLAIIMDGNGRWAKLKNKARAYGHKKGVKTLKDITIWCANHKLECLTLYAFSTENWKRPKSEVDFLMKMLKKYLKDERSTYLDNNIRFRAIGDLEGFSKELRDTILRLENDTRYFKDFTQVLALNYGSKNELSRAFKSLLENPPNHINNIESLENEISHRLDTHDLPEVDLLLRTGGEMRLSNFLLWQSSYAELFFTPILWPDFTPKDLENIISDFYKRVRKFGELKC

SEQ ID NO: 2960 - DNA, 705 bp, Helicobacter pylori
  CDS (1)..(705): transl_table=11
ttggacaacactctcaaacatcttgccattattatggatggtaatggcaggtgggctaaattaaagaataaagctagggcttatggccataaaaagggcgtaaaaacccttaaagatatcacgatctggtgcgctaaccataagctagaatgcttgactttatacgctttttctacggaaaattggaaacgccctaagagtgaagtggattttttaatgaaaatgcttaaaaaataccttaaagatgagcgatccacttatttaaataataacatacgcttcagggcgataggggatttagagggcttttctaaagaattacgagatacgattttgcagcttgaaaacgataccaggcattttaaggattttacgcaagttttagcccttaattacggatctaaaaacgaactttcaagggcgtttaaaagcttgctagaaagcccgcctagccatataaaccttttagaaagtttagaaaatgaaatttctaatcgtttagacacgcatgatttgccggaagtggatttgttgttacggacagggggggaaatgcgcttgtctaattttttattgtggcagtccagctatgcggaattgtttttcacgccgattttatggcctgatttcacccctaaagatttagaaaacatcattagcgatttttacaaaagagtgcgcaaattcggggaattaaaatgctag

SEQ ID NO: 2961 - protein, 234 aa, Helicobacter pylori
MDNTLKHLAIIMDGNGRWAKLKNKARAYGHKKGVKTLKDITIWCANHKLECLTLYAFSTENWKRPKSEVDFLMKMLKKYLKDERSTYLNNNIRFRAIGDLEGFSKELRDTILQLENDTRHFKDFTQVLALNYGSKNELSRAFKSLLESPPSHINLLESLENEISNRLDTHDLPEVDLLLRTGGEMRLSNFLLWQSSYAELFFTPILWPDFTPKDLENIISDFYKRVRKFGELKC

SEQ ID NO: 2962 - DNA, 735 bp, Lactobacillus acidophilus
  CDS (1)..(735): transl_table=11
atgagtaaaaaagacaatgaattaaatcatttagccattatcatggatggtaatggtcgttgggctaaaaagagacataaaccaagatttgttggtcaccgtgaaggtatggataacgttgaacgaattactttagctgctaaccaactaggaattaaagtcttgactctatatgcattttcaactgaaaattgggctcgtcctaaagaggaggttgcatatttaatgaatcttcccgtacgtttttttgataaatatatgccaactttaatggaaaataatgttaaagttaacattatggggtatttagatgaattaccggaaaaaacgtataaaattgttcaacgtgctatgtctgaaacggtaaataatactggtttaattcttaattttgcttttaattatggttctagacgagaaataacttctgctgtaaaagaattgggtggaatgattgaatctggatctttaaagagtgaagagatcacagaaagtatgatttcagatcatttgatgactgggaattttggaaaatatcgagatcctgacttattaattagaacttctggtgaacaaagaatttctaatttcttgctttggcaattagcatattcagaacttgcttttagcgaaaaaaattggccagattttgataaagatgatttgaaagaatttgtagatgaatataagcaccgtaatcggcgcttcggtaaagtagacgaatcggatagttaa

SEQ ID NO: 2963 - protein, 244 aa, Lactobacillus acidophilus
MSKKDNELNHLAIIMDGNGRWAKKRHKPRFVGHREGMDNVERITLAANQLGIKVLTLYAFSTENWARPKEEVAYLMNLPVRFFDKYMPTLMENNVKVNIMGYLDELPEKTYKIVQRAMSETVNNTGLILNFAFNYGSRREITSAVKELGGMIESGSLKSEEITESMISDHLMTGNFGKYRDPDLLIRTSGEQRISNFLLWQLAYSELAFSEKNWPDFDKDDLKEFVDEYKHRNRRFGKVDESDS

SEQ ID NO: 2964 - DNA, 720 bp, Lactobacillus johnsonii
  CDS (1)..(720): transl_table=11
atgtcagaatcaaaaaaaccacttaatcatttagccataattatggatggaaatggtagatgggcaaaaaaaagacatttaccacgttttgtcggacatcgtcatggtatggataatattcgaaatattgctcttgccgccaataaattaggaataaaagttttaacactttatgctttttcaactgaaaattgggctcgtccgactgacgaagtaaactatttgatgcgtttaccaattgacttttttgataagtttatgccggaactaatggaaaataacgttcgggttaatatcatgggatttgtagacgaattacctgagaagacatatttagtaacccaaaaagccatggcagaaacagctaataatacaggaatggtattgaattttgcctttaactatggatcgcgtagagaaataacggctggagtacaagaaattgctcgtaaggtaaaagtcggggaaattgatattgatgatattagtgaaaaaatggtctcagatcatttgctgactcattctttagctccatatgaagatcctgatttattaattagaacatctggagaagaacgtttatcaaatttcttattgtggcaaatggcctatactgaatttagtttttcagataaattatggccagattttgataaaactgatttagaagaattagttaaagattatcaaggacgtaatcgtcgttttggaaaagtataa

SEQ ID NO: 2965 - protein, 239 aa, Lactobacillus johnsonii
MSESKKPLNHLAIIMDGNGRWAKKRHLPRFVGHRHGMDNIRNIALAANKLGIKVLTLYAFSTENWARPTDEVNYLMRLPIDFFDKFMPELMENNVRVNIMGFVDELPEKTYLVTQKAMAETANNTGMVLNFAFNYGSRREITAGVQEIARKVKVGEIDIDDISEKMVSDHLLTHSLAPYEDPDLLIRTSGEERLSNFLLWQMAYTEFSFSDKLWPDFDKTDLEELVKDYQGRNRRFGKV

SEQ ID NO: 2966 - DNA, 735 bp, Lactococcus lactis subsp
  CDS (1)..(735): transl_table=11
atgtttaataacttaaaaaataaagagcaagaagaattacttccagagcatatcggaattatcatggatggtaatggacgatgggctaagcagaaagggaaaccacgaatctttggacacaaagcaggaatggattcgctaaaagatgttgctgttcatggtgcgagacgtggcataaaagtgatgactgtttatgctttttccacagaaaattggacaagaccagttgatgaagtgaaattcatcatgagtttacctatcgatttttatagtaaatatgttccagttttaaaagaagaaaatattcagattcggatgattggtgaacgcgaaggtttgccaaaagcaacgttagattcaattgaccgtgcggctcaagaaacttcagaaaatgacggaatgattttgaattttgcaatgaattatggtggccgtcgtgatattattttagccattcaagagcttgctaaaagtggtcaggatttaagtttactgacagaagaagagttgtcaaaacatctacaaaccgctgttttgtctgaaaatcttcgggatccagacttgattatcagaacatctggtgaacaaagaatgtctaatttcttgacttggcagtcagcttatagtgaattatattttgcgcaaactgcttggccagatttcgatgataaagaattggacaaggctatttctgcttttcaaaagcgtgaccgcagatatggaggagtcaaataa

SEQ ID NO: 2967 - protein, 244 aa, Lactococcus lactis subsp
MFNNLKNKEQEELLPEHIGIIMDGNGRWAKQKGKPRIFGHKAGMDSLKDVAVHGARRGIKVMTVYAFSTENWTRPVDEVKFIMSLPIDFYSKYVPVLKEENIQIRMIGEREGLPKATLDSIDRAAQETSENDGMILNFAMNYGGRRDIILAIQELAKSGQDLSLLTEEELSKHLQTAVLSENLRDPDLIIRTSGEQRMSNFLTWQSAYSELYFAQTAWPDFDDKELDKAISAFQKRDRRYGGVK

SEQ ID NO: 2968 - DNA, 780 bp, Lactobacillus plantarum
  CDS (1)..(780): transl_table=11
ttgttcgctttttttaataagaatgatcctgcagataacaccgacgtgcaattggatcctgaacgtattccagcccatgtcgccattattatggatggcaatgggcgttgggccaaagcacggcatttaccacgggttgctggccataaggaaggtatgaacacggtcaaaaagattacgattgccgcaagtgatttgggcgttaaagtcctgacgctttacgcgttttcaactgaaaattggaagcggccaactgatgaggttaattacctcatgcaactgccagtgagtttctttgatactttcgtaccggacttgataaaaaataatgtgcgggtgcaagtcatgggctacgttgatcacttgccagaagcaacgcaaaaagcagtccaaaatgcgattgcagataccaaagattgtgatgggatggtgctgaactttgctctcaactatggttcacgggccgaaatcgtgaccggggtgcaaaaaattgcccagcaagtgcaagatggtcaattggcggttggtgatatcgatgatgcaaccatcgacgcagcactgatgacggcaccacttgcgccatacaatgatccagatttgctgattcgcacgagtggtgaagaacgcatttcaaatttcttaatgtggcagattgcctacagtgaactggtctttactgatgtgaagtggccggatttcacagcggcgacccttcaagcctgtatcgcggattttcagagccgtgatcggcgctttggtgggttgtcggatcataaataa

SEQ ID NO: 2969 - protein, 259 aa, Lactobacillus plantarum
MFAFFNKNDPADNTDVQLDPERIPAHVAIIMDGNGRWAKARHLPRVAGHKEGMNTVKKITIAASDLGVKVLTLYAFSTENWKRPTDEVNYLMQLPVSFFDTFVPDLIKNNVRVQVMGYVDHLPEATQKAVQNAIADTKDCDGMVLNFALNYGSRAEIVTGVQKIAQQVQDGQLAVGDIDDATIDAALMTAPLAPYNDPDLLIRTSGEERISNFLMWQIAYSELVFTDVKWPDFTAATLQACIADFQSRDRRFGGLSDHK

SEQ ID NO: 2970 - DNA, 717 bp, Legionella pneumophila
  CDS (1)..(717): transl_table=11
ttgaatcataaattacctcaacacattgccgttgtcatggatggaaacgggcgttgggctgaaagccgcggtttgccccgtgtagagggacacaaagcgggccttgactcagttaaaaagattatcaattgttgcctggaaaaaaaaatttcctgcttaagcctgtttgcatttagctctgaaaattggtcaagaccagtgacagaagtcaattttcttatggaattgtttttggaggctttgcgaaaagagatagacgatttaaaccagcatggaatacggttaaagtttactggcgatagagaacctttgtctcaagtattacaaaagcaaatgtatgatgcggaagctcttaccaggaataatcaacaattaattctcaatgttgttgtgaattatggtgggaaatgggatatagtgacggcggctaaaaaattaatacactctgttttagatgggaagttggcatgtgatgaaatcaatgaggcagtattcgctcaatttcttgatacgagtggtatgccggaacccgatctgtttattcgaactagtggtgaattaaggataagtaatttttttctttggcagttagcttatactgagctgtattttactgatgttcattggcctgattttaatgagcatgagtttgaattggcattgacttcttttgccaggcgggcaagaaggtttgggcaaatttcacaatctgaataa

SEQ ID NO: 2971 - protein, 238 aa, Legionella pneumophila
MNHKLPQHIAVVMDGNGRWAESRGLPRVEGHKAGLDSVKKIINCCLEKKISCLSLFAFSSENWSRPVTEVNFLMELFLEALRKEIDDLNQHGIRLKFTGDREPLSQVLQKQMYDAEALTRNNQQLILNVVVNYGGKWDIVTAAKKLIHSVLDGKLACDEINEAVFAQFLDTSGMPEPDLFIRTSGELRISNFFLWQLAYTELYFTDVHWPDFNEHEFELALTSFARRARRFGQISQSE

SEQ ID NO: 2972 - DNA, 717 bp, Legionella pneumophila subsp
  CDS (1)..(717): transl_table=11
ttgaatcataaattacctcaacacattgccgttgtcatggatggaaacgggcgttgggctgaaagccgcggtttgccccgtgtagagggacacaaagcgggccttgactcagttaaaaagattatcaattgttgcttggaaaaaaaaatttcctgcttaagcctgtttgcatttagttctgaaaattggtcaagaccagtgacagaagtcaattttcttatggagttgtttttggaggctttgcgaaaagagatagacgatttaaaccagcatggaatacggttaaagtttactggcgatagagaacctttgtctcaaatattacaaaagcaaatgtgtgatgcggaagctcttaccaagaataatcaacaattaattctcaatgttgttgtgaattatggtggtaaatgggatatagtgacggcggctagaaaattaatacgcacggttttggatgggaagttggcatatgatgaaatcaatgaagcagtattcgctcaatttcttgatacgaatggcatgccggaacctgatctgtttattcgaactagtggtgaattaaggataagtaatttttttctttggcagttagcttatactgagctgtattttactgatgttcattggcctgattttaatgagcatgagtttgaattggcattgatttcttttgccaagcgggcaagaaggtttggacaaatttcacaatctgaataa

SEQ ID NO: 2973 - protein, 238 aa, Legionella pneumophila subsp
MNHKLPQHIAVVMDGNGRWAESRGLPRVEGHKAGLDSVKKIINCCLEKKISCLSLFAFSSENWSRPVTEVNFLMELFLEALRKEIDDLNQHGIRLKFTGDREPLSQILQKQMCDAEALTKNNQQLILNVVVNYGGKWDIVTAARKLIRTVLDGKLAYDEINEAVFAQFLDTNGMPEPDLFIRTSGELRISNFFLWQLAYTELYFTDVHWPDFNEHEFELALISFAKRARRFGQISQSE

SEQ ID NO: 2974 - DNA, 717 bp, Legionella pneumophila
  CDS (1)..(717): transl_table=11
ttgaatcataaattacctcaacacattgccgttgtcatggatggaaacgggcgttgggctgaaagccgcggtttgccccgtgtagagggacacaaagcgggccttgactcagttaaaaaaattatcaattgttgcctggaaaaaaaaatttcctgcttaagcctgtttgcatttagttctgaaaattggtcaagaccagtgacagaagtcaattttcttatggagttgtttttggaggctttgcgaaaagagatagacgatttaaaccagcatggaatacggctaaagtttactggcgatagagaacctttgtctcaagtattacaaaagcaaatgagtgatgcggaagctcttaccaagaataatcaacaattaattctcaatgttgttgtgaattatggtgggaaatgggatatagtgacagcggctagaaaattaatacgcacggttttggatgggaagttggcatatgatgaaatcaatgaagcagtattcgctcaatttcttgatacgaaaggcatgccggaacctgatctgtttattcgaactagtggtgaattaaggataagtaatttttttctttggcagttagcttatactgagctgtattttactgatgttcattggcctgattttaatgagcatgagtttgaattggcattgatttctttttccaagcgggcaagaaggtttgggcaaatttcacaatctgaataa

SEQ ID NO: 2975 - protein, 238 aa, Legionella pneumophila
MNHKLPQHIAVVMDGNGRWAESRGLPRVEGHKAGLDSVKKIINCCLEKKISCLSLFAFSSENWSRPVTEVNFLMELFLEALRKEIDDLNQHGIRLKFTGDREPLSQVLQKQMSDAEALTKNNQQLILNVVVNYGGKWDIVTAARKLIRTVLDGKLAYDEINEAVFAQFLDTKGMPEPDLFIRTSGELRISNFFLWQLAYTELYFTDVHWPDFNEHEFELALISFSKRARRFGQISQSE

SEQ ID NO: 2976 - DNA, 726 bp, Leptospira interrogans serogroup Icterohaemorrhagiae serovar
  CDS (1)..(726): transl_table=11
gtgggcttgttcgagtccaatctcccgaaacatattgccgttattatggatggtaacggtcgttgggcaacatcccgaggtaaatccagatcggaaggccatagagaaggtgcccaggccatagatagacttatggatgcgagtctggaactaggtttaaaaaatatttccctttatgctttttctaccgagaattggaaacgccctgtcaccgaaatccgttctatctttagccttttaattgaatttatagaaactcgattagatacgattcacaaaagaggaattcgaattcttcattccggaagccgaaaaaaacttacccgaggagttttagacaagatagactttgcggtagataagactcaaaaaaacaaaaatcttactgtaaacttctgtttgaactacggttccagagatgaacttctcagggcggcacaagagctttttttagaaagaaaacgttctaaagttgctttagaaaagcctttgaaagaaaaagagttcgaaaaatttttatatacgtccatccttcctcccgtagatttactgatcagaaccgccggggaacaaagactttccaattttctactttggcaatccgcgtatgcggagttgtattttacggatactctctggcccgagttcgataaaaattctctggtggattccctaaagtggtacgaaaccagaacccgaaaattcggaggacttacgaatgggtga

SEQ ID NO: 2977 - protein, 241 aa, Leptospira interrogans serogroup Icterohaemorrhagiae serovar
MGLFESNLPKHIAVIMDGNGRWATSRGKSRSEGHREGAQAIDRLMDASLELGLKNISLYAFSTENWKRPVTEIRSIFSLLIEFIETRLDTIHKRGIRILHSGSRKKLTRGVLDKIDFAVDKTQKNKNLTVNFCLNYGSRDELLRAAQELFLERKRSKVALEKPLKEKEFEKFLYTSILPPVDLLIRTAGEQRLSNFLLWQSAYAELYFTDTLWPEFDKNSLVDSLKWYETRTRKFGGLTNG

SEQ ID NO: 2978 - DNA, 759 bp, Listeria innocua
  CDS (1)..(759): transl_table=11
atgtttaaaaagctatttcgacaagatggaaatatattaaatagtgaacttgcagaagatttgccaattccacgtcacgtcgcaattataatggacggaaatgggagatgggcaaaaaaacgtttcttaccgagaattgcagggcataaagaaggtatggatgttgttaaacgagttacacgatatgcaaacgcgataggcattgatgttcttacactctatgctttttcaactgaaaactggaaacgacctacagatgaagtggattttttaatgaaactacctgtagaattttttgactcttttgtaccagagttgatagaagaaaatgttcgtgttaatgtgatggggtatcgagaaaatttgcctgaacacacaatgcgtgcagtggaaaaagcaattgcggatacagctcattgtacaggtcttacgctaaattttgcgcttaactacggtggacgttcagaaataatcacagcagcaaaagaagcgatgaaagaacttgtttcagagggcaaaacatctgaggacttaacagaagaattactgaatgatcatttaatgagtcacggtcttggggatcctgatttattaattcgtactagcggggaactgagattaagtaattttatgttatggcaactcgcttatagtgaattttattttacagaaacacattggcctgatttctcaaaagaagattttttacaggcgattattgaatatcaaaatcggtcgcgtcgttttggagggctctag

SEQ ID NO: 2979 - protein, 252 aa, Listeria innocua
MFKKLFRQDGNILNSELAEDLPIPRHVAIIMDGNGRWAKKRFLPRIAGHKEGMDVVKRVTRYANAIGIDVLTLYAFSTENWKRPTDEVDFLMKLPVEFFDSFVPELIEENVRVNVMGYRENLPEHTMRAVEKAIADTAHCTGLTLNFALNYGGRSEIITAAKEAMKELVSEGKTSEDLTEELLNDHLMSHGLGDPDLLIRTSGELRLSNFMLWQLAYSEFYFTETHWPDFSKEDFLQAIIEYQNRSRRFGGL

SEQ ID NO: 2980 - DNA, 759 bp, Listeria monocytogenes serotype 4b
  CDS (1)..(759): transl_table=11
atgtttaaaaagctatttcgacaagatgaaaatatattaaatagtgaacttgcagaagatttacctatcccgcgccatgtagctattatcatggatgggaatggaaggtgggcgaagaaacgttttttgccgcgcattgctgggcataaagaaggtatggatgtcgtaaagcgagtgacacgttatgctaatgcaattggcatcgatgttttaacgctttatgcattttcaactgaaaattggaagagacctacagatgaagtggattttttaatgaaacttcctgtagaattttttgactcttttgtaccagagttgattgaagaaaatgttcgtgttaatgtgatggggtacagagaaaatttacctaatcatacgatgcgtgccgtagagaaagccatagctgatacagcgcattgcacagggcttacgcttaactttgcacttaactacggtggacgttcagaaattattactgctgccaaagaagcgatgaaagaattagagcttgaagggaaaagtgcagatgatctgacagaagaaaaattaaatgatcatttgatgagtagcggtttgggtgatcctgacttgttgattcggacgagtggggagcttagattaagtaattttatgctttggcaactggcgtatagtgagttttattttacggatacacattggcctgatttttcaaaagaagattttttacaggcaattattgaatatcaaaaccggtcacgtcgttttggagggctctag

SEQ ID NO: 2981 - protein, 252 aa, Listeria monocytogenes serotype 4b
MFKKLFRQDENILNSELAEDLPIPRHVAIIMDGNGRWAKKRFLPRIAGHKEGMDVVKRVTRYANAIGIDVLTLYAFSTENWKRPTDEVDFLMKLPVEFFDSFVPELIEENVRVNVMGYRENLPNHTMRAVEKAIADTAHCTGLTLNFALNYGGRSEIITAAKEAMKELELEGKSADDLTEEKLNDHLMSSGLGDPDLLIRTSGELRLSNFMLWQLAYSEFYFTDTHWPDFSKEDFLQAIIEYQNRSRRFGGL

SEQ ID NO: 2982 - DNA, 759 bp, Listeria monocytogenes
  CDS (1)..(759): transl_table=11
atgtttaaaaagctatttcgacaagatgaaaatatattaaatagtgaacttgcagaagatttgcctatcccgcgccatgtagctattattatggatggtaatggaaggtgggcgaagaaacgttttttgccgcgcattgctgggcataaagaaggtatggatgtcgtaaagcgagtgacacgatatgctaatgcaattggcatcgatgttttaacgctttatgcattttcaactgaaaattggaagagacctacagatgaagtggattttttaatgaaacttcctgtagaattttttgactcttttgtaccagagttgattgaagaaaatgttcgtgttaatgtgatggggtacagagaaaatttacctgatcatacgatgcgagccgtggagaaagccatagctgatacagcacattgcacagggcttacgcttaattttgcacttaactacggtggacgttcagaaattattactgcggccaaagaagcgatgaaagaattagaacttgaagggaaaagtgcagatgatctgacagaagaaaaattaaatgatcatttgatgagtagtggtttgggcgatcctgacttgttgattcggacgagtggggagcttagattaagtaattttatgctttggcaacttgcgtatagcgagttttattttaccgatacacattggcctgatttttcaaaagaggattttttacaggcaattattgaatatcaaaaccggtcacgtcgttttggagggctctag

SEQ ID NO: 2983 - protein, 252 aa, Listeria monocytogenes
MFKKLFRQDENILNSELAEDLPIPRHVAIIMDGNGRWAKKRFLPRIAGHKEGMDVVKRVTRYANAIGIDVLTLYAFSTENWKRPTDEVDFLMKLPVEFFDSFVPELIEENVRVNVMGYRENLPDHTMRAVEKAIADTAHCTGLTLNFALNYGGRSEIITAAKEAMKELELEGKSADDLTEEKLNDHLMSSGLGDPDLLIRTSGELRLSNFMLWQLAYSEFYFTDTHWPDFSKEDFLQAIIEYQNRSRRFGGL

SEQ ID NO: 2984 - DNA, 897 bp, Methanosarcina acetivorans
  CDS (1)..(897): transl_table=11
gtgaaaaataggacgttcagcatgttctaccaagagtatgaacagctgcttgaaaaagagattttaagttccgaaatccctgaccacatagctgtaatcatggacggaaaccgcagatatgcgggacagcggggaagaacccgaagcttcgggcacgctatgggggcagaagttacagaacaggttattgagtggtgttatgagatcggagtaaaagagcttaccctctatgccttttccacggaaaatttccagcgttcggaagaagaggtcgatggacttttcaacctgatcaatgagaagtttctgaaactttacaatgacaaaaggacctacgaaaaagagacacagatcagggtaataggggatagaacaaaactgccggcttttctgaacaagtccattgaaaagattgaaaaagccaccgaaacccatagaaagtttaacctgaatgtggctattgcttatggcggcaggcaggacataatgcaggcagtccgggatattgcagcctgcgtttcaagtggaaaactctcgcttgaagatgttgatgaaaacctgatctcaaaacacctctacccagctccaggagtgtctgtcccgaatgtggacctgatcgtccgcaccgggggcgatgaaagagtctccaacttcctgccgtggcaggctaacggcagcgagtgtgcgacctatttctgtgctcctttctggccggaattccgaaaaatagaccttctccgctcaatcagagtatatcaggcccgaaaagacgaaaaaaagcaggaaaactcataccgggtctcaaaagttataaatttcctcggagtgggaaaatacggggaaaaaagcgaagagctaggacagctcctgccgttaaaaaagcagggagtggcctga

SEQ ID NO: 2985 - protein, 298 aa, Methanosarcina acetivorans
MKNRTFSMFYQEYEQLLEKEILSSEIPDHIAVIMDGNRRYAGQRGRTRSFGHAMGAEVTEQVIEWCYEIGVKELTLYAFSTENFQRSEEEVDGLFNLINEKFLKLYNDKRTYEKETQIRVIGDRTKLPAFLNKSIEKIEKATETHRKFNLNVAIAYGGRQDIMQAVRDIAACVSSGKLSLEDVDENLISKHLYPAPGVSVPNVDLIVRTGGDERVSNFLPWQANGSECATYFCAPFWPEFRKIDLLRSIRVYQARKDEKKQENSYRVSKVINFLGVGKYGEKSEELGQLLPLKKQGVA

SEQ ID NO: 2986 - DNA, 816 bp, Methanopyrus kandleri
  CDS (1)..(816): transl_table=11
ttgaaacgcgtcaccggggtgaactctcgccgcgtgctgcggcaggccgttcgcgtctcgcttaagccggtatataagatgtacgagaggatacttgaggagaaggtgaaggaaggcagagtccctgagcatgtaggcatcattatggacggaaacagaaggttcgcccgagagctgggattggaaccgtgggaaggtcatcggtacggagctgacaaactcgaggacgtgctggagtggtgtctcgacttaggtgttaaggctgttactgtgtacgcgctgtctaccgagaacctgaaccgaccgaaggaggagctcaagcggctcttcgacctcatggaagagcggttcaaggcactcgcggagagcgagcggatccatcgacgaaaggtcgccgtccgtgccgtcgggaggctccatctgctcccgacccgtgtccgcagagctatcaaaaaggccgaacgcgccactaaggagtacaaggacaggttcctgaacgtcgccgtagcctacggtgggaggcaggagattatcgacgctgttcgcgagatagcgcacgacgtgaaagtcggccggctcgaccccgatgagatcgatgaaggaacgttcagaaagtacgtatacgtgggagatctcccggatccggagctgatcataagaaccagtggtgaggaaagactcagcaacttcctgctctggtactccgcgtactccgagctgtactttgtggacgtgtactggcctgagtttcggaagattgacttgctgcgcgcgatccgtgaattccagaagcgtgaaagaagattcgggcggtaa

SEQ ID NO: 2987 - protein, 271 aa, Methanopyrus kandleri
MKRVTGVNSRRVLRQAVRVSLKPVYKMYERILEEKVKEGRVPEHVGIIMDGNRRFARELGLEPWEGHRYGADKLEDVLEWCLDLGVKAVTVYALSTENLNRPKEELKRLFDLMEERFKALAESERIHRRKVAVRAVGRLHLLPTRVRRAIKKAERATKEYKDRFLNVAVAYGGRQEIIDAVREIAHDVKVGRLDPDEIDEGTFRKYVYVGDLPDPELIIRTSGEERLSNFLLWYSAYSELYFVDVYWPEFRKIDLLRAIREFQKRERRFGR

SEQ ID NO: 2988 - DNA, 768 bp, Methanobacterium thermoautotrophicum
  CDS (1)..(768): transl_table=11
atgtcaccattaaagcccctttacaagctgtacgaatggtacatatcgcgcaacctcagaagggacagaatgccaagacatgttgccatcatcatggatggtaacaggagatactcaaagctgcagggcagtatgaaccccatagaaggccataagaagggcatagaaaccctcgagaaggtcctggactggtgcgtggacctcgggatagaaatagtaacggcgtacgccttctcaacagagaacttcaagagaccagaaaaggaggttaagggtctcatgaagctcttcagggaaaacttcgaggccatagcaagcaatgagaagatacataagaacagggtcagggtcagagcagtcggaaaacttgaactcctcccggaggacgtcagaagggccatagagatcgctgagaagtcaacagagcagtactcagaccgccttgtgaacatagccataggatatgatggaaggcaggagatagttgacgccacaagaaagattgcagaggatgttaaggcgggtttgatagacccggaggacatagacgaggacatgataaacagaaacctctacactgcaggtctggaggacccgcacctgataataaggaccagtggcgaggaaagactcagtggcttcctgctctggcagtcatcctactctgaactctacttctgcgacagcctgtggcctgaactcaggaaggtagactttttaagggccataaggtcatatcagcagcgtgagagaaggttcggcgtctag

SEQ ID NO: 2989 - protein, 255 aa, Methanobacterium thermoautotrophicum
MSPLKPLYKLYEWYISRNLRRDRMPRHVAIIMDGNRRYSKLQGSMNPIEGHKKGIETLEKVLDWCVDLGIEIVTAYAFSTENFKRPEKEVKGLMKLFRENFEAIASNEKIHKNRVRVRAVGKLELLPEDVRRAIEIAEKSTEQYSDRLVNIAIGYDGRQEIVDATRKIAEDVKAGLIDPEDIDEDMINRNLYTAGLEDPHLIIRTSGEERLSGFLLWQSSYSELYFCDSLWPELRKVDFLRAIRSYQQRERRFGV

SEQ ID NO: 2990 - DNA, 750 bp, Micrococcus luteus
  CDS (1)..(750): transl_table=11
atgtttccaattaagaagcgaaaagcaataaaaaataataacattaatgcggcacaaattccgaaacatattgcaatcattatggacggaaatggccgatgggcaaaacagaaaaaaatgccgcgcataaaaggacattatgaaggcatgcagaccgtaaagaaaatcacaagatatgctagtgatttaggtgtaaagtacttaacgctgtacgcattttcaactgaaaattggtctcgtcctaaagatgaggttaattacttgatgaaactaccgggtgattttttaaacacatttttaccggaactcattgaaaaaaatgttaaagttgaaacgattggctttattgatgatttaccggaccatacaaaaaaagcagtgttagaagcgaaagagaaaacgaaacataatacaggtttaacgctcgtgtttgcactgaattatggtgggcgtaaagaaattatttcagcagtgcagttaatcgcagagcgttacaaatctggtgaaatttctttagatgaaattagtgaaactcattttaatgaatatttatttacagcaaatatgcctgatcctgagttgttaatcagaacttccggtgaagaacgtttaagtaactttttaatttggcaatgttcatatagtgagtttgtatttatagatgaattctggccggattttaatgaagaaagtttagcacaatgtatatcaatatatcagaatcgtcatcgacgttttggtggattataa

SEQ ID NO: 2991 - protein, 249 aa, Micrococcus luteus
MFPIKKRKAIKNNNINAAQIPKHIAIIMDGNGRWAKQKKMPRIKGHYEGMQTVKKITRYASDLGVKYLTLYAFSTENWSRPKDEVNYLMKLPGDFLNTFLPELIEKNVKVETIGFIDDLPDHTKKAVLEAKEKTKHNTGLTLVFALNYGGRKEIISAVQLIAERYKSGEISLDEISETHFNEYLFTANMPDPELLIRTSGEERLSNFLIWQCSYSEFVFIDEFWPDFNEESLAQCISIYQNRHRRFGGL

SEQ ID NO: 2992 - DNA, 891 bp, Mycobacterium leprae
  CDS (1)..(891): transl_table=11
gtggttaggaacgagcgcacgctgaagtccacggattttccgcagctgccccctgcgcccgacgactacccgacctttcccgacaagtcgacctggccggttgtcttcccgatgctgccgccatcacccgacggcgggccgaggcgaccgccgcagcacacgtcaaaagctgtcgctccacggctctcggccgcccaattgccgactcatgtcgccatcgtgatggacggcaatggccgttgggctaaccaacgcggactgcaccgcaccgagggccacaagatgggcgaagcggtggtcatcgacgttgcttgcggcgctatcgaactcgggatcaaatggctcagtctctatgctttttctactgagaactggaagcggtctgtcgaagaggtccgtttcctgatgggttttaaccgcgatgtagtgcgacggcgtcgggagaatctcaaggagatgggggtccggatccgatgggtagggtcgcgaccgcgcttatggcgcagcgtcatcaatgaattggccattgcggaacacatgacggcgggcaacgacgtcatcaccatcaattattgtgtcaactacggtggtcgcactgaaatcgcagaagctacaagagaaattgctcgtctggcagctgcgggccggctcaatccggagcggatcaccgagtccacgatcacacggcacttgcagcggccagacatccccgatgtcgatctcttcgtgcggacttcgggggagcagcggtccagcaatttcatgttgtggcaggcggcgtatactgaatacattttccaggataagttgtggcccgattatgaccgccgtgacttgtgggcggcgtgtgaagaatatgcgtcgcgcaatcggcgcttcggaagcgcatag

SEQ ID NO: 2993 - protein, 296 aa, Mycobacterium leprae
MVRNERTLKSTDFPQLPPAPDDYPTFPDKSTWPVVFPMLPPSPDGGPRRPPQHTSKAVAPRLSAAQLPTHVAIVMDGNGRWANQRGLHRTEGHKMGEAVVIDVACGAIELGIKWLSLYAFSTENWKRSVEEVRFLMGFNRDVVRRRRENLKEMGVRIRWVGSRPRLWRSVINELAIAEHMTAGNDVITINYCVNYGGRTEIAEATREIARLAAAGRLNPERITESTITRHLQRPDIPDVDLFVRTSGEQRSSNFMLWQAAYTEYIFQDKLWPDYDRRDLWAACEEYASRNRRFGSA

SEQ ID NO: 2994 - DNA, 891 bp, Mycobacterium parafortuitum
  CDS (1)..(891): transl_table=11
atggcaacggaacggaatcggcgacggaagggcagctacccacagctgcctccggcgcctgacgactatccgacgttcccggacaagtcgacctggccggtggtcttccccgagatcccggcgggcaccaacggtcggttcgcccgcccgccgcagcacacctcgaaggaagcggctccccagattccggccgaccaggtgccccagcacgtcgcggtggtgatggacggcaacggccggtgggccacccagcgcgggctcggccgcaccgagggccacaagatgggcgaggcggtgctcatcgacatcacctgcggcgcgatcgagatcggcatcaaacacctgaccgtgtacgcgttctcgacggagaactggaagcgcagcaccgaggaggtgcgcttcctgatggggttcaaccgggaggtggtgcgccgccgccgcgagaacctcaacgacatgggcgtgcggatgcgctgggtgggctcgcgtccgcgcatgtggagcagcgtcatcaaggaattcgacatcgccgagcagatgacggtcgacaacgacgtcatcaccatcaactactgcgtgaactacggcggccgtaccgagatcgtggaggcggcgcgcgaactcgcgcaggaggccgtcgacggcaagatcaaacccaaccgcatcagcgaggcgcagttcgccaagcatctgcaccggtccgacatccccgatgtcgacctgttcatccggacctcgggggagcagcgggcgagcaacttcctgttgtggcaggcggcctacgccgaatacgtcttccaggacaagctctggcccgactacgaccggcgcgacctgtgggccgcgtgcgaggagtacgtccaacgcaaccgccgcttcggccgcgcctag

SEQ ID NO: 2995 - protein, 296 aa, Mycobacterium parafortuitum
MATERNRRRKGSYPQLPPAPDDYPTFPDKSTWPVVFPEIPAGTNGRFARPPQHTSKEAAPQIPADQVPQHVAVVMDGNGRWATQRGLGRTEGHKMGEAVLIDITCGAIEIGIKHLTVYAFSTENWKRSTEEVRFLMGFNREVVRRRRENLNDMGVRMRWVGSRPRMWSSVIKEFDIAEQMTVDNDVITINYCVNYGGRTEIVEAARELAQEAVDGKIKPNRISEAQFAKHLHRSDIPDVDLFIRTSGEQRASNFLLWQAAYAEYVFQDKLWPDYDRRDLWAACEEYVQRNRRFGRA

SEQ ID NO: 2996 - DNA, 891 bp, Mycobacterium tuberculosis
  CDS (1)..(891): transl_table=11
gtggctagggatgcacggaagcggacgtccagcaacttcccgcagctgcctccggcccccgacgactacccgacctttcctgatacgtcgacgtggcccgtcgtcttcccggagttgccggcagcgccctacggaggcccctgccggccaccgcagcacacttcgaaagcggccgcgccacgaataccggccgaccggctgcccaaccatgtcgccattgtcatggacggcaatggccgctgggccacccaacgtgggctggcccgcaccgaaggtcacaagatgggcgaggcggtggtgatcgacatcgcttgcggtgctatcgaacttgggatcaagtggctcagcctctacgccttctccacggagaactggaagcgttcgcccgaggaagtccgcttcctgatgggcttcaaccgcgacgtggtgcgacggcgccgagacaccctaaagaagctaggggtccggatccggtgggtgggttcacgaccacggctgtggcgtagcgtcatcaatgagttggcggtcgcggaggagatgaccaaaagcaacgacgtcatcaccatcaactattgcgtcaactacggcggacgcaccgaaatcaccgaagccacccgcgaaatcgctcgtgaggtcgccgcgggcaggctcaacccggagcggatcaccgaatccacgatcgcccgccacctgcagcgacccgacattcccgacgttgacctcttcctgcggacctcgggtgagcagcgctccagcaacttcatgctgtggcaggcggcctacgctgaatacatattccaggacaagctctggcccgactatgaccgccgcgacttgtgggcggcctgcgaggaatacgcgtcgcgcactcggcggttcgggagcgcctag

SEQ ID NO: 2997 - protein, 296 aa, Mycobacterium tuberculosis
MARDARKRTSSNFPQLPPAPDDYPTFPDTSTWPVVFPELPAAPYGGPCRPPQHTSKAAAPRIPADRLPNHVAIVMDGNGRWATQRGLARTEGHKMGEAVVIDIACGAIELGIKWLSLYAFSTENWKRSPEEVRFLMGFNRDVVRRRRDTLKKLGVRIRWVGSRPRLWRSVINELAVAEEMTKSNDVITINYCVNYGGRTEITEATREIAREVAAGRLNPERITESTIARHLQRPDIPDVDLFLRTSGEQRSSNFMLWQAAYAEYIFQDKLWPDYDRRDLWAACEEYASRTRRFGSA

SEQ ID NO: 2998 - DNA, 747 bp, Neisseria gonorrhoeae
  CDS (1)..(747): transl_table=11
atgaagagcagcacgcagaccattttggaacacaccgccatcccgaggcacatcgccgtaattatggacggcaacggccgttgggcgaaaaaacgttttctcccgcgtataatgggacacaaacgcggcttggacgcgttggaaaatatggtgaagcattgcgccaaactgggcgtgcaatatctgaccgtgtttgccttttcaaccgaaaactggcgtcgccccgaagacgaagtttcgttcctgatggggctgtttttacaggctttgcaaaaacaggtacgccgcctgcacgaaaacaatatgcgcctgaaaatattgggcagccgcgaacgctttaatcggcagattctgcaaggtatcgaagaggcggaagccttgacggcaaataataccggtctgaccctgagcattgctgcggattacggcggccgctgggatattttgcaggcggcaaacaaactgattgccgaaggcgtatccgagattacggaagacacgctggccaaacacttgatgctgggcgacgcgccggaaccggatttgttcatccgcacgggcggagaaacgcgcatcagcaatttcctgctctggcagatggcgtatgcagaactgtatttcaccgacatcctgtggcccgatttcgacgaaaccgccttagatgccgccgtcgcttcgttccaaaaacgcgaacggcggttcggacgcacttccgagcaactgcctatcggacagcaaaggaactga

SEQ ID NO: 2999 - protein, 248 aa, Neisseria gonorrhoeae
MKSSTQTILEHTAIPRHIAVIMDGNGRWAKKRFLPRIMGHKRGLDALENMVKHCAKLGVQYLTVFAFSTENWRRPEDEVSFLMGLFLQALQKQVRRLHENNMRLKILGSRERFNRQILQGIEEAEALTANNTGLTLSIAADYGGRWDILQAANKLIAEGVSEITEDTLAKHLMLGDAPEPDLFIRTGGETRISNFLLWQMAYAELYFTDILWPDFDETALDAAVASFQKRERRFGRTSEQLPIGQQRN

SEQ ID NO: 3000 - DNA, 747 bp, Neisseria meningitidis serogroup A
  CDS (1)..(747): transl_table=11
atgaaaagcagcacgcaggccgttttggaacacaccgccattcccaagcatatcgccgtgattatggacggcaacggccgttgggcgaaaaaacgtttcctcccgcgcataatgggacacaaacgcggtttggacgcattggaaaatatggtgaagcattgcgccaaactgggtgtgcaatatctgaccgtgtttgccttttcaaccgaaaactggcgccgccccgaagacgaagtttcgttcctgatggggctgtttttacaggctttgcaaaaacaggtacgccgcctgcacgaaaacaatatgcgcctgaaaatactgggcagccgcgaacgcttcaaccgtcaaatcctgaagggcatcgaagaggcggaagccttgacggcaaacaataccggcctgaccctgagcattgccgccgattacggcggacgttgggacattttgcaggcggcaaacaaactgattgccgaaggcgtatccgagattacggaagacacgctggcgaaatacctgatgctgggcgatgcgcccgagccggatttgttcatccgcaccggcggcgaaacgcgcatcagcaatttcctgctctggcagatggcgtatgccgaactgtatttcaccgatattttgtggcccgattttgacggcaaggctttggacgatgccgtcgcttcgttccaaaaacgcgaacggcggttcggacgcacctccgagcaactgcctatcgaacagcaaaggaactga

SEQ ID NO: 3001 - protein, 248 aa, Neisseria meningitidis serogroup A
MKSSTQAVLEHTAIPKHIAVIMDGNGRWAKKRFLPRIMGHKRGLDALENMVKHCAKLGVQYLTVFAFSTENWRRPEDEVSFLMGLFLQALQKQVRRLHENNMRLKILGSRERFNRQILKGIEEAEALTANNTGLTLSIAADYGGRWDILQAANKLIAEGVSEITEDTLAKYLMLGDAPEPDLFIRTGGETRISNFLLWQMAYAELYFTDILWPDFDGKALDDAVASFQKRERRFGRTSEQLPIEQQRN

SEQ ID NO: 3002 - DNA, 747 bp, Neisseria meningitidis serogroup B
  CDS (1)..(747): transl_table=11
atgaaaagcagcacgcaggccgttttggaacacaccgccattcccaagcatatcgccgtgattatggacggcaacggccgttgggcgaaaaaacgtttcctcccgcgcataatgggacacaaacgcggtttggacgcattggaaaatatggtgaagcattgcgccaaactgggtgtgcaatatctgaccgtgtttgccttttcaaccgaaaactggcgccgccccgaagacgaagtttcgttcctgatggggctgtttttacaggctttgcaaaaacaggtacgccgcctgcacgaaaacaatatgcgcctgaagatattgggcagccgcgaacgcttcaaccggcagattctgcaaggcatcgaagaggcggaagcgttgacggcaaacaataccggcctgaccctgagcattgccgccgattacggcggccgctgggatattttgcaggcggcaaacaaactgattgccgaaggcgtatccgagattacggaagacacgctggcgaaacacttgatgctgggcgatgcaccggaaccggatttgttcatccgcaccggcggcgaaacgcgcatcagcaatttcctgctctggcagatggcatatgcagaactgtatttcaccgatattttgtggcccgattttgacggcaaggctttggacgatgccgtcgcttcgttccaaaaacgcgaacggcggttcggacgcacctccgagcaactgcctatcgaacagcaaaggaactga

SEQ ID NO: 3003 - protein, 248 aa, Neisseria meningitidis serogroup B
MKSSTQAVLEHTAIPKHIAVIMDGNGRWAKKRFLPRIMGHKRGLDALENMVKHCAKLGVQYLTVFAFSTENWRRPEDEVSFLMGLFLQALQKQVRRLHENNMRLKILGSRERFNRQILQGIEEAEALTANNTGLTLSIAADYGGRWDILQAANKLIAEGVSEITEDTLAKHLMLGDAPEPDLFIRTGGETRISNFLLWQMAYAELYFTDILWPDFDGKALDDAVASFQKRERRFGRTSEQLPIEQQRN

SEQ ID NO: 3004 - DNA, 792 bp, Nitrosomonas europaea
  CDS (1)..(792): transl_table=11
atgcccctaaccccaagttcgacacgtggaattccggaaaccggtgcgatacccaagcacatcgccattattatggatggtaatgggcgatgggccaggaagcgtttcctgccaaggatagcggggcatacgcagggtgttgaagcggtacgaggtacaatcaaagcctgtatcgagagaggtgtttcacatctgacaattttcgcgtttagcagcgaaaattggcgcaggcccgcagaagaagtcaagttgctgatgcagttgtttttggctgcacttgaacgggaggtgactggactgcatgaaaatggagtccggttcagggtaattggtgatatttcaaaattcgatcctaaaatagtcgattttgttcaacagggcgaggcgcttacagccgggaatagccgattgaattttacggtggcagcaaattatggagggcgctgggatatcatgcaggctgtacgcaaaatgattaccgagaacccggattcagctgtgactttcgatgagcctgatattgccaggcacttggcactggccgatgctcccgagccggatttgttcatccggacgggaggtgaatgtcggatcagtaattttctgctttggcagcttgcctataccgagttgtattttaccgatacgttatggccggattttgatgcatcggcccttgatgaggcaattgcatcctaccggaagcgtgagcgccggttcgggcggacaagtgaacagattgccggccagcaggaaaataaaaatacggtctcgaacgaagaccgggtttaa

SEQ ID NO: 3005 - protein, 263 aa, Nitrosomonas europaea
MPLTPSSTRGIPETGAIPKHIAIIMDGNGRWARKRFLPRIAGHTQGVEAVRGTIKACIERGVSHLTIFAFSSENWRRPAEEVKLLMQLFLAALEREVTGLHENGVRFRVIGDISKFDPKIVDFVQQGEALTAGNSRLNFTVAANYGGRWDIMQAVRKMITENPDSAVTFDEPDIARHLALADAPEPDLFIRTGGECRISNFLLWQLAYTELYFTDTLWPDFDASALDEAIASYRKRERRFGRTSEQIAGQQENKNTVSNEDRV

SEQ ID NO: 3006 - DNA, 759 bp, Oceanobacillus iheyensis
  CDS (1)..(759): transl_table=11
atgtctatcaaaattccttttttatcaaaacaagtaaaagaaacggaactagaagattgggataacatacccagtcatattgctatcataatggatggaaacggtcgttgggcacaaaaacgagggttacctaggattgctggacacagagaaggcgtctctactgttaatcgaatcgtcaaaaccgctgtcaatgcaaatgtaaaagtattaacactttacacattttcaacagagaactggaaacggccaaaatctgaagtggattttattttaaaattaccaaaagagttcctgcatgtatatttaccaggtttaatagaaaataatgttcgtgtacaaacaattggtgattttaatgcagtacctaagcatacacaggatgcgatagaatatgcaatggagaaaacaaaggacaacgatggtttagtacttaattttgcgctaaactatggaagtaggtatgaaatcatacatgcagtaaaacaaatagtgcaaaaaacaaaagcatctgaactagacgtagaacaattggatgaaagctattttgaaaaacatctatttacgaatggtttatctgatccagatttattaattcgtactggaggagagtaccgtttaagtaactttatgctttggcagcttgcttatacggaattttggtttacggaaaagctctggccggaatttgatgaagatacatttcatcaagcgttgatggaatatcaacaacgaaaaaggagatacggaggtatataa

SEQ ID NO: 3007 - protein, 252 aa, Oceanobacillus iheyensis
MSIKIPFLSKQVKETELEDWDNIPSHIAIIMDGNGRWAQKRGLPRIAGHREGVSTVNRIVKTAVNANVKVLTLYTFSTENWKRPKSEVDFILKLPKEFLHVYLPGLIENNVRVQTIGDFNAVPKHTQDAIEYAMEKTKDNDGLVLNFALNYGSRYEIIHAVKQIVQKTKASELDVEQLDESYFEKHLFTNGLSDPDLLIRTGGEYRLSNFMLWQLAYTEFWFTEKLWPEFDEDTFHQALMEYQQRKRRYGGI

SEQ ID NO: 3008 - DNA, 723 bp, Pasteurella multocida
  CDS (1)..(723): transl_table=11
atggtagaacttgatccaaataatatcccacaacatgttgcgattattatggatggaaatgggcgttgggcacagcaaaagggcaaaatgcgcatttttggtcataaaaatggggtgaaagccgtgcgagaggcggtttcttatgcccgaaaagtgggcattaaagttttaacactctatgcgtttagtagtgaaaactggaaccgcccaaaaaaagaagtgaatgcattaatggcgttatttatgcaagcgttagatcttgaagttaaaaagttgcataaaaataatattaaattgaatatattaggggatgtaacggggtttagtgccagcttgcagaataaaattcatcaggccgagaaattaactgaaaacaatacagctttaaccttaaatattgcagcgaactatggcggttgctgggatatcgtgcaagctacaaaatcgctcgcacaacaggttaaagagggcaagttagccgttgatgagattaatgcgcaagtattacagcaagctttggttaccaaagagcagccacaagtcgatttattaattagaacgagtggtgaacaacgaattagtaactttttattatggcaaatcgcgtatgctgagctgtatttttctgatgtactttggccagattttaatgaaaaggaatttaacgaagcaattattgcttatcaacaacgccaccgacgctttggtggtgcagaagaataa

SEQ ID NO: 3009 - protein, 240 aa, Pasteurella multocida
MVELDPNNIPQHVAIIMDGNGRWAQQKGKMRIFGHKNGVKAVREAVSYARKVGIKVLTLYAFSSENWNRPKKEVNALMALFMQALDLEVKKLHKNNIKLNILGDVTGFSASLQNKIHQAEKLTENNTALTLNIAANYGGCWDIVQATKSLAQQVKEGKLAVDEINAQVLQQALVTKEQPQVDLLIRTSGEQRISNFLLWQIAYAELYFSDVLWPDFNEKEFNEAIIAYQQRHRRFGGAEE

SEQ ID NO: 3010 - DNA, 765 bp, Photorhabdus luminescens subsp
  CDS (1)..(765): transl_table=11
gtgatattatccagcgatcatcatcagaacgatttatcgtcattattacctaaacatgttgccattattatggatggtaacggccgttgggcaaagaaacgagggaaattaagagcctttggtcatcgtgcagggattaaagcggtacgtagtgcggtgagtttctcggctaaacataacattgagtcactgacgttgtacgctttcagtagtgaaaactggaatcggccggaacaagaagtcagctctttaatggaattatttatttttgcactagatagcgaaatcaaaagtttacataagcataatattagattatctgttattggtgatatcggccgcttcagtgagcgtttacaggatcgaatccatcgctcagttaagttgaccgctaataatacgggtctgcaacttaatattgctgcaaattatggtggtcgttgggatattgttcaaagtgttcagaaaattgctcagcagattaaggataattctcttgagcaacaggatattactgaagaattagttaataattatatgaatctaagccagcagccccaggttgatttggtcatcagaaccggaggtgaacatcgtatcagtaattttctgttatggcagatagcttatgcagaattctattttaccgatatactctggcctgattttgatgaaaacgtttttgaaggtgcaattaatgcctttgccaaaagagaacgccggtttggcggaacaataccagacgatgccgatgtgggatcatag

SEQ ID NO: 3011 - protein, 254 aa, Photorhabdus luminescens subsp
MILSSDHHQNDLSSLLPKHVAIIMDGNGRWAKKRGKLRAFGHRAGIKAVRSAVSFSAKHNIESLTLYAFSSENWNRPEQEVSSLMELFIFALDSEIKSLHKHNIRLSVIGDIGRFSERLQDRIHRSVKLTANNTGLQLNIAANYGGRWDIVQSVQKIAQQIKDNSLEQQDITEELVNNYMNLSQQPQVDLVIRTGGEHRISNFLLWQIAYAEFYFTDILWPDFDENVFEGAINAFAKRERRFGGTIPDDADVGS

SEQ ID NO: 3012 - DNA, 765 bp, Photobacterium profundum
  CDS (1)..(765): transl_table=11
atggcagagcgtaccatcgaaactgaactttctgctgaatgtttaccgaagcatgttgccgtcattatggatgggaatggtcggtgggcgaaggcaaaaggaaaggctcgagtgtttggccataaggctggcgttgaagccgtgcgtaaaagtgtcacgacggctaaccgccttggcgttaaggttttgacattatttgcttttagtagcgaaaactggcgtcgccctgaagacgaggtttcattattaatggaactgtttatgactgtactgactcgtgaagttaaacgtcttcataaaaataatatccaattacgtattatcggtgacaaaagtggctttagtgagcgacttcaacgaaaaatagcaacctcggaagcgttaacggctaacaatactggtctagtcttgaatattgctgccaattacggtgggcaatgggatatcttacaagcaacgaaaaaattagccgttcagattgctgaacaaggcttaacggcttcagatattactgaggatatgttgtctgctggcatgtcgacggctgatttgcctgatgtggatttaatgatccgtacgagtggtgaatgccgtattagtaattttatgctgtggcaggcagcttatgcagaattgtacttcacagagcagcactggcctgattttgatgaagaaagctttgctaacgctatagcatggtatattaaccgcgaacgccgctttggttgtacgggtgaacagattcaagctttaatacaagaataa

SEQ ID NO: 3013 - protein, 254 aa, Photobacterium profundum
MAERTIETELSAECLPKHVAVIMDGNGRWAKAKGKARVFGHKAGVEAVRKSVTTANRLGVKVLTLFAFSSENWRRPEDEVSLLMELFMTVLTREVKRLHKNNIQLRIIGDKSGFSERLQRKIATSEALTANNTGLVLNIAANYGGQWDILQATKKLAVQIAEQGLTASDITEDMLSAGMSTADLPDVDLMIRTSGECRISNFMLWQAAYAELYFTEQHWPDFDEESFANAIAWYINRERRFGCTGEQIQALIQE

SEQ ID NO: 3014 - DNA, 768 bp, Picrophilus torridus
  CDS (1)..(768): transl_table=11
atgagtgatattggaaactttgtttcaagaatctatgaaagcaagcttctcgaggaaataaagaagcatcctgttccggggcatttgggtataattacagatggaaatagaaggtacgcaagaagcattggaatatcggaaaatgaggggcatgtaaagggaaaagaaaaactcgaggaggtcttaaactggtccatggaggttggcatacacatggtaacggtttatgccttttcaacagaaaattttaagagaaaaagcgatgaggtaaactttctttttaatttaatcaacgatgcctttatagacctattaaacgatgagcgtgtttacaagaacgggatcagggtcaaggtcataggcgatatctcaaagctccctgattatttaaaggagactataaagcgggttgagggtgaaaccaacaaattcaaaaactttagatttaatcttgcaataggatacggcggcaggcaggagattatagacgcaataaaaaagattggccaggacatattaaatggaaaaataaaagttgataacataaacgaggagatgttcaggtcatatctttacgataaaacactgccagaccctgatttaatattaagaaccagcggtgaggagaggatttcaaacttccttttatggcagtctgcctattctgagctttactttgcagatgtgaactggcctgagcttaggaagattgactttctcagggccatatattcatatcagaacaggaagaggaggttcggtgagtaa

SEQ ID NO: 3015 - protein, 255 aa, Picrophilus torridus
MSDIGNFVSRIYESKLLEEIKKHPVPGHLGIITDGNRRYARSIGISENEGHVKGKEKLEEVLNWSMEVGIHMVTVYAFSTENFKRKSDEVNFLFNLINDAFIDLLNDERVYKNGIRVKVIGDISKLPDYLKETIKRVEGETNKFKNFRFNLAIGYGGRQEIIDAIKKIGQDILNGKIKVDNINEEMFRSYLYDKTLPDPDLILRTSGEERISNFLLWQSAYSELYFADVNWPELRKIDFLRAIYSYQNRKRRFGE

SEQ ID NO: 3016 - DNA, 765 bp, Porphyromonas gingivalis
  CDS (1)..(765): transl_table=11
atggaaggtgatggagacaagctccagtcagcagttatagtgccgaggcatatcgctttggtcatggatggtaatggccgttgggcaaagatacgagggaaagagcgatgcgaaggacatgcggccggtgtggatgctctgcgcgtagctttgcgtgcagcagccggttgcggtgtggaatatctcacagcctacaccttcagtacggagaattggaatcgtccggaagaggaagtcagggcgctgatgggccttttcgttacagctatcatgaatgagatgctggacttgatgaccaataacattcgcctcttggctatcggcgatttcagtcggctccccgaggatgtccgtgaatcgttagaaaagggtattcgagagactgccggaaacacggggctgactttggttttggcccttagctacagttctcgctgggaaatgaccgatgtcatccgtagattggctcgaaaggttcgggatggaagtgtggagcctgaagatataaatgtcgatttggtttctgatcatctttccaccgccggcattccggatccggatctcttcattcgtacaggtggagagaagcgtatcagcaattttcttatgtggcaaatggcctatacggaattgttttttaccgatacgctttggccggactttgatgccgactgtctgaaggcagccatagaagaatattcatcgagggagcgtcgattcggcaagaccagcgagcaaatcgctctcagagaaaataaatattga

SEQ ID NO: 3017 - protein, 254 aa, Porphyromonas gingivalis
MEGDGDKLQSAVIVPRHIALVMDGNGRWAKIRGKERCEGHAAGVDALRVALRAAAGCGVEYLTAYTFSTENWNRPEEEVRALMGLFVTAIMNEMLDLMTNNIRLLAIGDFSRLPEDVRESLEKGIRETAGNTGLTLVLALSYSSRWEMTDVIRRLARKVRDGSVEPEDINVDLVSDHLSTAGIPDPDLFIRTGGEKRISNFLMWQMAYTELFFTDTLWPDFDADCLKAAIEEYSSRERRFGKTSEQIALRENKY

SEQ ID NO: 3018 - DNA, 801 bp, Prochlorococcus marinus
  CDS (1)..(801): transl_table=11
atgaaaacccctattgcgattggagcagaaaagaagtctcttattactccgttgccagcgtcaatagatcctcttaggttgcctgagcatattgccatcattatggatggtaatggtagatgggcaaatgcaaagaaacttcctagagctatgggacatagtgcaggcgttgatgctcttaaacaaactctacgactttgcaatgattgggggataggagttttaactgtttatgcattctctacagagaattggtctaggcctaaggaagaagtcaacttcttgatgactctttttgaacgtgttcttaaaaaagaactagaggcattaaatcttgaagaggttcaaataagctttcttggtgatttagatcaacttccaacacgcctgcaagatctcattaatgaggcaacagagttaacctcagggaataatggaatccgttttaatgtttgtactaattatggaggtaggcgggaattggttttagctgctcaaaagttggcacaaagggtattgcaaggagatttagatccttcatttattgatgagcatacctttgcgggagaactcctaacatctagctatgcagaccctgatttgttaatacgtacaagtggagagatgcgaataagtaattttctcttatggcaactggcttatgctgaaatacatgtcacagatacattatggcctgattttgattccatctcgttgactaaggcacttattgattatcaatcaagaagaaggcgttttggaggagtagatccaacagttaatgattacgaccaagtttaa

SEQ ID NO: 3019 - protein, 266 aa, Prochlorococcus marinus
MKTPIAIGAEKKSLITPLPASIDPLRLPEHIAIIMDGNGRWANAKKLPRAMGHSAGVDALKQTLRLCNDWGIGVLTVYAFSTENWSRPKEEVNFLMTLFERVLKKELEALNLEEVQISFLGDLDQLPTRLQDLINEATELTSGNNGIRFNVCTNYGGRRELVLAAQKLAQRVLQGDLDPSFIDEHTFAGELLTSSYADPDLLIRTSGEMRISNFLLWQLAYAEIHVTDTLWPDFDSISLTKALIDYQSRRRRFGGVDPTVNDYDQV

SEQ ID NO: 3020 - DNA, 798 bp, Prochlorococcus marinus
  CDS (1)..(798): transl_table=11
ttgagccgccgttcggccactagttcaggccatccaaaggtctgtgcatgtccctcggggcttgatccctatcggctacctaaccatgtggctgtgattatggatgggaacggacgctgggccaaggccagaggcctgcctaggatggttggccatcgcgctggcgtagaagctctcaagagaacccttcgtctttgcagtgactggggcattggcgcccttacggcttatgccttttctacggagaattggtctcgccctggagatgaggtgaatttcttgatgactctgtttgagcgtgtgctgcagagggagttggagtcacttgaacgtgaaaaggtacggattcgtttcctgggagaccttgagggtctcccatcaggtctgcaggagttgatcagtgaggccaccgagctcactgttaggaacaatggcattcacttcaatgtctgcaccaattacggtggtcgccgtgaactggtgcttgcggcacagaaacttgcacaacgcgctgcaagaggggatcttgatccaactttgattgatgagaacagtttcgaggctgagttactcacggctggtgaggttgatccagacctgctgatccgcaccagtggtgagcgacggatcagtaattttctgctctggcaactcgcctatgcagaaattcacgtcaccgatgtgtgctggcctgattttgatgaagtagctttgacaaaagctctttttgattaccagtcacgctgtcgtcgtttcggcggtttggatccaatcgcagcgaatcatctgggatcttga

SEQ ID NO: 3021 - protein, 265 aa, Prochlorococcus marinus
MSRRSATSSGHPKVCACPSGLDPYRLPNHVAVIMDGNGRWAKARGLPRMVGHRAGVEALKRTLRLCSDWGIGALTAYAFSTENWSRPGDEVNFLMTLFERVLQRELESLEREKVRIRFLGDLEGLPSGLQELISEATELTVRNNGIHFNVCTNYGGRRELVLAAQKLAQRAARGDLDPTLIDENSFEAELLTAGEVDPDLLIRTSGERRISNFLLWQLAYAEIHVTDVCWPDFDEVALTKALFDYQSRCRRFGGLDPIAANHLGS

SEQ ID NO: 3022 - DNA, 819 bp, Prochlorococcus marinus subsp
  CDS (1)..(819): transl_table=11
atgagattgaataacttacaattaaaaaataatcttaatttatcgaataaattagataaggagagaattccagaacacattgcaataattatggatggcaatgggagatgggctacaaaaaaagggttacctagatcatttgggcataataagggtgttagtgttcttaaggaaattattaaggcatctaagaacatagattgtaaagttcttactgtttatgccttttcaactgagaattggattagaccctctaatgaggttgattttcttataaatctgtttgaaaaagttttgaaaaaagaaatttctgagatacatcaagaatcaataaaaattaagtttattggagatttatcacctcttcctaattcattaaaattactgataaagagttcagaagctcttactaataacaataaaaaatttacattgaatatttgtgtaaattatggaggtaggcaagaaatagtaaaagctgctaaagaaatagccatcaaatcttcctcaggtaaaataaaacccagtgacatcgatgaacaattatttaattcagaactactaactaaggggagcatggatcctgaactactaatacgaacaagtggtgaaaaaaggattagtaattttcttttatggcaattagcttattctgaaatttatgttactgatgtattatggccagattttactgagagtgaatttttaaaagcaataatagattatcaatcgaggaataggcgttttggaggtatagaatcattatcaaatgaatcttttgaagattcttgctattcttccctaagtaaaaatgattaa

SEQ ID NO: 3023 - protein, 272 aa, Prochlorococcus marinus subsp
MRLNNLQLKNNLNLSNKLDKERIPEHIAIIMDGNGRWATKKGLPRSFGHNKGVSVLKEIIKASKNIDCKVLTVYAFSTENWIRPSNEVDFLINLFEKVLKKEISEIHQESIKIKFIGDLSPLPNSLKLLIKSSEALTNNNKKFTLNICVNYGGRQEIVKAAKEIAIKSSSGKIKPSDIDEQLFNSELLTKGSMDPELLIRTSGEKRISNFLLWQLAYSEIYVTDVLWPDFTESEFLKAIIDYQSRNRRFGGIESLSNESFEDSCYSSLSKND

SEQ ID NO: 3024 - DNA, 756 bp, Pseudomonas aeruginosa
  CDS (1)..(756): transl_table=11
atggaaaagacccggaaggatgtgtgcgtgccacgccacgtggccattatcatggacggtaacaatcgctgggcgaagaagcgtcttctgcccggcgtcgccggccacaaggccggtgtcgatgccgtcagggcggtgatcgaggtctgcgccgaggcaggggtcgaggtcctcaccctgttcgcgttctccagcgagaactggcagcgtccggcggacgaagtcagcgcgctgatggagctgtttctcgtggccctgcgccgcgaggtgcgcaagctcgacgagaacggcatccgcctgcgcatcatcggcgatcgcacgcgtttccatccggagttgcaggcggccatgcgcgaagcggaagccgccactgccggcaatacccgtttcctcctccaggtcgccgccaactacggcggccagtgggacatcgtccaggccgcacagcgcctggcgcgcgaggtccagggcgggcacctggcggcggacgatatctccgccgagctgctccagggctgcctggtgaccggcgaccagccgctgcccgacctgtgcatccgcaccggcggcgagcatcgcatcagcaatttccttctctggcagctggcctacgccgagctgtatttctccgacctgttctggcccgacttcaagcacgcggcgatgcgggctgccctggcggatttctccaagcgccagcgccgcttcggcaagaccagcgagcaagtcgaggccgaggcccgtccgtcatgctga

SEQ ID NO: 3025 - protein, 251 aa, Pseudomonas aeruginosa
MEKTRKDVCVPRHVAIIMDGNNRWAKKRLLPGVAGHKAGVDAVRAVIEVCAEAGVEVLTLFAFSSENWQRPADEVSALMELFLVALRREVRKLDENGIRLRIIGDRTRFHPELQAAMREAEAATAGNTRFLLQVAANYGGQWDIVQAAQRLAREVQGGHLAADDISAELLQGCLVTGDQPLPDLCIRTGGEHRISNFLLWQLAYAELYFSDLFWPDFKHAAMRAALADFSKRQRRFGKTSEQVEAEARPSC

SEQ ID NO: 3026 - DNA, 756 bp, Pseudomonas putida
  CDS (1)..(756): transl_table=11
atggaaaagaccaagccagcggcgccgtcctcggtgccgcgtcatgtcgcgatcatcatggatggcaacaaccgctgggcgaaaaaacgcctgctgcccggcgtggccgggcacaaggcgggtgtggatgccgttcgcgcggtcatcgaagtctgtgccaagtccggggtcgaggtactgaccctgttcgccttctccagcgagaactggcagcgccctgccgaagaggtcggtgcgctgatggagctgttcttctcggcgctgcgccgtgaggccaagcgccttgacgagaacaacatcagcctgcgcatcatcggcgaccgttcgcgtttccatcctgagctgcaggccgccatgcgcgaggccgaggcagtgaccgctggcaacaaccgtttcattctgcagatagcagccaactacggtggccagtgggacatcgcccaggctgcccagcggctggcgcgggaagtgcaagccgggcacctgcgcccggaagacatcaccccgggtctgctgcagacctgcctggcaaccggcgacctgccgttaccggacctgtgcattcgcaccggtggcgagcaccgcatcagcaatttcctgttgtggcagctggcctatgccgagttgtacttctccgacctctactggccggacttcaaacacgaggccatgcgcaatgccctggccgatttcgcttcgcgccagcgccgcttcggtaagaccagcgagcaggtcgaggctggagctcgtgcttaa

SEQ ID NO: 3027 - protein, 251 aa, Pseudomonas putida
MEKTKPAAPSSVPRHVAIIMDGNNRWAKKRLLPGVAGHKAGVDAVRAVIEVCAKSGVEVLTLFAFSSENWQRPAEEVGALMELFFSALRREAKRLDENNISLRIIGDRSRFHPELQAAMREAEAVTAGNNRFILQIAANYGGQWDIAQAAQRLAREVQAGHLRPEDITPGLLQTCLATGDLPLPDLCIRTGGEHRISNFLLWQLAYAELYFSDLYWPDFKHEAMRNALADFASRQRRFGKTSEQVEAGARA

SEQ ID NO: 3028 - DNA, 756 bp, Pseudomonas syringae pv
  CDS (1)..(756): transl_table=11
atggaaaaaataaaatcggccggaccgtcctcggtaccgcgccacgtcgcgattatcatggatggcaataatcgctgggccagaaaacgcctgttaccgggtgtggctggccacaaggcgggtgtcgacgctgtgcgggctgttatcgaggtctgcgccgaagccaaggttgaagtgctgacattgttcgcgttctccagcgagaactggcagcgcccggccgaagaggttggtgcgttgatggagctttttttcacggcattgcgccgtgaaaccaagcgcctgaacgagaacgacatcagcctgcggattatcggtgaccgttcgcgctttcaccctgagcttcaggctgcgatgcgtgaagcggaagtgcgtacgtccggcaacagccgctttgtgctacagatcgctgccaactacggcgggcagtgggacatcgcgcaagcggcccagcggctggcgcgcgaggttcaggcagggcatctgcagccggaggacatcactccccagttgctgcagacctgtctggcaacgggcgatctgccgttgcctgacctgtgcattcgcaccggtggcgagcaccgcatcagcaattttctgctttggcagctggcttacgccgagctgtacttctccgacctgttctggccggacttcaaacacgatgccatgcgcgccgcgctggcagatttcgcttctcgccaacgtcgcttcggtaagaccagcgaacaggtagaagctggagcccgggcttaa

SEQ ID NO: 3029 - protein, 251 aa, Pseudomonas syringae pv
MEKIKSAGPSSVPRHVAIIMDGNNRWARKRLLPGVAGHKAGVDAVRAVIEVCAEAKVEVLTLFAFSSENWQRPAEEVGALMELFFTALRRETKRLNENDISLRIIGDRSRFHPELQAAMREAEVRTSGNSRFVLQIAANYGGQWDIAQAAQRLAREVQAGHLQPEDITPQLLQTCLATGDLPLPDLCIRTGGEHRISNFLLWQLAYAELYFSDLFWPDFKHDAMRAALADFASRQRRFGKTSEQVEAGARA

SEQ ID NO: 3030 - DNA, 795 bp, Pyrococcus abyssi
  CDS (1)..(795): transl_table=11
atgatatacggaattctttctcacgtccctaaaatatttttcaagcctgcttacgacctttatgaaaggtacctcctcgagaaggtaaaggccggtgttcttccaaagcacgtagcgataatcatggatggcaacaggagatgggctaagaagcgtgagaagcctccatggtatggtcacctctttggttctaagaagctagaggaaattcttgagtggtgtcatgagcttgggataaggatactaacggtatacgcattttctacggagaacttcaagaggtcaaaggaagaagttgaaaggctaatgcagttgtttgagcagaaattcagggagctggtaactgataagagggttcatgagtatggtgttagggtgaacgtcataggcaggaaggagctccttccgaaaagcgtaagggatgctgcggaagaggctgagagggcaactagaaaatacaataattacgttttgaacgttgcaatagcttacggtgggaggagtgaaattgtagatgcagtaaaagatatcgttagggatgttatggatggtaagcttagggtcgaagacattgacgaggagttactaaagaagtacctctacgttcccaacatgcctgatccagacatagttataagaactggtggtgaggtcagaatcagcaactttcttctataccaaatagcttacagtgagctgttcttcgtcgatgtttacttcccagaattcaggaagatagatttcctcagaataataagggaatttcagaagagggaaagaaggtttggtcgttaa

SEQ ID NO: 3031 - protein, 264 aa, Pyrococcus abyssi
MIYGILSHVPKIFFKPAYDLYERYLLEKVKAGVLPKHVAIIMDGNRRWAKKREKPPWYGHLFGSKKLEEILEWCHELGIRILTVYAFSTENFKRSKEEVERLMQLFEQKFRELVTDKRVHEYGVRVNVIGRKELLPKSVRDAAEEAERATRKYNNYVLNVAIAYGGRSEIVDAVKDIVRDVMDGKLRVEDIDEELLKKYLYVPNMPDPDIVIRTGGEVRISNFLLYQIAYSELFFVDVYFPEFRKIDFLRIIREFQKRERRFGR

SEQ ID NO: 3032 - DNA, 717 bp, Pyrobaculum aerophilum
  CDS (1)..(717): transl_table=11
atgtgggcgagcgggtctgttaaaatcccgactcacattgcagttattccagacgggaataggcggtatgccaaaaagacaggcattgatttttaccacgcgtataaaaaaggggtggaaaaagtgaggaattttctcacgtgggctttggagtttagagatattaaaaacgtcactttcttcgccttgtctacggaaaacctccagaggagtaaaatcgagcttgagatattatttcgcatttttgaggatgagttgaggaggacattagaagacccgcttattcacgacaacaaagtgagagttcgttttataggcgacagatcgttgctccccgggaaggtggtgaaatacatcgacgagctggagtccgtcactaaaaactattcaaactaccacctcactatagccctcggctacggcggcagggccgaaatcgtccgttgtataaagagggtgctctcgggagaggtgaggctggagactttttcagaggaggagctcttccagtgtctagacacgcggggtatcccaaaccccgagcccgacgtcgttgtgaggactgggggggagaagaggcttagcaacttcctcttgtaccagaccgcatactcagagctgatattcctagaaaagctctggcccgaggtggagagggaggaccttgtgtatataattgaggagtattcaagacgccagcggagattcggcaggtag

SEQ ID NO: 3033 - protein, 238 aa, Pyrobaculum aerophilum
MWASGSVKIPTHIAVIPDGNRRYAKKTGIDFYHAYKKGVEKVRNFLTWALEFRDIKNVTFFALSTENLQRSKIELEILFRIFEDELRRTLEDPLIHDNKVRVRFIGDRSLLPGKVVKYIDELESVTKNYSNYHLTIALGYGGRAEIVRCIKRVLSGEVRLETFSEEELFQCLDTRGIPNPEPDVVVRTGGEKRLSNFLLYQTAYSELIFLEKLWPEVEREDLVYIIEEYSRRQRRFGR

SEQ ID NO: 3034 - DNA, 795 bp, Pyrococcus furiosus
  CDS (1)..(795): transl_table=11
atgatttacagaataatttctcatatcccttcaatatttttcaaacctgcatatgacttgtacgagagatacctcctagagaaagttaaggctggggttatcccaaaacacgtagccataattatggacggaaatagaagatgggctcgaaaaagagagaaacccccttggtatgggcacttttttggttcaaagaagcttgaggaaatagttgagtggtgtcatgagctggggataaggatattaacggtctatgcattttcaacggaaaacttcaagagatcaaaggaggaagtcgataggctaatgaaactcttcgaagagaaatttagagaattagttacggatagaagagtccatgaatatgggattagggtaaatgttatggggagaaaggagcttctcccaaagaatgtgagagaggctgcagaagaagcggagagggttacaaggaaatacaacaattacttcttaaacattgctttggcctatgggggaagaagtgaaattgtggatgcaataaaagatattgttaacgatgtattagaagggagattaaagcttgaagatataaatgaagaaattgtgaggaagtatttatatgtacctaatatgccagacccagacattgttataagaacgggaggggaagttagaataagcaatttcttgctatatcaaatcgcatatagtgaactgttttttgtcgatgtgtacttcccagaatttagaaaaattgactttttaagaataattagagaatttcaaaagagagaaaggagatttggacgttag

SEQ ID NO: 3035 - protein, 264 aa, Pyrococcus furiosus
MIYRIISHIPSIFFKPAYDLYERYLLEKVKAGVIPKHVAIIMDGNRRWARKREKPPWYGHFFGSKKLEEIVEWCHELGIRILTVYAFSTENFKRSKEEVDRLMKLFEEKFRELVTDRRVHEYGIRVNVMGRKELLPKNVREAAEEAERVTRKYNNYFLNIALAYGGRSEIVDAIKDIVNDVLEGRLKLEDINEEIVRKYLYVPNMPDPDIVIRTGGEVRISNFLLYQIAYSELFFVDVYFPEFRKIDFLRIIREFQKRERRFGR

SEQ ID NO: 3036 - DNA, 795 bp, Pyrococcus horikoshii
  CDS (1)..(795): transl_table=11
atgatatatcgtattatctcccatattccaaaaatattttttaaacctgcctacgatttatacgagaggtatttaatagaaaaagtgaagtctggggttcttcccaagcatgttgcaataataatggatggaaatagaagatgggcaagaaagcatgagaagcctccttggtatggtcatctctttggttccaagaaacttgaggaaattttagaatggtgccacgaattgggaattaggatattgacggtatatgccttttctactgagaatttcaagagatccaaagaagaggttgacagactgatgaagttgtttgaagaaaaatttagggagttagttacggacaaaagggttcacgagtatggggttagggtgaacgttataggtagaaaggaactccttccaaaaagtgtcagagatgccgtggaagaagctgaaagggctacaagaaaatacaataattatatcctaaacgtcgctttagcttatggtggaaggagtgaaattgttgatgctgttaaggatatcgctagggatgtaataagcgggaaactcagaatagaagaaatagatgaagaacttttgagaagatacttatacgttccaaatatgccagatcccgatattgtgattagaactggaggggaggttaggataagcaactttctcctttatcagatagcatatagcgagctgttcttcgttgatgtatacttcccagagtttaggaagattgactttttgagaataataagggagttccaaaaaagagagagaagatttggacgttaa

SEQ ID NO: 3037 - protein, 264 aa, Pyrococcus horikoshii
MIYRIISHIPKIFFKPAYDLYERYLIEKVKSGVLPKHVAIIMDGNRRWARKHEKPPWYGHLFGSKKLEEILEWCHELGIRILTVYAFSTENFKRSKEEVDRLMKLFEEKFRELVTDKRVHEYGVRVNVIGRKELLPKSVRDAVEEAERATRKYNNYILNVALAYGGRSEIVDAVKDIARDVISGKLRIEEIDEELLRRYLYVPNMPDPDIVIRTGGEVRISNFLLYQIAYSELFFVDVYFPEFRKIDFLRIIREFQKRERRFGR

SEQ ID NO: 3038 - DNA, 795 bp, Pyrococcus kodakaraensis
  CDS (1)..(795): transl_table=11
atgctatacagattggtctcccacatccctcacattctttttaagccggtctatgacgcttatgaaagctacctcctggagaaggttaaatctgggaacatccctaagcacgttgccataataatggacggcaacagaaggtgggccaggaagcttgaaaagcccccctggtacggccacctattcggatcaaagaagctcgaagaaatccttgagtggtgcagggagctaaacataaggacgcttactgtctatgccttctcaaccgagaacttcaagcgctcaaaggaggaagttgaggccctcatgaacctcttcgaggagaagttcaaggaactcgttcaggatgaaagggttcatcgctacggcatcagggtgaacgtcctcggcaggaaggacatgcttcccgaaaacgtgagaaaggccgctgaagaggcggagagagcaacgagaaagtactccaactacaacctcaacatagccctcgcatacggcggtaggagcgagatagcggacgccgtcagggaaatagttagggacgtccttgaaggaaagattaagccggaggacatcgatgaggaggccataaagcgctacctctactatcccaacatgcccgatcccgacatcgtcatcaggactggcggcgaggtgagaataagcaacttcctcctctatcagatcgcctacagcgagcttttcttcgttgacgtttactttcccgagttcaggaagatagactttcttaggataatccgtgagttccagaagagacagcggcgctttggaaggtag

SEQ ID NO: 3039 - protein, 264 aa, Pyrococcus kodakaraensis
MLYRLVSHIPHILFKPVYDAYESYLLEKVKSGNIPKHVAIIMDGNRRWARKLEKPPWYGHLFGSKKLEEILEWCRELNIRTLTVYAFSTENFKRSKEEVEALMNLFEEKFKELVQDERVHRYGIRVNVLGRKDMLPENVRKAAEEAERATRKYSNYNLNIALAYGGRSEIADAVREIVRDVLEGKIKPEDIDEEAIKRYLYYPNMPDPDIVIRTGGEVRISNFLLYQIAYSELFFVDVYFPEFRKIDFLRIIREFQKRQRRFGR

SEQ ID NO: 3040 - DNA, 777 bp, Ralstonia solanacearum
  CDS (1)..(777): transl_table=11
atgcatatcagctcgacactggcggtgcctgacaccgccgatacgccacaccacgttgccatcatcatggatggcaatggccgctgggccaccgaacgccacctcccgcgcatggcagggcacagtcgtggcctcgatgccgtgcgtgccgcggtccaggccgcagaccaccgtggcgtgcgctacctgacgctgttcgcgttcagttcggagaactggcgccgtccggccgaggaaatctccttcctgatgaagctgttcatgacggctctgcggcgcgaggtgagcaagctgaatgacagcggcatccgcctgcgcgtggtgggtgacctgagtgcgttcagtccgcgtatccagctgatgatccgcgaggcggaagccaagacggcgaccaaccccgggctcactgtcaccatcgccgccaactacggcggccgctgggacatcctgcaggccatgcgcgcgctggtggccgatcagcccgacatcgcgcccgaagccatcaccgaagaggcgctgtcgccgtatatggcgctggcgtatgcgtcggagccggacctgttcatccgcaccggcggcgagcagcgcatcagcaatttcatgctgtggcagctcgcctattccgagctctacttcaccgaacgctactggcccgatttcgacgctgcggagatggatcgcgcctttgcctggtatcgcaaccgcgagcggcgctttggccgtaccagcgcgcagctggaacccggtactgcccccgcactgtcggctggagcctga

SEQ ID NO: 3041 - protein, 258 aa, Ralstonia solanacearum
MHISSTLAVPDTADTPHHVAIIMDGNGRWATERHLPRMAGHSRGLDAVRAAVQAADHRGVRYLTLFAFSSENWRRPAEEISFLMKLFMTALRREVSKLNDSGIRLRVVGDLSAFSPRIQLMIREAEAKTATNPGLTVTIAANYGGRWDILQAMRALVADQPDIAPEAITEEALSPYMALAYASEPDLFIRTGGEQRISNFMLWQLAYSELYFTERYWPDFDAAEMDRAFAWYRNRERRFGRTSAQLEPGTAPALSAGA

SEQ ID NO: 3042 - DNA, 735 bp, Rhizobium loti
  CDS (1)..(735): transl_table=11
atgacaacgcccgcgcatgtcgcgatcatcatggatgggaatggacgctgggccaaggcgcgcggcatgccgaggcttgccggtcatcgcgccggcgtcgaggcattgcgcaagacggtgcgcgcggcgcccgatctcggcatctcgttcctgaccgtctatgcgttctcgtcggagaactggtcgcggccgaaggccgaggtcagcgacctgatggggctgttgaagctgttcatccgccgtgatctcgccgaactgcaccagagcggcgtgcgggtcaggatcatcggcgacagggcagggctgcaggccgacatccgagggttgctcgaagaggccgaatcgctgaccgcccgtaacgagtccctgacgctggtgatcgccttcaactatggcgggcgcgacgaaatcgtccgcactgcacgcaagcttgcctcggccgccgcgcgcggcgaaatcgacgccgaatcgatcaccgccgatagctttgccggtggtctcgacacgcaaggcattcccgatccggaactggtcatacgcaccagcggcgagcttcgcctgtccaacttcctgttgtggcaggccgcctatagcgagctcgtcttcctgccttgctattggcccgacttcagccgcgagcaccttgccgaggcgttgcgcgaatttgccggccgcgagcgccgtttcggaggattgggccagcaagacgtcgcttcgcgaccggcagcgggatga

SEQ ID NO: 3043 - protein, 244 aa, Rhizobium loti
MTTPAHVAIIMDGNGRWAKARGMPRLAGHRAGVEALRKTVRAAPDLGISFLTVYAFSSENWSRPKAEVSDLMGLLKLFIRRDLAELHQSGVRVRIIGDRAGLQADIRGLLEEAESLTARNESLTLVIAFNYGGRDEIVRTARKLASAAARGEIDAESITADSFAGGLDTQGIPDPELVIRTSGELRLSNFLLWQAAYSELVFLPCYWPDFSREHLAEALREFAGRERRFGGLGQQDVASRPAAG

SEQ ID NO: 3044 - DNA, 744 bp, Rhizobium meliloti
  CDS (1)..(744): transl_table=11
atgcaagaattcaatcccgctaacgtaccggctcacgtcgccatcatcatggacggcaacggtcgttgggcgaatgcgcgtggactgccccgtaccatgggccaccgcaagggcgtagaggcggtccgcggggcggtaaggacggcggcggagatcggcatccgttacctgacgctgttcgcattctcgtcggagaactggaaccggccggaaaacgaggtcagcgacctcatgggcctgctcaaggctttcatccgacgggatctcgccgatctccaccgtgagaacgtccgcatccgggtcatcggcgaccgttcgaacctgagcggcgatatcctgcctctgctcatcgaagcggaggagacgacgatcgcaaacaccggcatcacggtggtcatcgcgttcaattacggtgccagagacgagctggcgagagccatgcgccgcctggcgggggaggtggctgccggtcgtctgcggccggaagagattaccgcggaacggatatcctcgacgatcgatacggcgggcattcccgatcccgatctcatcatccggacgagcggcgaggagcgtctctccaactttctcctttggcagggggcctactccgaattgctgttcattccggacctctggccggatttcacgcgcgagacattctttgcggcgatcgaacaatatgcctgccgcgagcgccgattcggcggactgacccaaccgactctggcggtcggctcctga

SEQ ID NO: 3045 - protein, 247 aa, Rhizobium meliloti
MQEFNPANVPAHVAIIMDGNGRWANARGLPRTMGHRKGVEAVRGAVRTAAEIGIRYLTLFAFSSENWNRPENEVSDLMGLLKAFIRRDLADLHRENVRIRVIGDRSNLSGDILPLLIEAEETTIANTGITVVIAFNYGARDELARAMRRLAGEVAAGRLRPEEITAERISSTIDTAGIPDPDLIIRTSGEERLSNFLLWQGAYSELLFIPDLWPDFTRETFFAAIEQYACRERRFGGLTQPTLAVGS

SEQ ID NO: 3046 - DNA, 735 bp, Rhodopirellula baltica
  CDS (1)..(735): transl_table=11
atgacttctgttccacttctcagcatgaatcttccacgtcacgtcgcgatcatcatggacggcaatggccgttgggcccaagcacgcgatttacctcgcatcgaaggccaccgacgcggcgtcacgacggtgcgaacggtcacggaaatggccagcgaactcaaactcgacgctctgacgttgtattgcttgtcgagcgaaaattggaaacggccgcaggcagagctcgactttttgatgcacctgcttcagcagtatctcgtcgaggaacggcgaaccattcgcgatcagaacatgcgattgcgtttcatcggaagacgcgaccggctgagcgatgaagtcctgaaggaaattgcgaaaacgcaggcggtgagcgaaaacaacaccggaacggaattggtcctggcggtcgactatggcggacgcgacgaactgactcgaatgactcggcaactcgctcagcaagtccgggacggtgagcggtcaatcgacgagatcactgagtcgctggtggatgaatcgctcgacacggcgggactgcccgacgtcgatttgatgattcgcaccgggggagacatccgaatcagcaactacctgctgtggcagattagctatgccgagctgtacttcaccccgaaatgctggccagaattcgagcgagacgacttccaggctgctttggatgagtttgccggcagacaacgtcgctttggcgggttaaacgtgggcgcctga

SEQ ID NO: 3047 - protein, 244 aa, Rhodopirellula baltica
MTSVPLLSMNLPRHVAIIMDGNGRWAQARDLPRIEGHRRGVTTVRTVTEMASELKLDALTLYCLSSENWKRPQAELDFLMHLLQQYLVEERRTIRDQNMRLRFIGRRDRLSDEVLKEIAKTQAVSENNTGTELVLAVDYGGRDELTRMTRQLAQQVRDGERSIDEITESLVDESLDTAGLPDVDLMIRTGGDIRISNYLLWQISYAELYFTPKCWPEFERDDFQAALDEFAGRQRRFGGLNVGA

SEQ ID NO: 3048 - DNA, 708 bp, Rickettsia conorii
  CDS (1)..(708): transl_table=11
atgcagcaacatctaaaatataaaataatgactaatataaaacatttagcaataataatggacggtaatgctcgttgggcagatcagcataacttaacaaaatctgaagggcataaagcaggagccgataaaattcgtgaattactgcctgagtttcttaaccttaacataccttatataactttatatactttctcttccgaaaattggcaacgctcaagcacggaagtagatttcttaataaaattattaagtatttatttaaaaaccgaattaaataatttacataaaaacggcgttaaaataaaagtaataggtagactgactttattaagtagctcattgcaaaaacaaataaataatgctatagaattaacaaaaaataataataaaataacgctttgtatagcttttagttatggaagtcgtcaagaaatagttgatgcctgcacaaaaattattacaagcggtaaaaaagcagtaagtgacagcgatatacaacacgctttatatgatcctgaaatgccggatgtagatttattaataagaccgggcggggtttatcgcatcagtaatttcttgctttggcaagcagcttatgctgaattatatttctcacccaaatattggcctgattttaataaatatgatatacaagaagctataaatgattactcaaaaaggaaaagaacatttggtaaaagataa

SEQ ID NO: 3049 - protein, 235 aa, Rickettsia conorii
MQQHLKYKIMTNIKHLAIIMDGNARWADQHNLTKSEGHKAGADKIRELLPEFLNLNIPYITLYTFSSENWQRSSTEVDFLIKLLSIYLKTELNNLHKNGVKIKVIGRLTLLSSSLQKQINNAIELTKNNNKITLCIAFSYGSRQEIVDACTKIITSGKKAVSDSDIQHALYDPEMPDVDLLIRPGGVYRISNFLLWQAAYAELYFSPKYWPDFNKYDIQEAINDYSKRKRTFGKR

SEQ ID NO: 3050 - DNA, 708 bp, Rickettsia felis
  CDS (1)..(708): transl_table=11
atgcagcaacatctaaaatataaaataatgactaacataaaacatttagcaataataatggacggtaatgctcgttgggcagatcagcataacttaacaaaatctgaagggcataaagcaggagccgataaaattcgtgaattactgcctgagtttattaatcttaatataccttatataactttatatactttctcttccgaaaattggcaacgttcaagcacggaggtagatttcttaataaaattattaagtatttattttaaaaatgaattaaacagtttacataaaaacggcgttaaaataaaagtaataggtaggcttaatttattaagtagctcattgcaaaaacaaataaataatgctatagaattaacaaaaaataataataaaataacgctttgtatagcttttagttatggaagtcgtcaagaaatagttgatgcctgcacaaaaattattgcaagcggtaaaaaagaaataagtgaaagcgatataggacacgctttatatgatcctgaaatgccggatgtagatttattaataagaccgggcggggtctatcgcatcagtaatttcttgctttggcaagcagcttatgctgaattatatttctcacccaaatattggcccgcttttaataaagatgatataatagaagctataaatgattactcaaaaaggaaaagaacatttggcaaaagataa

SEQ ID NO: 3051 - protein, 235 aa, Rickettsia felis
MQQHLKYKIMTNIKHLAIIMDGNARWADQHNLTKSEGHKAGADKIRELLPEFINLNIPYITLYTFSSENWQRSSTEVDFLIKLLSIYFKNELNSLHKNGVKIKVIGRLNLLSSSLQKQINNAIELTKNNNKITLCIAFSYGSRQEIVDACTKIIASGKKEISESDIGHALYDPEMPDVDLLIRPGGVYRISNFLLWQAAYAELYFSPKYWPAFNKDDIIEAINDYSKRKRTFGKR

SEQ ID NO: 3052 - DNA, 681 bp, Rickettsia prowazekii
  CDS (1)..(681): transl_table=11
atgactactataaaacatttagcaataataatggacggtaatgcacgttgggcagatcgacataacttaacaaaatctgaaggacataaagcaggagctgataaaattcgtgaattactgccggagtttattaaccttaatataccttatatcactttatacactttctcttttgaaaactggcaacgctcaagttctgaggtagatttcttaataaaattattaagtatttatttaaaaaatgaattagatagtttgcatgaaaacggagttaaaataaaagtaatagggaggctgaatttattaagaagctcattgcaaaaacaaataaataatgctatagaattaacaaaaaataataataaaataaaactttgtatagcttttagttatggaagccgccaagaaatagttgatgcctgcacaaaaattattgcgcatgggaaaaaacaagtgagcgagtatgatatacagcatgctttatatgatccagaaatgccggatgtagatttattaataagatcgggtggagtctatcgcatcagtaatttcttgctttggcaagcagcttatgctgaattatatttctcacaaaaatattggcctgattttaataaagatgatatacatgaagctataaatgattactcaaaaagaaaaagaacatttggcaaaagataa

SEQ ID NO: 3053 - protein, 226 aa, Rickettsia prowazekii
MTTIKHLAIIMDGNARWADRHNLTKSEGHKAGADKIRELLPEFINLNIPYITLYTFSFENWQRSSSEVDFLIKLLSIYLKNELDSLHENGVKIKVIGRLNLLRSSLQKQINNAIELTKNNNKIKLCIAFSYGSRQEIVDACTKIIAHGKKQVSEYDIQHALYDPEMPDVDLLIRSGGVYRISNFLLWQAAYAELYFSQKYWPDFNKDDIHEAINDYSKRKRTFGKR

SEQ ID NO: 3054 - DNA, 681 bp, Rickettsia typhi
  CDS (1)..(681): transl_table=11
atgactactataaaacatttagcaataataatggatggtaatgcacgttgggcagatcaacataacttaacaaaatctgaaggacataaagcaggggccgataaaattcgtgaattactaccggaatttattaaccttaatataccttatataactttatacactttctcttcggaaaactggcaacgctcaagctctgaggtaaatttcttaataaaactattaagtctctatttaaaaaatgaattagatagtttacatgaaaacggagttaaaataaaagtaataggaaggcttaatttattaagaagctcattgcaaaaacaaataaataatgctatagaattaacacaaaataataataaaataaaactgtgtatagcttttagttatggaagccgccaagaaatagttgatgcatgcacaaaaattattgcaaatgggaaaaaacaagtgagcgaaaatgatatacagcatgctttatatgatccagaaatgccggatgtagatttattaataagatctggtggagtttatcgcatcagtaattttttgctttggcaagcagcgtatgctgaattatatttctcacaaaaatattggcctgattttaataaagatgatatacatgaagctataaatgattactcaaaaagaaaaagaacatttggcaaaagataa

SEQ ID NO: 3055 - protein, 226 aa, Rickettsia typhi
MTTIKHLAIIMDGNARWADQHNLTKSEGHKAGADKIRELLPEFINLNIPYITLYTFSSENWQRSSSEVNFLIKLLSLYLKNELDSLHENGVKIKVIGRLNLLRSSLQKQINNAIELTQNNNKIKLCIAFSYGSRQEIVDACTKIIANGKKQVSENDIQHALYDPEMPDVDLLIRSGGVYRISNFLLWQAAYAELYFSQKYWPDFNKDDIHEAINDYSKRKRTFGKR

SEQ ID NO: 3056 - DNA, 759 bp, Salmonella paratyphi
  CDS (1)..(759): transl_table=11
atgttgtctgcaactcaaccagtaagcgaaaatttgccagcacatggctgccgtcatgttgccataattatggatggcaatggtcgctgggcgaaaaagcaagggaagatccgggcctttgggcataaagccggggcgaagtctgtccggcgagcggtctcttttgctgccaataacggtattgatgcgttaacgctgtatgcctttagtagtgaaaactggaaccgaccggcgcaggaagtgagcgcgttaatggagctgtttgtgtgggcgctggatagcgaagtcaaaagcctgcaccgccataacgttcgcctgcgtattatcggcgatatcagccgatttaactcacgtttacaagaacgtattcgcaaatcagaagcgcttaccgcccataatacgggtctaacgctgaatatcgctgcgaattacggcggacgttgggatattgtccagggagtccgacaactggcggagcaggtgcaggctggagtgctgcgccccgatcagattgatgaagagagactaggccagcaaatctgtatgcatgagctggcgcctgtggatttagtaattaggactgggggagagcatcgcattagtaactttttgctttggcaaattgcctatgccgaactttactttacggatgttctctggcccgatttcgatgaacaagactttgaaggtgcgctgcatgcctttgctaatcgagagcgtcgtttcggcggtaccgagcctggtgatgacaaagcctga

SEQ ID NO: 3057 - protein, 252 aa, Salmonella paratyphi
MLSATQPVSENLPAHGCRHVAIIMDGNGRWAKKQGKIRAFGHKAGAKSVRRAVSFAANNGIDALTLYAFSSENWNRPAQEVSALMELFVWALDSEVKSLHRHNVRLRIIGDISRFNSRLQERIRKSEALTAHNTGLTLNIAANYGGRWDIVQGVRQLAEQVQAGVLRPDQIDEERLGQQICMHELAPVDLVIRTGGEHRISNFLLWQIAYAELYFTDVLWPDFDEQDFEGALHAFANRERRFGGTEPGDDKA

SEQ ID NO: 3058 - DNA, 759 bp, Salmonella typhi
  CDS (1)..(759): transl_table=11
atgttgtctgcaactcaaccagtaagcgaaaatttgccagcacatggctgccgtcatgttgccataattatggatggcaatggccgctgggcgaaaaagcaagggaagatccgggcctttgggcataaagccggggcgaagtccgtccggcgagcggtctcttttgctgccaataacggtattgatgcgttaacgctgtatgcctttagtagtgaaaactggaaccgaccagcgcaggaagtgagcgcgttaatggagctgtttgtgtgggcgctggatagcgaagtcaaaagcctgcaccgccataacgttcgcctgcgtattatcggcgatatcagccgatttaactcacgtttacaagaacgtattcgcaaatcagaagcgcttaccgcccataatacggggctaacgttgaatatcgctgcgaattacggcggacgttgggatattgtccagggagtccgacaactggcggagctggtgcaggctggagtgctgcgccccgatcagattgatgaagagagactaggccagcaaatctgtatgcatgagctggcgcctgtggatttagtaattaggactgggggagagcatcgcattagtaactttttgctttggcaaattgcctatgccgaactttactttacggatgttctctggcccgatttcgatgaacaagactttgaaggtgcgctgcatgcctttgctaatcgagagcgtcgtttcggcggtaccgagcctggtgatgacaaagcctga

SEQ ID NO: 3059 - protein, 252 aa, Salmonella typhi
MLSATQPVSENLPAHGCRHVAIIMDGNGRWAKKQGKIRAFGHKAGAKSVRRAVSFAANNGIDALTLYAFSSENWNRPAQEVSALMELFVWALDSEVKSLHRHNVRLRIIGDISRFNSRLQERIRKSEALTAHNTGLTLNIAANYGGRWDIVQGVRQLAELVQAGVLRPDQIDEERLGQQICMHELAPVDLVIRTGGEHRISNFLLWQIAYAELYFTDVLWPDFDEQDFEGALHAFANRERRFGGTEPGDDKA

SEQ ID NO: 3060 - DNA, 828 bp, Shewanella oneidensis
  CDS (1)..(828): transl_table=11
atgtcatccacagtggaatttgatccgcaatctaggccgactgaggcggatgcttatgctcagacaagcttaccggaggtattacccgaactcgttaaacagtcattacctaagcatgttgcgattattatggatggtaatggacgttgggcccaaacccagggcaaaccacgagtgatggggcataaggccggggttaaagcggtgagacgtgcggtgagcgcggccagtcagttagggatacaatcgctaacgctatttgcgttttctagcgaaaattggcgtagacccgataaagaagtcagcttgttgatggaactgttttttactgtgctacagcgggaaattaagttactcgataagaaccaagtcaaactgaatatcattggtgatatcagccgtttttctgcgcgtttacaaaagcaaattcgtgccgcagaagaaaaaactgcaggcaacagcggattgatattgaatgtggcggccaattacggtggtcgctgggacatactgcaagctgcgcaaaagttagctgaaaaggttgaaactggtgaaatgaccagcagtcagttcactgaagaagccttgagtgaacatttgtgcatgcaaaatcagagtgaagttgatttaataatccgtacggggggggattaccggatcagcaattttgtactctggcaggcagcctatgctgagttggtgtttttggacaccctttggcctgattttgatgagcaggcttttcatgaagcgattgccacgtttgccaatcgccagcgccgttttggtttgaccggaagtcaaattgatgagatgcgcgcattgtaa

SEQ ID NO: 3061 - protein, 275 aa, Shewanella oneidensis
MSSTVEFDPQSRPTEADAYAQTSLPEVLPELVKQSLPKHVAIIMDGNGRWAQTQGKPRVMGHKAGVKAVRRAVSAASQLGIQSLTLFAFSSENWRRPDKEVSLLMELFFTVLQREIKLLDKNQVKLNIIGDISRFSARLQKQIRAAEEKTAGNSGLILNVAANYGGRWDILQAAQKLAEKVETGEMTSSQFTEEALSEHLCMQNQSEVDLIIRTGGDYRISNFVLWQAAYAELVFLDTLWPDFDEQAFHEAIATFANRQRRFGLTGSQIDEMRAL

SEQ ID NO: 3062 - DNA, 771 bp, Staphylococcus aureus
  CDS (1)..(771): transl_table=11
atgtttaaaaagctaataaataaaaagaacactataaataattataatgaagaattagactcgtctaatatacctgaacatatcgctattattatggatggtaatgggcgatgggctaagaagcgaaaaatgcctagaattaaaggtcattacgaaggtatgcaaacaataaaaaaaattactagggtagctagtgatattggtgttaagtacttaactttatacgccttttccactgaaaattggtcaagacctgaaagtgaagtaaattatattatgaatttgcctgtcaatttcttaaagacattcttaccggaactaattgaaaaaaatgtcaaagttgaaacaattggatttactgataagttgccaaaatcaacgatagaagcaattaataatgctaaagaaaagacagctaataataccggcttaaaattaatatttgcaattaattatggtggcagagcagaacttgttcatagtattaaaaatatgtttgacgagcttcatcaacaaggtttaaatagtgatatcatagatgaaacatatataaacaatcatttaatgacaaaagactatcctgatccagagttgttaattcgtacttcaggagaacaaagaataagtaatttcttgatttggcaagtttcgtatagtgaatttatctttaatcaaaaattatggcctgactttgacgaagatgaattaattaaatgtataaaaatttatcagtcacgtcaaagacgctttggcggattgagtgaggagtag

SEQ ID NO: 3063 - protein, 256 aa, Staphylococcus aureus
MFKKLINKKNTINNYNEELDSSNIPEHIAIIMDGNGRWAKKRKMPRIKGHYEGMQTIKKITRVASDIGVKYLTLYAFSTENWSRPESEVNYIMNLPVNFLKTFLPELIEKNVKVETIGFTDKLPKSTIEAINNAKEKTANNTGLKLIFAINYGGRAELVHSIKNMFDELHQQGLNSDIIDETYINNHLMTKDYPDPELLIRTSGEQRISNFLIWQVSYSEFIFNQKLWPDFDEDELIKCIKIYQSRQRRFGGLSEE

SEQ ID NO: 3064 - DNA, 771 bp, Staphylococcus aureus
  CDS (1)..(771): transl_table=11
atgtttaaaaagctaataaataaaaagaacactataaataattataatgaagaattagactcgtctaatatacctgaacatatcgctattattatggatggtaatgggcgatgggctaagaagcgaaaaatgcctagaattaaaggccattacgaaggtatgcaaacaataaaaaaaattactaggatagctagtgatattggtgttaagtacttaactttatatgccttttccactgaaaattggtcaagacctgaaagtgaagtaaattatattatgaatttgcctgtcaatttcttaaagacattcttaccggaactaattgaaaaaaatgtcaaagttgaaacaattggatttactgataagttgccaaaatcaacgatagaagcaattaataatgctaaagaaaagacagctaataataccggcttaaaattaatatttgcaattaattatggtggcagagcagaacttgttcatagtattaaaaatatgtttgacgagcttcatcaacaaggtttaaatagtgatatcatagatgaaacatatataaacaatcatttaatgacaaaagactatcctgatccagagttgttaattcgtacttcaggagaacaaagaataagtaatttcttgatttggcaagtttcgtatagtgaatttatctttaatcaaaaattatggcctgactttgacgaagatgaattaattaaatgtataaaaatttatcagtcacgtcaaagacgctttggcggattgagtgaggagtag

SEQ ID NO: 3065 - protein, 256 aa, Staphylococcus aureus
MFKKLINKKNTINNYNEELDSSNIPEHIAIIMDGNGRWAKKRKMPRIKGHYEGMQTIKKITRIASDIGVKYLTLYAFSTENWSRPESEVNYIMNLPVNFLKTFLPELIEKNVKVETIGFTDKLPKSTIEAINNAKEKTANNTGLKLIFAINYGGRAELVHSIKNMFDELHQQGLNSDIIDETYINNHLMTKDYPDPELLIRTSGEQRISNFLIWQVSYSEFIFNQKLWPDFDEDELIKCIKIYQSRQRRFGGLSEE

SEQ ID NO: 3066 - DNA, 771 bp, Staphylococcus epidermidis
  CDS (1)..(771): transl_table=11
atgtttaaaaagctgaaaaataaaaataaaactgagacaaaccataataatgacttagacatacataatatacctgaacatgtggctattatcatggatggaaatgggcgttgggcaaaaaaacgtaaaatgcctagaattaaaggccattatgaaggtatgcaaacaatcaaaaaaattactcgcgaagcgagtgatataggtattaagtatttaacattatacgcattttcaacagagaattggtctagacctgaaagtgaagttaattacattatgaatcttccagtgaatttccttaaaacatttctaccagaattaattgaaaagaatgttaaaattgaaacaatagggttttatgaaggtttaccacaatctacaattgatgctattgattttgctaaagctaagactcagcacaatactgggttaactcttgtgtttgctataaattatggtggacgagctgagattattcagagtatgaaagcaatatataacgaattacaattaaacggacaaggatctgaagtgattgatgaggcgttaataaagcgtcatttaatgactcatagttatccagatccagacttattaatacgcacttcaggagaacaaagaataagcaatttcttaatatggcaagcttcatatagtgaatttatttttaatgaaaagctatggccagattttgatgaaaaagagttaagagagtgtttgaaaatatatcaatcacgccaaagacgttttggaggattaagtgaggagtaa

SEQ ID NO: 3067 - protein, 256 aa, Staphylococcus epidermidis
MFKKLKNKNKTETNHNNDLDIHNIPEHVAIIMDGNGRWAKKRKMPRIKGHYEGMQTIKKITREASDIGIKYLTLYAFSTENWSRPESEVNYIMNLPVNFLKTFLPELIEKNVKIETIGFYEGLPQSTIDAIDFAKAKTQHNTGLTLVFAINYGGRAEIIQSMKAIYNELQLNGQGSEVIDEALIKRHLMTHSYPDPDLLIRTSGEQRISNFLIWQASYSEFIFNEKLWPDFDEKELRECLKIYQSRQRRFGGLSEE

SEQ ID NO: 3068 - DNA, 753 bp, Streptococcus agalactiae serotype III
  CDS (1)..(753): transl_table=11
atgtttatatttaaaagaaaaaaacaagtagaaatgcctttggagaaaataccagcacatattggtattatcatggatggtaacggacgttgggcaaaaaaacgtttaaaaccacgcgttatgggacataaggcggggatggatgctcttcaagaagttacaatagcagcttcaggattaggtgttaaagtactaactgtctatgccttttctacagaaaattggtcacgtccagatgatgaagttaagtttattatgaaccttccggttgaattttttgataaatatgtaccagagttagataaaaataatgtacgtgtacaggtcatcggagatactcataaattacctaaggcaacatacgatgcaatgcaacgcgcttgtttgaggacaaaacataattcggggctcgtcttgaattttgcgctaaattatggcggacgttcagaaatcactaatgccattaaggaaattgctcaggatgttttggaagctaagttgaatcctgacgatattacagaggatttagtagcaaatcatttaatgacaaatagcttaccctatctttatagagaccctgatttgattatccgaactagtggagagttacgcttgagtaactttttaccttggcaatcagcttatagtgaattttactttactcccgttttatggccagattttaaaaaagacgaactacataaggccattgtggattataatcaacgccatcgtcgatttggtagtgtatag

SEQ ID NO: 3069 - protein, 250 aa, Streptococcus agalactiae serotype III
MFIFKRKKQVEMPLEKIPAHIGIIMDGNGRWAKKRLKPRVMGHKAGMDALQEVTIAASGLGVKVLTVYAFSTENWSRPDDEVKFIMNLPVEFFDKYVPELDKNNVRVQVIGDTHKLPKATYDAMQRACLRTKHNSGLVLNFALNYGGRSEITNAIKEIAQDVLEAKLNPDDITEDLVANHLMTNSLPYLYRDPDLIIRTSGELRLSNFLPWQSAYSEFYFTPVLWPDFKKDELHKAIVDYNQRHRRFGSV

SEQ ID NO: 3070 - DNA, 753 bp, Streptococcus agalactiae serotype V
  CDS (1)..(753): transl_table=11
atgtttatatttaaaagaaaaaaacaagtagaaatgcctttggagaaaataccagcacatattggtattatcatggatggtaacggacgttgggcaaaaaaacgtttaaaaccacgcgttatgggacataaggcggggatggatgctcttcaagaagttacaatagcagcttcaggattaggtgttaaagtactaactgtctatgccttttctacagaaaattggtcacgtccagatgatgaagttaagtttattatgaaccttccggttaaattttttgataaatatgtaccagagttagataaaaataatgtacgtgtacaggtcatcggagatactcataaattacctaaggcaacatacgatgcaatgcaacgcgcttgtttgaggacaaaacataattcggggctcgtcttgaattttgcgctaaattatggcggacgttcagaaatcactaatgccattaaggaaattgctcaggatgttttggaagctaagttgaatcctgacgatattacagaggatttagtagcaaatcatttaatgacaaatagcttaccctatctttatagagaccctgatttgattatccgaactagtggagagttacgcttgagtaactttttaccttggcaatcagcttatagtgaattttactttactcccgttttatggccagattttaaaaaagacgaactacataaggccattgtggattataatcaacgccatcgtcgatttggtagtgtatag

SEQ ID NO: 3071 - protein, 250 aa, Streptococcus agalactiae serotype V
MFIFKRKKQVEMPLEKIPAHIGIIMDGNGRWAKKRLKPRVMGHKAGMDALQEVTIAASGLGVKVLTVYAFSTENWSRPDDEVKFIMNLPVKFFDKYVPELDKNNVRVQVIGDTHKLPKATYDAMQRACLRTKHNSGLVLNFALNYGGRSEITNAIKEIAQDVLEAKLNPDDITEDLVANHLMTNSLPYLYRDPDLIIRTSGELRLSNFLPWQSAYSEFYFTPVLWPDFKKDELHKAIVDYNQRHRRFGSV

SEQ ID NO: 3072 - DNA, 750 bp, Streptococcus mutans
  CDS (1)..(750): transl_table=11
atgtttacattaagacgaaaaaaacaagatataaaattatctaaaatcccagctcatatcggtatcattatggatggcaatggacgctgggctaagaaacgaatgaaaccaagggtatttggacataaggctggtatggatgcccttcaagatgtgacgatagcggcatcggaacttggagtcaaaattttaacagtttatgctttttcaacggaaaattgggctcgtcctcaagaagaggttaaatttatcatgaatttacctgtagagttctttgataagtatgttcctaagctgcataaaaataatgttcgtattttagtgattggcgataaggaagaactgccggcagcaactttagatgctctggaacgcgctagagaactgactaaacataattctggacttattttaaattttgctttgaattatggcggtcgtgctgaaattgttgatgctgtaaagttgattgctcaagatgttttagatgctcggtttaaccctggtgatattacagaagggctcattgctgattacttgatgacaagcaatcttccttacctttaccgtgatcccgatttgattattagaacgagtggtgagctgcgtcttagtaactttttaccgtggcaggctgcttatagtgagctttattttacagatacactttggccagattttgataaaaaagctttgtatttagctattgaagaatttaaccatcgccatcgtcgctttggtggtgtttag

SEQ ID NO: 3073 - protein, 249 aa, Streptococcus mutans
MFTLRRKKQDIKLSKIPAHIGIIMDGNGRWAKKRMKPRVFGHKAGMDALQDVTIAASELGVKILTVYAFSTENWARPQEEVKFIMNLPVEFFDKYVPKLHKNNVRILVIGDKEELPAATLDALERARELTKHNSGLILNFALNYGGRAEIVDAVKLIAQDVLDARFNPGDITEGLIADYLMTSNLPYLYRDPDLIIRTSGELRLSNFLPWQAAYSELYFTDTLWPDFDKKALYLAIEEFNHRHRRFGGV

SEQ ID NO: 3074 - DNA, 750 bp, Streptococcus pyogenes serotype M1
  CDS (1)..(750): transl_table=11
atgtttggattaaaagcgaaatcaacaaaaaaagttttggggagtatcccaaagcatattggaattatcatggatggtaatggacgttgggccaaaaaaagactaaaacctagagtgtttgggcataaagctgggatggatgctttacaagaagtaacgattactgcatctgagttgggggttaaagttctgacagtctatgccttttcgacagaaaactggtccagaccccaagatgaggtgtcttttatcatgaatttaccagtaaccttctttgacaaatatgtgcctgtgcttcatgagaacaatgtaaagattcaaatgattggagagactagtcgtttacctgaagataccttggcagcgctaaatgcagccatcgacaaaacaaaacgtaatacgggtttaattttgaattttgctctcaattatggaggacgtgctgagattaccagtgctgttcgctttattgctcaagatgtcttagatgccaaattaaatccaggagatattacggaggatttgattgctaattacttgatgacagaccatctgccatatctctaccgagaccccgatttgattattcgcaccagtggtgagctgcgtttgagcaatttcttgccttggcaatcagcttacagtgaattttatttcacaccagtcttgtggcctgattttaaaaaggcagagctactaaaggccattgcggattataaccgccgccaacgtcgttttggcaaggtctaa

SEQ ID NO: 3075 - protein, 249 aa, Streptococcus pyogenes serotype M1
MFGLKAKSTKKVLGSIPKHIGIIMDGNGRWAKKRLKPRVFGHKAGMDALQEVTITASELGVKVLTVYAFSTENWSRPQDEVSFIMNLPVTFFDKYVPVLHENNVKIQMIGETSRLPEDTLAALNAAIDKTKRNTGLILNFALNYGGRAEITSAVRFIAQDVLDAKLNPGDITEDLIANYLMTDHLPYLYRDPDLIIRTSGELRLSNFLPWQSAYSEFYFTPVLWPDFKKAELLKAIADYNRRQRRFGKV

SEQ ID NO: 3076 - DNA, 750 bp, Streptococcus pyogenes serotype M3
  CDS (1)..(750): transl_table=11
atgtttggattaaaagcgaaatcaacaaaaaaagtttttgggggtatcccaaagcatattggaattatcatggatggtaatggacgttgggccaaaaaaagactaaaacctagagtgtttggacataaagctgggatggatgctttacaagaagtaacgattactgcatctgagttgggggttaaagttctgacagtctatgccttttcgacagaaaactggtccagaccccaagatgaggtgtcttttatcatgaatttaccagtaaccttctttgacaaatatgtgcctgtgcttcatgagaacaatgtaaagattcaaatgattggagagactagtcgtttacctgaagataccttggcagcgctaaatgcagccatcgacaaaacaaaacgtaatacgggtttaattttgaattttgctctcaattatggaggacgtgctgagattaccagtgctgttcgctttattgctcaagatgtcttagatgccaaattaaatccaggagatattacggaggatttgattgctaattacttgatgacagaccatctgccatatctctaccgagaccccgatttgattattcgcaccagtggtgagctgcgtttgagcaatttcttgccttggcaatcagcttacagtgaattttatttcacaccagtcttgtggcctgattttaaaaaggcagagctactaaaggccattgcggattataaccaccgccaacgtcgttttggcaaggtctaa

SEQ ID NO: 3077 - protein, 249 aa, Streptococcus pyogenes serotype M3
MFGLKAKSTKKVFGGIPKHIGIIMDGNGRWAKKRLKPRVFGHKAGMDALQEVTITASELGVKVLTVYAFSTENWSRPQDEVSFIMNLPVTFFDKYVPVLHENNVKIQMIGETSRLPEDTLAALNAAIDKTKRNTGLILNFALNYGGRAEITSAVRFIAQDVLDAKLNPGDITEDLIANYLMTDHLPYLYRDPDLIIRTSGELRLSNFLPWQSAYSEFYFTPVLWPDFKKAELLKAIADYNHRQRRFGKV

SEQ ID NO: 3078 - DNA, 750 bp, Streptococcus pyogenes serotype M6
  CDS (1)..(750): transl_table=11
atgtttggattaaaagcgaaatcaacaaaaaaagttttggggagtatcccaaagcatattggaattatcatggatggtaatggacgttgggccaaaaaaagactaaaacctagagtgtttgggcataaagctgggatggatgctttacaagaagtaacgattactgcatctgagttgggggttaaagttctgacagtctatgccttttcgacagaaaactggtccagaccccaagatgaggtatcttttatcatgaatttaccagtagccttctttgacaaatatgtgcctgtgcttcatgagaacaatgtaaagattcaaatgattggagagactagtcgtttacctgaagataccttggcagcgctaaatgcagccatcgacaaaacaaaacgtaatacgggtttaattttgaattttgctctcaattatggaggacgtgctgagattaccagtgctgttcgctttattgctcaagatgtcttagatgccaaattaaatccaggagatattacggaggatttgattgctaattacttgatgacagaccatctgccatatctctaccgagaccccgatttgattattcgcaccagtggtgagctgcgtttgagcaatttcttgccttggcaatcagcttacagtgaattttatttcacaccagtcttgtggcctgattttaaaaaggcagagctactaaaggccattgcggattataaccgccgccaacgtcgttttggcaaggtctaa

SEQ ID NO: 3079 - protein, 249 aa, Streptococcus pyogenes serotype M6
MFGLKAKSTKKVLGSIPKHIGIIMDGNGRWAKKRLKPRVFGHKAGMDALQEVTITASELGVKVLTVYAFSTENWSRPQDEVSFIMNLPVAFFDKYVPVLHENNVKIQMIGETSRLPEDTLAALNAAIDKTKRNTGLILNFALNYGGRAEITSAVRFIAQDVLDAKLNPGDITEDLIANYLMTDHLPYLYRDPDLIIRTSGELRLSNFLPWQSAYSEFYFTPVLWPDFKKAELLKAIADYNRRQRRFGKV

SEQ ID NO: 3080 - DNA, 759 bp, Streptococcus pneumoniae
  CDS (1)..(759): transl_table=11
atgtttggattttttaagaaagataaggctgtggaagtagaggttccgacacaggttcctgctcatatcggcatcatcatggatggcaatggccgttgggctaaaaaacgtatgcaaccgcgagtttttggacataaggcgggcatggaagcattgcaaaccgtgaccaaggcagccaacaaactgggcgtcaaggttattacggtctatgctttttctacggaaaactggacccgtccagatcaggaagtcaagtttatcatgaacttgccagtagagttttatgataattatgtcccggaactacatgcgaataatgttaagattcaaatgattggggagacagaccgcctgcctaagcaaacctttgaagctttaaccaaggctgaggaattgactaagaacaacacaggattgattcttaattttgctcttaactatggtggacgtgctgagattacacaggcgcttaagttgatttcccaggatgttttagatgccaaaatcaacccaggtgacatcacagaggaattgattggtaactatctctttactcagcatttgcctaaggacttacgagacccagacttgattatccgtactagtggagaattacgtttgagcaatttccttccatggcagggagcctatagtgagctttattttacggacaccttatggcctgattttgacgaagcggccttgcaggaagctattcttgcctataatcgtcgtcatcgccgatttggaggagtttag

SEQ ID NO: 3081 - protein, 252 aa, Streptococcus pneumoniae
MFGFFKKDKAVEVEVPTQVPAHIGIIMDGNGRWAKKRMQPRVFGHKAGMEALQTVTKAANKLGVKVITVYAFSTENWTRPDQEVKFIMNLPVEFYDNYVPELHANNVKIQMIGETDRLPKQTFEALTKAEELTKNNTGLILNFALNYGGRAEITQALKLISQDVLDAKINPGDITEELIGNYLFTQHLPKDLRDPDLIIRTSGELRLSNFLPWQGAYSELYFTDTLWPDFDEAALQEAILAYNRRHRRFGGV

SEQ ID NO: 3082 - DNA, 750 bp, Streptococcus thermophilus
  CDS (1)..(750): transl_table=11
atgtttaaatttagaaaaaaatctcatcaagaggttttagacaatattcctaatcatatcggtattattatggatggaaatggccgttgggctaaaaagcgtctacaaccgcgtgtgatgggacataaggctgggatggatgccttgcaaaaggtaaccatcgaagcgtcacaacttggagttaaggtattgacagtctatgctttctcaactgaaaactggtcacgtccacaagatgaagttaaatttatcatgaatttgccagttgaattttttaacaagtatgtaccagaattagacaaaaacaatgttcgcattttgacaatcggagataatagtcgcctacctaaggaaaccttagatgctcttgaaaaggcagtagagcagacgaaacataattccggtttgatacttaattttgcattgaactacggtggtcgtgcggagattgtatcggctgttcaagctattgctaaagaggttgaaatagggagactcagacctgaagctattgatgaagacctcattgctaagcatttgatgacagataagctgccatacctttatcgtgatccagatttaattatccgtacgagtggcgaacttcgtcttagtaatttcttgccttggcaatctgcctatagtgagttttacttcacagatgttttctggccagactttgatcagcagggactacatcaagctatctctgactacaataaacgtcaccgtcgcttcggtggtgtctag

SEQ ID NO: 3083 - protein, 249 aa, Streptococcus thermophilus
MFKFRKKSHQEVLDNIPNHIGIIMDGNGRWAKKRLQPRVMGHKAGMDALQKVTIEASQLGVKVLTVYAFSTENWSRPQDEVKFIMNLPVEFFNKYVPELDKNNVRILTIGDNSRLPKETLDALEKAVEQTKHNSGLILNFALNYGGRAEIVSAVQAIAKEVEIGRLRPEAIDEDLIAKHLMTDKLPYLYRDPDLIIRTSGELRLSNFLPWQSAYSEFYFTDVFWPDFDQQGLHQAISDYNKRHRRFGGV

SEQ ID NO: 3084 - DNA, 789 bp, Sulfolobus acidocaldarius
  CDS (1)..(789): transl_table=11
atggccaaagatgtgataactagagcattgctacgcccaatctataagatatatgagaagatattatggtctcagataaaagatggtcctttcccatttcatgttgggataataccggatggtaacagaagatgggctagaaataacagacttcctttagatcagggttactacacgggatatgtgaaattgagagacgttttaacatggatacttgaaataggtataagtacagttacagttttcgcactctcagctgaaaattgtgaaaaaagaactcagcaagaactttctatgatatttaagtatttaaaaataggattagatgaattattaacaagcgatttagtacataagtatcaggttagagtaaaggcaataggaatgcttgataaattaccagaagatctaaagaaattagtagttgacctagaaagtactactgagaaatataacaagaagaaacttatcctggcgatttgttatggaggcaggcaagaaatattggatgctataaggaaaatcatgaatgattataaattaggtataatagattcaaaatccatagatgagtctacatttagaaaatatttatatgatcaagagttatccgatattgatttactcataagatcatcaggtgagataagaatcagtaatttcttactttggcacttagcatattcagaactattctttgtggatgtatattggcctgattttcgaaaaatagatttatggagagcaataaggtcatttcagaaaaggaaaagaaactttggggcttaa

SEQ ID NO: 3085 - protein, 262 aa, Sulfolobus acidocaldarius
MAKDVITRALLRPIYKIYEKILWSQIKDGPFPFHVGIIPDGNRRWARNNRLPLDQGYYTGYVKLRDVLTWILEIGISTVTVFALSAENCEKRTQQELSMIFKYLKIGLDELLTSDLVHKYQVRVKAIGMLDKLPEDLKKLVVDLESTTEKYNKKKLILAICYGGRQEILDAIRKIMNDYKLGIIDSKSIDESTFRKYLYDQELSDIDLLIRSSGEIRISNFLLWHLAYSELFFVDVYWPDFRKIDLWRAIRSFQKRKRNFGA

SEQ ID NO: 3086 - DNA, 789 bp, Sulfolobus solfataricus
  CDS (1)..(789): transl_table=11
atggcaaaagatctaactagaggccttctctttaagcctatttataaactgtatgagttagtattatggaatcagattcgtaatggtccattgccagatcacgtgggaattataccagatggaaatagaagatgggctagagataataatctttcgcttaatgacgcctatttctatggttataaaaaattgaaagaggtcttaatatggttgctagaacttggtataaaaaatataacagtttttgtgctatctacagaaaattgtgacaagagaaaacaaaatgagctatcaataataacaacatatattaagagaggtatacaagatttactagaagatcccatcgtagataagtatgaagttaaagtaagtgcaataggtaaactagataaattaccaaaagatcttattgattatctaaacagagtagtagagaaaacctcaaactatgataaaagaaaacttacgttagctatttgctatggaggtagacaagaaatattagatgcagtcgttagacttctggatgattatagaaatggaaaaattgtcaaaagtgagataaatgaagaaacgtttagaaaatatttttatgatagtgaattacaagatattgatctagtaattagaacttcgggtgaagtgagaattagtaactttttactttggcacgtggcatactctgagttattcttctgtgaggcgtattggccagaatttagaaaaatcgatctatggagagcaataaggtcgtttcaaaaaagaaaacgtaactttggggcctaa

SEQ ID NO: 3087 - protein, 262 aa, Sulfolobus solfataricus
MAKDLTRGLLFKPIYKLYELVLWNQIRNGPLPDHVGIIPDGNRRWARDNNLSLNDAYFYGYKKLKEVLIWLLELGIKNITVFVLSTENCDKRKQNELSIITTYIKRGIQDLLEDPIVDKYEVKVSAIGKLDKLPKDLIDYLNRVVEKTSNYDKRKLTLAICYGGRQEILDAVVRLLDDYRNGKIVKSEINEETFRKYFYDSELQDIDLVIRTSGEVRISNFLLWHVAYSELFFCEAYWPEFRKIDLWRAIRSFQKRKRNFGA

(The sequence listing continues in the following parts.)
